United States Patent Application Publication US 2025/0236857 A1 - sequence listing, part 2

SEQ ID NO: 3502 - protein, 463 aa, Blautia sp.
LPGKYKNKGGQLMSVAVISKTGERLMPTSEYRARKLLKSGKAIKHSYHPFTIQLTERKTGDIQPIELCMDTGYIHIGISVKSEKHEYLAEQIDTLTDERGRHDACRMYRRQRRSRKRYRQARFNNRKRDQGWIAPSLEHKKKIHIQAISRINNVMPITDITLEMGNFDTQVLKAKEEGKPLPQGADYQHGERYGIATLREAVFARDGYKCQCCGRTIKDGAILHVHHIKYRSQGGTNSMSNLATVCDKCHTPKNHKPGGKLYNWKPKLSSFKGATFMTTIRWQLYSEAKALFSDIDIYITYGAATKERRRELDIDKSHVNDAFVMGQFHPNHRIKAVLCKKKRRNNRCLEKFYDAKYIDSRDGSKKTGQELSNGRINRNHKKDSENLRQYRLQKVTAGKRTVRKQHYKIQPHDIVIYENRKRETAGCHCNGTRVMLLTDKKSASIKKVKVYRYAGGYFKSAFN

SEQ ID NO: 3503 - protein, 464 aa, unidentified
MAVFVIDRQGRPLMPCTEKRARLLLARARARVHRVVPFVIRLTDRRAQDSSFQSLRLKLDPGSQTTGIALVQEKADGIAVLNLMELVHRGRQISQALRQRRAFRRRRRGANLRYRAPRFDNRTRAAGWLAPSLQHRVDSTMSWVWRVMRWAPVSALSMELVRFDMQAMQNPDISGVGYQQGELFGYEVREYLLEKWGRKCAYCDAAGVPVQIEHILARARGGSNRVSNLTLGCAPCNIGKGARDVREFVKDEARLRRILSKAKAPLRDAAAVNSTRWALLNALKETELALETGSGGRTKWNRARLEIAKAHALDAVCVGEVKAVCGWPRPTLEVRCTGRGSYQRTRLTAQGFARGYLTRKKRVHGFQTGDRVRAMVPKGKKAGVHVGRVAVRASGSFNIQTPTGVVQGIAHRHCTMVQRADGYGYSTVPLTMEGNSGNGTKAWLAAQAALSHPGMNAEVSRANR

SEQ ID NO: 3504 - protein, 420 aa, unidentified
MQYVYVLSKHGEPMMPCSPGKARLLLKQQKACVVRRTPFTIKLLYGSAGYKQPITLGVDAGSKHVGLSASTEKRELYREEFTPRNDVVELLSTRRQNRRSRRNRKTRYRAPRFDNRVHSKHKGWLAPSVEVKIQEHITIIKRICKILPISLVRVETAEFDTQRLKAMLAGKPLPVGTDYQLGEMYDEYNVRQYVLKRDNYTCQCCGAHTTAKKLVKLHVHHLESRKTGGNAPSNLVTLCTTCHKNLHKGKVTLDGKERGKPLRDAAFMGIMRKTLMARLKEELPIPVQGTYGYITKMRREQNDIKKGHTNDARCISKHPLAEPCSVCYRTKAIRHHNRQTHKANFSKKGIRKRSQMPYLVEGYRLWDKVLYKEQECFVSGRRSSGSFTLKKLDGTSVSKGVTFKKLRLLEPATNYLIERM

SEQ ID NO: 3505 - protein, 456 aa, unidentified
MSTCVCVLSNSGERLMPTFRLGKVRRLLKDGKAKIVKHHPFTIQLLYDSKTNTQPIEICEDVGYNYIGISVKSESHEYVSAQYDTLQDEKACHDSCRKLRRTRRNRLRYRKPRFDNRKRGEGWLAPSLEHKKQLNIRLIERYVSVIPITHATVEVGSFDTMLLQAIQKGKSKPEGVDYQKGPRYNLATLREAVFYRDNYTCQVCGRKIADGAILHMHHMFYWKGRHGYQLDELVTACEKCHTPANHQKGGKLFGFGEDKEFANLSGAAFMNAVRWQIVDALHATYGKEFVTITYGAMTKEKRIILGIEKTHNNDAYAMGDYHPVHRCVFRHYQKRRRNNRVLEKFYDATYIDTRTGNKAKGKELFNGRISRNHKKNSEDLHKYRSKKVSKGRRSIRRQRYAIQPYDTVRLESKTYITSGCHNKGTRLLIPANGKSKSVAISKVQVVCHAGAWIQII

SEQ ID NO: 3506 - protein, 425 aa, Arthrospira sp.; identical to SEQ ID NO: 3231

SEQ ID NO: 3507 - protein, 431 aa, unidentified
MSKVFVVDTNSQPLDPVHPARARILLHGGKASVFRMYPFTIILKTEVLEPEVQPLRIKLDPGSRTTGIALVNDASAEVVFAAELDHRGQTVKASLDDRRAVRRSRRQRKTRYRKARWQNRTRAQGWFPPSLESRLANVLTWVNRLSWYAPISAISMELVRFDMQLMENPEVSGVEYQQGSLAGYEIREYVLEKWQRACAYCEAKDVPLQIEHIHPRAKGGTNRVSNLCLACEKCNTAKGTQDIAVFLKKKPEVLKKIQAQAKKPLKDATAVNSTRWKLFERLKATGLPVECGSGGLTRYNRTTRNLPKTHWLDAANVGTSTPVVLITKGIKPLKIKATGHGRRKMCVTDADGFPKHHKERKSSYMGYRTGDMVKAITPKGTYWGRIAIRHRPSFRLGKTDVHPKYMRRLHRADGYEYTYETKGVRDAPPHG

SEQ ID NO: 3508 - protein, 416 aa, unidentified
MPCSPAKARHLLDEGKAKIKKRTPFTIQLVYGSSGYTQEVILGVDAGSKTIGMSASTKKEEVFAADVTPRNDVVDLLSTRREFRRARRNRKTWYRKPRFNNRVRSKHKGWLAPSVEVKIQEHITSIKMVCRILPVSKVVVETAEFDLQLLKAIEEGKPVPQGEDYQQGEMYGHYNVRQYVLWRDNYTCQCCGAHATKKKEVRLHVHHLESRKVGGDAPDNQVTLCESCHEKLHKGLIAEKDFKKRKRRSTRDATFMGIMRKTLMQRLCSELPIPVIETRGYITKATREKLLVLPKSHTNDALAIAQGKRGFNVGYLPEIAQIDKIYTIRPVRHHNRQLHKATILKGGIRKSNQTEKYVFGYCLFDKVQFNGQDCFIWGRRTTGIFTIKTINGKMIKDGISFKKLKPVEKSTGYLIA

SEQ ID NO: 3509 - protein, 398 aa, unidentified
MNDASLGGPCIGENRKETMSRVLIVDQQRRPLMPCTPARARLLLKQKKAAVLRRCPFTLILHESRPEAVVQPLRLKIDPGSKVSGLALVNDTSGEVVWAAEVTHRGGQVHKDLQKRAGVRRGRRQRHTWYRPARYLNRRRPKGWLPPSLESRVQNVETWTQRLIFWAPVGSLSYEAVRFDTQALQNPEIEGTQYQHGTLAGLEVKEYLLLKWGQRCAYCEKMGLPLQLEHIIPKIRGGSNRVTNLTLACEQCNGKKGNQTAEEFGFPHLQAQAKAPLKDAAAVNSTRRVLHQRLVRTGLPIEASSGGRTKWNRRERDIAKTHWLDAANVGPSTPARLLFQHVRPWLIEANRRQDRQLCLVNALGFPRSKPKKKSPKHDFRTGDIVRAVVPAHLENPGI

SEQ ID NO: 3510 - protein, 473 aa, unidentified
VVDIPEGREASASVTRPVRAFIERKVMSVFVLDRRKHPLMPCTERRARLLLDRGRAVVVRAYPFTIRLKDRIGGIIQPVRIKIDPGSKTTGIAVVRESGQKQHVLALMELAHRGRPISKSLEQRRAFRRRRRNQLRYRAPRFLNRTKPKGWLAPSLQHRVDTTRSLVNRLRALAPVTAISQELARFDTQKMENPEVSGVEYQQGTLLGYEVREYLLEKWGRECAYCTDKDTPLQIEHIDPKANGGSNRISNLTLACRPCNQEKDRQSLVSFFATSKRLKNHQARLDRILKQCKKPLRDASAVNSTRWALHQTLKQTGLPVEVGTGGRTTFNRQRLGISKTHALDAACVGEVEIVEGWDVPTLAIKATGRGSYKRTRLTKHGFPRGYLMRQKQVQGFQTGDMVRALVPTGTKTGTWVGRVAVRKTGSFNIQTNSGAIQGISHRHCVLTQRADGYGYHIQPNQPKEEGDRKNESR

SEQ ID NO: 3511 - protein, 477 aa, unidentified; identical to SEQ ID NO: 3362

SEQ ID NO: 3512 - protein, 429 aa, Arthrospira sp.; identical to SEQ ID NO: 3105

SEQ ID NO: 3513 - protein, 423 aa, unidentified
MRVFVLNSNRQPLDPCKPARARILLSTGKAKVYRRYPFTIILTEEIQEPITHGSQLKIDPGAKTSGLAIVQGNRIVWGGELTHRGFQIRDALTSRRQLRCARRNRKTRYRKPRFLNRSRPEGWLAPSLMSRVHNILTWVKKLTRLCPIAGISQELVRFDTQKLQNPEISGIEYQQGTLYGYELREYLLEKWNRTCAYCGTTGTQLEIEHIKPLSKGGSNRVSNLAIACHSCNQSKSAQEIEQFLSGKPDVLKRVLSQAKRPLTDAAAVNTTRWKLYHELKSIGLPVEVGSGGLTKFNRCRQNLPKTHWLDAANVGKVDTLIIEGYQPLLIAAKGHGTRQICRTNKYGFPIRYCSRTKIHKGFQTGDIVRAVVTKGKKIGTYVGRVATRKSGSFNISTKSGLVQGISHKYCQCIHRKDGYAYRH

SEQ ID NO: 3514 - protein, 425 aa, Nodularia sp.; identical to SEQ ID NO: 3113

SEQ ID NO: 3515 - protein, 416 aa, unidentified
LRVFVLNKRGQPLVPCSPAKARLLLKERKAIVKRRTPFTIQLTIATGEAKQPVTLGVDSGYKHIGLSATTEKAELYASEVELRQDITDLLSARLALRRSRRSRKTRYRVPRFDNRVASKRKGWLAPSVENRITAHMSRVEAVMRVLPVTAITVETAAFDTQLLKNPDITGAAYQQGEQLRFWNVREYVLFRDGHVCQHCRGKSKDPILNVHHIESRRTGGDAPNNLITLCETCHKAFHRGKIKLKVRRGKSFKAETFMGIMRWTLFERLKKAHPELNVHNTYGYLTKHKRISHGIAKSHCADAYCIADNLSAKRLKGFFFQKQTRKHNRQIHKLSILKGGLRKKNQAPHEVKGFRLFDKVICKGEEAFIFGRRTSGSFDVRRLDGTRISAGISYKKLRRLEPRTTYLTEFRKEAAL

SEQ ID NO: 3516 - protein, 436 aa, unidentified
MSHVFVVDTNRTPLNPVHPGEARRLLSHGKAAVLKRYPFTIILKQAIITPQVTGLRVKVDPGSRTTGIAVVNDTSGQVVFAAELTHRGQAIKANLDARRRVRRSRRQRKTRYRKARWRNRRIKKGWLPPSLGSRLENICTWVRRLCQLCVVTASSMELVRFDMQRMENPDIAGVEYQQGTLMGYEVREYLLEKWGRQCAYCGVKDVPLEIEHIHSRAHGGTNRIANLTVACVPCNRAKGNRDITNFLHQKPEVLARILTQAKHPLKDAAAVNTTRWALLDRLTATGLPVETGSGGVTKFNRTQREIPKTHWSDAACVGASTPPVLKTTGVVPLLIRATGHGSRQMCLMSAYGFPRTAAKGARRVQGFQTGDLVKAVVPTGKKQGTYWGRVAVRSSGSFNIKTSTATIQGISYRHCQMLQRSDGYTYTTGGALPPHA

SEQ ID NO: 3517 - protein, 532 aa, unidentified
MSTVYVLNKDGKPLMPTTRCGHVRRLLKEQKAQVVTSKPFTIQLLYETDDVVQPLYLGIDPGRTNIGVAVVKADGTAVFTAHLKSRNKEIPKLMQDRKRARRARRTNGRRHRRQRRAKANGTISKKCVKQTTTQNGSVSKRAKEIGIIKRHLPGCEKDVLCIGIKNKEAKYTNRERPEGWLTPTANQLLQTHVNLVKKVQKLLPISDVVLEVNKFAFMRLDNPDIQKWQYQQGPLYKKESLESAVSEMQEHHCLFCKKPIDHYHHVVPKSENGSNTIANIVGLCAEHHNLVHKDVAWQEKLAEEKTGLNKKYGALSVLNQIIPALTNKLSVLFPKHFFVTAGKSTHDYRAAHGVSKDHWLDAYCIACSVLPSNVCDSNINNHVPYELKQFRRHDRRVLHKANMSRVYTLNGKAVATNRHKAIKQTTDSLEEFRQNYPDDVYKLKVKEHHPAYRNLNRNYPGSVFLVGKQAHVMQGIASSKDGKTTKYNDTNATTITAGKCKFVAKNSGILFVQCKFRKALSDGTTKKLQYPV

SEQ ID NO: 3518 - protein, 427 aa, Nostoc sp.; identical to SEQ ID NO: 3398

SEQ ID NO: 3519 - protein, 415 aa, unidentified
MVYVLANDGQPLMPTERHGKVCRMLKSGIAKVVKKCPFTIQLQYESERNVQPVALGIDAGSKHVGVSATTKAKVLYESDVELRDDIVKLLATRRQLRRRRRSRKTRYRPARFDNRRRKEGWLTPSIRQKIESHLTVVANVCKILPVSQIIVETASFDIQKIKNPDIQGIEYQQGEQMDFWNIREYVLFRDGHTCQCCKGKSKDKVLNVHHIESRKTGGNAPNNLITLCETCHKGYHNGTVTLPKNIKRGMKFKDAAFMGIMRWTFYNTLKEQYEPDIPVHYTYGYITKNTRINHNLPKGHCIDARCISGNPDAVSDGTYYYQKKVRCHNRQIHKQTILKGGIRKSNQAEYLVRGFRLFDKVRYQGREYFIFGRRKSGFFDIRTLSGEKVNKGSISVKKLTFADTRKNYLIERRTV

SEQ ID NO: 3520 - protein, 425 aa, Nodularia sp.; identical to SEQ ID NO: 3165

SEQ ID NO: 3521 - protein, 423 aa, Arthrospira sp.
MSNHIFVLDTNRKPLTPCQPGVARFLLKAGKASVFRRYPFTIILNKEVDANPEPLELKLDPGSKVTGIALKQGNRIIFAAELQHRGQQIVEALRSRRQLRRSRRNRKTQYRPARFLNRTRPQGWLAPSLQHRVDTLMTWVNRFRRLAPVGRIVQELVRFDLQLMENPEISGVEYQQGALQGYEVREYLLEKWGRTCAYCGAKHVPLEVEHIQPRSKGGSDRVSNLTIACHSCNQAKGNGDIRDFLSGQPDVLSRLLRQAKSPLNDAAAVNSTRWALFKALKATGLRVTTGTAGQTKFNRLRLNLPKAHWLDAACVGDVESLDIVTSKPLLILAKGHGTRRMCGTNKYGFPTRHRSRKQIHKGFQTGDIVTATVTAGKKIGSYVGRVLCRASGSFDMTTASGRVTGINHKYCQPIHRKDGYAYA

SEQ ID NO: 3522 - protein, 470 aa, Blautia sp.; identical to SEQ ID NO: 2925

SEQ ID NO: 3523 - protein, 431 aa, unidentified
MPNKVYVINKHGRPLMPCSPAKARHLLDEGKAKVKKRTPFTIQLVYGSSGYTQEVILGVDAGSKTIGMSASTTKEELLSAEVKPRNDVVDLLSTRREFRRARRNRKTRYRKPRFDNRVRSKHKGWLAPSVEVKIQEHITAIRRVCGILPVSKVVIETAEFDLQLLKAIADGKPVPQGEDYQQGEMYGHYNVRQYVLWRDGYTCQCCGAHTTKKKEVRLHVHHLESRKVGGDAPDNQVTLCESCHEKLHKGLIAEKDFKKRKRRSTRDATFMGIMRKTLMQRLCSELPIPVVKTRGYITKATREKLLVLPKSHTNDALAIAQGKQGFNVGYLPGIVQINKIYTIRPVRHHNRQLHKATILKGGIRKSNQTEKYVFGYRLFDKVQFNGQDCFIWGRRTTGIFTIKTINGKMIKDGISFKKLKLAEKSTSYLIA

SEQ ID NO: 3524 - protein, 442 aa, unidentified
MSTSVFVLDKKHRPLMPCRPARARRLLRAGRARVVKRFPFVIRLVDRTVEQSEVQPVLIKLDPGSRETGAAVVRDDEKKRHHALAFFVIKHRGGAIRDALKARSAFRRRRRSQNFRCRSPRFLNRVKPKGWLPPSLRHRVETTLSFVRRLCRYLPVSGIATELVKFDSQKLQNPEVSGIKYQQGTLFEYEVREYLLEKFGRKCVYCGAEGVPLNIDHVVPRAKGGSNRVSNLVLACVSCNQKKGARSLEDFLKGKPEVLARVRRELKTPLRDAAAVNATRWVLFNELKATGLPVETGSGALTKLNRHAFGVEKEHWLDALCVGRLNGVVTRKGLNVLEIRCMGRGSRQRTRLTKYGFPRGYLMRQKCVHGFATGDMVEANVPKGKKAGLWRGRVAVRVSGSFNIQTPKGVIQGVGWKHCRLISHNDGYGYAWLGHAPHSSPA

SEQ ID NO: 3525 - protein, 455 aa, unidentified
MQKFEAKFQNVPMDAPQVHSSTSTLLNRDQNLSEVSIVRTSNNLEVDLLQHKGEQGLRVPATAYVFNQRGRPLMPCSERKAHVLLQKGEAKVIRNYPFVIQLMKATGEQVQQCFLGIDSGYKYVGFSAITDKKEIVCGTFTLDGKTSERLTERRMHRKNRRNRLWYRKPRFNNRMRKVGWLPPSIQRKFNTHITLINILKKLLPTERVTIEVGNFDIQRIENPDIKGIQYQQGSLFEHQNMRSFLMAREHGKCQLCGKEFSKTNPSHIHHIIPRNKGGTDREKNLALLHKKCHDKLHKKSLYNSLKKNKQYKEATFMSIIRNKFRETIVGCRIVFGNETFVKRQQLRLEKSHSNDAFVIAGGTTQIKTIPNDMGQKHKNNRSLQTVRRRLGICVRRKRYSIQPFDLVTVDNLKYVSRGCSNRGKIVLCSRNNIDYKIYIKRVEDVFHTKSIYNII

SEQ ID NO: 3526 - protein, 423 aa, Microcoleus sp.
MSNHVFVLDTNRKPLTPCKPGVARSLLNAGKASVFRRYPFTIILKKEVDANPEPLELKLDPGSKVSGIALKQGNRIIFAAELQHRGQQIVEALRSRRQLRRSRRNRKTRYRPARFLNRTRPEGWLAPSLQHRVDTLMTWVNRFRRLAPVGRIAQELVRFDLQLMENPDISGVEYQQGALQGYEVREYLLEKWGRTCAYCGAKHVPLEVEHIQPRSKGGSDRVSNLTMACRSCNQAKGNGDIRDFLSGQPDVLSRLLRQAKSPLNDAAAVNSTRWALFKALKATGVPVTTGTGGQTKFNRLRLNLPKAHWLDAACVGDVESLDILTSKPLLIVAKGHGTRRMCGTNKYGFPTRHRSRRQIHNGFQTGDIVTATVTAGKKIGSYIGRVLCRASGSFDITTASGRVAGINHKYCKPIHRKDGYAYA

SEQ ID NO: 3527 - protein, 430 aa, unidentified
MSNVFVMDTMYQPLNPIHPGRARLLLKEGKAAVYRRYPFTLILKTEVDHPEIIPLRIKLDPGSKTTGLAIVDDKSGDIVFAAELFHRGDAVKRALDDRRSLRRSRRQRKTRYREPRYTNRKNKKKGWLPPSLESRIANILTWVQRLSRSCPIEAISMELVKFDLQQMENPEISGIEYQQGILQGYEVREYLLEKWNRKCAYCGARELPLQVEHIHPRAKGGTNRISNLALSCEKCNIAKGTQDIAVFLKKKPDVLKRIQAQAKTPLKDATAVNATRWALFEQLKATHLPIECGSGGATKWNRITRGLEKTHWLDACCVGRSTPAILHYQQIKPLLITATGHGNRQMCRPDKYGFPRTSAKGTRRMKGFQTGDVVKAVVPHGKKRGIFVGRVAVRSSGFFNITTKDGTIQGISYRYCQLLQRCDGYRYHIG

SEQ ID NO: 3528 - protein, 428 aa, unidentified
  VARIANT 29..30: note = X can be any naturally occurring amino acid
MENTLKVFVLNMRGQPLMPCSPSKARQLXXLLRAGKAVPVRRTPFVIQLTVPTGETKQPITLGVDAGYKHVGLSATTAKEELLAFEVELRQDVTGLLSNRLALRRARRNRKTRYRAPRFANRVRSEHKGWLAPSVENRIQAHISRIEAVCRVLPITKIVIETASFDIQKIKNPEIEGEGYQQGEQLGFWNVREYVLFRDGHVCQACKGRSKDLILNVHHIESRKTGGDAPGNLITLCEACHKAYHAGKLKQFSPRRCASFRAETFMGIMRWTVFNRLRERHPELPVTNTYGYLTKHKRIVEGLPKTHCADAFCIAGVLDAKRRGEYLFQKQTRRHNRQIHKLTILKGGVRKRHRAPYLVHGFRLFDKVLCKGEVGFIFGRRSSGAFDVRRLNGTKISAGISYKKLSLLEKRKMFLTELRKEGRDSSRV

SEQ ID NO: 3529 - protein, 425 aa, Nodularia sp.; identical to SEQ ID NO: 3165

SEQ ID NO: 3530 - protein, 437 aa, unidentified
MTKTETQKVTQVCVLDQNGQPLMPTQRLGKVYRLLKTRKAHIVNYEPFTIKLDYEPKTHIIQPMTLGVDSGAIHSGYSLANEHREYYNAEVIARDNISKNLSDRRMYRRTRRSRKTRYRKPRFNNRKNKGEGWIPPSLEQKVDVQVKEIEHLHKYFPISNIIIEVAEFDTQKIINPDISGNEYQQGTLHGYNIRNYLLEKYHHKCFYCAKEVSAFEVEHMIPKARNGSNRIDNLTLSCHDCNQKKGTLTAEEFIEQTLSPQKAAQKLRQLPKTKQLLKYMAHMNATRWVLYNTIKETYDSVSITYGYITKYNRINAGLPKTHHIDAKCITGFSTVPSFDVTVVKTKMRRHNRQLHRATFSKGHIRRAATLPRFVHGFQLYDIVLFNNHRYYIKSRRSSGSFALVSLEGLKNENRNYKKITFLAHTNAYLTNHYVNDK

SEQ ID NO: 3531 - protein, 471 aa, Caldicellulosiruptor sp.; identical to SEQ ID NO: 3268

SEQ ID NO: 3532 - protein, 425 aa, Nodularia sp.; identical to SEQ ID NO: 3165

SEQ ID NO: 3533 - protein, 423 aa, unidentified; identical to SEQ ID NO: 2741

SEQ ID NO: 3534 - protein, 456 aa, unidentified
MSTCVCVLSNSGKRLMPTFRLGKVRHLLKDGKAKIVKHHPFTIQLLYDGKTNTQPIEICEDVGYNYIGISVKSQSHEYVSAQYDTLQDEKACHDSCRKLRRSRRNRLRYRKPRFDNRKRSEGWLAPSLEHKKQLNIRLIERYVSVIPITRATVEVGSFDTMLLQAIQKGESKPEGVDYQKGPRYNLATLREAVFYRDNYTCQVCGRKIADGAILHMHHMFYWKGRHGYQLDELVTACEKCHTPANHQKGGKLYGFGKDKKFANLSGAAFMNAVRWQIVDALHATYGKEFVTITYGAMTKEKRIALQLEKTHNNDAYAMGDYHPACRCKFRHYQKRRRNNRVLEKFYDATYIDARTGNKAKGKELFNGRISRNHKKDSENLHKYRSKKVSKGRRSIRRQRYAIQPYDTVRLENKTYITSGCHNKGTRLLIPANGKSKSVAISKVQVVCHAGAWIQII

SEQ ID NO: 3535 - protein, 551 aa, unidentified; identical to SEQ ID NO: 3262

SEQ ID NO: 3536 - protein, 425 aa, Nodularia sp.; identical to SEQ ID NO: 3165

SEQ ID NO: 3537 - protein, 423 aa, Arthrospira sp.; identical to SEQ ID NO: 3469

SEQ ID NO: 3538 - protein, 423 aa, unidentified
VPIMVYVLNINGQPLMPTNRHGKVKCLLKQGKAKVIRRCPFTIKLLYQSTAYTQNLTLGVDTGSGIIGTAVSKDNGNIVYMSETIVRNDITDKMTQRAKYRRNRRNRKTRYRKTRWLNRKNSIKTDRFSPTMQSKLHSHVKEIEYIKSILPVTTMVLETGQFDTHLMKNPSLANPNVKHWGYQKGANYGFENTKAMVLNRDNYTCQCCKGKHKDSKLEVHHIVFRSQGGSDEESNLITLCHTCHKDLHSGKINPKLKGKVKGTLKYATQMNSIRKQLFRVYPDAIETFGYVTKANRLALGIDKKHYYDACTIATQGNIFIVKSNLYKKKCVSDGDFQKTKGIRSEQSIVTDKICGFRKFDKVKYFGKEYFIKGRMSTGYAILMDIDGHKINFSTMPKGYKIPKLSNCKRVTARTSQMLQAVVI

SEQ ID NO: 3539 - protein, 436 aa, unidentified; identical to SEQ ID NO: 3516

SEQ ID NO: 3540 - protein, 344 aa, Halomonas sp.
  source 1..344: note = isolate UBA1491
MAIFVLDKKNQPLMPCSEKRARLLLQRGRAVVHKRYPFTIRLKDRVGGKTQPLRLGIDPGSKTTGLALMRETEGEQRHVLCLFELIHRGFQIKKALQQRAAFRRRRRSANLRYRAPRFNNRTKPKGWLAPSLQHRVDTVMAWANRLSRLAPVTAISQKLVRFDTQKLENPEISGVEYQQGTLLGYEVREYLLEKWGRECAYCGTGDTPLEIEHVVPRSRGGSNRVSNLTLSCHPCNQSKDALPLAGFFAHDEGLRKRLKANGLSADAQLERVQRQLKQPMRDVSAVNATRWALFSALKTTDLPVAVSSGGRTKYNRQRLNIPKTHALDAACVGAFEKLHDWTVP

SEQ ID NO: 3541 - protein, 423 aa, Microcoleus sp.; identical to SEQ ID NO: 3526

SEQ ID NO: 3542 - protein, 422 aa, Sutterella sp.
LRVFVINQRGKPLMPCSPAKARVLLREKKARVKRRTPFTIQLTTATGEARQDVSLGVDAGYRHVGLSASTEKAELYASEAVLRDDITDLLSARLALRRARRSRKTRYRAPRFLNRVHSKNKGWLAPSVEQRIASHLKLVENVCRLLPVTKITVETASFDMQAIKNPDIKGAEYQQGEQLGFWNVREYVLWRDGHQCQHCRGKSGDPILNVHHLESRRTGGDAPNNLVTLCETCHKAYHAGRIDLKLKRGRSMRAEAFMGIMRWTFFNRLKEIYSGKTVENTYGYLTKHTRITHGIEKSHCADAYCIAGNLRAERLPDYLWQKQVRKHNRQIHKLTIGKGGIRKRQQTPFEVKGFRLFDKVRLGDEEGFIFGRRSSGYFDVRRLDGQKLSAGVSFRKLHLLEKRTTYLTVLLPRLKTRVSAPE

SEQ ID NO: 3543 - protein, 332 aa, unidentified
LKAREEGKPLPHGADYQHGERYGIATLREAVFTRDDYKCQCCGMTIKDGAILHVHHIKYRSQGGTNRMSNLITVCDKCHTPANHKQGGKLYNWKPKIASFKGATYMTTIRWKLYNEVKALFPDIDIHITYGAETKERRRALDIDKSHVNDAFVMGQFHPKHRSKPICYKKKRRNNRCLEKFYDAKYIDSRDGKKRSGQELFNGRISRNHKKDSENLHQYRLQKVTPGRRAIRRQHYPIQPHDIIVYNGNKIEVSGCQHKVQESFFPKLKSQYRYQKLNYLNTLAVIPNQCLINRKGGSRRNVKPRIPPPPDLRNKEYCFYVGWGTLREKRWI

SEQ ID NO: 3544 - protein, 452 aa, Ktedonobacter sp.
VLYVKPFANIDEAHITLEDRRLNLSNVFVIDSDYKPLNPVHPARARLLLTQGNAAVYRRYPFTIVLKRVVDQPEVHPLRLKLDPGSKTTGIALVNDTNGKVVFAAELEHRGHAIKDSLDSRRGVRRRRRNRKTRYRKPRFQNRRRKKGWLPPSLESRLANILTWVARLCRSAPITALSQELVKFDLQLMENPDITGVEYQQGTLQGYEVREYVLEKWKRTCAYCGKQDVPLQIEHIHPRANGGTHRISNLTLACEPCNIAKGTQDIAVFLAKKPDVLKRILAQVKKPLKDASAVNATRFALLERLKAFGLPVECGSGGLTKYNRTTRGLAKTHWLDATCVGKSTPSAISHKGVVPLLITANGHGRRQMCVPDKYGFPEKHKQRRKTFLGYRTGDMVKAITSKGTFEGRIAIRHRPSFRLGKVDIHPKYMHCIHRADGYEYTQKGVRNAPPHV

SEQ ID NO: 3545 - protein, 438 aa, Ktedonobacter sp.
MSRILIVDQQRRPLMPTTPARARLLLKSRKAAILRRFPLVLILKEARPEAVVEPLRVKLDPGSQTSGIAVVNERSGEVVWAAELTHRSQAVHEALSKRRAARRSRRSRHTRYRAARFANRRRPKGWLAPSLLSRVQHLLCWAKRLARWCPVGALSLELVRFDLALLQTPSLEGVDYQRGTLWGTEVRQYLLAKWEHRCAYCQATGVPLEIDHVVPQSRGGSDRIANLVIACHTCNQCKADQTLEAFLADRPEVLARVQAQRKAPLRDAAAVNSTRWALYENLKTLGMPLETGSGGLTKWNRTSRNLPKRHWIDAACCGRSTPERLRIQHVRPSLIEARGRQARRMVNVDEQGFPVGRAKGPSRVQGFRTGDLVRARVTRGKKVGVYVGRVAIKTDGYFKLTGRPFGMVEGIHARYCTPLHQKDGYAYSQGEAALPPQA

SEQ ID NO: 3546 - protein, 420 aa, unidentified
MQYVYVLNKHGEPLMPCSPRKARLLLKQKKACVVKRTPFTIKLLYGSTGYKQPITLGVDAGSKHIGISAATEKYELYCEEATPRNDVVDLLSARRAFRRSRRNRKTRYRAPRFNNRVHSKHKGWLAPSVEVKIQEHITLIKRVCRILPVTFVRVETAEFDTQRLKAMLEGKPLPVGTDYQLGEMYDEYNVRQYVLKRDNYTCQCCGAHPTKTKAVKLHVHHIETRRTGGNAPNNLITLCTACHKALHAGKVTLDGKKRGRSLKDAAFMGVMRKTLMERLLKELKIPVQGTYGYITKYLREKHSIPKSHTNDARCISKNPLAIPCDTCYYTKAIRHHNRQLHKATILKGGIRKANQAPYTVKGYRLWDKVSYNGSECFITGRRTSGYFALKKLDGTVVSNSASYKKMRLLEVATNYITERR

SEQ ID NO: 3547 - protein, 425 aa, Nodularia sp.; identical to SEQ ID NO: 3165

SEQ ID NO: 3548 - protein, 415 aa, unidentified
MENEIAYCFVVDKNSRPLAPTKVNKGWYLVRKGRAKIKSRYPMVIQLEKEVEYDKYDESRMVVGIDDGSVHVGLAIVQKCPTKNKVVFKGTIEQRQDVKHLMDVRRGYRRYHRYHKRYRQARFDNRYSSKRSDRLAPSIKQKKDAILRVLYQLNRWIDIQEYCLEDVCIDIRAMTDGYKPNKWQYQKSNRLDENLRKAAIISDGCKCQECGKSNCVLEVHHIRARKYGGADTIGNLITLCSRCHQKTEGREREFEDRYFKIIGSKPKRFDYAMHVMQGKNYLRRKISELGPLYLTNGGETANKRIDWNIEKSHSNDAICITNCIPDTCDVKEWIIRPMRRKSKAKTNNVLGIRHRDLVSYTPRGKSSVVGYVTALYPDSYQLNMTSYNKQYKKISARSCVLKWRFNKIYWLEQCV

SEQ ID NO: 3549 - protein, 630 aa, Nocardiopsis sp.
MTRAPSSARSSLGGASSTFPMGTPASVRVPVPPLVPAPPSTTVIPVLSRYGWLVTPSETWFRGPSAKDNHLRPQPTSRGNAFPARRRGFRPPGRGPGVTSTSQHQGGDQLATFHTGEKTHQAVLPQRPALESASADIPRNGNETGRGSHVRGAPGVEHVRGETTGGSPTAGGVAPVPPGAGEQAREDRPPKTTPREGHPYVFVPDRHGTPLQPTHPARARRLLARGRAIAARHTPFVIRLKDRTTAESGVGGVETGIGPGSKRTGTAVFTDRRGERRGRCAIRPDHRGGQIAKRMRQRAAYRKGRRSRNLRYRTARFDNRTRPRGWPPPSLRHRVDTTLAWVGRPARWAPVLERVAFDVHALGAGRPAEGVEYRHGTLHGYEVREYLLAKWGRACAYCGATGTPLNVDHVRPRSRGGSDRVADLALACVPCNRAKADQPVEEFVTNPRALAGISAQTKAPLRDAAAVDATRWALWRSLDECPPTRVGSGGRTKWNRTRDHLPESHTLDALAVGRVETVTTAVSTVLVVGAAGRGPYARTRADRHGFPRLRLPRRKRFFGFQTGDLARAAVPSDMNAGTHTGRVAVRSSGSHTLQTSYGPIKTSWKNLCLLQRADGYGYTTQKEAGAPSTA

SEQ ID NO: 3550 - protein, 427 aa, unidentified
MSKVLVIDTNKRPLDPIHPAQARQLLRNDKAAILYRFPFTLILKESRPEVSVQPLRFKIDPGAKTTGLALLNDKTGEVVWAAELQHRGFAIRESLISRRQLRRSRRNRKTRYRAPRFNNRTKPKGWLPPSLMSRVYNIETWVKRLCKLAPITGISQELVKFDTQLIQNPEISGKEYQQGTLAGYETREYLLDKWLRQCAYCKIKDVPLQIEHIHPRSLGGSNRISNLCLACEKCNLKKGNKPIELFLKNKPDLLKKILSQAKKPLADTTAVNATRFKLLEVLKATELPVETGSGGLTKFNRTQQGLDKTHWIDAACVGLSTLTLVVKYVKPLLLKATGHGTRQMCGTDKYGFSTRHHERKVLHFGFRTGDIVKAVVESGKKTGKYVGRVLCRKSGSFDISTKSGRVSGISYKCCTHIHKNDGYNYAF

SEQ ID NO: 3551 - protein, 427 aa, Nostoc sp.
MSKVFVIDQNKRPLDPIHSAQARQLLRNKKAAVHRQFPFTIILKKSCPSPEVRPLRLKIDPGAKTTGIALVDDASGEVVFAAELKHRGFAIRDAINSRRQLRRSRRNRKTRYRQPRFLNRTRPQGWLAPSLQSRVDNIKTWVQKLCRFAPIAAISQELVRFDMQLMRNRDIQGNEYQQGTLQGFETREYLLEKWNRECVYCGIKDVPLQIEHIHPRAKGGSNSITNLTLSCEKCNTKKGTKDIKDFLKKDPSRLEKILKQAKKPLADAAAVNTTRFALLNVLKSTGLPVETGSGGLTKFNRSKHYIPKSHWADAATVGKSTPILIIKGIKPLLMTSNGHGTRQMCGTDKFGFPNRHRTNKQIHFGFQTGDIIKSVVTNGKKVGVYVGRVLCRATGSFDIATKTGRISGISHKYCSPIHKKDGYSYGF

SEQ ID NO: 3552 - protein, 431 aa, unidentified
MPNKVYVINKHGRPLMPCSPAKARHLLDAGKAKVKKRTPFTIQLVYGSSGYTQEVILGVDAGSKTIGMSASTKKEEVFAADVTPRNDVVDLMSTRREFRRARRNRKTRYRKPRFDNRVRSKHKEWLAPSVEVKIQEHITAIRRVCGILPVSKVVVETAEFDLQLLKAIEEGKPVPQGEDYQKGEMYGHYNVRQYVLWRDDYTCQCCGAHATKKKEVRLHVHHLESRKVGGDAPDNQVTLCESCHEKLHKGLIAEKDFKKRKRRSTRDATFMGIMRKTLMQRLCSELPIPVIETRGYITKATREKLLVLPKSHTNDALAIAQGKRGFNVGYLPEIAQIDKIYTIRPVRHHNRQLHKATILKGGIRKSNQTEKYVFGYRLFDKVQFNGQDCFIWGRRTTGIFTIKTINGKMIKDGISFKKLKPVEKSTSYLIA

SEQ ID NO: 3553 - protein, 426 aa, Tolypothrix sp.
MSKVFVIDQNKRPLDPIHSAQARQLLRNKKAAVYRQFPFTIILKKLCPNPEVQSLRLKIDPGAKFTGIALVNDASGKVVFAAELKHRGFAIRDALTSRRQLRRGRRARKTRYRKPRFLNRTRPGLLAPSLQSRVDNIKTWINKLRRFAPITAISQELVRFDMQLMRNSDIQGSEYQQGTLQGYEAREYLLEKWNRECAYCGIKDVPFQVEHIHARARGGSNSITNLTLSCEKCNVKKGTKDIKDFLKKDPSKLEKILKQAKRPLADAAAVNTTRWALFRELESTGLQVETGSGGLTKFNRSQQMLQKTHWLDAACVGKSTPILNIKGIKPLLITANGHGSRQSCRTDKFGIPNRHVPREKIHFGFQTGDIVKAIVTTGKKIGNYVGKVAIRSSGSFNISTKNGLIQGISHKFCKRIHAKDGYSYAT

SEQ ID NO: 3554 - protein, 537 aa, Planomonospora sp.
MATSDVRRQTHRRVLPQPAALESTGADTPGRDETARGDTIGDDCVPGIGPGRGETRVRRTRVRGRHPEAAAAAEGERGGNAPSVFVLDKHGEPLMPCPPARARKLLSSGRAVVHRHTPFVIRLKDRTVAESVVPGVEAGIDPGSRHTGLSLFTATSEGVRRGLFALQLDHRGGKIRDRLAARAAYRRGRRSRNLRYRAPRFHNRTRPDGWLAPSLRHRLDGTLSWVTRLSRWAPVRALHVERVAFDTFALSAGRPLAGVEYQQGTLHGYEVRAYLLEKWNRTCAYCGAQNIPLNIDHIQPRARGGSDRISNLTLACVPCNQAKDARPVEEFLKRDPKRLARLLAQAKAPLRDAAAVNTTRQALGRTLTGIGVPVHAASGGRTKWNRSRTGAPKSHTLDALHVGALKTVTAWPATVLVTTATGRGTYARTRTDSYGFPRLTLPRIKQVRGFTTGDLVRAVVPSGKKVGTHTGRVAVRTTGNFNIRTARGLVQGIGHRHVRLLQRADGYGYTTAEEATVTGRSAFPPRPEDRGLHAGGK

SEQ ID NO: 3555 - protein, 430 aa, Tolypothrix sp.
MSNFVFLIDANKQPLDPIPPGQARRLLNQGHAAVYRRYPFTLILKKIISDPKVKPHQLKIDPGSKVSGLAILQEDKVIWGAELTHRGQQIKNDLESRRAIRCNRRNRKTRYRQPRFLNRTRQKGWLPPSLESRIKNILTWVNRIIRYVPITGISQELVKFDLQATENPEISGKEYQQGTLAGYETREYLLEKWNRKCAYCGVENVPFEVEHIHPKSKGGTDRVSNLTLACHECNQAKGNLDIKEFLAKKPAILSRILSQAKQPLKDAAAVNSTRWALFDRLKKTELPLEIGTGGRTKYNRVRLELPKKHWIDAAAVGMVESLQLLASQPLLITAKGWGSRQMCTPNKYGFPIRHKTRCKTFFGFQTGDMVRAILPSGKFAGTHIGRLTVRESGVFEMKTPKQKVSPVRYKYCKSVHRNDGYMYFFSTNVQ

SEQ ID NO: 3556 - protein, 518 aa, unidentified
MTPKKRKEASRMSEYIYVLGMDGDPQMPTKRKRHVEKLLQVGRARVFRQIPFTIQLTYENKPVLQPITIAEDPGRSNIGMAVVSLSGELLSAAVVQTRNKEIVKLMEKRKQHRRASRNGERKARQRLAKKCHTIIKTGFLMRKLPMYGKDKRVRCNVIKNTEAKFCNRKREDGWMTPSAEHLVRTHINLIHKMQKFLPITDVAIEINRFAFLSLEDPSISGVDFQNGPLKGYDDLNAAIEDLQDGHCLMCNSPIEHRHHIVPRSMQGSNTIGNIAGLCCKCHERVHKDARFEDRLKKKKAGLNKRYAAVSVLNQAIPFICKRLEQEFGKEHVHYCSGRDTSMVRRSIGYHKTKEEQLHEVDAWCIAVLALQHVPEKAPEFDHVHEILQFRRQDRSRIKAQTSRAYYHEGKKIAKNRKKAEGQREDSLQEWRKRQVERYGKEQTRKMISQLEVKESIRRYNRLDRLMPGAVFYYQGVRYVMRGQHSNGQYLQAVGMGDKDFPAKKCKIVVHNQGLVFVS

SEQ ID NO: 3557 - protein, 425 aa, Nodularia sp.; identical to SEQ ID NO: 3165

SEQ ID NO: 3558 - protein, 413 aa, unidentified; identical to SEQ ID NO: 3290

SEQ ID NO: 3559 - protein, 403 aa, Nodularia sp.
  VARIANT 360..379: note = X can be any naturally occurring amino acid
MSNFVLVLDTNKKPLTPIHPGDARFLLNQQKAAVFRRFPFTIILKEPKSEVPTQPIELKIDPGSKTTGFALVQNNKVIWGMELQHRGLAIKESLETRKGVRRGRRSRHTRYRQARFLNRTKPQGWLAPSLSHRVLTINTWVKRLCNFAPITDIVQELARFDLQQLENPEISGFEYQQGELQGYEVREYLLNKWNRKCAYCTAENVPLQVEHIKPKAKGGTNRISNLCLACEKCNIKKGTQDIEKFLAKKPELLKQILSQAKRPLKDASAVNSTRWALFNKLKETGLPITTGSGGLTKFNRTRLGLPKTHWIDAACVGKVETLKILTTKILTVKSTGHSCRRFCRINKFGFPCTEPKKIFXXXXXXXXXXXXXXXXXXXXISKSSSRGSKFHSVCDAKNCRRLH

SEQ ID NO: 3560 - protein, 420 aa, unidentified
MLVYVLKQNGQPFMPTGRFGKVRRLLKEGKAKVVRREPFTIRLLYEPETDVVQECYCGVDTGSKHVGVAVVGNDKVLYQSQTELRNDIKKKMERRKSFRQLKRSRKTRYRKPRFLNRKNSTKLNRLPPSVKHKVQAHIDEIEFCKKILPVSDLILEVSQFDTALMKNPALISEKVRHWGYQQGFNYSYSSRRSAILHRDNYTCQCCGKKNCRLEVHHIRFKSDGGTDDEENLITLCKECHDSVHAGIVELNKKPKKSKNLKYATHMSIIRSWLLKEYPDAIETFGFVTSENRHRLNLEKDHYIDACVIASGGLEFKELDVIYRKRRVPVQDRILTKGIHDEKKLPTGKIFGFKKFDKVEYLGETCFIKGRRSSGAFVLMDINNNTINFVDREGKQNPSYKSLKMINTRRGILYINEKVER

SEQ ID NO: 3561 - protein, 416 aa, Nostoc sp.
MSNFVFVLDTNKQPLNPVPPGQARRLLKASLAAVYRRYPFTIILKYAVPNSEAEPHQLKIDPGSKTTGLAIVQGEKVIWGAELTHRGQQIKNDLESRRAIRRNRRNRKTRYRQARFLNRTRYKGWLAPSLNSRVENILTWVNRITRYVPITGISQELVKFDTQAMQNPEVSGVQYQHSELMGFEIREYLLEKWGRKCAYCGVENVPFEVEHILAKSRGGSDRVSNLALACHDCNQAKGNRDVKEFLAKKPDILSRILRQAKQPLKDAAAVNSTRWTLFNRLKAICLPIEVGTGGRTKYNRVRLSIPKTHWLDAACVGIVESLKILTSLPLLITAKGWGSRQMCTPNKYGFPVKHRTRCKTFFGFQTGDMVRAILPKGKFAGTHVGRLTVRESGVFEMRTAHGKISPVRHKYCKSIH

SEQ ID NO: 3562 - protein, 473 aa, unidentified
  source 1..473: note = uncultured beta proteobacterium
MSVFVLDKRKRQLMPCSENRARKLLDSGRARVHKLFPFCIRLTDRLIEDSALQPMRLSLDPGSKETGLAVSRIAETIDVRTGEIAPVMHICFLIELVHRGAAIKKSLEARAAMRGRRRSANLRYRAPRFGNRPRAKGWLAPSLKHRVDTTCSWVRRLTCLAPITHLAKELVRFDMQLMQNPEICGVEYQQGSLQGYEVREYLLEKFHRTCAYCDAKDIPLQMEHIHPKANGGSNRVSNLTLACGPCNSKKAARDIKDFLAKDSVRLKRILAQAKAPLRDAAAVNSTRWALFNALKATGLAVETGTGGQTKWNRSRLGIVKTHALDAACVGTVYDVQGVNAPALRVTCTGRGSRCKTRLDQYGFPRTYLSKQKTAFGFKTGDMVIANVTKGIKTGVHKGRLAIRLSGSFNVQSGLKGIPAVQGISYKYCRITQRADGYGYSQPEQPKKGSRDQGRASHAALYLPGLNAQVSRAF

SEQ ID NO: 3563 - protein, 437 aa, Clostridium sp.
MVYVLNKEGKPLMPTNRYAKIRVLLKSKKAIVVNSKPFTIKLLYDTKNFTQSITLGIDSGYLNIGFSTITKEKELISGEVKLLKGMSERLREKAMYRRQRRSRLRYRKPRFDNRKRSKDWLAPSIQHKYDSHIRFIDKLKNLLPITNTIIEVANFDTHKLKDPSIEGAAYQNGEQKDFFNLREYILHRDGHKCQNPNCKNKSTEPILQVHHIGFWKQDRSDRPGNLITLCNKCHTPKNHKEKSFLYGWKPKVKSFKEATFMSMIRWRLVNTLSCKYTYGYITKSNRIILKLDKTHYNDAFCIAGGSNQNRVKPLIFEQIKRNSRSLEKFYDAKVIDIRTNTKVSGVELFNGRRTRNKSLNSENLRKYRGAKISKGQRRIRTKRYFYQPGDLVKYEDKVYIVKGTQNKGKYIALKELKKVPKVELLTPYKFRKGLVCV

SEQ ID NO: 3564 - protein, 310 aa, unidentified
LNRTRPEGWLAPSLQSRVENIKTWVKKLRQFAPIGAISQELVRFDMQLMTNPDIQGKEYQQGTLAGYETREYLLEKWNRQCAYCGVKDVPFQVEHIHPRAKGGSDSITNLTLSCEKCNTKKGTKDIKDFLKKDPSKLEKILKQAKRPLADAAAVNTTRFALLFVLKATGLPVETGSGGLTKFNRSQQKVEKTHWIDAACVGQSTPILNIKGVKPLLITANGHGTRQSCRTDKHGFPNRHCSRTKFHFGFQTGDIVKSVVKTGKKIGEYIGRIATRAIGSFNISTRNGLVQGISYKTCKTIHQKDGYGYSN

SEQ ID NO: 3565 - protein, 483 aa, unidentified
VNNPQKWRICHKAEGVDLSERAKLRKGGYSMMTAVLSSIGVRLMPTTCFRARKLIKSGKAVIHSYDPFTIRLTQRENGGTQPIEYCCDTGYQHIGISIKSAKHEYVGVQVDAVKDEKKHHQDAATYRRTRRNRKTRYRVARFNNRKATKSKGWLAPSIRHKKDIHLAQVQKYVKVFPITSIVFEMGEFDTQKLKAIEEGRPAPAGIEYQHGEQCGFDDVRNAVFTRDDYRCVYCGKGIEDGAILHAHHLNYRSLGGTNRMGNLVAVCDRCHTPANHQKGGLLWKLMDKYKVKNFKGATFMTAVRWQMYDELKAMFPDTEIRPTYGSRTKEARRQLGVRKSHINDAYCMGNFHPKHRSEHWLYTKKRRNNRVLAKFYDAKYIDSRDGKKKSGQELFSGRTKRNRELNAENQHRYRQLKASKGRVSIRRQHYSIQPGDTIIYEGRKHITKGIQNLGAYLKISEKVVPVRKICIHHYAGGYIRQRM

SEQ ID NO: 3566 - protein, 490 aa, unidentified
MNYVYVLDKKGKPLMPTTRYGKVRRMLKSGQAKPIQNLPFTIQLTYIPKTTVCQPVIVGFDPGRTNIGISAVREDGTCLNLTHCETRNREIPKLMQKRKEHRQTSRRGERLVRKRLAKRHGTVSSKPLERILPGCEKPLKVKDIINTESRFNNRLRSEGWLTPTATQLLRTHVNLLKRMCQILPATDVVMEVNRFAFMQLDQPNVKKCGIDFQHGPLFGTDGIKEAVSIQQDGRCLLCEKRTIEHYHHIVPRAYRGSDTAENIAGLCAGCHKLVHTSREASNKLKHKKDGINKKYGGISVLNQVIPFLFMEFEQMFPGHTYATNGWNTKQFREKYRLAKDHSVDAYCIAASILPEPKVELPEDTHEIVQYRRHDRARIKRQTERTYCLGKKGVCKNRHKRFEQKTDSLEEYVEKYPNFLSNLTVKKSQRSYNDLKRVLPGAVILYQGKRYILSGRSSGGKQYRMLGYGNQNFTASKCTIVQQNTGLVYVS

SEQ ID NO: 3567 - protein, 406 aa, unidentified
MVYVQDIYGRPLMPTTRHGKVRRLLKSKKATVVNLCPFTIRLLYDTTGYKQEITLGVDTGTKHVGLSATTKSKELYASEVILRSDVVDLLSTRRELRKIRRYRLRYRKPRFMNRIKSKKRGWIAPSIRQKIDSHIRIIGFVYSILPVSKLIIEVAQFDTQKIKNPEISGKEYQEGEQLGFWNVREYVLARDEHKCQHCKGKSKDPVLNVHHIESRKTGGDSPSNLITLCKTCHKEFHKGNIKLKVNRGESLRDAAVMSIMKWELYDELKSLYPNVKMTFGYITKYNRINHGIEKSHVSDAFVISRNFDSERLGYYYKRKLVRRHNRQIHKMKAPKGGNKRMNQSPFKVFGFRLFDKMMFQGKERFIYARRLRGIFNIRDINGENKKDISYKKLEYVSHGLISIVAG

SEQ ID NO: 3568 - protein, 514 aa, Nocardiopsis sp.; identical to SEQ ID NO: 3215

SEQ ID NO: 3569 - protein, 428 aa, unidentified
LKVFVLNMRGKPLMPCSPAKARHMLKAGKAVVVRRTPFTIKLTIATGETKQDVTLGVDAGARHVGISATTEKEEVFASEVALRQDITGLLADRLAFRRARRNRKTRYRAPRFNNRVRSKHKGWLASSVENRIQAHMSRIDAVCRLLPVTKIVIETASFDIQKIKDPSVEGTDYQQGDQLGFWNVREYVLFRDGHVCQHCHGRSKDKILNVHHLESRQTGGDAPNNLITLCETCHKACHAGKIKLKVKRAQSFRAEAFMGIMRWTLLDRVRKAHPGLPVENTYGYLTKNTRITLGLPKTHCVDAYCIAGNLKAVRRGVYLHQRQMRKHNRQIHKFTVLSKRLEDGTKIGYRKLNQSPYLVHGFRLFDKVRCLGQIGFIFGRRSSGYFDVRRLDGVKLSPSISWRKLTLLEKRSTYLTELRKQDGASSPV

SEQ ID NO: 3570 - protein, 437 aa, unidentified
MSKVFVLDTNTRPLDPVHPGYARFLLKQGKAAVYRRYPFTLILQKVVEYPPVKPLRVKLDPGSRTTGIAIVNDVSGEVVFAAELSHRGQAVKAALDARRAVRRSRRQRKNRYRKARWANRKNQKKDWLPPSLESRIANILTWVRRLSRYCPIQAISQEVVRFDMQLMERPEMKGMEYQQGTLAGYEAREYLLEKWQRACAYCGEKDIPLQIEHIHPRAKGGTNRMSNLCLACEKCNRAKGTQDIAVFLKKKPEVLKRIQAQARQPLKDAAAVNATRWALFERLQATGLPVEFGSGGLTKYNRTTRKLPKTHWLDAVCVGKSTPERLQVNGIVPLLITATGHGSRQMCGVNKYGFPIRHRQRQKRYFGYQTGDMIRAVVTSRKNKGVYVGRVLVRATGSFDIRTKQGRVQGISHRFCTPIHRCDGYSYQQGAGHSFPA

SEQ ID NO: 3571 - protein, 449 aa, Anoxybacillus sp.
MVEENMTCFMQRKGENPMVFVLDTNKRPLAPCHEAVARKLLKQGKAAIYRRFPFTIILKKSVDESEIVDESEIKATYRLKIDYGSRHTGLAILRGQEVVWLGQLDHRTDIKERIDKRRAFRRARRNRKTRYRKPRFLNRRRKDGWLPPSLESRVQNIQTWVNRLKKLCPIGYISYENAKFDTQLMRNPEINGVEYQQGTLQGYEVREYLLEKFGRKCCYCGKENVPLEVEHIIPKSRGGTDRVDNLCLACHDCNQRKGSKTAEEFGYPHIQKQVKESLKDTSAINSTRWKVYEVLKQTGLDVECGTGARTKMNRIRLDLPKTHYFDACCVGESTTNHLYFKTKEVLFIKAKGRGSRSRTNLDRYGFPRGYLARQKFFFGFQTGDMVKAVVPRGKYQGVWFGEVACRKTGSFDIKGKDGKRIAQGINYRYVQVIQRFDGYAYGKGVAELA

SEQ ID NO: 3572 - protein, 544 aa, unidentified
MKQKKQKVMVYILNKKGKPLMPTTRCGHVRKLLNSKKAVVVNSNPFTIRLKYDTPNGVQDVFAGIDSGRENIGSGASNEDGDCLYLGELKTSNKSIKLKMTERAGFRKERRRHDRQNKQRKARKDHTEIQNGNADICRTTISCKSVQISYPAAEKSVTHKIIRGKEGKFANRHRDEGWITPSARQLVQMHMNDLKSMCKILPISHVTLERVAFDFQKLENENIKVWEYGKGKLYGYDSPEEYIHDVQNGKCLVCGKPHIDYLHHIIPRSKGGSDKVSNIAGLCYDCHYGPMGVHNCQNTQDRLPELKSEANKQYKVSLLNSVMPVLIEEMDKFCKANSIMFSICEGHDTAKVRDMYDLQKDHCIDGFAISLVDRNVKSVDVMPDRIYQKQRYKKKSKNIIQKRNCREYYDDKKLVAVNRHKGTDQKADSLEEYMNTYAETHTTDECKKHFDSLVVKPARRTYTFHKEWRICPFHIGDKVRYEKKNKIKGNTKVDTFICEGIRFVKDENKAEVKHNKTKSKKMKFCRVLESGCTPYVDYRKLALM

SEQ ID NO: 3573 - protein, 310 aa, Fischerella sp.
MSNYVFLIDGNQTPLNPVHPAQARKLLDCGKAAVFRRYPFTLVLKRVIENPNVYPLTLKIDPGSKFTGIALVTNQGDVIWAMELQHRGQQIKDALLHRLAVRRGRRNRNTRCRQARFLNRKRPDGWLAPSLRHRVLTTETWVKRLKKFAPIGSIAQELVRFDTQAMQNPEISGTEYQQGTLHGYECREYLLEKWNRQCAYCGVKDVPLEIEHIHPKSKGGSERISNLCLACHKCNQRKGNKDVKDFLKGKPEVLNRVQKLAKAPLKDAASVNSTRWMLFNTLKSFGLPVTTGTGGQTKFNRTRFELPKAH

SEQ ID NO: 3574 - protein, 482 aa, Nodularia sp.
  VARIANT 420..440: note = X can be any naturally occurring amino acid
MSNFVLVLDTNKKPLTPIHPGDARFLLNQQKAAVFRRFPFTIILKEPKSEVPTQPIELKIDPGSKTTGFALVQNNKVIWGMELQHRGLAIKESLETRKGVRRGRRSRHTRYRQARFLNRTKPQGWLAPSLSHRVLTINTWVKRLCNFAPITDIVQELARFDLQQLENPEISGFEYQQGELQGYEVREYLLNKWNRKCAYCTAENVPLQVEHIKPKAKGGTNRISNLCLACEKCNIKKGTQDIEKFLAKKPELLKQILSQAKRPLKDASAVNSTRWALFNKLKETGLPITTGSGGLTKFNRTRLGLPKTHWIDAACVGKVETLKILTTKILTVKSTGHSCRRFCRINKFGFPCTEPKKIFTHVSTGDFVKATLHKDRKNITSGKYVSRVKTPTKNGCEIVINGFRVEFSTMKDITKVHCSXXXXXXXXXXXXXXXXXXXXXLGKLCHRKIFVSLQTHFYFPEINLCHFFVLAHQLLHQQYLYH

SEQ ID NO: 3575 - protein, 429 aa, Salipiger sp.
MSNYVFVLDDARRPLSPTSPARARQLLRDGKAAVFRRYPFTIILKRKVPDAEPAPVEVKIDPGSKVTGLALVQGDKVVWGGELTHRGHQIRERLQMRRERRRGRRNKLRYRKPRYRTKAQINNADRKRKKGWLAPSLMHRVETIMTWMDRFRRYAPASSIAMELVRFDLQQMQNPEISGVEYQQGDLAGFEVKEYLLAKWGRECAYCGAEGRPLEVEHIQPRSRGGSNRVSNLTLACEPCNQKKGNRPVEDFLSGRPDLLARIRKQAKQPLRDAASVNSTRWAMFTALKMTGLPVTTGTGGRTKYNRKRMGWAKAHWLDAAAVGNVDALTLRTDKPLLISAKGQGGRQKGVFDKHGQPRRNKAGAAQIRPLKPIHGWRSGDIAKARGLEGRISPRTRGNFELRAAGQKPRSFPPRDFKAIHRNDGYAYQ

SEQ ID NO: 3576 - protein, 423 aa, unidentified
MSNFIFVVDTNKKPLTPCKSSMARKLLTAGKAAIFRRFPCTIILKKAVTATIESITLKLDPGSKTTGIALLQGEKVIFGAELTHRGQTIKASLESRRSLRRGRRNRHTRYRQARFLNRTRKKGWLAPSLQHRVETTLTWVEKLRRLAPIGLIVQELVRFDLQQLENPEISAIEYHQGELQGYEVRQYLLNKWNRKCAYCDAENVPLQVEHIHPKSQGGSNRISNLCLACQKCNQKKGTQNIEQFLAKKPDILSRILTQSKRPLKDAAAVNSTRWTLFGRLKETGLPVLTGSGGLTKFNRSRLQLPKTHWLDAACVGQVEALELLTNKPLLIKATGHGTRQMCRTDKFGFPSRYVPRNKFVKGFQTGDIVKAIVISGKKIGEYVGRVAVRTTGSFNISASELVQGISHKYCKIVHKKDGYSYAY

SEQ ID NO: 3577 - protein, 427 aa, unidentified
MRVFVLDKNRKPLDPCHPAKARKLLKLGRAKVLRRYPFTIIVQDLDVDNCITHQHQLKIDPGAKTTGLAIVQGDRVIWGAELTHRGEHIREALTSRRQLRRSRRNRKTRYRQPRFLNRTRPKGWLPPSLMSRVHNILTWVNKLIKFCPVTGISQELVRFDTQKMLNPEVSGIEYQQGTLYGYELREYLLEKWNRTCAYCGANNTRLEIEHIKPKSKGGSDRVSNLAIACHNCNQAKGNLEIEEFLSSKPNILKRILSQAKKPLADAAAVNATRWKLHDELKSIGLPVEVGSGGLTKYNRCRQNLPKTHWLDAANVGKVDTLYIEDYQPLLITAKGHGKRQVCGTNKYGFPIRHNSRKKIHKGFQTGDIVRAVVTKGKKIGTYVGRIATRKTGSFDITTAKGRVSGISYKYCQAIHRKDGYSYQFHGG

SEQ ID NO: 3578 - protein, 410 aa, Singulisphaera sp.; identical to SEQ ID NO: 3336

SEQ ID NO: 3579 - protein, 428 aa, unidentified
LKVFVLNMRGRPLMPCSPAKARHLLKAGKAVVRRRTPFTIQLRIATGETKQSVILGVDAGAKHVGLSAATEKEEVFASEVELRQDITGLLAARLSLRRDRRHRKTRYRAPRFLNRVRSKHKGWLAPSVENRIQAHMSRIDAVCRLLPVTKIVIETASFDIQKIKDPSVEGTDYQQGDQLGFWNVREYVLFRDGHVCQHCHGHSKDKILNVHHLESRQTGGDAPNNLITLCETCHKACHAGKIKLKVKRAQSFRAEAFMGIMRWTLLDRMRKAHSGLPVENTYGYLTKNTRITLGLPKAHCVDAYCIAGNLKAVRRGVYLHQRQVRKHNRQIHKCTVLSKTLKDGTKIGYRKLNQTPHLVKNFRLFDKVRCLGQTGFIFGRRSSGYFDVRRLDGVKISSCINYRKLTLLEKRSTCLTELRKEDGASSPV

SEQ ID NO: 3580 - protein, 408 aa, unidentified
MPCSAVVARLLLKEGKAKVIRRTPFTLKLFTMPEKSYTQPLTLGVDTGSTMIGSAVANEQGHISYLSEVKIRNDIATTMKARAKARRNRRNRKTRYRKARWLNRRNSIKTGRFSPTMRSKIEAHLREIRFVQALLPISAIVLETGTFDLHALKNPEVLQKKWLYQRGINYGFANTKAYVLTRDGYQCQHCQGESKDQHLEVHHIVFRSQNGSDEERNLLTLCKTCHDGLHAGTVILKKPGKRKGNLAHATQMNSIRVQLLQQVEGAEETFGFVTKEHRFLAGLPKTHTNDAAMIATRGNQPLFQVKTVLAKKCVSDGDYQQTKGVRSERRIPTGKIKGFRKFDKVRHRKQEYFIKGRMSTGYVILMGIDGEKVDLKPIPKFEKMKRVSARSSWIMQQRIMGRSSYSPI

SEQ ID NO: 3581 - protein, 451 aa, unidentified
MSVAVISKTGERLMPTSEYRARKLLKSGKAIKYSYHPFTIQLTERKTGNIQPIELCMDTGYIHIGISVKSEKHEYLTEQIDTLTDERSRHNARRMYRSQRRNRKRYRQPRFNNRKKDKGWIAPSLEHKKNIHVQTISRINNVMPLTDITMEMGNFDTQVLKAKEEGRPLPQGVDYQHGERYSIATLREAVFARDGYKCQCCGRTIKDGAILHVHHIKYRSQGGTNSISNLATVCDKCHTPKNHKPGGKLYGWKPKLPSFKGATFMTTIRWQLYNEAKALFPDIDIHITYGAATKERRRELNIDKSHINDAFVMGQFHPRHRIKAVLYKKKRRNNRCLEKFYDAKYIDSRDGKKRSGQELFNGRINRNHKKDSENLHQYRLQKVTAGKRTVRKQHYSVQPHDIIIYESRKRETTGCHCNGARVMLLPDKKSVSIKKIKIYRYAGGYFKSTFN

SEQ ID NO: 3582 - protein, 415 aa, unidentified
MVYVLANDGQPLMPTERHGKVCRMLKSGIAKVVKKCPFTIQLQYESERNVQPVALGIDAGSKHVGVSATTKAKVLYESDVELRDDIVKLLATRRQLRRRRRSRKTRYRPARFDNRRRKEGWLTPSIRQKIESHLTVVANVCKILPVSQIIVETASFDIQKIKNPDIQGIEYQQGEQMDFWNIREYVLFRDGHTCQCCKGKSKDKVLNVHHIESRKTGGNAPNNLITLCETCHKGYHNGTVTLPKNIKRGMKFKDAAFMGIMRWTFYNTLKEQYEPDIPVHYTYGYITKNTRINHNLPKGHCIDARCISGNPDAVSDGTYYYQKKVRCHNRQIHKQTILKGGIRKSNQAEYLVRGFRLFDKVRYQGREYFIFGRRKSGFFDIRTLSGEKVNKGSINVKRLTFVDTRKNYLTERRTV

SEQ ID NO: 3583 - protein, 431 aa, Klebsiella sp.; identical to SEQ ID NO: 2435

SEQ ID NO: 3584 - protein, 416 aa, unidentified
MVYVLDKNGQPLMPTDRHRKVRLMLQSGQAKVIKRCPFTIQLNYDSGHQTQEISLGIDAGSKHIGVSATTKIKVLYEADVELRNDIVDLLSSRRELRRGRRNRKIRYRQAKFNNRRRGNGWLAPSIRQKIGTHLTVVENICKILPISRIMVETASFDIQKIKNPDIQGAEYQQGDQLEFWNVREYVLFRDGHTCQCCKGKSKDKILNVHHIESRKTGGNAPNNLITLCETCHTGYHKGTVQLPKAIKRGMRFKDAAFMGIMRWAFYEALKQQYEPVGTPVHNTYGYITKHTRIAYNLPKEHYVDARCISGNPEASSNGEYYYQKKVRCHNRQIHKLTVLKGGIRKQNQATYLVKGYRLFDKVSYQGKGYFVFGRRQSGFFDIRTLSGEKVNKGSLSCKKLKFIATRTYYLTERRAV

SEQ ID NO: 3585 - protein, 425 aa, Nodularia sp.; identical to SEQ ID NO: 3165

SEQ ID NO: 3586 - protein, 443 aa, Oligella sp.
MAVFVLGKNKRPLMPCSEKRARLLLERGRARVHRLVPFTIRLVDRTVADCVLQPLELKIDPGSKTSGLALVRTRQSVNAQSGEITATAHVLNLFELIHRGTQISQALTARSQMRRRRRSANLRYRAPRFLNRTRPTGWLAPSLQHRVDTIQSWVQRIRRYAPVMQLAQELVRFDMQQLENPEIAGVEYQQGELAGYEVREYLLEKWQRQCAYCDAINVPLQIEHIQPKARGGSNRISNLTLACAPCNTKKGAQSVSSFLANDPKRLAHTQAQAKRPLRNAAAVNTTRWKLLNALKATGLPVNTGSGGLTKFNRTRLQMPKTHALDAVCVGEVGHVKQWQKPTLVIKATGRGSYQRTRLNRFGFPRGYLTRQKQIHGFQTGDRVKAVVTQGKKIGTYVGRVAVRASGSFNIQTAQRLIQGISHRYCTLIQRGDGYGYSLRTDSN

SEQ ID NO: 3587 - protein, 413 aa, unidentified
MTNYAFVLDVNGKQLAPTKEQKAWFLIRKKRATLISKYPMVIQLKKEISDEQICKDEICCGIDDGGLYVGVALVQKCKTKNKVVFKGTIEQRNDVKHLMEVRKGYRGYHRFHKRYRQARFNNRKSSKRKERIAPSILQKRQATIRVIKQLNKWINIANYLLEDVAIDIRALTDGYKLYRWQYQQSNRLDENIRKTVILRDDCKCMECGKSNCRLEVHHIKPRRLNGSNTLDNLISLCETCHQRTEGQEELYMDRYFSILNSTDNKNLNYAQHVMIGKKWLREQLSELGTLILTTGGDTANKRIDWNIEKSHSNDAICITGLQPDTCNVKEWTIKPMRRQSKAKTDNVLGIKHRDLVEYTFRNGETHRGYVTALYPEQNALNFQSPTKHCKRVNAKKCKLIWKYSKIYWLDNVS

SEQ ID NO: 3588 - protein, 437 aa, unidentified; identical to SEQ ID NO: 3570

SEQ ID NO: 3589 - protein, 512 aa, unidentified
MSTVYVLNKDGKPLMPTTRGGHVRHLLKEQKARVVRAKPFTIQLLYETNDVVQPLYLGIDPGRTNIGVAVVKANGMAVFTAHLETRNKEVPKLMQDRKKARRARRTNGRRCRRQRRAKANGTISKKCVKQDTAQSKNPSKRAKEIGIIKRRLPGYKKDVLCIGIKNKEAKYTNRTRPEGWLTPTANQLLQTHINLVRKIQKFLPISDVVLEVNKFAFMRLDNPDIQKWQYQQGPLYQKGSLENAVSEMQEHHCLFCDKPIDHYHHVVPQSENGSNTIANIVGLCAEHHNLVHKDAAWQKKLAEEKVGLNKKYGALSVLNQIIPALTNKLSVLFPKHFFVTAGKSTHDYRATHGVSKDHWLDAYCIACSVLPSDVCDSNINNHMPYELKQFRRHARRALNNENMNRVYTLNDKAVAINRHKATEQEAASLEEFRKEHPNDVCKLKVKEHHPTYRNMNRNYPGSIFLVGKHVHIMQGIAGSKDGKATTYKDSNANSITASKCKFVAKNSGILFV

SEQ ID NO: 3590 - protein, 552 aa, unidentified
MTSCTCTVFPACNHAKASSSQGKHNLLLRQERLIVKEVAYMSTIYVLNKDGKPLMPTTRGGHVRHLFKEQKARVVQSNPFTIQLLYETNDVVQPLYLGIDPGRTNIGVAVVKADGTAVFAAHLETRNKKIPKLMQDRKKARRARRTNGRRCRRQRRAKANGTISKKCVKQDTAQSKNPSKRAKEIGVIKRHLPGCKKDVLCVGIKNKEAKYTNRARLEGWLTPTANQLLQTHINLVKKIQKFLPISDVVLEVNKFAFMRLDNPNIQKWQYQRGPLYQKGSLENAVSKMQEHHCLFCEKPIEHYHHVVPKSENGSNTIANIVGLCAEHHNLVHKDVAWQEKLVEEKTGLNKKYGALSVLNQIIPALTKELSFLFPKHSFMTNGKSTHDYRAAHGISKDHWLDAYCIACSVLPIDVCDSTINNCVPYELKQFRRHDRRALNNENMNRVYTLNDKVVATNRHKATEQEAASLEEFRKEHPNDVCKLKVKEHHPTYRNMNRNYPGSVFLVGKQIHVMQGIASSKDGKATKYNDTRATTIAAGKCKFVAKNSGILFV

SEQ ID NO: 3591 - protein, 429 aa, Ktedonobacter sp.
LSNVFVIDSDYKPLNPVHPARARLLLTQGKAAVFRRYPFTIVLKRVVEQPEVQPLRLKLDPGSKTTGIALVNEGNGKIVFAAELEHRGHKIKGSLDDRRAVRRNRRNRKTRYRKPRYLNRRRKKGWLPPSLESRLANIQMWVARLCRYAPIAAISQELVKFDLQLIENPDITGIEYQQGTLQGYEIREFLLEKWERRCAYCGKQNVPLQVEHIHPRAHGGTNRISNLTLACEPCNTAKGTQDIAVFLTKKPDVLTRILAHVKKPLKDAAAVNATRFALFERLKAVGLPVECGSGGLTKYNRTMRGLPKNHWLDASCVGMNTPVTLSHKGIVPLRIAATGHGRRRMCVPDEFGFPKQHKARKKTFLGYQTGDMVKAITPKGTFEGRIAIRHRPSFRLGKVDIHPKYLRCVHRSDGYEYIQKGVRHAPPHV

SEQ ID NO: 3592 - protein, 449 aa, Scytonema sp.
MMITNSVFVFSKNGKILKPTTPARARILQSIGKAKKLKSFPFTLILDKDVDENVESYLELRIDPGSRYTGMSLVDLNKNEVVWAMELEHRGLAIKMELIKRAGVRRSRRTRRLRYRKKRFDRKKPDGWLAPSLRHRLLTTQTWIKRLLKIAPIKSIAIESVKFDLQKMETPDIEGIEYQQGTLRGYTLREALLEHWGRECVYCGNTDVPLQIEHINARSKGGSDRFSNLTLSCEKCNQKKGNKPVEQFLKEQPEILQKIKSHQKKSLSDAAAVNSTRKAIFEMAQQFGLPVISGDGASTKMIRIQSGLLKAHWIDSSCVATLSIVKLRICQPLRVTCTGHGTRQVQRVNAKGFPAIASIKNNPITGKKEVKLVSKNQKYTHATAGDYVICNLLKDRKHIKAGIYRARIKTPTPKGVEVLISTRRISVDRQYVKLIHRSDGYEYSFTTID

SEQ ID NO: 3593 - protein, 425 aa, Nodularia sp.; identical to SEQ ID NO: 3165

SEQ ID NO: 3594 - protein, 470 aa, unidentified; identical to SEQ ID NO: 2949

SEQ ID NO: 3595 - protein, 425 aa, Nodularia sp.; identical to SEQ ID NO: 3113

SEQ ID NO: 3596 - protein, 427 aa, Fischerella sp.
MSKIFVIDSEKRPLDPIHPAQARQLLRNKKAAVYRRFPFTLVLKELRSEAPVQPLRLKIDPGAKHTGIALVNDSTGEVVFAAELKHRGFAIRDSLTSRRQLRRSRRNRKTRYRQPRFLNRTRPNGWLAPSLQSRVENIKTWVNKLRKLAPIKAISQELVRFDMQLMRNPDIQGKEYQQGTLAGYETREFLLEKWNRECAYCGIKDVPLQIEHIHPRAKGGSNSITNLTLSCSKCNTKKGTKDIKDFLKKDPSRLEKILRTSKRPLADAAAVNTTRFALLEVLKRTGLPVETGSGGLTKFNRSQQNLKKTHWLDAACVGKSTPTLNIKGVKPLLITANGHGTRQSCRTDKFGFPNRHCSRIKFHFGFQTGDIVKSVVTSGKKVGEYVGRIATRATGSFNISTKNGLVQGISFKNCFHIHKKDGYSYSN

SEQ ID NO: 3597 - protein, 491 aa, Pseudomonas sp.
MLAKGKAPKVPTAATAGAGCRHSRGERAARLRHQARKGTVQRRIAVAVYVLDKTGTPLMPCSEKRARLLLERGRARIHRQVPFVIRLVDRRQADSALQSLTLKFDPGSKFTGIALVRQKGQRVSVLSLMELAHRGAAIRQAMQQRAAFRRRRRGQNLRHRAPRFDNRTRPEGWLPPSLRHRLDTTLGWVGRMRNWAPISDLAVERVKFDMQAIQNPEISGVQYQQGELAGYEVREYLLEKWGRCCAYCDAENTPLEIEHIVPRSAGGSDRVPNLTLACRPCNQRKGNQPVEVFLKARPELLARIKAKAKAPLRDAAAVNATRNALFRGLLDTGLSVTTGTGAQTKYNRRRLDLPKTHALDAACVGEIRAIEHWHRPTLAIKATGRGDYQRTRLTTHGFPRGYLTRQKRHFGFQTGDQVRAEVPTGKKAGTHLGRVAVRKTGSFNIQTSDGVVQGVHHRHFTLIQRADGYAYSHIQTDSPQSQKEAARAEVR

SEQ ID NO: 3598 - protein, 431 aa, Ktedonobacter sp.
MSKVFVLDIYEKPLEPVHPGRARILLSQRKAAVFRTFPFTIILKIKGEPLQIEPLRIKLDPGSRTTGIAIVNDRSGEVVFAAELSHRGHKIKESLDSRRAVRRSRRRRKTRYRKARFLNRRHHASWLPPSLESRVANVQTWVNRLARYAPISAMSMELVRFDMQLMENAEISGVEYQQGALAGYEVREYLLEKWNRKCAYCLKQGISLQIEHIVPRAKGGTNRVSNLTLSCEKCNTAKGTLDSAVFLKKKPAVLQRILAQVKKPLKDASAVNTTRWALYERLKATGLPIECGSSGLTKFNRTRKELPKAHWLDAANVGKSTPDVLFVKNIVPLLITATGHGRRQMCVTDSHAIGFPKQHKERHKTFLGYRTGDIVKAVTPKGTIRGRIAIRHRPSFRIGKVDIHPKYMRRLHRADGYEYQVKGVVALPPHS

SEQ ID NO: 3599 - protein, 436 aa, unidentified
VSNVFVIDRSGIPLDPVHPGYARLLLKQGKAAVYRRYPFTLILKKEIEQPHVKPLRIKLDPGSKTTGIALVDDASGEVAFAAELSHRGHAIKDALTSRRALRRNRRQRRTRYRKARWANRKRKQGWLPPSVESRIANILTWVRRLSRVAPIEAMSLELVRFDTQLMENPEVKGVEYQQGTLAGYEVREYLLEKWNHHCSYCGKTDVPLHVEHIRPRAHGGTNRVSNLCLACEKCNTAKGTKDIAAFLKKKPDVLQRIQAQAKAPLKDAAAANASRWALFDRLKATGLPVEVGSGGLTKFNRTSRELPKTHWLDATCVGKSTPEKLLVQQVVPLLITATGHGNRQMCLPDTYGFPRTSAKGAKKVKGFQTGDMVKAIVTRGKKKGTYVGRVAVRRTGSFNIKTRRETIQGVSYHYCHMLHQSDGYSYIQGGVLPPHA

SEQ ID NO: 3600 - protein, 425 aa, Nodularia sp.; identical to SEQ ID NO: 3165

SEQ ID NO: 3601 - protein, 411 aa, Ktedonobacter sp.
MSNHVFVVNHNGHPLMPCQPAKARKLLREGRATVMRRSPFTIQLGWECEEHVQEVVLGLDKGSHVTGFSCIGNGQILLSGEIQHRLDVKDKMQERRNNRRHRRKRKWYRPARFLNRASSKRSGRLPLSIKTNIEEVIRVVKHLPLPINAIIIEDVQVDIALLGNPTVQGSHYQDPTRLDENLRIACLMRDGYACQHCGKQKVRLEAHHLIFKGEGGKDTLTNLLTLCEACHKKLHQGKIQLKVAGVSGHLDQVAQRTMQGKSYLYATLGASTSLSTLFGYQTATLRKARELPKAHDADALCLATYETGKLVPYDREHFYKVSFRPRRTRRRYHTLPRKGQGRVRYQVNDELGGLRKGYIVRVKGRYIKQINSIYSNGYVAFARVKGEPNKALPRDCQLLERERTILWEKAS

SEQ ID NO: 3602 - protein, 512 aa, unidentified
MSTVYVLNKDGKPLMPTTRGGHVRHLLKEQKARVVRAKPFTIQLLYETNDVVQPLYLGIDPGRTNIGVAAVKANGTAVFTAHLETRNKEIPKLMQDRKKARRARRTNGRRCRRQRRAKANGTISKKCVKQTTAQNGSVSKRAKDIGVIKRRLPGCEKDVLCIGIKNKETKFTNRTRPEGWLTPTANQLLQTHINLVKKIQKFLPISDVVLEVNKFAFMRLDNPNIQKWQYQQGPLYKKESLESAVSEIQEHHCLFCKKPIDHYHHVVPQHKNGSDTIGNIVGLCAKHHDLVHKDSAWEKKLAKKSTGLYKKYGALGVLNQIIPTLTNELSSLFPKHSFVTNGKSTYDYRAAHGVSKDHWLDAYCIACSVLPSNVCDSNINNHMPYELKQFRRHDRRVLNNENMNRVYTLNNKAVAINRHKAKDQKTVSLEEFRKEHPDDVCKLKVKEHHPTYRNMNRNFPGSVFLVGKQIHVMQGIASSKDGKATKYNDTSATAIAAGKCKFVAKNTGILFV

SEQ ID NO: 3603 - protein, 465 aa, unidentified
MSTCACVLSKNGERLMPTIRLGKVRHLLKDGKAKIIKHHPFTIQLLYDSETNIQPIEICEDVGYNYIGISVKSQSHEYVSAQYDTLQDEKDCHDSCRKMRRTRRNRLRYRKPRFDNRKHDKGWLAPSLEHKKELNVNVIKMYCEVMPITHATVEVGSFDTMLVKAIEEGKATPESTDYQKGPRYNLASLREAVFYRDNYTCQVCGRKANEGAILHVHHMFYWKGRHGNSLNELVTVCEKCHTPANHQKGGKLYGFGENIKFANLSGAAFMNTVRWQIVNELYAAFGKPFVTFTYGAMTKEKRIALHLDKSHSNDAYAMGNFHPVDRCAFEHYEKVKRNNRILEKFHDSRYIDIRTGKEAKGKELFNGRISRSHKKDSENLHKYRGKRIRKGYRALRRKKVALNSGDLVSLNGETLIVHGTHTNKKGNVRVEFKVAALNGKKSASLKKLKIVKTSTPMHSAWAKVS

SEQ ID NO: 3604 - protein, 426 aa, unidentified
  source 1..426: note = Cyanobacteria bacterium UBA11153
MCKILVIDQDKRPLNPIHPARARQLLSHKKAAIFRRLPFTLILKKSLPDSSVSELRLKIDPGAKHTGIALVNDATGEVVFAAELKHRGFTIRDALTSRRQLRRSRRNRKTRYRQARFLNRKRPNGWLPPSLQSRIYNIKTWVKRLRKFAPITAISQELVRFDMQLMRNPDIQGKEYQQGTLAGYETRQYLLEKWSRQCAYCGVKDVPLQIEHIQSRAKGGTNSITNLTLSCKKCNIKKGTKDVKDFLKKNPTRLEKILKQAKHPLADAAAVNTTRLALLEILKATGLPVETGSGGLTKFNRYQQNLEKTHWLDAACVGISTPKLIIKGIKPLLITASGHGSRQSCRTDKFGFPIRYCPRIKVHFGFQTGDIVKANMTSGKYIGQFLGRITIRSRPSFSLKTTANKFDVHPKYLRKIHQADGYSYEF

SEQ ID NO: 3605 - protein, 425 aa, Nodularia sp.; identical to SEQ ID NO: 3165

SEQ ID NO: 3606 - protein, 551 aa, unidentified; identical to SEQ ID NO: 3262

SEQ ID NO: 3607 - protein, 469 aa, Burkholderia sp.
VAVFVLDRKGKALMPCTERRARLLLARGRARVHRVVPFVIRLVGRTADSCQFQPLRIKLDPGSKTTGMALVRDTEEVDASTGDVLRGAAVLNLFELVHRGRQISEALSARRAMRRRRRGNLRYRAPRFLNRTRRAEWLPPSLQHRVDTTVAWVRRLMRWAPITSLSSELVRFDMQSIGNPEIVGVQYQQGTLAGYEVREYLLEKWGRACAYCDRRDVPLQIEHIVAKARGGSNRVSNLTLGCQPCNHKKAALPVEVFLAQDPRRLARILAQAMHPLKDAAAVNATRWVLANALKATGLPVELASGGRTRFNRMTLGVPKTHALDAACVGDVGHLRDWNQPTLQAKCSGRGSYQRTRLDRYGFPRGYLTREKQHFGFQTGDMVRAVVCAGKKAGTHTGRVAVRASGSFNIQSGGMVVQGIAHRHCRLVQRSDGYAYSRIATPEGAAETGATLRPALSLPGLKAGGSRETR

SEQ ID NO: 3608 - protein, 424 aa, Lentibacillus sp.
MIVFVINKHGKPLMPCKPRKARLLLKEKKAKIVSRNPFGIQLLYETNSYTQEVKIGIDLGAKYVGIAITSEDKVLAKGEVELRQDVKSAIDTRRTYRRSRRNRKTRYRKPRFQNRTRGKRWLPPSIQSRVENTFFWIDKFCDLVPNPKLTMEVSKFDVQKMIDPAIQGVAYQEGQTYGYHDVRYFVLARDHYTCQVCKKKGKILNTHHIIYRTHGGSNRADNLITVCTDCHTHDNHQRGNILWKWMVEGKRLPQYKEGPFMNIVRKRVFTKYPHARITYGSVTTPKRKALELEKTHANDAIAISGISSIKENAKTTFKIKQFRKKKRSLHEATARKGRKSKNITSKRNEKNKKYLKGFYLNDKVRLYEKTGYITGFTGTSGAYVKSIDGDYIIMPNKSYKQVSLKKLTQISHHNNWQFEYKAFG

SEQ ID NO: 3609 - protein, 413 aa, unidentified; identical to SEQ ID NO: 2636

SEQ ID NO: 3610 - protein, 412 aa, unidentified
MTQLVYVINQNGHPLMPCKPSKARKLLRDGRAKVKHRAPFTIQLRWDCEEQVQDVVVGIDKGSSTTGFACVGRGEILLSGEILHRKDVKEKLDARRAHRRSRRNRRWYRPCRILNRASSKRSGRLPPSIKTNVEEVIRVVRRLPLPITRIVIEDVQVDIARLNDPTVQGSRYQDSKRLDENLRIACLLRDRYQCQHCGKREVRLEAHHVQYRQHGGKDTLSNLLTLCESCHHGVHAGKITLEVSGVSGHLDHIAQRSMQGKTYLYTTLGSALPLSTLFGYQTATWRKQQELPKEHDSDALCIATYDTGELVPWQRERFYRIGFRPRQTRRQYHDLPRKGQGRVRYQLNTELEGFRKGDVVRVKGTWIKQINSIYSTGYLAFSRKKGEPANARPKDCVLLERGTTILWQRPQR

SEQ ID NO: 3611 - protein, 430 aa, unidentified
VEQNLRVFVLNKRGKPLMPCSPAKARHLLKEKKAIVVRRTPFTIKLTIATGESKQPVSLGVDAGYKHVGLSASTEKAELYVSEVELRQDITDLLSARLALRRSRRNRKTRYRAPRFDNRIRTKRKGWLAPSVENRINAHLSRIEAVLRLLPVTKITVETASFDMQLLKNPDIAGKEYQEGEQLGFWNVREYVLFRDGHVCQHCHGRSKDPVLNVHHLESRRTGGDSPGNLITLCETCHKALHRGEIKLKAKRGRSFRAETFMGIMRWGVLNRLKASHPKLEVHNTYGYRTKHARISNGIAKSHCADAFCIAGNLGAERLGEFFFQKQTRRNNRQIHKLSILKGGRRKRNQASFEVKGFRLFDKVACKGEESFIFSRRSSGYFDVRKLDGTRISAGISYKKLRLLEKRRTYLTEIRKEAFPPLPEGRSLRA

SEQ ID NO: 3612 - protein, 423 aa, Tolypothrix sp.
MSNYVFLIDQNKAPLNPVHPAQARKLLDSGKAAVFRRYPFTLILKRVIENPNVYPLALKIDPGSKFTGIALVTNQGDVIWGMELQHRGQQIKDALQHRQAVRRGRRNRNTRYRQSRFLNRKRPNGWLAPSLRHRVLTTETWVKRLQRFAPIGGIVQELVKFDTQAIQNPEISGIEYQQGTLKGYECREYLLEKWNRQCAYCGVKDAPLEIEHIQARSKGGSDRISNLCLACHKCNQRKTDKDIKDFLKGKPDVLNRVLRQAKTPLKDAASVNSTRWSLFNTLKQIGLPVSTGTGGQTKFNRVRFELPKAHWIDAACIGVVETIKLVTTKILKIKATGFGGRQRCQTDKFGYPQKHRPLRPILGFCTGDIVRADVPKGKYAGTFTARVCPMSRGYGEFVIDKKRRSVKLEYLTPVHRRDGYDYA

SEQ ID NO: 3613 - protein, 470 aa, unidentified; identical to SEQ ID NO: 2825

SEQ ID NO: 3614 - protein, 426 aa, unidentified
MRIFVMNMRGDPLMPCTQKKARILLKEGKAVIYKYDPFTIQLTYATGETKQDCHIGIDTGSKHIGMAITSENKVLFKGEIELRQDVKSNIDTKHIYRRSRRNRKTRYRQPRFLNRKRSDKWLPPSLQNRVDHTFHWIDTFCSLVSDPILHIEVGKFDTAKMINPEINGVDYQHGQTYGFFEERYFVFARDNYTCQCCGKSKDKILQTHHIIYRSNGGTDRVDNLITVCTDCHTSKNHQKGGILYKWQEQHKKVKQYKEPPFMNAIRKRIFARYPNAHTTYGSETTPHRKELGLEKTHYNDAITISGITNIKEDPKEWLLIKQFRKKKRSLHEATARKGRKEPNCFQKRNSKNTPFYRGFYLNDKVKVFGHGQIGYITGFTSGGAYVKNVDGEYITIPNKSYKQVSIKYLKLLSHNNNWQYVVKSAV

SEQ ID NO: 3615 - protein, 425 aa, Nodularia sp.; identical to SEQ ID NO: 3165

SEQ ID NO: 3616 - protein, 413 aa, Blautia sp.
MTNYAFVLDANGKQLAPTKEQKAWFLIRKKRATLVSKYPMVIQLKKEISDEQICKDEICCGIDDGGIHVGLALVQKCKTKNKVVFKGTIEQRNDVKHLIEVRKGYRNYHRFHKRYRQARFNNRKSSKRKGRIAPSIFQKRQATIRVIKQLNKWINIANYSLEDVAIDIRALTDGYKSYRWQYQQSNRLDENIRKAVILRDGCKCMECGKSNCRLEVHHIKPRRLNGSNTLDNLISLCEKCHQRTEGQEELYMDRYFSILSSTDNKNLDYAQHVMIGKKWLREQLSELGTLILTTGGDTANKRIDWNIEKSHANDAICITGLQPDACNVKEWTIKPMRRKSKAKTDNVLGIKHRDLVEYTFKNGETHRGYVTALYPKQNAINFQSPTKHCKKVNAKKCKLIWKYSKIYWLDNVL

SEQ ID NO: 3617 - protein, 420 aa, unidentified
MQYVYVLNKHGEPLMPCLPGKARVLLKQQKACVVKRTPFTIKLLYGSTGYKQPITLGVDAGSKHVGLSASTEKRELYCEEFTPRNDVVDLLSTRKQNRRSRRNRKTRYRAPRFDNRVHGKHKGWLAPSVEVKIQEHITVIKRICRILPITLVRVETAEFDTQRLKAMLAGKPLPVGTDYQLGEMYDEYNVRQYVLKRDNYTCQCCGAHTTAKKVVKLHVHHLESRKVGGNTPSNLITLCTTCHNNLHKGKITLDGKKRGKTLRDAAFMGIMRNTLLTRLHNELNIPVQNTYGYITKLLREQNDIKKSHVNDARCISKYPLAEPCSVCYHTKAIRHHNRQIHKAKILKGGIRKANQAPYIVKGFRLWDKVLYNGQECFISGRRSSGYFALRKLDGTAITNSISFKKLQLLEAATNYLIERM

SEQ ID NO: 3618 - protein, 429 aa, Ktedonobacter sp.; identical to SEQ ID NO: 3433

SEQ ID NO: 3619 - protein, 427 aa, Parasutterella sp.; identical to SEQ ID NO: 2603

SEQ ID NO: 3620 - protein, 413 aa, unidentified
MIKNNNYSFVIDNKGNKLSPCKTNKAWYLIRKSRAIQVNKYPMIIQLKKEIKDKKDESEFVSGIDDGSAHVGISVIQKCKTKNKVIFKGTIEQRQDVKHLMDVRRGYRRYKRYHKRYRKARFNNRSNSKRKNRIAPSIKQKKDATLRVINRLNKYINITEYHLEDVAIDIRALTEGKKLYRWQYQKSNRLDENIRKAVILRDDCKCQECGKSNYILEVHHIVPKRLHGSNNIGNLITLCSKCHQKTEGKEELFIKHYQDMIQGKNIRFDYAQHVMQGKIYLRNELSKLDKLILTTGGDTANKRIQWDIEKTHSNDSLVINDLKINSKDCNIKDWIIKPMRRKNKGNIDECLGFKHRDLVKCTKKNGESYIGYITALYPQKKQCNITTLEGKILKRYGIKSCKLLWRFNKIYWF

SEQ ID NO: 3621 - protein, 413 aa, unidentified
MTSYSFVLDANGKQLAPTKEQKAWFLIRKKRAALISKYPMVIQLMKEIPEKEICQDEIRCGIDDGGLHVGIALVQKCKTKNKVVFKGTMEQRNDVKHLMEVRRGYRRYHRYHKRYRQARFDNRKSSKREGRIAPSILQKRQATIRVIHWLNKWINITNYWLEDVSVDIRALTDGYQSYRWQYQKSNRLDENIRKAAILRDGGKCMECGKSNCRLEVHHIKPRRRNGSNTLDNLITLCESCHQKTEGQEELYMDRYFSLLKSSDNKNLNYAQHVMIGKMWLRKQLSGLGVLYLTSGGDTANKRIDWNIEKSHANDAVCITDLQPDTCDVKEWTMKPMRRQSKAKTDHVLGIHHRDLVEYTFKNGETHRGYVTALYPEQKAINFQSPTKHCKKVNARKCKLLWKYSKIYWFENAS

SEQ ID NO: 3622 - protein, 430 aa, unidentified
MPKVYVLNRHGRPLMPCTPAKARHLLDAGKAKVRHRTPFTIQLLYGSTGYTQEVILGVDAGSKTIGLSASTETEELFSTEVKPRSDVVELMSARRQFRRARRNRTTRYRKPRFDNRVRSKHKGWLAPSVEVKIQEHMTAIRRACAILPVSKVVVETAEFDLQLLKAVAEGKPVPQGEDYQKGEMYGHYNVRQYVLWRDGYTCRVCGAHGSVKKGVPLHVHHLESRKVGGDAPDNLVTLCTACHDKLHKGIITAADLKKRKRRSTRDATFMGIMRMTLLRRLREQLPVPVVETRGYITKATREKLLVLPKSHTNDALAIAHGPQGFRAGYLPNIRQADRLYTIRPVRHHNRQLHKATILKSGVRKANQAETYICGFRLYDKVLYNGIECFVWGRRTSGSFLLRQLNGEKVKDGVSHKHLKLLERSQSYLVA

SEQ ID NO: 3623 - protein, 425 aa, Nodularia sp.; identical to SEQ ID NO: 3165

SEQ ID NO: 3624 - protein, 482 aa, unidentified
LVWNVQAPWDVYPSPTLCGLCLKVLRGRNGDADKKPIPTLTKDENRPSGRTTGLRAEQAEPAGIRKGDTLKVFVLNMRGKPLMPCSPAKARHMLKAGKAFVVRRTPFTIKLTIATGETKQDVTLGVDAGARHVGISATTEKEEVFASEVALRQDITGLLADRLAFRRARRNRKTRYRAPRFNNRVRSKHKGWLAPSVENRIQAHISRIEAVCRLLPVTKIVIETASFDIQKIRNPEVEGTGYQQGDQLGFWNVREYVLFRDGHICQHCRGRSKDPILNVHHLESRKTGGDAPNNLITLCETCHKAYHAGKIKLKVKRGQSFRAEAFMGIMRWTLLDRVRKTHPKLPVENTYGYLTKHKRIALGLPKTHCADAFCIAGNLKALRRGDFLFQQQTRKHNRQIHKCSILKGGVRTLNQAPFLVKGFRLFDKVRIGGQIGFVFGRRVRGTFNIRRLDKTVIGTDINCKKLSLLETRKTFLTELRKE

SEQ ID NO: 3625 - protein, 466 aa, Ralstonia sp.
MAVFVLDRHGKSLMPCSEKRARLLLERGRARVHRLVPFAIRLTDRRLVDSELQPLRLKLDPGSKETGVAIVREMASHAGGAPDAFVLSLAEIIHRGRQINEALTARRAMRRARRGRMTRYRAARFDNRRKPEGWLAPSLRHRVETTAAWVRRFRKLAPITALSMELVRFDMQAMENPEISGVEYQQGTLLGYEVKEYLLAKLGRTCAYCDATDRPLETEHIVAKAKGGSNRVSNLTLACRPCNQKKGNLPLEVFLRKDPDRAKRILARAKAPLRNAAAVNATRFALLNALKSFGLPVETGSGGQTKYNRRRLDIPKSHALDAACVGNVHSVWPWQRPILRIKCAGRGSYQRTRVTAHGFPRGYLMRSKRVFGFQTGDMVKAVVPSGKKAGTHIGRVAIRATGSFNIQTVAGAVQGISYKHCNLLQRGDGYGYFFITPTTKESETRGDASRRALSLPDLKAEVSRAN

SEQ ID NO: 3626 - protein, 447 aa, unidentified
VPAYRFKHITKKEVPYMVYVLDIDGQPLMPTSRHGKVRRLLNSHLAKVVKRCPFTIQLLYQSTKETQPVSLGVDAGSRHVGLSATTEREVVYQEELVPRNDIVKLLSARRALRRSRRNRKTRYRRVRFNNRVHSKHKGWLAPSVEVKIQEHITATKRICQILPIFDIHVETAEFDLQRLKAMEEGRLLPAGTDYQLGEQYDFYNTRQYVLHRDEYTCQCCGTHDNNVKLHVHHVESRQTGGEAPNNLITLCEHCHKSIHAGKMMLPKGKKRGKSYRDAAFMGIMRNTLLERLRKEVNVPVTMTYGYITKYWREKAGLEKSHINDAICISKHPYARPLETYYLTKAVRHHNRQIHKTKFSKGGIRKRNQAPYLVKGFRLFDKVLYQGESYFIFGRRITGYFDIRTLDGTKVNKGSTSYKKLRIQDTAEAYLTEVRAIPHMNEFTCVLA

SEQ ID NO: 3627 - protein, 425 aa, unidentified
MVYVINKEGQALMPTERFGKVRRLLKNGLAHVICRIPFTIQLDYETTHFVQPISLGVDAGSKHIGISATTSEKELYAADVELRNDIVEKLSTRREQRRTRRNRLRYRKTRFNNRVSSKHKGWLAPSVENKIQTHLTVVEKIHKFLPITKIIVETASFDIQKIKNPSISSKEYQQGEQLGFFNVREYVLFRDNHTCQHCKGKSKDHILNVHHIESRKTGGNSPSNLITLCESCHKAYHNGKIDIKVKRGASFRDAAFMGIARWTTYERLKNIYPNVSMTFGYITKNTRITNGLPKEHYVDARCISGNPKSKPLGYYFYQKKVRCQNRQIHNANFLKGGRKKLNQSPFLVKGYRLFDLVEYQKKLYYIFGRRDSGFFDIRRLDGIKVNKGSISCKHIRLVDIRKGIIIERRNSCSIPPHELKFCGFP

SEQ ID NO: 3628 - protein, 419 aa, unidentified
MVYVINKQGQALMPTERFGKVRRLLKNSLAHVVCRIPFTIQLDYDTTDYTQPVSLGVDAGSKHIGISVTTSEKELYAADVELRNDIVDKLSTRRELRRTRRSRLRYRKARFNNRVSSKRKGWLAPSVENKIQTHLTVVEKIHKFLPITNIVVETAAFDIQKINNPSISGSEYQQGEQLDFFNVREYVLFRDNHTCQHCKGKSKDKVLNVHHIESRKTGGDSPNNLITLCETCHKAYHRGEFKLNVKRGRSFRDAAFMGIMRWSFYEKLKNIYPNVSMTFGYITKNTRITNNLPKEHYVDARCISGNPVAKPLGYYFYQKKVRCQNRQIHKANFLKGGRKKLNQAPFLVKGFRLFDLVEYQNDLYYIFGRRDSGFFDIRKLNGTKVNKGSINCKHLRLMATRKSILIEKRMQINYENTGF

SEQ ID NO: 3629 - protein, 436 aa, Pseudomonas sp.
MAVYVLDKSGKPLMPCSEKRARLLLVRGRARVHRLMPFAIRLTDRKQAESLLQPLAIKVDPGSRYTGMALVRQQAKCVSVLSLMELAHRGAAIRKALEQRAGYRRRRRSQNLRHREARFDNRSRPDGWLPPSLQHRVDTTLPWVQRLRRLAPVCELAVERVKFDMQAMHNPEISGVEYQQGELAGYEVREYLLEKWGRCCAYCFAENTPLEVEHIQARSNGGSDRVSNLTLACHPCNQRKGNQPVELFLKGKPELLARIQANAKVPLRDAAAVNATRNTLFQALLTTGLPVATGTGAQTKYNRRRLGIPKTHALDAVCVGEVDTVTGWQRPTLSIKATGRGEYQRTRQSKHGFPRGYLTREKRHFGFQTGDQIIATVPSGKKAGVHKGRVAVRKSGSFNVQMLSTVIQGIHHRHCRIIQRADGYSYAQISTQDSQP

SEQ ID NO: 3630 - protein, 438 aa, Tolypothrix sp.
MGGQSMSNFVFVIDTNFQPLNPVPPGQARRLLKAKQAAVYRRYPFTIILKYAVPIPDTDPYRLKIDPGSKTTGLAIVQGEKVIWGAELAHRGQQIKNDLESRRAIRRSRRNRKTRYRKPRFLNRTRQKGWLAPSLNSRVENILTWVNRITRYVPITGISQELVKFDLAAMQNPEISGKEYQQGELAGYEVREYLLEKWGRKCAYCGVENVPFEVEHIHPKSRGGSDRISNLTIACHACNQVKGNRDVKDFLAKKPDILSRILRQAKLPLKDAAAVNSTRWALFNRLKETGLPVETGTGGRTKYNRVRLNLPKAHWLDAACVGNVESLQMLTSAPLLIAAKGWGNRQMCTTNQYGFPVRHRTRCKTFFGFQTGDMVRAILPTGKFAGVHVGRLTVRESGVFEMKTPTSKVSPVRHKYCKSIHRNDEYMYTFSTNVHALP

SEQ ID NO: 3631 - protein, 327 aa, Nodularia sp.
  VARIANT 303..323: note = X can be any naturally occurring amino acid
MELQHRGLAIKESLETRKGVRRGRRSRHTRYRQARFLNRTKPQGWLAPSLSHRVLTINTWVKRLCNFAPITDIVQELARFDLQQLENPEISGFEYQQGELQGYEVREYLLNKWNRKCAYCTAENVPLQVEHIKPKAKGGTNRISNLCLACEKCNIKKGTQDIEKFLAKKPELLKQILSQAKRPLKDASAVNSTRWALFNKLKETGLPITTGSGGLTKFNRTRLGLPKTHWIDAACVGKVETLKILTTKILTVKSTGHSCRRFCRINKFGFPCTEPKKIFTHVSTGDFVKATLHKDRKNITSGXXXXXXXXXXXXXXXXXXXXXWADI

SEQ ID NO: 3632 - protein, 470 aa, unidentified; identical to SEQ ID NO: 2949

SEQ ID NO: 3633 - protein, 425 aa, Nodularia sp.; identical to SEQ ID NO: 3165

SEQ ID NO: 3634 - protein, 426 aa, Leptolyngbya sp.
MSNYVFLIDANKKRMNPIHPAHAQKLMDAGKAAVFRRFPFTLIMNRVVENIVTYPLKLKIDPGSKVTGISLVNDQDQVIWGMELEHRGNTIKSNLDSRRSVRRGRRNRNTRYRKPRFLNRKRSKGWLAPSLMHRVLTTETWVKRLIKFAPVTEIVQELVRFDLQKMENPEISGAEYQQGTLHGYEIREYLLNKWGRKCTYCGKSDVPLQVEHIQAKANGGSDRISNLCLACEPCNLRKGTQDIKDFLKIKSDLLFRILRQAKAPLKDAAAVNSTRWKLYETLKETGIPVSTGSGGKTKFNRIKLGLEKAHWIDAACVGNVEKLTILTTRILRVKATGMGGRQKCQTDKYGYPQKHRPLKPIHGFCTGDIVKVQIPKGVNKGNYIARLCPYSDGNGEIYPRSGKKRIGIKLKYIVKAIHRKDGYSYA

SEQ ID NO: 3635 - protein, 415 aa, unidentified
MENEMAYCFVVNKNNRPLAPTKVNKGWYLVRKGRAKIKSRYPMVIQLEKEVEPDKYDESRMVVGIDDGSAHVGLAIVQKCPTKNKVVFKGTIEQRQDVKHLMDVRRGYRRYHRHHKRYRQARFNNRHSSKRSGRLAPSIKQKKDAILRVLYQLNRWIDIQEYCLEDVCIDIRAMTDGYNPYKWKYQKSNRLDENLRKAAIIRDGCKCQECGKSNCVLEVHHIRARKYGGADTIGNLITLCSGCHQKTEGREREFEDRYFKIIGSKPKRFDYAMHVMQGKNYLREKISELGPLHLTNGGETANKRIDWNIEKSHSNDAICITGCIPDTCDMKEWIIKPMRRKSKAKTDNVLGIRHRDLVSYTYKNGEIHTGYVTALYPELLALNFQSKTKHCKKVNARKCRLLWKFDKIYWLEQRV

SEQ ID NO: 3636 - protein, 574 aa, Nocardiopsis sp.; identical to SEQ ID NO: 3358

SEQ ID NO: 3637 - protein, 411 aa, unidentified
MVYVQDIDGKPMMPTTRHGKVRRLLKDNKAVVVNTCPFTIKLTYKTSDYKQEIVLGVDSGTKHVGLSATTKSKELYASEVILRSDVVDLLSTRRGLRRTRRSRLRYRKQRFNNRVKSKKDGWIAPSVRHKIDSHIRIISFVYSILPVSKLIVEVAQFDTQKIKNPEISGKEYQEGEQLGFWNVREYVLARDGHKCQHCKGKSKDPILNIHHIESRKIGGDSPSNLITLCETCHKEFHKGNIKLKVSRGKSLRDAAVMGIMKWKLYEELKSRYDNVSMTFGYITKYNRINHGIEKSHVSDAFVISRNFNSCRLGYYYKRKLVRRHNRQIHKMKILKGGIRKRNQAPFKVFGFKLFDKVMFQGEEHFIYARRPSGQFNIRDINGENKKDVSCKKLKYVSHGLVSVKTNLFLSQ

SEQ ID NO: 3638 - protein, 453 aa, unidentified; identical to SEQ ID NO: 2687

SEQ ID NO: 3639 - protein, 480 aa, unidentified; identical to SEQ ID NO: 2726

SEQ ID NO: 3640 - protein, 380 aa, Ktedonobacter sp.
MSSHQIGRRLCLALLRLPVCCSKRERPKSSAQPERTYTQPLTLGVDTGSAVIGSAVADEQGSILYLSEVEVRNDIATTMKERATHRRDRRNRKTRYRPARWLHRRNSIKTGRFSPTMRSKIDAHLREIHFAHSFLPISSIVLETATFDPHALKNPEVVRKKWLYQKGINYGFANTKAYVLTRDGYTCQHCQGKSKDQRLEVHHIIFRSQHGSDEESKLLTLCKTCHDALHAGTITLKRTGKKKGDLLHATQMNSIRVQLLKLVEAEETWGFVTKEHRLLAGLPKEHCFDAAMIATRGNRPVFQIQTVFVKKCIPDGEYQQTKGKRSEQRIPTGKIQGCAQMRQSALSRSGILYQRPYVYWLCYFDDDRREKGRFETHSQV

SEQ ID NO: 3641 - protein, 1304 aa, Nocardiopsis sp.
MATFRVGQQTHPPVLPQQVALESESADKPRIGHETGLRDRRQAVPGADPVRGETTSTSPGAGGVTPNPVGERGREAHTKNTALYAFVLDKNGVPLQPCPPARARKLLTKGRAVVARHTPFTIRLTDRTAAESEVDGVQVGIDPGSKHTGIALFTHQAEERRGRYSIQLNHRGAAIRKKLDQRSAYRRRRRSANLRHRTPRFSNRTRPRGWLAPSLRHRVDTTLSWVERLCRWAPVNAVHVERVAFDTHALSAGKPLEGVEYQQGTLAGFEVREYLLAKFDRACVYCGTVNVPLNIDHVYPRSRGGSDRVSNLVLACVPCNQAKAGRPVEEFVTSKRTLARVLARAKAPLRDAAAAQSTRWALWRALDRSLPTHVASGGRTKFNRTRNLLPKTHTLDALAVGKIGPSPRPWTGYWSPGARAGAPTHAPAPTSTDSPGCVCPAPNTSSPSPPVIWCGPWCPGARRRARTPGGSRYAPRAASTSPPSRALSRASTTGMCVCSSGRTAMPTPGRRRAFPPGLEGPGFHAQKIDDRPPDRTPGSTESAGGRTAPHPRRLRPAGQARHRRLLHRPAAGLRHDPAPAGAARPEPRLPAVGPGRRDRRGGRDGRLRRRHRVPGRLRRRELRLRRGPAQARPQTPGRGHPHRAPGAELRACGDHRERAAVGPGGGTGPAPAAVGRGRRGAVPGRVRPVLLGAEDQLPGVPGTLPHRTGCRLGPGPLRAARRAGRRVRRRPGADLRGRPDDLRPVLQHQRRRRGPVRRADHRRRAGLVPHQHGLHRRAHRGGDPAGHRFAPGRCRPVVVPCRPAARHRPARGPTVHRVRPRRHPARPPHGHPHPPGHGGAAHRRQPARPVPARDVGVSAPVDVAVVGAGPAGLATAHLLAAAGHTVRVLEAADAVGGRMRTLRTDGHLVDTGAEMLPSADAYPATWRLIRAVGLDADPRAVPLVREALSVWWQGRSRPHAGRPLGLLTGMGLPLRARLDLARLQLRLGRAGLDPDRPERAALPERTVADLLQHHHPHLRERLLGPLASGFFGWPVERAAAAPFAAHLVASGSTATWRTYRDGMDTLTRALAARLDVRTDHPVTGVDPGPGGVRLDSPRGALTARSAVLAVPAPVAARLHPGAPPAEREYLTSCGYAPMLRLSLMLDAPLSPRGARRGFAHLVPGDPLLAVVTVDHAKHPGRAPRGRGLVSLIATPSGTEELLDAPDDVVVRRLVERAERILPGVGARVRGALTHRFRHGLPLPEPRTLAARPAFAARPPAAVDYAGDWTSLRPCSEGAVTSAFTAAERVSAFLAATREPTPIEI

SEQ ID NO: 3642 - protein, 425 aa, Nodularia sp.; identical to SEQ ID NO: 3165

SEQ ID NO: 3643 - protein, 418 aa, unidentified; identical to SEQ ID NO: 2710

SEQ ID NO: 3644 - protein, 535 aa, unidentified
MRVRAAVTRPSQHLREVNQLATFRVGQQTHQPVPHQQTALEFASADTPRIGNETGREHHDVVPGAGHGRGGTAPVSPSGRGVTPEPCGVGEQHREVRPVVFVLDQHHTPLQPCHPARARTLLAKGRAVVHRHTPFVIRLKDRTRKKSEVAGVEVGIDPGSQHTGLAVFTHQGGQRRGRFSVQLTHRGGQIRKRMGQRATYRRGRRSRDLRYRAPRFNNRTRTPGWLPPSLYHRVVTTTSWVDRLARWSPVRAIHLERVAFDVHALTAGRPLEGVEYQHGTLHGYEVREYLLAKWNHACAYRGATNTALNIDHIHPRSAGGSNRVSNLALACIGCNETKNNHPVGEFLKNKPARLKTVLAQAKAPLRDAAAAQSTRWALWRELDQRFPVHVASGGRTKYNRTRNHLAKSHTVDALAVGKLDTITQTVSTVLTAGCTGRGSHARTRADRHGFPRLRLPRTKQVHGFHTGDLVRAVVPTGKKNGTYTGRVAVRTTGSFNITTAEGPVQGINHRYVRLLQRSDGYAYTTRKEDGVSFPA

SEQ ID NO: 3645 - protein, 420 aa, unidentified
MQYVYVLNKHGEPLMPCSPGKARLLLKQQKARVVKRTPFTIKLLHGSAGYKQPITLGVDAGSKHVGLSASTEKRELYSEEFTPRNDVVELLSTRRQNRRSRRNRKTRYRAPRFNNRVHSKHKGWLTPSVEVKIQEHITVIKRICRILPITLVRVETTEFDTQRLKAMFSGKPLPVGTDYQLGEMYDEYNARQYVLKRDNYTCQCCGSHTTAKKVVKLHVHHLESRKVGGNAPSNLITLCITCHNNLHKGKITLDGKKRGKTLRDAAFMGIMRNTLLTRLRNELNIPVQNTYGYITKLLREQNDIKKSHVNDARCISKHPLAEPCSVCYRTKAIRHHNRQIHKAKILKGGIRKANQAPYIVKGFHLWDKVLYNGQECFISGRRSSGYFVLKKLEGTTITNSISFKKLRLLEPATNYLIEKM

SEQ ID NO: 3646 - protein, 461 aa, Parasutterella sp.
MVKSSERQERCCRLETPSNIGEGSQPVERPRRENLRVFLLNKRGKPLMPCSPAKARLLLKEKKAIVVRRTPFTIQLTIATGESKQPVSLGVDAGYKHVGLSASTEKAELYASEVELRPDVSDLLSARRTLRQSRRNRKTRYRAPRFDNRIRTKRKGWLAPSVENRINAHLSRIGAILRLLPVTKITVETASFDTQLLKNPDISGKEYQEGEQLGFWNVREYVLFRDGHACQHCHGRSKDPVLNVHHLESRRTGGDSPGNLLTLCETCHKALHRREIKLKTKRGQSFRAEAFMGIMRWEVLNRLKASHPELEVHNTYGYRTKHTRIVNGIDKSHCADAFCIAGNLGAKRLGEFFFQKQTRRNNRQIHKLSILKHGLRKRNQAPFEVKGFRLFDKVVCQGEEGFIFGRRSSGSFDVRKLDGTRISAGISYKKLRLLEKRRTYLKEIRKEEALPPLPEGRSLRA

SEQ ID NO: 3647 - protein, 418 aa, Exiguobacterium sp.
MFVFVLNYHGEPLMPCKPSKARKLLNNGKAKLIKQTPFTIQLLFGSSGYKQEISLGVDAGTKHIGFSATTSTKVLLEGEVQLRTDIQDLLATRRAMRSARRSRKTRYRQARFLNRKKPNGWLAPSVQHKVDSHLKLIRMIHRLLPIKHLTIEVAQFDIQKIKSPDISGDLYRKGDQLGFWNVREYVFFRDKHMCQHCKGKSKDKILNVHHIESRRTGGDAPDNLITLCETCHKKIHKENLEHLFQRKSRSFRDASQMTVMRWFIYNAVKETYPYVKLTYGFLTKNRRIQNGLEKRHAVDARCISGNPLAEEPKVSYLFRQVRANNRQLHKMTVGKKGKRKANKAERLVHGYQLFDKVQYEEQTCFVFGRRKNGYFDLRTLAGFSIHKSASYKKLILLEKAKTWLVDIQPEGGEGRSHP

SEQ ID NO: 3648 - protein, 448 aa, unidentified
MSNVFVVDTYQRPLNPVHPGRARILLSEGKAAVFKRYPFTIILKIEVQEPAVQPLRIKLDPGSKTTGLAIVNDATGEVVFAAELSHRGQKIKAALDDRRTVRRSRRQRKTRYRKPRFNNRKNKKKGWLPPSLESRIANVLTWVNRMSRSCRITAISMELVRFDMQLMQNAEVSGVEYQQGTLAGYEIRHYLLEKWDRTCSYCGSKDMPLQIEHIQPRANGGTNRISNLCLACEACNTAKGTLDIAVFLKKKPEVLKRIQSQAKKPLKDAAAVNATRWALFERLKATGLPIECGSGGLTTFNRTTRAFQKTHWLDAANVGKSTPDVLIVKDIVPVLITATGHGSRQMCRPDRYGFPRTSAKGNKKVKGFQTGDIIKAIVTTGIKKGTYIGRVAVRSSGSFTIVTSTQTIQGISYRFCRMVHHSDGYSYTKGSALLPMHECRGIRALEKR

SEQ ID NO: 3649 - protein, 402 aa, Dactylococcopsis sp.
MSNFVFVLDKNKQPLDPTHPAKARKLLKAGRAKVFRRYPFTIIMQDLEVQNCVTHNHQLKIDPGSKTTGLAILQDNKVLWGAELTHRGSQIRDALTSRRQLRRTRRSRKTRYRKPRFNNRKRPEGWLPPSLQSRVENTMTWVNRLAKFCPITGISQELVKFDLPKLENPEISGIQYQQGELQGYEVREYLLEKWGRQCAYCAVKDVPLEIEHIKPKSRGGTNRISNLTLACHECNQDKGNQEIEDFLSGKPNLLKRIQSKTKKPLADATAVNVTCWKLYESLQQTGLPVETGSGGLTKFNRTHRGISKTHWLDASCVGKSTPENLKIKTKKPLLITATGHGSRQMVRTDKHGFPKRYVPRYKFVEGFQSGDIVKAYVTFMKEKRRICWKSSSKNFRKFQHKN

SEQ ID NO: 3650 - protein, 425 aa, Nodularia sp.; identical to SEQ ID NO: 3165

SEQ ID NO: 3651 - protein, 408 aa, unidentified
MSKIFLIDANKKPLNPIHPAQARQLLRNKKASIFRRFPFVLILSEPYEDPIISPLRLKIDPGAKTTGIALVNDATGEVVFAAELKHRGFAIRDALTSRRQLRCSRRNRKTRYRKPRFLNRTRSKGWLAPSLQSRIENIKTWVNKLQRFAPIIAISQELVRFDMQLMQNPDIQGKEYQQGTLAGYETREYLLEKWDRQCAYCGVNGVPLQIEHIHPRAKAGTNSIANLALSCEKCNIKKGIKDIKDFLKKDTNRLEKILKQAKRPLANAAAVNATRFALLDALKATGLPVETGSGGLTKFNRNQQGIDKTHWVDAACVGKSTPKLIIKNIKPLLITANGHGSRQSCRTDKYGFPKRYVPRFKFVKGFQTGDIVKAIVSTGKKVGEYIGSVKKFPLTVQDADTLPTVVKE

SEQ ID NO: 3652 - protein, 439 aa, unidentified
LMPTSEYRARKLLKSGKAIKYSYHPFTIQLTERKTGNIQPIELCMDTGYIHIGISVKSEKHEYLTEQIDTLTDERSRHNARRMYRSQRRNRKRYRQPRFNNRKKDKGWIAPSLEHKKNIHVQAISRINNVMPLTDITMEMGNFDTQVLKAKEEGRPLPQGVDYQHGERYSIATLREAVFARDGYKCQCCGRTIKDGAILHVHHIKYRSQGGTNSISNLATVCDKCHTPKNHKPGGKLYGWKPKLPSFKGATFMTTIRWQLYNEAKALFPDIDIHITYGAATKERRRELNIDKSHINDAFVMGQFHPRHRIKAVLYKKKRRNNRCLEKFYDAKYIDSRDGKKRSGQELFNGRINRNHKKDSENLHQYRLQKVTAGKRTVRKQHYSVQPHDIIIYESRKRETTGCHCNGARVMLLPDKKSVSIKKIKIYRYASGYFKSTFN

SEQ ID NO: 3653 - protein, 424 aa, unidentified
MSNYTLVLDTNKQPLSPCHPSVARKLLDSGKAALFRRYPFTIILNKSCSDVVNQAIELKIDPGSKTTGIALVQGEKIIFGGELSHRGNAIKASLESRRSLRRGRRNRHTRYRQARFLNRTRTKNWLAPSLQHRVETTLTWVNKLIKFIPITRISQELVRFDLQQIDNPEISGIEYQQGTLSGYEVREYLLEKWQRKCAYCGIENVPLQVEHIHPQARGGTNRISNLCLACEKCNIKKGTQDIKDFLAKKPDLLKCILAQAKRPLKDAAAVNSTRWALFSRLQETGLPVFTGSGGQTKFNRTRLNFPKTHWLDAACVGQIGELEILTNKPLLIKATGHGTRQMCRTDKFGFPSRYVPRIKFVKGFQTGDIVKAIVTTGKKIGKYIGRVAVRATGSFNISASKLVQGISYKYCKIIHRKDGYDYAF

SEQ ID NO: 3654 - protein, 421 aa, unidentified; identical to SEQ ID NO: 3396

SEQ ID NO: 3655 - protein, 425 aa, unidentified
MPCNEKRARLLLARGRARVHRVMPFVIRLVDRQIGVCSFQPLRLKLDPGSRVTGMALVRETDDAIAVLNLFELVHRGRQIGEALTARRACRRRRRTNLRYRTPRFLNRTRPSGWLPPSLMHRVHITIAWVNRMRRWAPVTALSSEQVRFDMQALANPEISGVMYQQGTLAGYEVREYLLGKWSRTCIYCDATDRPLQVEHLTARARNGSNRIGNLGLACGECNQDKGALDVREYVKDPKRLARILATASRPLNDAAAVNATRRALSSALRTTGLPLELASGGQTKFNRVTHNIPKTHALDAVCVGEVAALRGWQRPSLTIRATGRGSYQRTRLTRHGFPRGYLMRQKQVQGFQTGDHVRADVPHGKKAGVHTGRVAVRATGSFNIQTAMTVVQGISHRYCKLVQRGDGYAYSLQPNDSFRQDGGG

SEQ ID NO: 3656 - protein, 429 aa, Parasutterella sp.
LRVFVLNKRGKPLMPCSPAKARHLLKEKKAIVVRRTPFTIQLTIATGESKQPVSLGVDAGYKYVGLSASTEKAELYASEVELRQGITDLLSARRALRRARRNRKTRYRAPRFDNRIRTKRKGWLAPSVENRINAHLSRIETVLRMLPVTKITVETASFDMQLLKDPDISGKEYQEGEQLGFWNVREYVLFRDGHVCQHCHGRLKDPVLNVHHLKSRRTGGDSPGNLITLCETCHKALHRGEITLKAKRGQSFRAETFMGIMRREVLDRLKASHPKLEVQNTYGYRTKHARISNGIAKSHCADAFCIAGNLGAKRLGEFLFQKQTRRNNRQIHKLSILKGSLRKRNQAPFEVKGFRLFDKVAYQGEEGFIFGRRSSGFFDIRRLDGTRISAGINYKKLRLLEKRRTYLTEIRKEEARRPLPEGRGLRAQM

SEQ ID NO: 3657 - protein, 418 aa, unidentified; identical to SEQ ID NO: 3367

SEQ ID NO: 3658 - protein, 442 aa, unidentified
MVTVQQSTHHLPFGRVFIRRNLFMVYVISQDGKPLMPCSDPIARLLLKQGKAKVKKREPFTIKLTYETTNHTQGLTLGVDTGSGTIGTAVSKDNGDIVYMSEVVVRNDITDKMTQRAKYRRNRRNRKTRYRKARWLNRASSIKKDRFSPTMQSKLHSHVREIEYIQSILPVTEMVFETGQFDMQLMKNPSLANPKVRPWGYQKGANYGFENTKAMVLNRDNYTCQCCKGKHKDSKLEVHHIVFRSQGGSDEESNLLTLCHTCHKDLHSGKINPKLSGKLKGNLKYATQMNSIRKQLFRFYPNAIETFGYVTKANRLHLGVDKEHYYDACTIATQGNAFNVKSNLYKKKCVSDGDFQKTKGIRSEQPIVTDKICGFRKFDKVRYFGNDYFIKGRMSTGYAILMDIDGNKIDFSTMPRGYKTPKLSNCKRITARSTVMTQVKVV

SEQ ID NO: 3659 - protein, 435 aa, unidentified
VFVLDQHHNPLQPCHPARARKLLTKGRALVHRRVPFVIRLTARTSTESEVEGVEIGIDPGSTHTGVAVFTESSGERRGRFALQITHRGGQIRANLAKRSAHRRRRRSANLRYRSPRFANRTRSEGWLAPSLAHRVETTLTWVERLARWAPLRQAHVERVAFDVHALAAGKPLNGVEYQQGTLAGYEVREYLLATWNRACAYCGTSGVPLNIDHIHPRSQGGSGRIANLALACVGCNQAKSHHPIEEFLACQPARLATILTQAKSPLRNAAAVNATREALWRGLNARLPTRVGSGGRTKYNRTRASLPKTHTQDALAVGTLDTITTHPAWVMVVGCTGRGGYARTRSDRYGFPRLRLPRVKAFFGFQTGDLVRAVVPTGKKTGTYVGRVAVRATGSFNIATAQGTVQGIRHKHVRLLQRADGYTHTRKEEGVSSPT

SEQ ID NO: 3660 - protein, 427 aa, unidentified
MSNFVFVLDTNRQPLAPCHPARARELLAKGKAAVFRRYPFTIVLNRAVGDVPPSCQLKIDPGSQTTGLSIVNRDRLVWGAELEHRGQHIKAKLETRRACRRNRRNRKTRYRKPRFLNRTRPDGWLPPSLQHRVETTMTWVNRLRKLCPIVSISQELVQFDTQKLQNPEVSGVEYQQGELFGYEVREYLLQKWGRKCAYCGAENQPLEVEHIVSKSRGGSDRVSNLTLACHQCNQSKGNRDIHEFLSGKPSVLDRILKQAKTPLKDATAVNATRWKLYQQLKETGLPVEVGTGGLTKFNRTRLGLPKTHWLDAACVGKLTPDRLDVAVKKPLLVAAKGHGVRQRCRLDRYGFPRAVAPKAKSFQGFQTGDLVKAVIPQGKFAGNYMGRIAIRFRPSFRLNAGVKPFDVHPKYLTTVQKSDGYEYSFSK

SEQ ID NO: 3661 - protein, 411 aa, unidentified
MIYVRNKEGKALMPTERGGRIGYLLRHGKAHVVSRVPFVVQLDYESTTYTQEVSLGIDAGSKHIGVSASSEKKELLAAQVELRSDVTKLLSSRRELRRTRRNRKTRYRKSRFDNRKRKDGWLAPSVAQKVESHLKVIRLAHKLLPITKTTIEVAQFDAQKIKNPDIKGDEYQQGEQMGFWNVREYVLARDGHKCIHCKGKSRDPILNVHHLESRKTGGNSPSNLVTLCETCHKAYHRGEFELKIKRGSSLRDAAVMNIMRWAVYERAKAEFGNVYLTYGYITKHTRIENDIEKTHAADAFCIAKNVHAIRLGTFFMCRCVPRHTRALHVATPKKGGIRRSCIASHKIGKSRFQRFDMVRWNSKECFIFGSTNGRPILRNVYGNQVAEYPSVNIKTITFLKRLRMNLLIVVV

SEQ ID NO: 3662 - protein, 419 aa, Ktedonobacter sp.; identical to SEQ ID NO: 3457

SEQ ID NO: 3663 - protein, 493 aa, unidentified; identical to SEQ ID NO: 2644

SEQ ID NO: 3664 - protein, 419 aa, unidentified
MFVYVINQHGKPLMPCSPRKARNLLKSKKAKVAKRTPFTIQLVHGSAGYIQPISLGVDAGTKHIGISATTEKKVLLEADIKLRTDIQELLATRSQFRRARRSRTTRYRKARFLNRKKPKGWLAPSIQHKVDSHVKIVKFVHNILPVTHIIIEVAQFDTQLLKNPSIQGVEYQQGEQMGFWNVHEYVLFRDKHICQRCKGKKKDKILNVHHIESRKTGGDRPDNLITLCETCHNEIHQKGLEHTISRKSPSLRDASQMTVMRWFIYNGLKEIYPHAKLTYGYIIKNTRIRHGLEKSHMADARCISGHPLAKSNDAVYTMKFVRKNNRQLHTATIGKGGRRKTNKAERFVLGFQLFDKVIYEGQECFIFGRRIRGYFDIRQLDGTKIHTSTSFKKLRKVEYASTLLIERRISDSSPTYSSA

SEQ ID NO: 3665 - protein, 471 aa, Caldicellulosiruptor sp.; identical to SEQ ID NO: 3375

SEQ ID NO: 3666 - protein, 492 aa, Acidithiobacillus sp.
VLRETGSAATGTWPGAGTSDGAFHYSAGGSAAEGFGLAAYAVETGSGQQYYGHRSGPRERIRGDENTGEVSRQAIVLLLLELQHRGHAIRDALTQRRAFRRRRRGNLRYRPARFDNRTRPTGWLAPSLQHRVDTAMAWVHRLRRWTPVTGLSTMIHRFDTQRLQNPEISGMEYQQGELQGYEVREYLLEKWGRKCAYCGAEHAPLTIDHIHPKSRGGSDRVSNLTLACFPCNQRKGNRDVAEFLAHDPKRLARIEAQRKAPLRDAAAINSTRWVLWRDLASTGLDVEVGTSGRTRWNRSRLQIPKAHCLDAACIGHVDAAHGWKQPVLAVKTTGRGSYQRTRLTKYGFPRGYLTRSKSAFGFQTGDLVKAIVTKGKKVGTYLGRVAIRASGSFNIQTASGLVQGVHHRFCTLLQRADGYGYFWTKIASNQGEAGMGRSATAALSLPGINAGVPAQSDENIRPTPIRRSCSSLGVMDIRIQRYLRFCQVYSRL

SEQ ID NO: 3667 - protein, 440 aa, Ktedonobacter sp.
LSNVFVIDSDSKPLNPVHPARARLLLTQGKASVFRRYPFTIVLKRVVEQPEVQPLRLKLDPGSKTTGIALVNDANGKMIFAAELEHRGQAIKDGLDSRRAVRRNRRHRKTRYRKPRFQNRRRKKGWLPPSLESRLANILTWVARLCRLAPITALSQELVKFDLQLIENPDIAGVEYQQGTLQGYEVREYLLEKWERTCAYCGAQNVPLQVEHIHPRAKSGTNRMSNLTLACEPCNTAKGTQDIRVFLAKKPDVLKRILAQVKKPLKDASAVNITRWALLERLKTFGLPVECGSGGLTKYNRTTRGLAKTHWLDAACVGKSTPVTLSWKGLVPLHMKATGHGRRQMCVPDTYGFPKQHKARKKTFLGYQTGDMVKAVTPKGTYEGRIAIRHRPSFRLGKVDIHPKYMRCVQRADGYEYTQKGVRHAPPHVSSQGAPHGAIG

SEQ ID NO: 3668 - protein, 426 aa, Bacillus sp.
MVFVLDTNKCPLAPCHEAVARKLLKQGKAAIYKRFPFTIILKKSVDESEIKTTYRLKIDYGSRHTGLAILRGQEVVWLGQLDHRTDIKERIDKRRAFRRARRNRKTRYRKPRFLNRRGKDGWLPPSLESRVQNIQTWVERLRKICPIEHISYENAKFDTQLMRNPEINGVEYQQGTLQGYEVREYLLEKFGRKCCYCGKEGVPLEIEHIIPKSRGGTDRVDNLCLACHDCNQRKGSKTAEEFGYPHIQEMVKKTLKDASVVNATRWKVYEVLKQSGCEVECGTGARTKMNRIRLGLPKIHYFDACCVGESTPLQLHFKTKEALFIKAKGRGSRSRTNLDKYGFPRGFLARQKFFFGFQTGDMVKAVIPRGKYQGGWFGEVACRKTGSFDIKGKDGKRIAQGINYRYVQVIQRFDGYTYRREGMNIA

SEQ ID NO: 3669 - protein, 400 aa, unidentified
LEQRGKPLMPCSPAKARLLLKEKKAIVVRRTPFTIQLTIATGETKQPVSLGVDAGYKHVGLSASTEKAELYASEIELRQDITDLLSARRELRRARRNRKTRYRAPRFDNRIRTKRKGWLAPSVENRINAHLSRIEAVLRLLPVTKITVETASFDMQLLKNPDISGKEYQEGEQLGFWNIREYVLCRDGHVCQHCYGRSKDPVLNVHHLESRRTGGDSPGNLITLCETCHKALHRGEITLKQSADNRSRGSLHGNYALGGAESPEASHPELEVNNTYGYRTKHARIANDIAKSHCADAFCIAGNLGAERLSEFFFQKQTRRNNRQIHKLSILKGGIRKRNQAPFEVNGFRLFDKVACKGEEGFIFGRRSSGFFDVRKLDGTCISAGISYKKLHLLEKREPI

SEQ ID NO: 3670 - protein, 419 aa, unidentified
MVYVQDIDGKPLMPTTRHGKVRRLLKDKKAVVVNLCPFTIKLMYVTSDYKQEIVLGVDAGTKHVGLSATTKSKELYASEVILRNDIINLLSTRRELRKARRNRIRYRKPRFNNRIKSKRQGWIAPSVCQKIDSHIKVVSFIHSILPVSRLIIETSQFDTQKIKNPDILGKEYQQGEQLGFWNVREYILFRDGHKCQHCKGKSKNPILNIHHIESRKTGGDSPSNLITLCETCHKEYHKGNIKLKVKRGTSLRDAAAMGIMKWKLFDKLKSLYPNVSMTFGYITKHNRIKHRIEKSHVSDAFVISENFKAKRLGYHFKMKLTRRHNRQIHKMKMQKGGIKRMNQSPFRVFGFRLFDKVMFYGEKRFIYARRLSGSFKIKDIDGENEKNISYKKLKYIGHGLTSIEVDQSYGYKANTHNNE

SEQ ID NO: 3671 - protein, 434 aa, Syntrophaceticus sp.
LLVYVLNKHGRPLMPCKPSKARKLLKQGKAKIVKYEPFTIQLLYGSSGYKQKCVLGIDAGSKNIGLVVTIEDGRVIYKAQATLRQDIRENIETRRRLRRARRYRKTRYRKPKTFTSKWRNGWLPPSIRARIDAHYNIVKKICSIMPIKEIVVEVGQFDVQAIINPDIQGEEYQNGELKGFDSVKEYVKIRDNFQCHYVNLRPDIPCSGKLTVDHIIPRSRGGTDNPTNLVCCCEMHNMAKGNMSYKEFTGHEPTSIRDFRPTVFMNVLMEHLVPRLQELAPTKYTFGYVTRRRRKEWRLEKSYINDAIAIAGIKPRWQDNVWYCIRQVRKKKRSLHEEIPRKGRNKPNREAKRNNKNVKEIVTKSGKWCLWDKVKITTGEIGFISGFTGKWVYVQDIDGNYLQLSDKYKQINPSELVLICRNNNYITQQFISTL

SEQ ID NO: 3672 - protein, 419 aa, unidentified
MLNNQKEYAFVLDAEGKKLDPTIIQNAWRLVRQKKATLIAKRPMTIQLKKVVDTPNNDEIRIGIDDGAKYVGLALVQKCKTKNKVIFVATMEHRIDVHKKIVQRHEYRRYRRYLKRYRKDKSLNRANSRKQGWISPTIKQKRHAVIRIVDVLSKYICIDSIYLEDVAIDIRVLTEGHQIYGEQYQISNRLDENLRKATVLRDNCKCQLCGKKNCRLEVHHITPRRMNGSNTIGNLITLCSDCHSKVTGREMEFADQFYSKIGKKRNNYGLIYASHVMIGKTWLREELAKRAQLTLTTGGDTANKRINWNLEKSHEVDAVCITSLRPEFVNVKKWRIKPLRHQIKKRKTIEVLRFRHRDIVSYVYRNGEYHEGYVTAIFPLSKRRKENLSFQSQTKHCCRVAINKCKFICRPNKFYWLSS

SEQ ID NO: 3673 - protein, 461 aa, unidentified
MSNFVFVLDTNKRRLNPVHPREARLMLNQGKAAVFRKYPFTIILKESCPDVLVQDLELLLDPGSKVTGIAIKQGNKVLFGAEVQHRGQQIRDALLSRRQLRRGRRNRKTRYRQPRFLNRTRPSGWLAPSLQHRVLTTLTWVRKFIRLAPIASLAQELVRFDLQLMQNSEVSGVEYQRGELQGYEVREYLLEKWNRRCAYCSVENVPFEVEHIQPKSKGGSERVSNLTIACHDCNQSKGNQDIRDFLSSKSDLLNHVLKQAKSPLKDAAAVNSTRWALFNALKATGLPVTTGTGGQTKFNRTRLNLPKAHWTDAACVGRIDSLLILTSKPLLIAAKGHGTRQMCRTDKYGFPSRYVPRNKFVKGFQTGDIVKAIVEKGKKIGQYVGRVAVRSTGSFNISTNNGLVQGISHKYCSIIHRKDGYNYGFCHDAEFIQRVVLPPRVKTSRFPYSRRFLDEKTRRSH

SEQ ID NO: 3674 - protein, 413 aa, unidentified; identical to SEQ ID NO: 2636

SEQ ID NO: 3675 - protein, 425 aa, unidentified
MSNFVLVLDTNKKPLTPIHPGDARFLLNQQKAAVFRRFPFTIILKEPKSDVPTQPIELKIDPGSKTTGFALVQNNKVIWGMELQHRGLAIKESLETRKGVRRGRRSRHTRYRQARFLNRTKPQGWLAPSLSHRVLTINTWVKRLCNFAPITDIVQELARFDLQQLENPEISGFEYQQGELQGYEVREYLLNKWNRKCAYCTAENVPLQVEHIKPKAKGGTNRISNLCLACEKCNIKKGTQDIEKFLVKKPELLKQILSQAQRTLKDASAVNSTRWALFNKLKETGLPITTGSGGLTKFNRTRLGLPKTHWIDAACVGKVETLKILTTKILTVKSTGHSCRRFCRINKFGFPCTEPKKIFTHVSTGDFVKATLHKDRKNITSGKYVSRVKTPTKNGCEIVINGFRVEFSTMKDITKVHCSDGYSYV

SEQ ID NO: 3676 - protein, 456 aa, Halomonas sp.
MAVFVLDKKKQPLMPCSEKRARLLLARGRAVVHKRYPFTIRLKNRVGGEAQPLRLGIDPGSKTTGLALMHEPDSQQRHVLCLFELIHRGFQIKKALQQRAAFRRRRRSANLRYRAPRFNNRIKPKGWLAPSLQHRVDTVMAWVNRLSKSAPITGISQELVRFDTQKLESPEISGVEYQQGTLLGYEVREYLLEKWGRKCAYCGTADTPLEIEHVVPRSRGGSNRVSNLTLSCHPCNAEKDSQTLTDFFATNKGLKKRLKANGLSADAQLERVQRQLKQPMRDASAVNATRWALFSALKTTDLPVAVSSGGRTKYNRQRLNIPKTHALDAACVGAFGKLYDWTVPTLTIKAMGRGSYQRTRLTKHGFPRGFLMRQKQVHGFQTGDMVRAIVPTGKKAGTHTGRVAIRKTGSFNIQAEYGAVQGISHKYCTLIQRSDGYGYYVTLFSNLTGEAGRAVA

SEQ ID NO: 3677 - protein, 479 aa, unidentified
MVFVLDKHHKPLMPCTERRARILLRRGKAVVARVSPFTIRLKDRLQEESILQPLRFKDDPGSKTTGFAILREVSPNESVAILLGEIHHKPGIKQKLDSRRSLRHSRRSRNTRYRIKRFNNRHPQKCASCGKNAKHGSRYCRPCSEAKNFTDNGYRDTWLPPSLDARVNQTLNVLAKLRKLLPITSVSSEHVKFDTQLLQNPDIQGVEYQQGTLFGYEVREYLLERDGHTCRYCSNLSNDPVLEVEHKIPKSRGGSNSIKNLVMACHTCNEKKDDLTPEEWLTALKGKDGPSAVNQKRIANLDEIVKNKVVPLKDAAMMNATRWKLYRKLQETGLPVECGTGTRTKKQRIDHGLPKEHYYDACCVGESTPERLEIATHYVEVWSAKGRGTRKMCNTDKFGFPISHRTRQKQFFGFQTGDLVKATVPKGKYTGIWTGRVMVRAKGNFDIKDASGNRMTISHRYIQLLQRNDGWQYEKTKIS

SEQ ID NO: 3678 - protein, 443 aa, Oligella sp.
MAVFVLGKNKRPLMPCSEKRARLLLERGRARVHRLVPFTIRLVDRTVADCALQPLELKIDPGSKTSGLALVRNNEAINTETGEITATAHVLNLFELIHRGTQISQALTARSQMRRRRRSANLRYRAPRFLNRTRPTGWLAPSLQHRVDTIQSWVQRIRRYAPVMQLAQELVRFDMQQLENPEIAGVEYQQGELAGYEVREYLLEKWQRQCAYCDAIDVPLQIEHIQPKARGGSNRISNLTLACAPCNTKKGAQSVSSFLANDPKRLAHTQAQAKRPLRNAAAVNTTRWKLLNALKATGLPVNTGSGGLTKFNRTRLQMPKTHALDAVCVGEVGHVKQWQKPTLVIKATGRGSYQRTRLNRFGFPRGYLTRKKRIHGFQTGDRVKAVVTQGKKIGTYVGRVAVRASGSFNIQTAQSLIQGISHRYCTLIQRGDGYGYSTRIDSF

SEQ ID NO: 3679 - protein, 263 aa, unidentified
LKVFVLNMRGQPLMPCSPAKARHLLKAGKAAVRRRTPFTIQLRIATGETKQSVTLGVDAGAKHVGLSAATEKEEVFASEVELRQDITELLAARLSLRRERRQRKTRYRAPRFLNRVRSKHKGWLAPSVENRIQAHMSRIDAICGLLPVTKIVIETASFDIQKIKHPDVESTDYQQGDQLGFWNVREYVLFRDGHVCQHCHGHAKDKILNVHHLESRQTGGDAPNNLITLCETCHKAYHAGKIKLKVKRGQSFRAEAFMGIMRW

SEQ ID NO: 3680 - protein, 512 aa, unidentified
MSTVYVLNKDGKPLMLTTRCGHVRYLLKEKKARVVASKPFTIQLLYETDDVVQPLYLGIDPGRSNIGVAVVKTDGMAVFTAHLETRNKEIPKLMKKRKDSRRARRTNGRRCRRQRRAKANGTISKKCVKQTTAQNGSVSKRAKEIGVIKRHLPGCEKDVLCIGIKNKEAKFNNRTRPTGWLTPTANQLLQTHINLVKKIQKFLPISDVVLEVNKFAFMQLDNPNIQKWQYQKGPLYQKESLKSAVSEMQEHHCLFCKKKIDHYHHVVPQHKNGSNTIDNIVGLCTQHHDLVHKDATWQKRLAKKKTGLNKKYGALSVLNQIIPALTKELSSLFPKHFFVTNGKSTYDYRAAHGVSKDHWLDAYCIACSVLPNDTCDKTINSRVPYELKQFRRHDRRALNNENMSRVYTFNGKMVAANRHKATEQTTDSLEEFRQRQPNDVCNLKVKEHHPTYRNMSRNYPGSIFLVEKQVHIMQGIAGSKDGKATTYKDTNANSIAAGKCKFVAKNSGILFV

SEQ ID NO: 3681 - protein, 430 aa, unidentified
MVYVLDISGNPLTPTKRHGKVRHLLETGKAVCVKRCPFTIRLTYQNAGPELEGLSLGVDCGSKHIGLSVSSEEQEYYSSEVELRQDIPANLSTRREFRRARRHRKMRYRKPRFLNRIASKKKGWLAPSVRQKVESHLNRIDKAVKMLPIREIKVEVAAFDLQKLQADLKGLKRPKGEEYQQGPQLDFWNVREYVLFRDHHECQCCHGKSGDKVLNVHHLRSRKVGGDAPDNLITLCEYCHGQYHKGELELPESAKKPKPLRDAVFMGIMRWTLYSRLKEIYEPQGIKVKLTYGYITKHTRIENGLEEKSHRLDALCIAGHPKAKRCREWFLQKKVRCHNRKLHKATIQKGGVRKANQLPAVIKGFRLYDKVLFQNRECFIWGRRKTGYFTLKTLDGIMICDGVSSKKLTLLEKRKSYLTERRKQELCNSF

SEQ ID NO: 3682 - protein, 214 aa, unidentified
LHVHHFESRKYGGNAPDNHGTLCDDCHKKFHLGIITDVKLKTRRRQSTRDAAFMGIMRKALMWRLRTELFIPVAETKGYITKATSEKLLVLPKSHTRDALAIAQGRHGFGIKEYAYVEPANHIYTVRPVRHHNRQLHKASILKGGIRKRNQASKYVFGFRLYDKVLYQGKACFVWGRRTSGTFLLRTIDGIKVKDGVSYRNLTLLERSSNYLIA

SEQ ID NO: 3683 - protein, 447 aa, Marinobacter sp.
MSVFVLDRRKQPLMPCSEKRSRLLLGRGRALVVRAYPFTIRLKDRAGGITQPVRIKIDPGSKTSGIAVVRESGQKQHVLALMELAHRGRQISKSLEQRRAFRRRRRSQLRYRAPRFLNRTKPRGWLAPSLQHRVDTTKSLVNRLRSLVPVESISQELVRFDTQKMENPEVSGVEYQQGTLLGYEVREYLLEKWGRECAYCTGKDTPLQIEHIDPKANGGSNRVSNLTLACRPCNQEKGRQPLADFFASSKRLKNHQARLDRILKQCKKPLRDASAVNSTRWALHQTLKQMGLSVEVGTGGRTKFNRQRLEIPKTHALDAACVGEVEIVEGWDVPTLAIKATGRGSYQRTRLTRYGFPRGYLMRQKKVQGFQTGDMVRAIVPTGTKAGTWLGRVAVRKTGSFNIQTSSGAIQGISHRHCVLTQRADGYGYHIQPNQPKEEGDREHESR

SEQ ID NO: 3684 - protein, 414 aa, unidentified
MPCSPAKARLLLKEKKAIVKRRTPFTIQLTIATGETKQPGSLGVDAGYEHVGLSASTEKAELYASEVELRQDITDLLSARRALRQSRRNRKTRYRAPRFDNRIRTKRKGWLAPSVENRINAHLSRIEAVLRLLPVTKITVETASFDMQLLKNPDIAGKEYQEGEQLGFWNVREYVLFRDGHVCQYCHGRSKDPVLNVHHLESRRTGGDSPGNLITLCETCHKALHRGEITLKAKRGQSFRAEAFMGIMRWEVHNRLRALHPGIEVSNTYGYRTKHARIANGIAKSHCADAFCIAGNLGAERLGEFFFQKQTRRNNRQIHKLSILKGGIRKRNQAPFEVKGFRLFDKVACQGEEGFIFGRRSSGFFDVRKLDGTRISAGISCKKLHLLEKRRTYLTEIRKEEALPPLPEGRGLRA

SEQ ID NO: 3685 - protein, 420 aa, unidentified
MQYVYVLNKHGEPLMPCSPGKARLLLKQQKACVVRRTPFTIKLLYGSAGYKQPITLGVDAGSKHVGLSASTEKRELYSEEFTPRSDVVKLLSTRKQNRRSRRYRKTRYRAPRFDNRVHSKHKGWLAPSVEVKIQEHITVIKRICKILPISLVRVETAEFDTQRLKAMLAGKPLPVGTDYQLGEMYDEYNVRQYVLKRDHYTCQCCGAHNTAKKVVKLHVHHLESRKTGGNAPSNLVTLCTTCHKNLHKGKVTLDGKERGKPLRDAAFMGIMRKTLMARLKEELPIPVQGTYGYITKMRREQNDIKKSHTNDARCISKHPLAEPCSVCYRTKAIRHHNRQTHKANFSKKGIRKRSQMPYLVEGFRLWDKVLYKGQECFVSGRRSSGSFALKKLDGTSISKGVTFKKLRLLEPATNYLIERM

SEQ ID NO: 3686 - protein, 423 aa, Marinobacter sp.; identical to SEQ ID NO: 2646

SEQ ID NO: 3687 - protein, 425 aa, unidentified
MENTLKVFVLNMRGQPLMPCSPPKARKLLRAGKAVPVRRTPFVIQLTVPTGETKQPITLGVDAGYKHVGLSATTAKEELLASEVELRQDVTGLLSDRLALRRARRNRKTRYRAPRFDNRVRSKHKGWLAPSVENRIQAHISRIEAVCRVLPITKIVIETASFDIQKIKNPEIEGEGYQQGEQLGFWNVREYVLFRDGHVCQACKGRSKDLILNVHHIESRKTGGDAPGNLITLCEACHKAYHAGKLKQFSPRRGASFRAETFMGIMRWTVLNRLRERHPELPVTNTYGYLTKHKRIVAGLPKTHCADAFCIAGVLDAKRRGEYLFQKQTRRHNRQIHKLTILKGGVRKRHQAPYLVHGFRLFDKVLCKGEVGFIFGRRSSGAFDVRRLNGTKISAGISYKKLSLLEKRKMFLTELRKEGRDSSRV

SEQ ID NO: 3688 - protein, 455 aa, Halomonas sp.
MAVFVLDKQKRPLMPCSEKRARLLLARGRAVVHKRYPFTIRLKDRVGGDTQPLRLGIDPGSKTTGMALAREDAEDRHVLCLFDLVHRGFQIRKALEQRRAFRRRRRSKNLRYRAPRFNNRTRPKGWLAPSIQHRVDTVTAWVNRLTRHAPITAISQELVRFDTQKLENPEISGVEYQQGSLLGYEVREYLLEKWGRECAYCGDTDTPLEVEHVVPRAHSGSNRVSNLTLACHVCNQGKGKGTLDAFFTTDKGLKKRLKANSLSVDARLERVQRELKRPLRDASAVNATRWVLFGALKATGLPMTAGSGGRTKYNRQRLGIPKTHALDAACVGPFGRLHGESRPTLVIKATGRGSYQRTRLNKHGFPRGHLMQQKQVRGFQTGDMVKAIVPTGKKAGIHTGRVAVRKTGSFNIQTEQGAVQGISHKHCLLIQRGDGYGYHLTSSIQPKGGAGQAVA

SEQ ID NO: 3689 - protein, 429 aa, Ktedonobacter sp.
VSNVFVIDSDCKPLNPVHPGHARRLLRQGKAAVFRRYPFTIVLKRVVEQPEVQPLHLKLDPGSKTTGIALVNGTNGKIVFAAELSHRGHAIKDSLDSRRASRQGRRQRKTRYRKPRFDNRRRKKGWLPPSLESRLANILTWVARLCRYAPIATLSQELVKFDMQLMENPDIAGVEYQQGTLQGYEVREYLLEKWERTCAYCGKQDVPLQVEHIHPRARSGTNRMSNLTLACEACNTAKGTQEIEVFLKKKPEVLKRLLAQVKKPLKDASAVNSTRCALLERLKAIGLPVECGSGGLTKFNRTTRGLPKTHWLDAACVGKSTPDVLLQKGVIPLRIKATGHGRRQMCVPDKYGFPKQHKERKKTFLGYQTGDLVKAITPKGTFEGRIAIRHRPSFRLEKVDIHPKYMRCVQRSDGYEYTQKGVRHAPPHG

SEQ ID NO: 3690 - protein, 413 aa, unidentified; identical to SEQ ID NO: 3621

SEQ ID NO: 3691 - protein, 417 aa, unidentified
VYVLNKHGEPLMPCSPRKARLLLKQKKACVVKRTPFTIKLLYGSTGYKQPITLGVDAGSKHIGISAATEKYELYCEEATPRNDVVDLLSARRAFRRSRRNRKTRYRAPRFNNRVHSKHKGWLAPSVEVKIQEHITLIKRVCRILPVTFVRVETAEFDTQRLKAMLEGKPLPVGTDYQLGEMYDEYNVRQYVLKRDNYTCQCCGAHPTKTKAVKLHVHHIETRRTGGNAPNNLITLCTACHKALHAGKVTLDGKKRGRSLKDAAFMGVMRKTLMERLLKELKIPVQGTYGYITKYLREKHSIPKSHTNDARCISKNPLAIPCDTCYYTKAIRHHNRQLHKATILKGGIRKANQAPYTVKGYRLWDKVSYNDSECFITGRRTSGYFALKKLDGTVVSNSASYKKMRLLEVATNYITERR

SEQ ID NO: 3692 - protein, 489 aa, unidentified
MAMVYVQNKDGKPLMPTTRYCYVRLLLKENKARVVCTTPFTIQLNYDTPDVTQDLILGIDPGRTNIGVAVVKEDGSCVFSAHLETRNKEVPLLMKKRAAFRRQHRTQDRRRKRQRRAIAAGTTVESNTIERLLPGYEKPVVCHYIRNKEARFNNRSRPAGWLTPTANHLLQTHINLIAKVAKFLPITKVVIELNRFAFMAMDNPNIRRWEYQQGPLYGLGSVEDAVYAQQDGHCLFCEKPIDHYHHVVPRHKGGSETLANRCGLCARHHDLVHTDKSWAEKLVTRKGGMNKKYHALSVLNQIIPHLIEHLGSETPYEAYATDGKSTKGFRIAKNVPKEHYTDAYCIACSILDTDIEVSAPTSPFELKQFRRHDRQACIRQMVDRKYLLDGKVVAANRHKAIEQKSDSLQEFREAYGNAAVSLLTVKPHPPQYKDMTRIMPGAVMDFNGTIGVMQSSIVGRFYKSTKGYKAAPRRCVLLAQNAGMVFLPA

SEQ ID NO: 3693 - protein, 468 aa, unidentified
MSSNSICVIGKSGERLMPSFRPGRVRHLLKDGKAKIVKHQPFTIQLLYDSNNFVQPIELCEDVGYKYIGISAKSKSHEYVSAQYDTLADEKKNLDDRRKYRRTRRNRLRYREPRFDNRRREKGCLAPSLRHKKELNVNLIKTYVSVMPISRVIVEVGSFDTTLLSAIAQGKVKLEGVDYQQGPRYNIATLREAVFFRDDYKCVVCGRSVIKDTAILHVHHVYYWKGRHGYKLDELAAVCEKCHTPANHQKDGKLFGFGEDQKFKDLSGAAFMNTVRWQIVQALREIYPKDFVQFTYGAMTKAKRIKLKIPKTHNNDAYVMGDYHPSHRCAFTHYQKKHRNNRILEKFYDASYIDARTGNMAKGKELFNGRINRNHKKDSENLHQYRQQKISKGYRAFRRKTTKLNPGDIVCLDGEKLIVHGTHTSKTGNVNVQFKKPSKTGKKSASLKKLAIIKTTGTIRPVWERVLQ

SEQ ID NO: 3694 - protein, 413 aa, unidentified
MTSYAFVLDANGKQLAPAKEQKAWFLIRKKRAALVSKYPMVIQLKKEIPENEICKDEIRCGIDDGGLHVGIALVQKCKTKNKVVFKGTIEQRNDVKHLMEVRRSYRHYHRYHKRYRPARFDNRKSSKRKKRIAPSILQKRQAIIRVIHWLNKWINITNYWLEDVSIDIRALTDGYKPYRWQYQKSNRLDENIRKAAILRDGGKCMECGKLNCRLEVHHIKPRRRNGSDTLDNLITLCKSCHQKTEGQEELYMDRYFSLLKSSDHKNLNYAQHVMIGKEWLRKQLSSLGVLYLTNGGDTANKRIDWNIEKSHANDAVCITNLQPDTYDMKEWTVKPMRRQSKAKTDNVLGIKHRDLVEYTLKNGETHRGYVTALHPEQKAINFQSPTKHCKKVNARKCKLRWKYSKIYWFENAS

SEQ ID NO: 3695 - protein, 413 aa, unidentified
MTSYSFVLDVNGKPLAPTKEQKAWFLIRKKRAALVSKYPMVIQLMKEIPENEICQDEIRCGIDDGGLHVGIALVQKCKTKNKVVFKGTMEQRNDVKHLMEVRRGYRRYHRYHKRYRQARFDNRKSSKREGRIAPSILQKRQATIRVIHWLNKWINITNYWLEDVSVDIRALTDGYQSYRWQYQRSNRLDENIRKAAILRDGGKCMECGKSNCRLEVHHIKPRRRNGSNTLDNLITLCESCHQKTEGQEELYMDRYFSLLKSSDNKNLNYAQHVMIGKRWLRKQLSGLGVLYLTSGGDTANKRIDWNIEKSHANDAVCITDLQPDTCDMKEWTMKPMRRQSKAKTDHVLGIHHRDLVEYTFKNGETHRGYVTALYPEQKAINFQSPTKHCKKVNARKCKLLWNYSKIYWFENAS

SEQ ID NO: 3696 - protein, 427 aa, unidentified
MRVFVLDKNRKPLDPCHPAKARKLLKSGRAKVLRRYPFTIIIKDLEAENCSTHDHQLKIDPGAKTTGLAIVQGDRVIWGAELTHRGFQIKEALTSRRQLRRSRRNRKTRYRQPRFLNRTRPKGWLPPSLMSRVHNILTWVNKLIRFCPVTGISQELVRFDTQKMLNPEVSGIEYQQGTLYGYELREYLLEKWNRTCAYCGADNTRLEIEHIKPKSKGGTDRVSNLAIACHDCNQAKGNLEIEQFLSRKPSILKRILSQAKKPLADAAAVNATRWKLHDELKLIGLPVEVGSGGLTKYNRCRQNLPKTHWLDAANVGKVDTLYIEDYQPLLITAKGHGTRQICRTDKFGFPRLHCSLKKIHKGFQTGDIVRAVVTKGKKIGTYMGRIATRKTGSFDIAAAKGKVSGISYKYCQAIHRKDGYSYQFYGG

SEQ ID NO: 3697 - protein, 545 aa, Nocardiopsis sp.
VVEGLPLPAPANTQRGDSLATFHTGSKTHQAVLPQRPALESASADTPGNRDETGRGGRARVAPGVEHVRGEMPDAPPGVEHVTPVPARDGERAREGHPPRKGTPPRQGHRCVFVLDAHGTPLQPTHPARARKLLAKGRAVVARHTPFVIRFKDRTTAGSEVDGIEVGVDPGSKHTGLAVFTAQAGQRRSRYALRLDHRGGQITRRMRQRASCRKGRRSRNLRYRSPRFDDRTRPDGWLPPSLQHRVDTTVSWVDRLSRWAPVRAVHAERVAFDTHALSMGHPLEGVEYQHGTLHGYEVREYLLAKWGRSCAYCGAAGTPLNIDHIHPRSKGGSNRVANLAPACIPCDQAKDDRPVEEFVTSPRTLARVRSQAKAPLRDAAAVNATRWALWRALDERLPTHAASGGRTKWNRTRNRLPKSHTLDALAVGKLDTITTTVSTILVVGCSGRGSYARTRTDRYGFPRLRLPRRKAFFGFQTGDLARAVVPSGKHAGTHAGRVAVRSSGGHTLQTPHGPIKTSWKNLRLLQRADGYGYSTQKEAGAFSPA

SEQ ID NO: 3698 - protein, 315 aa, unidentified
DNRIRTKRKGWLAPSVENRINAHLSRIGAILRLLPVTKITVETASFDTQLLKNPDISGKEYQEGEQLGFWNVREYVLFRDGHACQHCHGRPKDPVLNVHHLESRRTGGDSPGNLLTLCETCHKALHRREIKLKTKRGQSFRAEAFMGIMRWEVLNRLKASHPELEVHNTYGYRTKHTRIVNGIDKSHCADAFCIVGNLGAKRLGEFFFQKQTRRNNRQIHKLSILKHGLRKRNQAPFEVKGFRLFDKVVCQGEEGFIFGRRSSGSFDVRKLDGTRISAGISYKKLRLLEKRRTYLKEIRKEEALPPLPEGRSLRA

SEQ ID NO: 3699 - protein, 392 aa, unidentified
FTIQLVYGSSGYTQEVILGVDAGSKSIEISASTKKEEVFAADVTPRNDVVDLLSTRREFRRARRNRKTRYRKPRFNNRVRSKHKGWLAPSVEVKIQEHITSIKMVCRILPVSKVVVETAEFDLQLLKAIEEGKPVPQGEDYQQGEMYGHYNVRQYVLWRDNYTCQCCGAHPTKKKEVRLHVHHLESRKTGGDAPGNLVTLCDSCHEKLHKGLITEDDFKKRKRRSTRDATFMGIMRKTLMQRLCSELPIPVIETRGYITKATREKLLVLPKSHTNDALAIAQGKHGFNVGYLPGIEQIDKIYTIRPVRHHNRQLHKATILKRGIRKSNQAEKYVFGYRLFDKVQFNGQDCFIWKRRTSGYFVVKTIDGKIIHNSASFKKLRIAERASNYLIA

SEQ ID NO: 3700 - protein, 464 aa, unidentified; identical to SEQ ID NO: 3503

SEQ ID NO: 3701 - protein, 411 aa, Bacillus sp.
MTEFCFVLDASGKRLSPTKVNKAWYLIRKNKAEQINKIPMVIQLYKTVEVDEIDETPIYLGIDDGSRFTGMALVQDGKTKAKPLFKGEIEHRQDVKDKMDVRRGYRRYKRSHKKYRIKRFNNRSSSKRKGRIAPSIKQKKEATLRVVKQLNKWCRINQIFLEDVQIDIASLTEGKKLYKWQYQQSNRLDENLRKACVLRDHNRCQKCGKTKGKMEAHHITPRRLGGSHSIYNLITLCPSCHHEVTGKEMEYAEIFYQLIKGKTIFTRDAMHVMQGKNYLRTELKSIAPLDLAFGGDTANKRIDWGIDKTHANDALVLCDLEISIKQSQLRSWIIKPMRRKNKANTDLVDGFKHRDYVCYTKRNGNQYFGYITALYPEKKQFNMTTIDGNVLKRYGLKSLTLLWRFNKIYWF

SEQ ID NO: 3702 - protein, 409 aa, Microcoleus sp.
MSKQPNYVFVLDTNRKPLTPCKPSLARKLLTTGKAKVFKLYPFTIILNKEVVDTSRPLTLKIDPGSRVTGLALLSGSTLLWVAELTHRGQAIKVSLESRRSLRRGRRNRHTRYRQARFLNRTRPKGSLAPSLQHRVETTLTWVRRLSKLAPINAVFQELVRFDLQHLENPEISGVEYQQGELAGYEVREYLLNKWDRKCAYCGAQNLPLQVEHIQPKAQGGSNRISNLCLACEPCNIKKGTKDVNIFLAKQPDVLNRILAQSKRPLKDAAAVNSTRWALYNRLKETGLKISTGSGGLTKFNRTQLNLPKTHFFDAACVGDTPELLVLANQPLLIKATGHGSRQMCRTDKFGFPSRYVPRFKFVKGFQTGDIVKAIVTSGKKMGAYTGRVAVRLAWELQYLNNNWVNSRN

SEQ ID NO: 3703 - protein, 429 aa, Ktedonobacter sp.
LSNVFVIDSDCKPLNPVHPGHARRLLKQGKAAVYRRYPFTILLRRVVEQPEVQPLRLKLDPGSKTTGIALVNDANGHVVFAAELEHRGHAMKDSLDSRRASRQGRRQRKTRYRKPRFDNRRRKKGWLPPSLESRLANILTWVARLCRYAPIAALSQELVKFDMQLMENPDIAGVEYQQGTLQGYEVREYLLEKWERTCAYCGKQDVPLQVEHIHPRARSGTNRMSNLTLACEPCNTAKGTQEIEVFLKKKPEVLKRLLAQVKKPLKDASAVNSTRCALLERLKAIGLPVECGSGGLTKFNRTTRGLPKTHWLDAACVGKSTPDVLLQKGVIPLRIKATGHGRRQMCVPDKYGFPKQHKERKKTFLGYQTGDLVKAITPKGTFEGRIAIRHRPSFRLEKVDIHPKYMRCVQRSDGYEYTQKGVRHAPPHG

SEQ ID NO: 3704 - protein, 443 aa, Caldicellulosiruptor sp.; identical to SEQ ID NO: 2385

SEQ ID NO: 3705 - protein, 544 aa, unidentified
MKQKKQKVMIYILNKKGKPLMPTTRCGHVRKLLDSKKAVVVNSNPFTIRLKYDTPNGIQDVFAGIDSGRENIGSGASNEDGDCLYLGELKTSNKSIKIKMTERTGFRRERRRHDRQSKQRKAKKDHTEIQNGNDDICRTTISCKSVQISYPVAEESVTHKIIRGKEGKFANRHRDEGWITPSARQLVQMHMNDLKSMCKILPINHVTLERVAFDFQKLENENIKTWEYGKGKLYGYDSPEEYIHDVQDGKCLVCGKPHIDYLHHIIPRSKGGSDKVSNLAGLCYDCHYGPMGVHNCRETQDRLPELKNEANKQYKVSLLNSVMPVLIEEMDKFCKANSIIFSICEGHDTAKVRDMYDLQKDHCLDGFAISLVGRNVKSVDVMPDRIYQKQRYKKKSKNIIQKRNCREYYDGKKLVAVNRHKGTDQKADSLEEYMNTYAETHTADECKKHFDSLTVKPARRTYTFHKKGCICPFHIGDKVRYEKKNKIKGNTKVETFICESIHFYKDENKAKVEHNKTKSKRMKFCRVLEAGCTPYIDYRKLALM

SEQ ID NO: 3706 - protein, 426 aa, unidentified
MSKVYVLAMNGQPLMPTTRSGWVYRALRDGKAKVVSKCPFTIKLLYESTNFTQPLTLGVDTGSKYVGSAVINDITSEVVYESQTELRDDIKSKMDRRRVSRRGRRNKLRYRPKRFNNRKASKHKGRYSPTLISKFQGHTREIEFIKSILPISDTILEVGEFDTHLLQDPTLVFHKWDYQRGELYQHENFKQAARARDGYKCQCCGKKNCRLEVHHLLPRSRGGSDKLANLITLCTDCHHLAHSSEEQLLLFQRRFGKKANGTLNHATQMNVLRSMLQMKYPDAKLTYGFITKEVRRIFKLEKTHIIDACCIASRGALFKNNDSNRYKKKCVPKGYYARTGIKGGRFVILPKGKIAGFKRYDKVLYNNKEYFVTGRMSAGCVSLIDIDGNYFKVERVKRYTGEKYTSVAHINSSLVKKICGAKSVVY

SEQ ID NO: 3707 - protein, 572 aa, Nocardiopsis sp.
VVRPQRTAISDPNLRAEVTGSPPEGGAFSPRGWRPAVTSTSQHQGGDSLATFHTGEKTHQAVLPQRPALESTSADHPGNRDETGRGGRARVAPGVEHVRGETTDGSPAAGGVTPDHPVREQAREGHPPREVTPPRQGHRCVFVLDAHGTPLQPTHPARARKLLSKDRAVVARHTPFVIRIKDRTTAESEVGGVEVGVDPGSRHTGLAVFTAQAGQRRGRYALRLHHRGDQITRRMRQRAAYRKGRRSRNLRYRSPRFDNRTRPDGWLPPSLRHRVDTTLAWVDRLARWAPVRAVHAERVAFDTHALSAGRSLEGVEYQHGTLHGYEVREYLLTKWSRSCAYCGAIDTPLNIDHIHPRSQGGSDRISNLVPACVPCNQAKGDQPVEEFVTTPRILAGIKGQAKIPLRDTAAVNATRWALWHALNKRLRAHAASGGRTKWNRTRNKLPKSHTLDALAVGKVDAITAAVSTVLVIGCSGRGTYTRTRTDRYGFPRSYLPRRKAFFGFRTGDLAQASIPSGKHAGSHTGRVAVRSSHTLQTPHGPVKTSWKNLRLLQRADGYGYTTQKEARVSSPV

SEQ ID NO: 3708 - protein, 242 aa, unidentified
MPNKVYVINKHGRPLMPCSPAKARHLLDDGKAKVKKRTPFTIQLVYGSSGYTQEVILGVDAGSKTIGISASTKKEEVFAADVTPRNDVVDLLSTRREFRRARRNRKTRYRKPRFNNRVRSKHKGWLAPSVEVKIQEHITSIKMVCRILPVSKVVVETAEFDLQLLKAIEEGKPVPQGEDYQQGEMYGHYNVRQYVLWRDNYTCQCCGAHPTKKKEVRLHVHHLESRKVGGNAPGNLVTLWRC

SEQ ID NO: 3709 - protein, 545 aa, unidentified
VQFAWWLCHPKPSDNIEDVNHETALMLLQIKAGTETFGTAPCGSGPKAEGVSPERKAMNTVAVVTNTNKPLMPTSPYRARKLLSSGKAKIVKHRPFTILLVNRSDGNVQEIEYKSDTGYLHVGISVCSEKREFVREQRDLLPDEKEKHNDRRKYRRTRRNRKRYRKARFDNRIGKIRKKEKNEHVWLPPSLEHKVDAQVQLFLRLYQVMPVKRAVFEMGQFDPALMKALEKGEAAPQGIDYQMGERYQIATRRAAVFTRDRYACVFCGRSIKDHAILHVHHIGFWKQDRSNRLDNLATCCEQCHTSENHRPGGILYGVEPKLESLASATYMNVVRFELLRRLKEAAPDVEFHISYGAKTSVIRKQRSISKSHTNDAYCLGQYFPKLRAEEIGFQKIRRNDRILQKFYDAEYLDSRDGTTKKGKELTNGRISRNHKKDHENLHQYRGKKLSKGRITIRRGRSSLNPGSLVRFDGEVLTVHGTHRSRKKNKAGHIKVSVNVEFERPSKTGRKSAALSKCQIISQSYNTGWKKIQLRKEEQGKIAAVV

SEQ ID NO: 3710 - protein, 421 aa, Butyrivibrio sp.
MVYVSNQDGQPIMPTSNYAKVRVLLKNGKAKVVKRCPFTIQLLYPCDNEVQPISLGVDAGSKHIGISATTKGENTGAIVLYEADVTLRNDIVELLSTRRENRRARRNRKTRYRKARFNNRRKGEGWLAPSIREKIDAHLTVIANVHKILPITKITVETAQFDIQKIKNPDIQGIEYQQGEQLDFWNVREYVLWRDNHTCQCCKGKSKDKVLNVHHIESRKTGGNAPNNLITLCEYCHSQYHQGNIKLPKTIKRGTSFKDASFMDVMRWNFYNRLKEIYPNVHMTYGYITKNTRISRNLPKEHYIDARCISDYPEAIHPWNKTVVYYQKKVRCHNRQIHKMSILKGGNRKLNQAEYIVKGYRLFDKVQYHGKNYFVFGRRTSGFFDIRTLDGEKVNKGSISCKKLRLVEMTKGFLIERKVVA

SEQ ID NO: 3711 - protein, 512 aa, unidentified
MSTVYVLNKDGKPLMPTTRCGHVRHLLKEQKARVVASKPFTIQLLYKTNDVVQPLYLGIDPGRTNIGVAVVKADGTAVFTAHLETRNKEIPKLMKKRKDSRRARRTNGRRCRRQRRAKANGTISKKCVKHDTAQNGSVSKRAKEIGVIKRHLPGCEKDVLCIGIKNKEAKFSNRTRPEGWLTPTANQLLQTHINLVKKIRKFLPISDAVLEINKFAFMQLDNPNIQKWQYQQGPLYQKANLEEAVSEMQEHHCLFCKKPIAHYHHVVPQSENGSDTIGNIVGLCTKHHDLVHKDTAWQNKLAKKKTGLNKKYGALSVLNQIIPALTKELSSLFPKHFFATNGKSTYDYRSAHGVSKDHWLDAYCIACSVLPNDVCDSGINNRVPYELKQFRRHDRRALNNENMSRVYTLNDNVVATNRHKATKQTTDSLEEFRQNHPDDVCKLKVKEHHPTYRNMNRNYPGSVFLIGKQVHVMQGIAGSKDGEATTYKDTNANSIAAGKCKFVAKNSGILFV

SEQ ID NO: 3712 - protein, 411 aa, Ktedonobacter sp.; identical to SEQ ID NO: 3601

SEQ ID NO: 3713 - protein, 343 aa, unidentified
MSEVVGRNDITDKMTQRAKYRRNRRNRKTRYRKARWLNRASSIKKDRFSPTMQSKLHSHVREIEYIQSILPVTEMVFETGQFDMQLMKNPSLANPKVRPWGYQKGANYGFENTKAMVLNRDNYTCQCCKGKHKDSKLEVHHIVFRSQGGSDEESNLLTLCHTCHKDLHSGKINPKLSGKVKGNLKYATQMNSIRKQLFRFYPNAIETFGYVTKANRLHLGVDKEHYYDACTIATQGNAFNVKSNLYKKKCVSDGDFQKTKGIRSEQPIVTDKICGFRKFDKVRYFGNDYFIKGRMSTGYAILMDIDGNKIDFSTMPRGYKTPKLSNCKRITARSTVMTQVKVV

SEQ ID NO: 3714 - protein, 425 aa, Fischerella sp.
MQTNYVFLVDTNKQPLNPIHPARARELLNKNKAAIYRQFPFTLVLHKAIDNPVVRLLTLKLDPGSKTTGIALLDGENVIWAAELQHRGWSIKDALNSRRSLRRSRRSRKTRYRMARFDNRKRPEGWLPPSLIHRVLTVETWVKRLCRYAPIAQAVMELVKFDTQKMQNPEIDGIEYQQGQLAGYEVRQYLLEKWGRQCVYCDKEGVPLQIEHIHPKSKGGSNRVSNLALSCKRCNLKKGTQLIDEFLKKDAKRLEKIKQQAKKPLKDAAAVNATRWTLFHTLKGILPTTTGTGAQTKYNRTLFQLEKQHWIDAACIGDIKAIKLLTLQPLLIKANGWGTRQMAGTNKYGFPIRHRTRQSLHFGFQTGDIVKAVVLSGKKVGQYVGRVLCRARGSFDIVTKTGRVGDINHRFCKPIHKKDGYSYAF

SEQ ID NO: 3715 - protein, 782 aa, Streptomyces sp.; identical to SEQ ID NO: 3487

SEQ ID NO: 3716 - protein, 544 aa, unidentified
MKQKKQKVMVYILNKKGKPLMPTTRCGHVRKLLDSKKAVVVNSNPFTIRLKYDTPNGVQDVFAGIDSGRENIGSGVSNEDGDCLYLGELRTSNKSIKMKMTERVGFRRERRKHDRQNKQRKARKDHTEIQNGNADICRTTISCKSVQISYPAAEKSVTHKIIRGKEGKFANRHRDGDWITPSARQLVQMHMNDLKSMCKILPISHVTLERVAFDFQKLENENIKVWEYGKGKLYGYDSPEEYIHDVQNGKCLVCGKPHIDYLHHIIPRSKGGSDKVSNIAGLCYDCHYGPIGVHNCQDTQDRLPELKNEVNKQYKVSLLNSVMPVLIEEMDKFCKANSIMFSICEGHDTAKVRDMYDLQKDHCIDGFAISLVDRNVKSVDVMPDRIYQKQRYKKKSKNIIQKRNCREYYDDKKLVAVNRHKGTDQKADSLEEYMNTYAETHTTDECKKHFDSLVVKPARRTYTFHKEWRICPFHIGDKVRYEKKNKIKGNTKVDTFICEGIRFVKDENKAEVKHNKTKSKKMKFCRVLESGCTPYVDYRKLALM

SEQ ID NO: 3717 - protein, 427 aa, Tolypothrix sp.
MSKIFVIDQNKRPLDPIHSAQARQLLRNKKAAVFRQFPFTIILKESRPDSPVSSLRLKIDPGAKHTGIALVNDASGEVVFAAELKHRGFSIHNALTSRRQLRRSRRARKTRYRKPRFLNRTRPEGWLAPSLQSRVDNIKTLVDKLRRFAPITAISQELVRFDMQLMSNPNIQGEEYQQGTLQGYETREYLLEKWGRQCAYCGVKDVPFQVEHIHPRAKGGSNSISNLTLSCEKCNTKKGTKDIKDFLKKDPSKLTKILAQAKKPLADAAAVNTTRWALLQTLKSTVLPVETGSGGLTKFNRSQQMLEKTHWFDAACVGKSTPVLMIKGIKPLLITANGHGSRQSCRTDKFGFPNRHVPRKKIHFGFETGDIVSSVVTTGKKVGQYVGKVAIRSSGSFNISTKNGLIQGISHKFCKRIHAKDGYSYAI

SEQ ID NO: 3718 - protein, 512 aa, unidentified
MSTVYVLNKNGKPLMPTTRCGRVRHLLKEQKARVVTSNPFTIQLLYETDDVVQPLYLGIDPGRTNIGVAVVKTDGTAVFTAHLETRNKEIPKLMQGRKKARRARRTNGRRCRRQRRAKANDTISKKCVKQDTAQSGSASKRAKKIGVIKRHLPGCEKGVLCIGIKNKEAKFSNRTRPEGWLTPTANQLLQTHINLVKKIRKFLPISDVVLEINKFAFMQLDNPNIQKWQYQQGPLYQKASLEEAVSEMQEHHCLFCKKPIAHYHHVVPQSENGSDTIGNIIGLCTKHHDLVHKDTAWQKKLAKKKTGLNKKYGALSVLNQIIPALTKGLGSRFQGHFYVTTGKSTYDYREVHGVSKDHWLDAYCIACSVLPNDVCDSDINNRVPYELKQFRRHDRRALHKANINRVYTLNGKSVATNRHKAIKQTTDSLEEFRQCQPDDVCKLKVKEHHPAYRNLNRNYPGSVFLVDGQVHVMQGVSGSHNGKADGYYNTNGNAYPYYKCKFVVKNEGIVFA

SEQ ID NO: 3719 - protein, 419 aa, unidentified
MLVYVISKDGQPLMPTERFGKVRRLLKEKKAKVVRRCPFTIKLLYEPETCIVQEVVLGQDTGSKYVGTACVANGRVLYQSEVILRDNIKKKMDSRRALRRNRRYRKTRHRKARFLNRANSKKKDRLPPSVRSKVQSHIDEIEFCKKILPISKIILEVSQFDTALMKNPSLINDKVKRWGYQKGFNYRYSSRREAVIHRDNYTCQCCSKKHVRFEVHHIIFRRQGGSDDESNLITLCKECHDAIHSGILVLTKKPKKLNLKYATLMSIIRSQLLKIYPDAIETIGFVTKTNRENLNLSKEHYIDACVIAGGGKKFKLNDIIYQKRRVAKGDYKLTRGSRSQQKLPVGKIQGFRKFDKVKYLKQEYFIKSRMSTGYAKLMDIFSITIDFSYMPKGKKTPKLLNLERISARSTCLCASQRII

SEQ ID NO: 3720 - protein, 512 aa, unidentified
MPTVYVLNKDGKPLMPTTRCMHVRHLLKNGKARVVKSKPFTIQLLYETDDVVQPLYLGIDPGRTNIGVAVVKADGAAVFTAHLETRNKEVPKLMKKRKESRCARRTNGRRCRRQRRAKTNGTISKKCVKQTTAQNGSVSKRAKEIGVIKRHLPGCEKDVLCIGIKNKEAKFTNRARPEGWLTPTANQLLQTHINLVKKIQKFLPISDVVLEVNKFAFMQLDNPNIQKWQYQQGPLYQKGSLENAVSEMQEHHCLFCEKPIEHYHHVVPKSENGSNTIANIVGLCTEHHNLVHKDATWQKKLAKEKVGLVKKYSALSVLNQIIPALTKEMNSLFPKHFFVTNGKSTYDYRTAHGVSKDHWLDAYCIACSVLPNDVCDSNINSHVPYELKQFRRHDRRVLHKANMSRVYTLNGKTVATNRHKAIKQTTDSLEEFRQSHPGDVCKLKVKEHHPAYRNLNRNYPGSVFLVDGQVHVMQGVSGSHNGKADGYYNTNGNAYPYYKCKFVVKNEGIVFA

SEQ ID NO: 3721 - protein, 480 aa, unidentified
LYTKPLDNIGEGSLPPSGEINLKGMTFMVYVKSIDGKALMPTSNSKARKLLKQKKAKVVSLRPFVVKLTYKTKTEYTQKLNLGVDSGYSNIGFSVIDAKQEYIAGEVKLLEGMKKRLLEKASYRRIRRSRLRYRKARWNNRVKSKKKGWLAPSLKHKLDTHIKFIDYLKNILPIGKITIEVANFDIQKMKDDLISGIDYQNGDMFGFWNVREFVLHRDGHKCQNPNCKHKDKKEQILKVHHIRYRSEGGSDRPENLITLCSKCHTPANHKKGKFLYDWCVNGKKVRGFKDATFMSIIRWYLVNELKSKHNNVSITYGYITKNHRIQNGIEKSHLNDAFAIAKGTNQARTKDRFLVIQDRLKNRSLEKFYDSKIIDIRTEKKVSGGDLNCGRSTRNKNLNTENLRKYRGVKISKGQRRIRKQKYFYQPNDLVKYDGKVYTVKGTQNEGKYIALKEIKKVPKVELLIPYVFKKGLNWSYGLC

SEQ ID NO: 3722 - protein, 412 aa, unidentified; identical to SEQ ID NO: 3610

SEQ ID NO: 3723 - protein, 470 aa, unidentified; identical to SEQ ID NO: 2825

SEQ ID NO: 3724 - protein, 427 aa, Scytonema sp.
MSKVFVIDTDKRPLDPIHPAQARQLLRNKKASVFRRFPFTLILKESRFESPVLPLRLKLDPGAKITGIALVNDATGEVVFAAGLKHRGFAIRDALTSRRQLRRSRRNRKTRYRQPRFLNRTRPQGWLAPCLKSRVDNIKTWVEKLRRFAPVEAISQELVRFDMQLMRNPDIQGKEYQQGTLAGYETREFLLEKWNRQCAYCGVKDVPLQIEHIHPRAKGGSNSITNLTLSCEKCNTKKGSKDIKEFLKKDPLRLEKILKQAKIPLADAAAVNGTRFTLLSTLKATGLPVETGSGGLTKFNRSQQNLPKLHWLDAACVGKSTPILDIKCVKPLMITANGHGTRQMCGTDKFGFPNRHRTNKQIHFGFQTGDIIKAVVTSGKKVGVYVGRVLCRATGSFDIATKTGRISGISYKYCSATHKKDGYSYGF

SEQ ID NO: 3725 - protein, 515 aa, unidentified
MATVYVLNKDSKPLMPTTRCGHVRYLLKEKKARVVRANPFTIKLLYETDDVVQPLYLGIDPGRTNIGVAVAKGDGTAVFTAHLETRNKEIPKLMAKRKEYRQGRRHYRRCKRQRRAAAHGTLSKRCKKQDTAQGSNISERAQKIGVFERNLPGCEKPVLCIGIKNKEARFNNRVRPAGWLTPTANQLLLTHINFVKKICKYLPISDVVLEINKFAFMALDNPNIQKWQYQQGPLYQKGSLENAVSEQQDHHCLFCKKAIEHYHHVVPRSENGSNTIANIVGLCTKHHDLVHKDTAWQKKLAKKKTGLNKKYGALSVLNQIIPALTKELSSRFQGHLYVTTGKSTYDYRAAHGVSKDHWLDAYCIACSVLPDGCFDNTVNSRIPHELRQFRRHDRQVCHQQNAKRKYYLDRKLVAINRHKATEQKTDSLEEYRNNGGATDKLVVKEHKPTSKRLNRILPGALMTANGKLNVMVASKGLHNGIPDYYVFADNSEAKPTKYTLINKNKGIVFVLNSVS

SEQ ID NO: 3726 - protein, 470 aa, unidentified; identical to SEQ ID NO: 2825

SEQ ID NO: 3727 - protein, 380 aa, Ktedonobacter sp.; identical to SEQ ID NO: 3640

SEQ ID NO: 3728 - protein, 425 aa, Planktothrix sp.
MSNYVFVINTNKQPQNPLHPAQARLLLSQGQAAVYRRYPFTIILKESKPESETEHLTLKIDPGSKTTGIALVQGNKVIWGAELTHRGQAIKMSLESRRSLRRSRRNRHTRYRQARFLNRTRQKDWLAPSLQHRVKTNLTWVNKLIKIAPIGSIIQELVRFDLQQLENPEISGIEYQQGELQGYEVRQYLLEKWQRKCAYCGIENVPFQVEHIHPKAKGGSNRISNLCLACEKCNLKKGTQSIEEFLIKKPDVLKRILSQAKRPLKDATAVNSTRWSLFNRLKETGLPVETGSGGLTKFNRTRLNLPKTHWIDAACVGKVKTFKVLTNKPLLIQATGHGSRQMCRTDKFGFPSLYIPRFKFVKGFQTGDIIKAVVTQGKKIGTYIGRIAVRSTGSFNVSTSPGLIQGINYKYCRKIHRKDGYFYSF

SEQ ID NO: 3729 - protein, 551 aa, unidentified
MNDASLGGPCIGENRKETMSRVLIVDQQRRPLMPCTPARARLLLKQKKAAVLRRCPFTLILHESRPEAVVQPLRLKIDPGSKVSGLALVNDTSGEVVWAAEVTHRGEQVHKDLQKRAGVRRGRRQRHTWYRPARYLNRRRPKGWLPPSLESRVQNVETWTQRLIFWAPVGSLSYEAVRFDTQALQNPEIEGTQYQHGTLAGLEVKEYLLLKWGQRCAYCEKMGLPLQVEHILPKIRGGSNRVTNLTLACEQCNGKKGNQTAEEFGFPHLQAQAKAPLKDAAAVNSTRRVLHQRLMRTGLPIEASSGGHTKWNRGERDIAKTHWLDAANVGPSTPARLLFQHVRPWLIEANRRQDRQLCLVNALGFPRSKPKKKSPKHDFRTGDIVRAVVPAHLENPGIYVGRMAAKASGAEQRKGACGFLPIPSKGMGTCRIRSMANSHRQEKLGELIAVELSDLMRTRLKDPRVGFASITHVEVSGDFRHAKIFVSVMGSPEDQAATMKGLKHASGYLRHELAERITLRYMPELVFKLDTSIAEGAKVLELIRQNEQEQH

SEQ ID NO: 3730 - protein, 426 aa, unidentified; identical to SEQ ID NO: 3614

SEQ ID NO: 3731 - protein, 411 aa, unidentified
MVYVQDIDGKPMMPTTRHGKVRRLLKDNKAVVVNTCPFTIKLTYKTSDYKQEIVLGVDSGTKHVGLSATTKSKELYASEVILRSDVVDLLSTRRGLRGTRRSRLRYRKQRFNNRVKSKKDGWIAPSVRHKIDSHIRIISFVYSILPVSKLIVEVAQFDTQKIKNPEISGKEYQEGEQLGFWNVREYVLARDGHKCQHCKGKSKDPILNIHHIESRKIGGDSPSNLITLCETCHKEFHKGNIKLKVSRGKSLRDAAVMGIMKWKLYEELKSKYDNVSMTFGYITKYNRINHGIEKSHVSDAFVISRNFNSCRLGYYYKRKLVRRHNRQIHKMKILKGGIRKRNQAPFKVFGFRLFDKVMFQGEEHFIYARRLSGQFNIRDINGENKKDVSCKKLKYVSHGLVSVKTNLFLSQ

SEQ ID NO: 3732 - protein, 412 aa, unidentified; identical to SEQ ID NO: 3443

SEQ ID NO: 3733 - protein, 277 aa, unidentified
VETAEFDLQLLKAVAEGKPVPQGEDYQKGEMYGHYNVRQYVLWRDSYTCRICGMHGSVRKGVPLHVHHLESRRVGGDAPDNLVTLCTACHDKLHKGIIMAADIKKRKRRSTRDATFMGIMRMTLLRRLREQLPVPVVETRGYITKATRENLLVLPKSHANDALAIAHGPQGFRAEHLPNIRQADRLYTIRPVRHHNRQLLKATILKGGVRKTNQAEKYICGFRLYDKVLYNGIECFVWGRRTSGSFLLRQLNGEKVKDGVSYKHLKLLERSQSYLVA

SEQ ID NO: 3734 - protein, 425 aa, Nodularia sp.; identical to SEQ ID NO: 3165

SEQ ID NO: 3735 - protein, 423 aa, Arthrospira sp.
MSNHVFVLDTNRKPLTPCKPGVARSLLKAGKASVFRRYPFTIILNKEVDANPEPLELKLDPGSKVTGIALKQGNHIIFAAELQHRGQQIKEALLSRRQLRRSRRNRKTRYRPARFLNRTRSKGWLAPSLQHRVDTLMTWVHRFRRLAPVGCIAQELVRFDLQLMENPEISGVEYQQGELQGYEVREYLLFKWDRTCAYCGAQNVPLEVEQIQPRSKGGSDRVSNLTMACHSCNQAKGNGDIRDFLSSQPDVLSRLLRQAKSPLKDAAAVNSTRWALFKALKATGLPVTTGTGGQTKFNRLRLNLPKAHWLDAACVGPVESLEVLTSKPLLILAKGHGTRQMCGTNKYGFPNRHRSRRQIHKGFETGDMVTATVTAGKKIGSYLGRVLCRASGSFDITTASVRVAGISHKYCQPIHRKDGYAYA

SEQ ID NO: 3736 - protein, 442 aa, Anaerostipes sp.
MVTVQQSTHHLPFGRVFIRRNLFMVYVISQDGKPLMPCSDPIARLLLKQGKAKVKKREPFTIKLTYETTNHTQGLTLGVDTGSGTIGTAVSKDNGDIVYMSEVVARNDITDKMTQRAKYRRNRRNRKTRYRKARWLNRASSIKKDRFSPTMQSKLHSHVREIEYIQSILPVTEMVFETGQFDMQLMKNPSLANPKVRPWGYQKGANYGFENTKAMVLNRDNYTCQCCKGKHKDSKLEVHHIVFRSQGGSDEESNLLTLCHTCHKDLHSGKINPKLSGKVKGNLKYATQMNSIRKQLFRFYPNAIETFGYVTKANRLHLGVDKEHYYDACTIATQGNAFNVKSNLYKKKCVSDGDFQKTKGIRSEQPIVTDKICGFRKFDKVRYFGNDYFIKGRMSTGYAILMDIDGNKIDFSTMPRGYKTPKLSNCKRITARSTVMTQVKVV

SEQ ID NO: 3737 - protein, 447 aa, Marinobacter sp.
MSVFVLDRRKHPLMPCTERRARLLLDRGRAVVVRAYPFTIRLKDRIGGIIQPVRIKIDPGSKTTGIAVVRESGQKQHVLALMELAHRGRPISKSLEQRRAFRRRRRNQLRYRAPRFLNRTKPKGWLAPSLQHRVDTTRSLVNRLRALAPVTAISQELARFDTQKMENPEVSGVEYQQGTLLGYEVREYLLEKWGRECAYCTDKDTPLQIEHIDPKANGGSNRISNLTLACRPCNQEKDRQSLVSFFATSKRLKNHQARLDRILKQCKKPLRDASAVNSTRWALHQTLKQTGLPVEVGTGGRTTFNRQRLGISKTHALDAACVGEVEIVEGWDVPTLAIKATGRGSYKRTRLTKHGFPRGYLMRQKQVQGFQTGDMVRALVPTGTKTGTWVGRVAVRKTGSFNIQTNSGAIQGISHRHCVLTQRADGYGYHIQPNQPKEEGDRKNESR

SEQ ID NO: 3738 - protein, 412 aa, Deinococcus sp.
VPPGTRQGVAARKEGRRVQAVSVHDHSQGARRRRDAAPIQIKIDPGSKTTGIALVGDFKRGKKVLWGANLTHRGLAIKMKPEARRSLRSSRRSRKTRYRKARFLNRTKPKGWLAPSLMHRVFTVDPWVTRLAKWTPADQISIERVRFDMQTMENPEIQGTEYQQGTLHGYEVKGYLLHKWGHQCAYCREKDVPLEVERIQPRSKGGSDRVSNLTLACVPCNQKKGSKPVEQFLAKKPDLLKRILGQAKAPLRDAAAVNATRWKLYETLKVSGFPVEVGTGGRTKFNRTHQGFSKNHWIDAACVGESGERLRLPILKPFQIKCMGRGNRQACKTDEHGFPNKWRTRQKVFFGFQTGDMVRADVPSGKNAGHHTGRVSVRAKGSFALATKDGKKDGINHRFFSTIQRQDGYSYA

SEQ ID NO: 3739 - protein, 515 aa, unidentified; identical to SEQ ID NO: 3339

SEQ ID NO: 3740 - protein, 429 aa, Ktedonobacter sp.
MSNVFVIDTDYNPLDPVHPGYARRLLKQGKAAVYRRYPFTIVLKRVVEEPQMQPLRLKLDPGSKTTGIALVDDGNGKVVFAAELAHRGHAIKESLDDRRVVRRNRRNCKTRYRKPRWQNRRRKKGWLPPSLESRIANILTWVARLCRLAPITALSMELVKFDLQQIENPDITSVEYQQGTLQGYEVREYLLEKWERTCAYCSVQNVPLQVEHIHPRAKGGTSRISNLTLACEPCNKAKDTLDITVFLAKKPEVLKHILAQVKRPLKDASAVNATRWAVLQRLKALGLPVECGSGGLTKYNRTTRGLPKTHWLDAACVGKSTPVGLSHTGIVPLQIKAMGHESRQMCVVDKYGFPKQHKQRKKTFLGYQTGDMIKAMTPKGTFEGRIAIRHRPSFRLGKRDIHPKYLRCVHRADGYEYIQKGVRHAPPHD

SEQ ID NO: 3741 - protein, 512 aa, unidentified
MSTVYVLNKDGKTLMPTTRCGHVRHLLKKQKARVVTSNPFTIQLLYETDDVVQPLYLGIDPGRTNIGVAVVKADGTAVFTAHLETRNKGIPKLMKKRKDSRRARRTNGRRCRRQRRAKANGTISKKCVKQATAQNGSASKRAKKIGVIKRHLPGCEKEVLCIGIKNKEAKFNNRTRPAGWLTPTANQLLQTHINLIKKIQKLLPISDVVLEINKFAFMQLDNPNIQKWQYQQGPLYQKANLEEAVSEMQEHHCLFCKKKIDHYHHVVPQHKNGSNTIDNIVGLCTKHHDLVHKDTAWYEKLTKKKTGLNKKYGALSVLNQIIPALTKGLSSLFQKHFFVTTGKSTYDYRAAHGVSKDHWLDAYCIACSVLPNDVCDSNINSHVPYELKQFRRHDRRALHKENINRVYTLNGKKVATNRHKAIEQTTDSLEEFRQNHPDDVCKLKVKEHHPEYRNPKRNFPGCVFLVGKRTHVMQGTSGSHNGKADGYYDTNGNSYPSGKCKFVAKNKGIVFA

SEQ ID NO: 3742 - protein, 408 aa, unidentified; identical to SEQ ID NO: 3580

SEQ ID NO: 3743 - protein, 427 aa, Anabaena sp.
MSKVFVINTDKQPLNPIHSAQARQLLRNGKAAVFRRFPFTIILKESRPDFSVSPLRLKIDPGAKHTGIALINDTTGEVVFAAELKHRGFAIRDALTSRRQLRRFRRTRKTRYRQPRFLNRTRSLGWLTPSLQSRIENIKTWVKKLSRIVHFVAISQELVRFDMQLMANPDIQGREYQQGTLAGYETREYLLDKWDRQCAYCGVKDVPFQVEHIHPRAKGGSDSITNLTLSCEKCNTKKGTKDIKDFLKKDPSKLEKILKQAKRSLADAAAVNTTRFVLLFVLKATGLPVETGSGGLTKFNRSQQKLEKTHWIDAACVGQSTPILNIKGVKPLLITANGHGTRQSCRTDKHGFPNRYCSRTKFHFGFQTGDIVKSVVKTGKKVGEYIGRIATRATGSFNISTRNGLLQGISYKTCKTIHKKDGYSYSN

SEQ ID NO: 3744 - protein, 462 aa, unidentified
MSVLVIGRNGRALMPTNPRKARLLLKKKTASVVCRHPFTIQLLYKTGCATQEGCIGIDTGSQHIGVGITCGDRVILKDEHALRSSMEKRSLLATRTVMRRGRRYRKVRYRKPKWRHHTKRMYFEKANRRGQHWRKVKTTTQSPRQKGWLPPSLQSKCDHHFRIIDRYLKYLPDPITRNLVIEAGRFDMARMNDPTIHGEMYQRGPMYDAENLRAYIFARDNYQCACCKAKAGTTRKADGTTVKLVAHHILFRSRGATDNPKYIISVCDHCHTTKAHQPGGILYSWMENNKKVARGLRDATFMNILRKRLFARYPQAAFTYGNITAADRKQLRLPKSHANDAVAISLFGKEASTVKNICQTMHYKQIRKSKRSLHEAIPRKGRKNPNTKAVRNKKNTTQANGFKLWDSVLADGKKLFICSFTGTSAYLIDKNGCYISQPGKTYKQWPLSKLKRLHPNGNWLMA

SEQ ID NO: 3745 - protein, 464 aa, unidentified
MYVFVIGLDGTRLMPCKPRKARKLIEAHKAEIYKKQPFTIRLLYKTGCASQPITLGIDTGSQHIGIAVTSENKVLYQAEIELRSTMDKRSLMETRYSYRRSRRYRKTRYRSPKFRFHTKRTYSETLVKRKTTGIMTHWVKHTNSMSTNRPDGWLAPSMQSKVDHHIRWINRFLDVLPPDTKLRLEIARFDMARMKNPEVHNELYQHGPQYDYENLKAYVFDRDHYKCVVCKRKLGSKQPDGHSLKGMMHHITFRSKGATDNPDQLVTVCEYCHTPQAHKEGGVLWDLKEKHKSVQRGLRDATQMNIIRTRLVKAFPDAELTYGNITAADRKKMHLPKSHAGDAVAIAMKGEDVNICEPTVYIKQIRKKKRSLHEATPRKGRKKPNTQAVRNPKNTKSIGIYHIYDTVRFQNETGFISGFTGKSAYVQDFDGNYITMPGKSYKQINLSSLELVKHNNNWIQKTRN

SEQ ID NO: 3746 - protein, 431 aa, unidentified
MPDKVYVISRLGHPLMPCSPAKARHLLDDGKAKVVKRTPFTIKLLYGSTEYTQPVILGVDAGSKTIGLSASTTKEELFAAEVMPRNDVVENLSTRREFRRARRNRTTRYRKPRFNNRVHSKNNGWLAPSVEVKIQEHITSIKRVCAILPISKIVVETAEFDLQLLKAVQDGKPVPEGEDYQKGEMYGSYDVRQYVLWRDNYTCTCCGVKGTDKKPVKLHVHHFESRKHGGNAPDNYGTLCEDCHKKLHLGIITDISRKTRKRPSTRDAAFMGIMRKTLMQRLITGLSIPVAETKGYITKAAREEILKLPKTHTNDALAIAQGRHGFGIREQAYVKPTNRIYTVRPVRHHNRQLHKATMLKGGIRKLNQASKYIFGFRLYDKVLYQGGECFVWGRRRSGSFLLRTIDGTKVKDGVGYRNLTLLERSTNYLIA

SEQ ID NO: 3747 - protein, 406 aa, Geobacillus sp.
MPCSPRKARLLLKQKKAKVVRRTPFTIQLLYGSSGYKQPVSLGVDMGTRHVGISATTKKDVLFEAEAQLRTDIVELLAIRRQFRRSRRNRKTRYREARFLNRRKPEGWLPPSIQHKINSHIKLIDLVHNILPVTSVTIEVAAFDTQKLKNLNIRGVEYQQGEQMGFWNVREYVLYRDNHTCQYCKGKKKDPVLQVHHIESRKTGGDSPDNLITLCKTCHHEIHEKGLEHIFQRKRPPMRDASQMTAMRWAMFSRIREKYSHANITYGYITKCIRIANGLSKSHMVDARCISGNPLAKPSGTVYLLKFVRKNNRQLHKATILKGGKRKSNKAPRFVKGFQLFDKVVYERKECFIFGRRSSGYFDLRLLDGTKVHASASWKKLKRVEHASTLLIERRKGDSSPTFALA

SEQ ID NO: 3748 - protein, 551 aa, unidentified; identical to SEQ ID NO: 3229

SEQ ID NO: 3749 - protein, 427 aa, unidentified
MSNFVLVLDTNKKPLTPIHPGDARFLLNQQKAAVFRRFPFTIILKEPKSEVPTQPIELKIDPGSKTTGFALVQNNKVIWGMELQHRGLAIKESLETRKGVRRGRRSRHTRYRQARFLNRTKPQGWLAPSLSHRVLTINTWVKRLCNFAPITDIVQELARFDLQQLENPEISGFEYQQGELQGYEVREYLLNKWNRKCAYCTAENVPLQVEHIKPKAKGGTNRISNLCLACEKCNIKKGTQDIEKFLVKKPELLKQILSQAKCPLKDASAVNSTRWALFNKLKETGLPITTGSGGLTKFNRTRLGLSKTHWIDAACVGKVETLKILTTKILTVKSTGHSCRRFCRINKFGFPCTEPKKIFTHVSTGDFVKATLHKDRKNITSGKYVSRVKTPTKNGCEIVINGFRVEFSTMKDITRVHCSDGYSYSYV

SEQ ID NO: 3750 - protein, 324 aa, Parasutterella sp.
KTRYRAPRFDNRIRTKRKGWLAPSVENRINAHLSRIKAVLRLLPVTKITVETASFDLQLLKNPDISGKEYQEGEQLGFWNIREYVLCRDGHVCQHCYGRSKDPVLNVHHLKSRRMGGDSPGNLITLCETCHKALHRGEITLKAKRGQSFRAEAFVGIMRWEVHNRLRALHPGIEVSNTYGYRTKHARIANGIAKSHCADAFCIAGNLGAERLCEFFFQKQTRRNNRQIHKLSILKGGIRKRNQAPFEVKGFRLFDKVACQGEEGFIFGRRSSGFFDVRKLDGTRISAGISCKKLHLLEKRRTYLTEIRKEEALPPLPEGRGLRA

SEQ ID NO: 3751 - protein, 413 aa, unidentified
MTSYSFVLDANGKQLAPTKEPKAWFLIRKKRAALVSKYPMVIQLKKKIQENEICKDEIRCGIDDGGLHVGIALVQKCKSKNKVVFKGTIEQRNDVKHLMEVRRNYRRYHRYHKRYRQARFDNRKSSKRKGRIAPSILQKRQATIRVINRLNKWINITNYWLEDVSIDIRVLTDGYKSYSWQYQKSNRLDENIRKATILRDGGKCMECGKSNCRLEVHHIKPRRRNGSNTLDNLITLCESCHQKTEGQEELYMDRYFSLLKSSDNKNLNYAQHVMIGKMWLRKQLSGLGVLYLTSGGDTANKRIDWNIEKSHTNDAVCITDLQPDTCDIKEWAIKPMRRQSKAKTDHVLGIHHRDLVEYTFKNGETHRGYVTALYPDQKAINFQSQTKHCKKVNARKCKLLWKYSKIYWFENAS

SEQ ID NO: 3752 - protein, 458 aa, Nitrosococcus sp.
MGVFVLDKNRQPLMPCQPARARKLLREGKAAVFRCYPFTIILKERAGGTTQPISLTVDPGSKTTGISLNAQFNSGTVCIFAMQLEHRGRQIKESLDSRRGVRRSRRNRNTRYRQPRFLNRSRPKGWLPPSLLSRVDNTETWAERLVRLAPICSANVEIARFDLQLLENPDITGIEYQQGTLYGFELREYLLARHQHTCAYCHGLSKDSILEIEHILPKSLGGTDRVGNLVVACRTCNQHKNNLHPQAWADACRKRKNKLEQQRSLAMRAILKGHRPTLKDAAAVNATRYAVGRVIKQLIPDIRFCSGGQTKRNRTLQGYPKAHWIDAACVGEQGQQVRLECSGYLQVSAKGHGARQQCRMDKYGFPRTSAKAARTVQGFRTGDIVEARVPTGKKAGHYIGRVAVRSSGFFNITSQRIVTQGISYQYCRTLHRCDGYGYGYVIDTQIASTQQEDAGEAA

SEQ ID NO: 3753 - protein, 425 aa, Nodularia sp.; identical to SEQ ID NO: 3165

SEQ ID NO: 3754 - protein, 634 aa, Nocardiopsis sp.; identical to SEQ ID NO: 3305

SEQ ID NO: 3755 - protein, 406 aa, unidentified
MVYVQDIDGKPMMPTTRHGKVRRLLKDNKAVVVNTCPFTIKLTYKTSDYKQEIVLGVDAGTKHVGLSATTKSKELYSGEVILRNDVVELLSTRRESRRARRNRLRYRKPRFENRVKSKRLGWVAPSVRHKVDAHIRVIDNICSTLPISRIIVEIAQFDTQKIKNPDISGNEYQEGDQLGFWNVREYVLARDGHKCQHCKGKSKDPILNVHHIESRKTGGDSPSNLITLCETCHKEYHKGNIDLKVKRGKSLRDAAVMGIMKWKLYEELKSRYPNVSMTFGYITKYNRIKYGIEKSHTSDAFVISRNFNAKRIERQYLNRLIRRHNRQIHKMKILKGGKKKNNQAPFEVFGFRLFDKVLYNNEICFIYGRRKSGCFDIRDFDGKNSKNVTYKKLKLIRGKRYPIILK

SEQ ID NO: 3756 - protein, 419 aa, unidentified
MIYIRSKDGKALMPSERGGRIGYLLRHAKAHVVSRVPFTVQLDYESTTYTQEVSLGVDAGSKHIGVSASSEKKELLVAQVELRNDVVNLLSTRRELRRTRRNRKTRYRKARFDNRKKKDDWLAPSVEQKVDSHLKVIRLVHGLLPITNTTIEVAQFDAQKIKRPDIKGEEYQQGEQMCFWNVREYVFARDGHRCVHCKGKSKDPILNVHHLESRKTGGNSPSTLVTLCEPCHKAYHRGEFELKIKRGNSLRDAAVMNNMRWAVYKRANEEFGNVHLTYGYVTKHTRIENGIAKTHAADAFCIAKNINAMRLRTFYLCRCVPRHSRALHVANPKKGGIRRSTIASHKIGKSRFQRFDMVRWKGKESFIFGSTNGRPVLRDIEGYKMHENASVNIKTIKFLKRLRNNILVEEKDFRKLNML

SEQ ID NO: 3757 - protein, 518 aa, Nocardiopsis sp.
VLPQQLDLEFESADNPRIGGETGLERRRAPGAEHVRGETPGSAPAAGRVTPNQQVRESAGREARTIHPVVFALDKHGRPLQPTSPARARKLLKKRRAVVPRHTPFVIRLKDREAAESGIDGVELGIDPGSKHTGIAVFTEQKRSKRRGLYSIDLEHRSRRIRDKLTQRAAYRRSRRTRNLRYRAPRFLNRTRPDGWIAPSLRHRVDTTTAWAARLARWAPVRTVHVERVAFDTHAISAGRPLEGAEYQHGTLAGIEAREYLLTKWGRACAYRGITGVVLNIDHIQPRSRGGSDRISNLTLACIPCNKRKSNRPVEEFLEQKPQRLAGILAHAKAPLRDAAAVNTTKWALWRALEAVFPAVRTASGGRTKWNRARCGLPKTHTLDALCIGHMEAVDRHPRTVLAVQATGRGSYTRTRTDKYGFPRLRLPRHKTFFGFQTGDLGRATVPAGKKAGTHSGRIAVRASGSFNVTTAHGLAQGINHKHFRLLQRADGYAYTTQKEGGGFLPGLKARVSAPDIR

SEQ ID NO: 3758 - protein, 424 aa, Parasutterella sp.
LRVFVLNKRGKPLMPCSPAKARHLLKEKKAIVVRRTPFTIQLTIATGESKQPVSLGVDAGYKYVGLSASTEKAELYASEVELRQGITDLLSARRALRRARRNRKTRYRAPRFDNRIRTKRKGWLAPSVENRINAHLSRIETVLRMLPVTKITVETASFDMQLLKDPDISGKEYQEGEQLGFWNVREYVLFRDGHVCQHCHGRLKDPVLNVHHLKSRRTGGDSPGNLITLCETCHKALHRGEITLKAKRGQSFRAETFMGIMRREVLDRLKASHPKLEVQNTYGYRTKHARISNGIAKSHCADAFCIAGNLGAKRLGEFLFQKQTRRNNRQIHKLSILKGSLRKRNQAPFEVKGFRLFDKVAYQGEEGFIFGRRSSGFFDIRRLDGTRISAGINYKKLRLLEKRRTYLTEIRKEEARRPLPEGRG

SEQ ID NO: 3759 - protein, 414 aa, unidentified
MVYVINKQGQALMPTERFGKVRRLLKNSLAHVVCRIPFTIQLDYDTTDYTQPVSLGVDAGSKHIGISATTSEKEMYAADVELRNDIVDKLSTRREQRRTRRSRLRYRKARFNNRVSSKRKGWLAPSVENKIQTHLTVVEKIHKFLPITNIVVETASFDIQKINNPSISGSEYQQGEQLDFFNVREYVLFRDNHICQHCKGKSKDKVLNVHHIESRKTGGDSPNNLITLCETCHKAYHRGEFKLNIKRGKSFRDAVFMGIMRWGFYDRLKNIYPNVSMTFGYITKNARITNNLPKEHYVDARCISGNPTAKPLGYYFYQKKVRCQNRQIHKANFLKGGRKKLNQAPFLVKGFRLFDLVEYQKELYYIFGRRSNGSFDIRKLDGTKVNKGSINCKYLRLISTRKSILTEKRTQVNL

SEQ ID NO: 3760 - protein, 430 aa, unidentified
MVFVLNKSKKPLDMISHAKARILLKNRLAVVHKIYPFTIRLRDNSCVSNDRAYTVKIDPGSRYTGIAIVDDKNSVVMLAELEHRGYLIKRNLDKRRSLRQSRRERKTRYRPARFLNRTKPKGWLTPSIKSRADNVINFIKKYKNVLNIDKVMIENVIFDTAQMTSDDNLVGTAYQQGPLYNTNLREFIFSKTKGRCSYCGAKATEIDHIVPRAKGGSNSTYNLTPACSSCNKKKSNLSLKDFGKLVGKDFSHLKSKKLPKNAAIVQAAKNYMFKEISKLVSDTTTHDSWMTKYNRDELGLPKQHYYDALSVGEVPNKFNFLTDKALQISAKGRGSRQMCHVDKYGFPRTLAKTSKTARGFQTGDMVKAIVPTGSKAGKYFGKVAIRSRGCFNIETERGLVKDIWYKYCRLIQRGDGYSYNYKASARQSKN

SEQ ID NO: 3761 - protein, 343 aa, unidentified
  source 1..343: note = Archaeon sp.
MQKLLVELKNTSGDALQTPCSVSETLNREGTLSVPCTVLANNNSDEDLHYGKSGQDLRVPVINMRGEVLMPTRPRKARILLKQKKATVVQRSPFIIQLKYPIGENKQALTLGIDSGYTTIGFSAVTEKSELISGELTIRKRISKLLEQRSSYRQTRRSRLWHRKPRFNNRSIAKGWFTPSIQHKLNTHLRLIEKLKKILPITKVIVEVASFDTHNLQNPEIKGVEYQLGELQGYEVREYLLEKWKHKCAYYGKSNLPMEIEHIIPKIRGGTDRVSNLTLACHKCNQKKAKQTLKATAFMNIIRWRLVNTLKCDWTYGYITKHDRIEIGLKKSHVNDAFASGKN

SEQ ID NO: 3762 - protein, 411 aa, unidentified
MVYVQDIDGKPMMPTTRHGKVRRLLKDNKAVVVNTCPFTIKLTYKTSDYKQEIVLGVDSGTKHVGLSATTKSKELYASEVILRSDVVDLLSTRRGLRRTRRSRLRYRKQRFNNRVKSKKDGWIAPSVRHKIDSHVRIISFVYSILPVSKLIVEVAQFDTQKIKNPEISGKEYQEGEQLGFWNVREYVLARDGHKCQHCKGKSKDPILNIHHIESRKIGGDSPSNLITLCETCHKEFHKGNIKLKVSRGKSLRDAAVMGIMKWKLYEELKSRYDNVSMTFGYITKYNRINHGIEKSHVSDAFVISRNFNSCRLGYYYKRKLVRRHNRQIHKMKILKGGIRKRNQAPFKVFGFRLFDKVMFQGEEHFIYARRLSGQFNIRDINGENKKDVSCKKLKYVSHGLVSVKTNLFLSQ

SEQ ID NO: 3763 - protein, 429 aa, Ktedonobacter sp.; identical to SEQ ID NO: 3740

SEQ ID NO: 3764 - protein, 292 aa, unidentified
LSRIEAVLRLLPVTKITVETASFDLQLLKNPDISGKEYQEGEQLGFWNIREYVLCRDGHVCQHCYGRSKDPVLNVHHLESRRTGGDSPGNLITLCETCHKALHRGEITLKAKRGQSFRAEAFMGIMRSEVLNRLKASHPELEVNNTYGYRTKHARIANDIAKSHCADAFCIAGNLGAERLGEFFFQKQTRRNNRQIHKLSILKGGIRKRNQAPFEVKGFRLFDKVACQGEEGFIFGRRSSGFFDVRKLDGTRISAGISCKKLHLLEKRRTYLTEIRKEEALPPLPEGRGLRA

SEQ ID NO: 3765 - protein, 574 aa, Nocardiopsis sp.; identical to SEQ ID NO: 3358

SEQ ID NO: 3766 - protein, 421 aa, unidentified; identical to SEQ ID NO: 3386

SEQ ID NO: 3767 - protein, 472 aa, Cupriavidus sp.
MSVFVLDKHGKPLMPCTEKRARLLLERRRARVHRVVPAVIRLVDRTVDDCEFQPLRIKLDPGSKMTGGALVRDTELACSVSGEIRRGAAVLNLFELVHRGGQISEGLTARRSMRRRRRSANLRYRAPRFLNRTRPAGWLAPSLQHRVDTTMAWVQRIRRWAPVNGVSSELVRFDMQAMENPEISGVEYQQGTLAGYEVREYLLEKWRRTCIYCDATDRPLQIEHLTARAKGGTNRIGNLGLACGPCNQDKGAKDIRQYVDDPKRLARILATASRPLTDAAAVNATRWALANALRATGLPLELASGGRTKFNRAAYTIPKTHALDAACVGDVNAITGWQRPTLEVKATGRGSYQRTRLTASGFPRGYLMRQKQVKGFQTGDRVHAVVPSGKKAGTYAGRVAVRASGSFNIQTPNGVVQGISHRHCSLVQRADGYGYHFRTKDSIYKGEAGEGRAAHAALSIPVLKDGVSRASR

SEQ ID NO: 3768 - protein, 616 aa, Salipiger sp.
VPPQHGPLLEAPSVDKPGQARNGADACAGGQHVREETVKRRRHRRGQPSSASGVSRVFVLARNGKPLMPTRPARARRLLKDGRAVVHKTYPFTIRLKDRAEGDTQDVELRVDPGSKTTGMALVRKDEAADDVLHLSEVTHRGGAIRKKMDQRRGHRRRRRSANLRYRKKRFDNRRRAPGWLPPSLQSRVDNVASWAARYRKLVPVTSIAVERVRFDMQMLDNPEVSGAEYQQGTLAGYEVREYLLEKWDRRCAYCNARHVPLQIEHIHPRSRGGSNRVSNLALACEPCNQAKGNKPVEAFLAGKPARLARIRAQAKRPLRDAAAVNATRNATWHALRATGLPVTTATGGRTKYNRAALGIPKTHSLDAACVGEVNSLTGWDQPVLRITAMGRGSHARTRLDRHGFPRGYLMSEKSIHGVQTGDIVKASVPNGRKAGTYTGRVAIRRSGSFNIQTRTGTVQGISHRHCRILQRNNGYGYHIATGNFRNGHWLVKSRVSHVAGFMLPFVVGARPPHHAIQVNPERLSEKRAPRPRTCHEQPAGVIEVRVPATGPLRTGSPVPAQTFSDGLSRSGRPPCRSGTSSRRSTCDGERWPTSAPRRRLPGFALAAVQLASPTP

SEQ ID NO: 3769 - protein, 512 aa, unidentified
MPTVYVLNKDGKPLMPTTRCMHVRHLLKNGKARVVKSKPFTIQLLYETDDVVQPLYLGIDPGRTNIGVAVVKADGAAVFTAHLETRNKEVPKLMKKRKESRCARRTNGRRCRRQRRAKTNGTISKKCVKQTTAQNGSVSKRAKEIGVIKRHLPGCEKDVLCIGIKNKEAKFTNRARPEGWLTPTANQLLQTHINLVKKIQKFLPISDVVLEVNKFAFMQLDNPNIQKWQYQQGPLYQKGSLENAVSEMQEHHCLFCEKPIEHYHHVVPKSENGSNTIANIVGLCTEHHNLVHKDATWQKKLVKEKVGLVKKYSALSVLNQIIPALTKEMNSLFPKHFFVTNGKSTYDYRTAHGVSKDHWLDAYCIACSVLPNDVCDSNINSHVPYELKQFRRHDRRVLHKANMSRVYTLNGKTVATNRHKAIKQTTDSLEEFRQSHPGDVCKLKVKEHHPAYRNLNRNYPGSVFLVDGQVHVMQGVSGSHNGKADGYYNTNGNAYPYYKCKFVVKNEGIVFA

SEQ ID NO: 3770 - protein, 431 aa, Klebsiella sp.; identical to SEQ ID NO: 2435

SEQ ID NO: 3771 - protein, 425 aa, Planktothrix sp.; identical to SEQ ID NO: 3728

SEQ ID NO: 3772 - protein, 388 aa, unidentified
MSRVLIVDQQRRPLMPCTPARARLLLKQKKAAVLRRCPFTLILHESRPEAVVQPLRLKIDPGSKVSGLALVNDTSGEVVWAAEVTHRGEQVHKDLQKRAGVRRGRRQRHTWYRPARYLNRRRPKGWLPPSLESRVQNVETWTQRLIFWAPVGSLSYEAVRFDTQALQNPEIEGTQYQHGTLAGLEVKEYLLLKWGQRCAYCEKMGLPLQVEHILPKIRGGSNRVTNLTLACEQCNGKKGNQTAEEFGFPHLQAQAKAPLKDAAAVNSTRRVLHQRLMRTGLPIEASSGGHTKWNRGERDIAKTHWLDAANVGPSTPARLLFQHVRPWLIEANRRQDRQLCLVNALGFPRSKPKKKSPKHDFRTGDIVRAVVPAHLENPGIYVGRMAAK

SEQ ID NO: 3773 - protein, 420 aa, unidentified
MVYVISKDNKPLMPCENVVARLLLKQKKAKVKRKTPFTIKLLYDTTEYVQDCTLGVDTGSTHVGTSVINSKNEVLYMSDIEIRNDIADKMSQRAKYRRNRRNRKTRYRKARWLNRKDSIKKDRFSPTMRSKLDSHMKEIEFIKSILPISRLVMETATFDPHLLKNPSLHNPVYKKWGYQQGGNYGFENTKAKVLNRDNYTCQHCKGRRKDSKLEVHHIIYRSNGGSDEEDNLITLCHTCHKGVHSKSIKLKLTGKRKGQLKHATQMNSIRIQLLKLYSDVIETFGYITKANRLLLEIDKSHHLDACVIASGGNKFIIRQNILYRKKCVSDGDFQQTKGIRSQQAIPTGKIQGFRKFDKVRYLGKEYFIKGRMSSGYAILMDIEGNKVDFSSMSEGWKTPKLSNCKRISARKTWIVDSLVV

SEQ ID NO: 3774 - protein, 430 aa, unidentified; identical to SEQ ID NO: 3527

SEQ ID NO: 3775 - protein, 425 aa, Nodularia sp.; identical to SEQ ID NO: 3165

SEQ ID NO: 3776 - protein, 512 aa, unidentified
MSTVYVLNKDGKPLMPTTRCGHVRHLLKEQKARVVTSKPFTIQLLYETDDVVQPLYLGIDPGRTNIGVAVVKTDGTAVFTAHLETRNKEIPKLMQGRKKARRTRRTNGRRCRRQRRAKANGTISKKCVKQTTAQNGSVSKRAKEIGVIKRHLPGCEKDVLCVGIKNKEAKFSNRTRQEGWLTPTANQLLQTHINLIKKIRKFLPISNVVLEINKFAFMRLDNPNIQKWQYRQGPLYQKASLEEAVSEMQEHHCLFCKKPIAHYHHVVPQSENGSNTIGNIVGLCTKHHDLVHKDTTWQKKLAKKKTGLNKKYGALSVLNQIIPALTKELSSLFPKHFFATNGKSTYDYRAAHSVSKDHWLDAYCIACSVLANDVCDSNINSRVPYELKQFRRHDRRALNNENMSRVYTLNGKVVATNRHKATKQTTDSLEEFRQNHSDDVCKLKVKEHHPTYRNMNRNYPGSVFLIGKQVHVMQGIAGSKNGEATTYKDTNANSIAAGKCKFVAKNSGILFV

SEQ ID NO: 3777 - protein, 471 aa, Caldicellulosiruptor sp.; identical to SEQ ID NO: 3268

SEQ ID NO: 3778 - protein, 460 aa, unidentified
MVAVVDLFGKPLMPTNEYRARKLLKQKKAKIFGYRPFTIQLTERKSAEIQPIELCMDTGYIHIGISAKSERHEYLGMQIDTLTDEKLKRDDKRQYRRQRRNRKRYRAPRFDNRRRKEGWIAPSLEHKKEIHIDAIQRICKVMPITDITLEIGNFDTHVLKAVEEGKPLPQGSDYQHGERYGIATLREAVFLRDGYKCQCCEKSVKDGAILHVHHIKYRSQGGTNRMSNLITVCDKCHTPKNHKPGGKLWNWKPKLAEFKGASYMTSIRWTLYNEVTALLPNSSVHITYGAKTKESRRKLDIKKSHVNDAYVMGLFCPKHRTKPVYFKKKRRNNRVLEKFYDAKYIDSRDGKKRSGQELFNGRINRNHRKDSENLHLYRKQKVTKGKRSIRNKHYPIQPHDILLYQKKKYENAGCHNNGSRVILLPEKKSVALKQLTIYQYAGGYYRVPYESNKKEERTGS

SEQ ID NO: 3779 - protein, 415 aa, Bacillus sp.; identical to SEQ ID NO: 2431

SEQ ID NO: 3780 - protein, 400 aa, unidentified
AKIKKRTPFTIQLVYGSSGYTQEVILGVDAGSKTIGVSALTKKEELFAANVIPRNDVVDLLSTRRESRRARRNRKTRYRKPRFDNRVRSKHKGWLAPSVEVKIQEHITSIKRACRILPVSKVVVETAEFDLQLLKAIADGKPVPQGEDYQKGEMYGHYNVRQYVLWRDDYTCQCCGAHATKKKEVRLHVHHLESRKTGGDASGNLVTLCESCHEKLHKGLITEDDFKKRKRKSTRDATFMGIMRATLLQRLRSELPIPVVETRGYITKATREKLLVLPKSHTNDALAIAQGKHGFNVGYLPGIAQIDKIYTIRPVRHHNRQLHKATILKGGIRKSNQAEKYVFGYRLFDKVQFNGQDCFIWGRRTTGIFTIKTINGKMIKDGISFKKLKLVEKSTSYLIA

SEQ ID NO: 3781 - protein, 493 aa, unidentified
MAAVYVISASGKPLMPTTRCGHIRGLLNAGKARVVEREPFTIQLKYETPDVTQPLYLGIDPGRTNVGSAVVREDGECVFTAQLTTRNKDVPKLMKARKQFRMAHRRLKRRCKRQRRAKAAETLSQKGEFQRLLPGYEEPILCKGIRNKEARFNNRQRPAGWLTPTANHLLLTHLNMVKKLQKLLPITDVVLEVNRFAFMAMENPSIRRWQYQQGPLYGKGSVEDAVYAQQDGHCLFCGKPIAHYNHVVPQHKNGSETLENRVGLCNEHHDLVHKDRAWDAKMKETKAGLNKKYHALSVLNQIIPALTEQLTAMFPQHAFVTTGKDTADFREDYGIAKEHHLDAYCIACSVLAEPTKVAAPTGKPHRLMQFRRHDRQVCHKENIKRVYLSEGKAVATNRHKAIEQKDDSLEEFRKTHTQQEVSALTVKDHQPVYKDMRRFMPGGVFLFNGKVHTLQRSHGRYKGMPFYYIDTDGSKNHAKGCIFLQQNCGLRWV

SEQ ID NO: 3782 - protein, 441 aa, Thioploca sp.
MAVFVLDRQKKPLMPCSEKRARRLLERGRAVVVKRYPFAIRLKDRVGGELQPIRVKLDPGSKQTGVAIVRESKNIDTETGEITRKINILSLLHLHHRGLAISANLTSRRAMRKRRRNNLRYREARFDNRTKPTGWLAPSLQHRVDTAISWIKKLQRVAPVTALSQELVRFDLQQLESPEISGIEYQQGELQGYEVRKYLLDKWDRKCAYCGVEQVPLEIEHIVPKSAGGSHQVSNLTLACIPCNQKKGSQALDIFLAKQPQLLQKIKAQAQQPLKDAAAVNSTRWALANALKTTGNPVELASGGRTQFNRIRLDIPKSHALDAACVGIVDTVQDWNKPTLEIKCTGRGSYQRTRLDKFGFPRGYLMRSKSAFGFQTGDMVKAVVTKGKKVGEYVGRVAIRASGSFNITTLIETIQGISHKYCQMISRNDGYGYSLQPKIAN

SEQ ID NO: 3783 - protein, 424 aa, unidentified; identical to SEQ ID NO: 3232

SEQ ID NO: 3784 - protein, 424 aa, unidentified; identical to SEQ ID NO: 3232

SEQ ID NO: 3785 - protein, 469 aa, unidentified
LAVFVLDRSGKALMPCSEKRARLLLARGRARVHRVVPFCIRLIDRQHASSAMQSLRLKLDPGSKTTGIALVRDVTQPDASIGEIQRGAAVLNLFELIHRGRQISETLTARRSMRQRRRGNLRYRAPRFLNRTRPTGWLAPSMQHRVDTTMAWVKRLMRWAPVCAVTSELVRFDLQALENPEIEGVEYQQGALAGYEVREYLLAKWGRACAYCDAENTPLQIEHIHARARGGTNRVSNLTLACAPCNTKKAARALPDFLTRDPKRAARILAQAKRPLKDAAAVNATRWQLVQSLRATGLPVELASGGRTKFNRTRFDIPKTHALDALCVGEVEWVRTWQRPTQTVKCTGRGSYQRTRLDKYGFPRGYLTRSRRVHGFQTGDLVRADVPTGKKAGIHVGRVAVRATGSFNIQGDGAVVQGIAHRHCRLVQRSDGYGYSRIATSKGDARTGTASLSALSLPAVNDGVSRATG

SEQ ID NO: 3786 - protein, 458 aa, Halomonas sp.
MAVFVWDKQKQPLMPCCEKRARLLLERGRAVVHKRYPFTIRLKDRVGGETQPLRLGLDPGSKTTGLALMRESEGEQRHVLCLFDLVHRGFQIKKALEQRRGFRRRRRSANLRYRAPRFDNRTRKAGWQPPSLQHRVDTVMAWVDRLSRLTPITAISQELVRFDTQQLDNPEISGVEYQQGTLLGYEVREYLLEKWGRECAYCGTADTPLEIEHVVPRSRGGSNRVSNLTLSCHNCNQAKNALPLADFFARDKGLKKRLKANGLSADTRLERVQRELKRPLRDASAVNATRWALFNALKATGLPVTVASGGRTKFNRNLLDIPKTHALDAACVGAFETLHDWTVPTLTIKATGRGSYQRTRLTKHGFPRGVLMRQKQVHGFQTGDMVRAVVPAGKKTGTHTGRVAVRKTGSFNIQTEHGAVQGISHKHCTVIQRGDGYGYHVTPTIHQPIKGGAGHAVA

SEQ ID NO: 3787 - protein, 427 aa, Parasutterella sp.
LKVFVLNKRGKPLMPCSPAKARLLLKEKKAIVVRRTPFTIQLTIATGESKQPVSLGVDAGYKHVGLSASTEKAELYESEVELRQDVSDLLSARRALRQSRRNRKTRYRAPRFDNRIRTKRKGWLAPSVENRINAHLSRVETVIRLLPVTKITVETTSFDMQLLKNSDIAGKEYQEGEQLGFWNVREYVLFRDGHVCQHCHGRSKDPVLNVHHLESRRTGGNSPGNLITLCETCHKALHRGEIKLKAKRGHSFRAQAFMGIMRWEVLNRLKASHPELEVNNTYGYRTKHARIANDIAKSHCADAFCIAGNLGAERLGEFLFQKQTRRNNRQIHKLSILKGGIRKRNQVPFEVKGFRLFDKVAYKGEEGFIFGRRSSGYFDVRKLDGTHISAGISYKKLRLLEKRQTYLTEIRKEEALPPLPEGRGLRA

SEQ ID NO: 3788 - protein, 430 aa, Clostridium sp.
LRVYVKNQRNQPLMPTTQRKARIFLKQKKAKIITYEPFTIQLLYATGETTQETILGVDAGNRTIGLSATTYKCELFSAELKLRTDIVELLATKRQFRRSRRSRKTRYRQPRFENRKKTEGWLAPSIENKIGTHLKVVNKVHSLLPISKIIIEVASFDIQKIKNPDIQGEKYQQGNQLGFWNVREYVIFRDGHKCQGKKNCKGKILNVHHIESRKTGGDSPDNLITLCEDCHKDYHSGKLKLNLKRGQSFRDAAFMGIMRWSFYNKLKELYSNVNLTYGYITKNTRITNNLPKEHRIDALCITGNSTVKRLDNWYLIKQVRKKKRSLHEAIARKGRKEPNITSKRNSKNTKEIISKGKKWCLFDKVKIGSNTGFVSGFTGNMVYVQDIEGNYLQVSPKYKQISTDNVSLISRNNNWIYKEVALGTANHPHL

SEQ ID NO: 3789 - protein, 438 aa, Geobacillus sp.
MPCSPRKARLLLKQKKAKVVRRTPFTIQLLYGSSGYKQPVSLGVDMGTRHVGISATTKKDVLFEAEAQLRTDIVELLAIRRQFRRSRRNRKTRYREARFLNRRKPEGWLPPSIQHKINSHIKLIDLVHNILPVTSVTIEVAAFDTQKLKNLNIRGVEYQQGEQMGFWNVREYVLYRDNHTCQYCKGKKKDPVLQVHHIESRKTGGDSPDNLITLCKTCHHEIHEKGLEHIFQRKRPPMRDASQMTAMRWAMFSRIREKYSHANITYGYITKCIRIANGLSKSHMVDARCISGNPLAKPSGTVYLLKFVRKNNRQLHKATILKGGKRKSNKAPRFVKGFQLFDKVVYERKECFIFGRRSSGYFDLRLLDGTKVHASASWKKLKRVEHASTLLIERSLDRSTFLEGGRAIPPRLSLSLRSRGLLAKEDENSKMIDNYANS

SEQ ID NO: 3790 - protein, 347 aa, Ktedonobacter sp.
MSNVFVIDSDYKPLHPVHPARARLLLTQGKATVYRRYPFTIVLKRVAEQPEAPPLRLKIDPGSKTTGIAIVNDANGKVVFAAELEHRGHAIKASLENRRAIRHSRRQRKTRYRKPRYKNRKRKQGWLPPSLESRLANILTWVARLCRSAPIAAVSQELVKFDLQLLDNPDITGIEYQQGTLQGYEVREFLLEKWGRTCAYCCKQDIPLRIEHIHPRANGGTHRISNLTLACERCNRTKGTQDIAVFLAKKPDVLTRILAQVKKPLKDASAVNATRWALLERLKAFGLPVECGSGGLTKYNRTTRGLPKTHWVDAACVGKSTPVALSYKGVGPLCVTAKGMDRGKCAG

SEQ ID NO: 3791 - protein, 442 aa, unidentified
MSTSVFVLDKKHRPLMPCRPARARRLLRAGRARVVKRFPFVIRLVDRTVEQSEVQPVLIKLDPGSRETGAAVVRDDEKKRHHALAFFVIKHRGGAIRDALKARSAFRRRRRSQNFRCRSPRFLNRVKPKGWLPPSLRHRVETTLSFVRRMCRYLPVSGIATELVKFDSQKLQNPEVSGVKYQQGTLFEYEVREYLLEKFGRKCVYCGAEGVPLNIDHVVPRAKGGSNRVSNLVLACVSCNQKKGARSLEDFLKGKPEVLARVRRELKTPLRDAAAVNATRWVLFNELKATGLPVETGSGALTKLNRHAFGVEKEHWLDALCVGRLNGVVTRKGLNALEIRCMGRGSRQRTRLTKYGFPRGYLMRQKCVHGFATGDMVEANVPKGKKAGLWRGRVAVRVSGSFNIQTPKGVIQGVGWKHCRLISHNDGYGYAWLGHAPHSSPA

SEQ ID NO: 3792 - protein, 408 aa, unidentified
FVLDANNKQLTPTKEQKAWFLIRKKRATLVSKYPMVIQLKKKIPDKEICKDEVRCGIDDGGLHVGVALVQKCQTRNKVVFKGVIEQRNDVKHLIDVRCGYRRYHRYHKRYRSARFNNRNSSKREERIAPSILQKRQATIRVINQLNKWINITNYWLEDVAIDIRALTDGYKPYRWQYQKSNRLDENIRKAVILRDGCKCMECGKSNCRLEVHHIKPRRLKGSSTLDNLITLCTKCHQKTESVEELYMDRYFALLNSSDNKNLNYAQHVMIGKKWLREQLSNLGMLYLTNGGDTANKRIDWDIAKSHSNDAICITDLRPDTCEIKEWAIKPMRRQSKAKTDNVLGIKHRDLVEYTFRNGKTHRGYVTALYPEQNAINFQSPTKHCKKVNAKKCKVLWKYSKIYWLDNVG

SEQ ID NO: 3793 - protein, 551 aa, unidentified; identical to SEQ ID NO: 3262

SEQ ID NO: 3794 - protein, 437 aa, Ktedonobacter sp.; identical to SEQ ID NO: 2920

SEQ ID NO: 3795 - protein, 406 aa, unidentified
MVYVQDIYGRPLMPTTRHGKVRRLLKSKKATVVNLCPFTIRLLYDTTGYKQEITLGVDTGTKHVGLSATTKSKELYASEAILRSDVVDLLSTRRELRKIRRYRLRYRKPRFMNRIKSKKRGWIAPSIRQKIDSHIRIIGFVYSILPVSKLIIEVAQFDTQKIKNPEISGKEYQEGEQLGFWNVREYVLARDEHKCQHCKGKSKDPVLNVHHIESRKTGGDSPSNLITLCKTCHKEFHKGNIKLKVNRGESLRDAAVMSIMKWELYDELKSLYPNVKMTFGYITKYNRINHGIEKSHVSDAFVISRNFDSERLGYYYKRKLVRRHNRQIHKMKAPKGGNKRMNQSPFKVFGFRLFDKVMFQGKERFIYARRLRGIFNIRDINGENKKDISYKKLEYVSHGLISIVAG

SEQ ID NO: 3796 - protein, 435 aa, Streptosporangium sp.
VFVLDKHGQPLQPTIPAYARKLLRSGRAVVHRHTPFVIRLKDRTAADSTVEGVHVGIDPGSRHTGIAVFTEHGGSRTGRYALQLDHRGAAIGDKVASRAALRRGRRSRNLRYRAPRFDNRTKPKGWLAPSLKHRVDTTMSWAGRLRRWAPVSAVHVERVAFDTHALSAGRPLEGAQYQQGTLLGYEVREYLLAKWGRACAYCAISGTPLNIDHIHPRSRGGSDRISNLTMACIPCNQTKNATPVEEFLKARPTLLAKILKQAKAPLRDAAAVNATRWALWRALEATGLPVATASGGRTKWNRSRTGAAKSHALDALHVGHLETVIGWPSTVLVVTATGRGSYARTTPDRYGFPRLVRPRIKLHHGFQTGDLVRANVPTGKKAGVHVGRVLVRSSGSFDITTRHGRVAGISHKHVRHLQRADGYGYTTQKEADRND

SEQ ID NO: 3797 - protein, 459 aa, Ktedonobacter sp.
VSNVFVIDSDYTPLNPVHPGHARRLLRQGKAAVFRRYPFTLVLKRIVEQPEVQPLRLKLDPGSKTTGIALVNDANGKIVFAAELEHRGHAIKDSLDDRRAVRRSRRHRKTRYRKPRFHNRRKKKGWLPPSLESRLANILTWVARLCRYAPIAAISQELVKFDMQLMENPDIAGVEYQQGTLQGYEVREYLLFKWERKCAYCGKQDVPLQVEHIQARANDGTNRVSNLTLACEPCNTAKGTQDIEVFLKKKPDVLKRILAQIKKPLKDASAVNATRFALLERLKAVDLPVECGSGGLTKFNRTMRKLPKTHWLDAACVGTSTPVALLNKGTVPLHITATGHGRRQICSTDKYGFPKQHKERKKKFLGYQTGDMVKAITPKGTFEGRIAIRHRPSFRLGKADIHPKYMRCVHRSDGYEYRQKGVRHAPPPWLKPGAPAWRDFKGGQWRLRFHALPGRPSAL

SEQ ID NO: 3798 - protein, 401 aa, Sharpea sp.
MSSARYWHEEKFSERKVSEMTNYAFVLDADNKQLAPTKEQKAWFLIRKKRATLVSKYPMVIQLKKKIQDKEICKDEIRCGIDDGGLHVGVALVQKCQTRNKVIFKGTIEQRNDVKHLMDVRRGFRRYYRYHKRYRPARFNNRKFSKRKERVAPSILQKRQATVRVISQLNKWINITSYWLEDVAIDIRALTDGYKPYQWQYQKSNRLDENIRKAVILRDGCRCMECGKSNCRLEVHHIKPRRLKGSNTLGNLITLCTECHQKTEDAEELYMNRYFALLNSSDNKNFDYAQHVMIGKKWLREQLSNLGMLHLTNGGDTANKRIDWGIAKSHSNDAICITDLQPDTCEIKEWVIKPMRRQSKAKTDNVLGIKHRDLVEYTFRNGETHRGYVTALYPEQNALNF

SEQ ID NO: 3799 - protein, 424 aa, Spirulina sp.
MSNFVFVLDTKKQMLNPVHPGEARCLLSQGKAAVCRQYPFTIMLKQEAESEIQPLQLKIDPGSKTTGLAILNGSTVVWAAELTHRGQGIKDALLSRSQLRRGRRNRKTRYRAPRFLNRTRAEGWLAPSLMHRVKTTLTWVNRLCRYAPIAGISQELVRFDTQVIQNPEMSGTEYQQGTLAGDEVREYLLEKWGRKCAYCKAENTPLQIEHIQPRSKGGSDRVSNLTLACEPCNRAKSNLPVQEFLSGKPDRLKRILAQAKAPLKDAAAVNSTRWALFNALKETGLPVSTGSGGQTQYNRTRLNLPKTHWLDAACVGMVNRLEILTTQPLLIKATGHGTRQMCGTDRYGFPSRHRSRVQIHKGFQTGDIVVATVTAGQKIGSYLGRVLCRASGSFDIATKIGRVAGISHKYCKSIHKRDGYAYTL

SEQ ID NO: 3800 - protein, 464 aa, unidentified; identical to SEQ ID NO: 3503

SEQ ID NO: 3801 - protein, 431 aa, Klebsiella sp.
MNRVFVLGKTGQALMPCHPARARQLLQSKKARVKRLYPFTIQLTQRSDGYIQPVELKFDPGSKQTGVGLVLHGKNRLSAIYAAVLTHRGQEIKSNLDSRRMIRRARRNRKTRYRQERFLNRVRSKHKGWLAPSVHSRVDNIVEWSKRFMRLSHVDFITVESVKFDMQKMESAAVEGLEYQRGTLFDYEVKEYLLEKYHYSCVYCGIKNVPFEKEHVVPRSRGGSNRISNLVLSCRSCNEKKDNLPIEEFLKDNPALLKKIKAQLKSSLKDAAAVNITRKQIVKELSDLNVPVLTGIGAETKYNRVSQGYGKEHYIDALCAGTTGTKVYIPSKLKPLLIKKERRNNRQMCLVDKYGFPRGKAKGSKIVHGFKTGDIVKAVVLKGKKKGVYKGKVAVRSSGSFNINVKQGRIEGIGWKNCVMLHRFDGYSYTY

SEQ ID NO: 3802 - protein, 414 aa, unidentified
MPCSPAKARLLLKEKKAIVVRRTPFTIQLTIATGETKQPVSLGVDAGYKHVGLSASTEKAELYASEVELRQDITDLLSARRELRRARRNRKTRYRAPRFDNRIRTKRKGWLAPSVENRINAHLSRIEAVLRLLPVTKITVETASFDMQLLKNPDISGKEYQEGEQLGFWNVREYVLFRDGHVCQHCHGRSKDPVLNVHHLESRRTGGDSPGNLITLCETCHKALHRGEITLKAKRGQSFRAEAFMGIMRWEVLNRLKASHPELEVNNTYGYRTKHARIANDIAKSHCADAFCIAGNLGAERLGEFFFQKQTRRNNRQIHKLSILKGGIRKRNQAPFEVNGFRLFDKVACQGEEGFIFGRRSSGFFDVRKLDGTRISAGISCKKLHLLEKRRTYLTEIRKEEALLALPEGRSLRT

SEQ ID NO: 3803 - protein, 456 aa, Halomonas sp.
MAVFVLDKHKRPLMPCSEKRARLLLARGRAVVHKRYPFTIRLKDRVSGETQPLRLGIDPGSKTTGLALMREPDSQQRHVLCLFELIHRGFQIKKALQQRAAFRRRRRSANLRYRAPRFNNRTKPKGWLAPSLQHRVDTVTAWVKRLSRLAPVTAISQELVRFDTQKLENPEISGVEYQQGTLLGYEVREYLLEKWERECAYCGTGDTPLEIEHVVPRSRGGSNRVSNLTLSCHPCNAEKDSQTLTDFFATNKGLKKRLKANSLSADAQLERVQRQLKQPMRDASAVNATRWALFSALKTTDLPVAVSSGGRTKYNRQRLNIPKTHALDAACVGAFEKLHDWTVPTLTIKAMGRGSYQRTRLTKHGFPRGYLMRQKQVHGFQTGDMVRAIVPTGKKAGTYTGRVAIRKTGSFNVQAEHGAVQGISHKYCTLIQRSDGYGYYITPFTSLTGGAGQAVA

SEQ ID NO: 3804 - protein, 420 aa, unidentified
MQYVYVLSKHGEPLMPCSPGKARLLLKEKKARVVRRTPFTIKLLYRSAGYKQPITLGVDAGSKHVGLSASTEKRELYREEFTPRNDVVKLLSKRKQYRRSRRNRKTRYRAPRFNNRVHSKHKGWLAPSVEVKIQEHITVIKLICRILPISLVRVETAEFDTQRLKAMLEGKSLPVGTDYQLGEMYDEYNVRQYVLKRDNYTCQCCGAHTTKKKTVKLHVHHLEGRQVGGNAPNNLITLCVDCHKALHAGKVKLDGKKRGKSFKDAAFMGIMRKTLMARLSKELPIPVQGTYGYITKLLREQNDIKKSHVNDARCISKHPLAEPCSVCYRTKAIRHHNRQTHKANFSKKGIRERNQTPYVVEGYRLWDKVLYKGQECFISGRRTSGSFALKRLDGTSISESVTFKKLRLLEPATNYLIERM

SEQ ID NO: 3805 - protein, 411 aa, unidentified
MVYVQDIDGKPMMPTTRHGKVRRLLKDNKAVVVNTCPFTIKLTYKTSDYKQEIVLGVDSGTKHVGLSATTKSKELYASEVILRSDVVDLLSTRRGLRRTRRSRLRYRKQRFNNRVKSKKDGWIAPSVRHKIDSHIRIISFVYSILPVSKLIVEVAQFDTQKIKNPEISGKEYQEGEQLGFWNVREYVLARDGHKCQHCKGRSKDPILNIHHIESRKIGGDSPSNLITLCETCHKEFHKGNIKLKVSRGKSLRDAAVMGIMKWKLYEELKSKYDNVSMTFGYITKYNRINHGIEKSHVSDAFVISRNFNSCRLGYYYKRKLVRRHNRQIHKMKILKGGIRKRNQAPFKVFGFRLFDKVMFQGEEHFIYARRLSGQFNIQDINGENKKDVSCKKLKYVSHGLVSVKTNLFLSQ

SEQ ID NO: 3806 - protein, 455 aa, Ktedonobacter sp.
MNRVYVLSSDRTPLMPCSSVIARLLLKEGKAKVVRRTPFTIKLYVQPEHPSTQPLTLGVDTGSTVIGSAVASEQNDIVYLSEVEARNDIATAMKERAAYRRKRRSRKIRYRPARWLNRRNSIKRGRFSPTMRSKIDAHLREIRFVQSILPITSIVLETSTFDPHALKNPEVLRKKWLYQKGINYGYANTRAYVLTRDGYTCQHCKGKTKEQRLEVHHLIFRRHHGSDEESNLLTLCKTCHDALHAGTITLKCTGKKKGKLLHATQMSSIRMQLLKRVEAEETWGFVTKEHRLLASLPKEHCFDAAMIATRGQRPVIQIQTVLVKKCIPDGDYQQTKGKRSEQRLTTGKIEGFRKFDKVRYRGQEYFIKGRMSTGYAILMMIDGKKVDLKPIPKLEKMKRVSARSSWMIDQRSMPRSIGNASQETPRQDIESQGEKEGTALIHEAEDLVVFLPHQV

SEQ ID NO: 3807 - protein, 544 aa, unidentified
MKQKKQKVMIYILNKKGKPLMPTTRCGHVRKLLDSKKAVVVNSNPFTIRLKYDTPNGIQDVFAGIDSGRENIGSGASNEDGDCLYLGELKTSNKSIKIKMTERTGFRRERRRHDRQSKQRKEKKDHTEIQNGNDDICRTTISCKSVQISYPVAEESVTHKIIRGKEGKFANRHRDEGWITPSARQLVQMHMNDLKSMCKILPINHVTLERVAFDFQKLENENIKTWEYGKGKLYGYDSPEEYIHDVQDGKCLVCGKPHIDYLHHIIPRSKGGSDKVSNLAGLCYDCHYGPMGVHNCRETQDRLPELKNEANKQYKVSLLNSVMPVLIEEMDKFCKANSIIFSICEGHDTAKVRDMYDLQKDHCLDGFAISLVGRNVKSVDVMPDRIYQKQRYKKKSKNIIQKRNCREYYDGKKLVAVNRHKGTDQKADSLEEYMNTYAETHTADECKKHFDSLTVKPARRTYTFHKKGCICPFHIGDKVRYEKKNKIKGNTKVETFICESIHFYKDENKAKVEHNKTKSKRMKFCRVLEAGCTPYIDYRKLALM

SEQ ID NO: 3808 - protein, 434 aa, Anoxybacillus sp.
MVFVLDTNKCPLAPCHEAVARKLLKQGKAAIYKRFPFTIILKKSVDESENETTYRLKIDYGSRHTGLAILRGQEVVWLGQLDHRTDIKERIDKRRAFRRARRNRKTRYRKPRFLNRKRKEGWLPPSLESRVQNIQTWVSRLKKLCPIGHISYENAKFDTQLMRNPEISGIEYQQGTLQGYEVREYLLEKFGRKCCYCGKENVPLEEEHIIPKSRGGTDRIDNLCLACRDCNQRKGNQTAEEFGCPHIQKQVKESLKDTSIINATRWKVYEVLKQARLDVECGTGARTKMNRIRLGLPKTHYFDACCVGESTPNHLYFKTKEVLFINAKGRGSRSRTNLDRYGFPRGYLARQKFFFGFQTGDMVKAIVPRGKYKGVWFGEVACRKTGNFDIKGKDGKRIAQGISYKYIQVIQRFDGYTYRKEEAELAQGAIPPRA

SEQ ID NO: 3809 - protein, 493 aa, unidentified
MAAVYVISASGKPLMPTTRCGHIRGLLNAGKARVVEREPFTIQLKYETPDVTQPLYLGIDPGRTNVGSAVVREDGECVFTAQLTTRNKNVPKLMKARKQFRMAHRRLKRRCKRQRRAKAAETLSQKGEFQRLLPGYEEPILCKGIRNKEARFNNRQRPAGWLTPTANHLLLTHLNMVKKLQKLLPITDVVLEVNRFAFMAMENPSIRRWQYQQGPLYGKGSVEDAVYAQQDGHCLFCGKPIAHYNHVVPQHKNGSETLENRVGLCNEHHDLVHKDRAWDAKMKETKAGLNKKYHALSVLNQIIPALTEQLTAMFPQHAFVTTGKDTADFREDYGIAKEHHLDAYCIACSVLAEPTKVAAPTGKPHRLMQFRRHDRQVCHKENIKRVYLSEGKAVATNRHKAIEQKDDSLEEFRKTHTQQEVSALTVKDHQPVYKDMRRFMPGGVFLFNGKVHTLQRSHGRYKGMPFYYIDTDGSKNHAKGCIFLQQNCGLRWV

SEQ ID NO: 3810 - protein, 438 aa, Ktedonobacter sp.; identical to SEQ ID NO: 3407

SEQ ID NO: 3811 - protein, 378 aa, Moorena sp.; identical to SEQ ID NO: 2642

SEQ ID NO: 3812 - protein, 429 aa, Ktedonobacter sp.
LSNVFVIDSDYKPLNPVHPGHARRLLRQGKAAVFRRYPFTIVLKRVVEQPEIQPLHLKLDPGSKTTGIALVNDTNGHIVFAAELSHRGHAIKDSLDSRRASRQGRRQRKTRYRKPRFDNRRRKKGWLPPSLESRLANILTWVARLCRYAPIATLSQELVKFDMQLMENPDIAGVQYQQGTLQGYEVREYLLEKWERTCAYCGKQDVPLQVEHIHPRARSGTNRMSNLTLACEACNTAKGTQEIEVFLKKKPDVLKRLLAQVKKPLKDASAVNSTRCALLERLKAIGLPVECGSGGLTKFNRATRGLPKTHWLDAACVGKSTPDVLLQKGVIPLRIKATGHGRRQMCVPDKYGFPKQHKERKKTFLGYQTGDLVKAITPKGTFEGRIAIRHRPSFRLEKVDIHPKYMRCVQRSDGYEYTQKGVRHAPPHG

SEQ ID NO: 3813 - protein, 431 aa, Moorena sp.
MRVFVLDKDFKPLDPCRPARARLLLKQGRAKVFRMYPFTIILKDLEVENCTTHNHQLKIDPGAKTTGLAILQDNTVIWGAEIRHRGFQIRDALTSRRQLRRSRRNRKTRYRKPRFLNRKRQSEWLAPSLMSRVHNILTWVKKLIRFCPMTGISQELVRFDTQKMENPEISGTEYQQGTLYGYEIREYLLEKWNRKCAYCGATDTRLEVEHIKPRSNGGSDRVSNLAIACHDCNQAKGNQDIKQFLSRKPDVLKRVLSQSKRSLADTAAVNSTRWKLYKELKSTGLPVQTGSGGQTKYNRRRFNLVKTHWLDAACVGNVQAIYVENCQFLLIMAKGHGTRQICRTDKFGFPKRYCSRTKIHKGFQTGDIVKAIVTKGKKIGTYVGRVATRKTGSFNISTANGLIQGISYKYCTPIHKKDGYSYQINTLSSLS

SEQ ID NO: 3814 - protein, 464 aa, Ktedonobacter sp.
LLDVPPDNIIEATITRAIGGSERSKHMSHVFVIDANKQPLNPVHPARARVLLSQGKAAVLKRFPFTIILNVAIDAPVVEELRIKIDPGSKTTGIALVNDQSGEVVFAAELHHRGANIKEALDDRRTVRYSRRRRHTRYRKARWQNRRRREGWLPPSLTSRISNVLTWVKRLRNLCPITAMSMELVKFDMQAMENPDIQGWEYQQGTLAGYELREYLLEKWNRMCAYCGKGNVPLQVEHIVPRANKGTHRVSNLTLACEKCNQAKGTQDIKDFLKKKPAMLKHILAQAKAPLKDAAAVNATRWELFRGLQALGLPIECGSGGLTKYNRTTRELPKTHWIDAACVGQSTPEYLNTTGISSLLITATGYGKRQLCGVDKHGFPQRHRQRKKVHHGYQTGDLVRAVVPEGFAAAGRHVGRVLARATGSFDLRTARGRIEGVPVRYCRPLHRNDGYSYHSTRGGNSSPL

SEQ ID NO: 3815 - protein, 426 aa, Bacillus sp.
MVFVLDTKKRPLAPCHEAVARKLLKQGKAAIYKRYPFTIILKEIVDNFRPKTPYRLKIDYGSKHTGLAIVRGEEVLWLAQLDHRTDIKERLDKRRAFRRARRKRKTRYRKPRFLNRRRKDGWLPPSLESRVQNIQTWVERLRKICPIEHISYENAKFDTQLMRNPEINGVEYQQGTLQGYEVREYLLEKFGRKCCYCGKEGVPLEIEHIIPKSRGGTDRVDNLCLACHDCNQRKGSKTAEEFGYPHIQEMVKKTLKDASVVNATRWKVYEVLKQSGCEVECGTGARTKMNRIRLGLPKIHYFDACCVGESTPLQLHFKTKEALFIKAKGRGSRSRTNLDKYGFPRGYLARQKYFFCFQTGDIVKANVPKGKYQGVWFGEVACRKNGSFDMKDKDGKRIAQGISYKYFNIIQRFDGYTYRREGMNIA

SEQ ID NO: 3816 - protein, 529 aa, Burkholderia sp.
LEVAAADKPRVGTKRAATGELTLTLCCTTWSRGAAPQGARHQARKGNAPDVFRRHNKELGLAVCVLDRSGKALMPCSEKRARLLLARGRARVHRVVPFIIRLVDRRAHASRFQPLRIKVDPGSRTTGLALVRDTQLVDATSGEIQRGAAVLNLFELVHRGRQISEALSARRAMRRRRRGNLRYRAPRFLNRTRPAGWLAPSLEHRVATTMAWVNRVMDWTPVAALSSELVRFDMQALENPEIASVEYQQGTLAGYEVREYLLAKWGRRCAYCDQEHVPLQIEHILARASGGTNRISNLTLACACCNAKKAARPIEAFLARDPKRLAVILAQAKRPLKDAAAVNATRWALANALRATGLPVELASGGCTQFNRKQLGLPKTHALDAVCVGKVASVSVWYKPTLAVKCTGRGSYQRTRLDRYGFPRGYLTRSRRVHGFQTGDLVRAEVPTGKKAGRHTGRVAVRATGSFNIQVAGNVVQGIAHRHCRLIQRSDGYGYSRIALLKGDASDGTASLSALSLPAVNDGVSRAAG

SEQ ID NO: 3817 - protein, 499 aa, unidentified
MRYVYVLDVDGKPLMPTCRFSKVRRMLKSDQAKAVDTLPFTIQLTYRTKTRILQPVTLGQDPGRTNIGVAAVRSDGKELGRFHCITRNKEIPKLMADRMAVRRASRRGERLVRKRLARKLHTTAKHLEGRMLPGCDKPLPVKDIINTESRFNNRLRPEGWLTPTATQLLRTHINLFVRLAKILPVTDVAIELNKFAFMQLDNPEMKKREIDFCHGPLYGTGGLEATVKEQQNGKCLLCGKEPISHYHHIVPRSRRGSNTIANIAGLCPKCHELVHKDADTAERLTEMKTGLTKKYGGTSVLNQIIPKLVETLADLFPGHFHVTNGWNTKEFREKHHLEKDHDVDAYCIACSHLKPEETLVETEPFEILQFRKHNRAIIHHQTERTYKLDGVTVAKNRKKRMEQKTDSLEDWYVDMAKEHGKTQADAMRSRLTVIKSTRYYNTPGRMMPGTVFLYEGKRYVMTGQITNGKYYRAYDQEKRNFPAVKVRILTKNTGLVFVA

SEQ ID NO: 3818 - protein, 428 aa, unidentified
LKVFVLNMRGQPLMPCSPAKARHLLKAGKAAVRRRTPFTIQLRIATGETKQSVTLGVDAGAKHVGLSAATEKEEVFASEVELRQDITGLLAARLLLRRERRQRKTRYRAPRFLNRVRSKHKGWLAPSVENRIQAHMSRIDAICGLLPVTKIVIETASFDIQKIKHPDVEGTDYQQGDQLGFWNVREYVLFRDGHVCQHCHGHAKDKILNVHHLESRQTGGDAPNNLITLCETCHKACHAGKIKLKVKRGQSFRAEAFMGIMRWTLLDRVRKAHPGLPVENTYGYLTKNTRITLGLPKAHCVDAYCIAGNLKAVRRGVYLHQRQVRKHNRQIHKCTVLSKTLKDGTKIGYRKLNQTPHLVKNFRLFDKVRCLGQTGFIFGRRSSGYFDVRRLDGVKLSSGISYRKLTLLEKRSTYLTELRKEDGASSPV

SEQ ID NO: 3819 - protein, 323 aa, Ktedonobacter sp.
MEQGSILYLSEVEVRNDIATTMKERATHRRDRRNRKTRYRPARWLHRRNSIKIGRFSPTMRSKIDAHLREIHFAHSLLPISSIVLETGTFDPHALKNPEVLRKKWLYQKGINYGFANTKAYVLTRDGYTCQHCQGKSKDQRLEVHHIIFRSQHGSDEESNLLTLCKTCHDALHAGTIPLKRTGKKKGDLLHATQMNSIRVQLLKLVEAEETWGFVTKEHRLLAGLPKEHRFDAAMIATRGNRPVFQIQTVFVKKCIPDGEYQQTKGKRSEQRIPTGKIQGCAQMRQSALSRSGILYQRAYVYWLCYFDDDRREKGRFETHSQV

SEQ ID NO: 3820 - protein, 429 aa, unidentified; identical to SEQ ID NO: 3501

SEQ ID NO: 3821 - protein, 442 aa, unidentified; identical to SEQ ID NO: 2903

SEQ ID NO: 3822 - protein, 417 aa, unidentified
MFVYVISKDGQPLMPTSRFGKVRRLLKNKKAKVIRSCPFTIKLLYEPESLIVQEIVLGQDTGSKHIGTACVADDKILYQSEVALRDDIKKKMDRRRALRRNRRQRKTRYRKPRFLNRANSIKKDRLPPSTKSKVQSHIDEIEFCKKILPVSKIVLEVSQFDIHLMKNPSLIFEKVRHWGYQKGFDYGYSSRREAVLNRDNYTCQCCGKKHVRLEIHHIIFRCMGGTDDERNLITLCEKCHKLIHDGVLILTKKPRKLNLKYATQMSIIRNQLLKIYPDAIETFGFVTKENRNNLNLPKGHYIDACVIASAGKKFKQLNWLFKKRRVAKQNRQLCKGVRGEKQIPTGKVFGFRRFDKVKYLKEICFIKGRRNSGSFVLMDIDNNTIDFRSGGGKQSPSYKLLERLNTRKSVLCISQRI

SEQ ID NO: 3823 - protein, 356 aa, unidentified
QEIVLGVDAGTKHVGLSATTKSKELYSSEVILRNDIVDLLSTRRELRRTRRNRLRYRKPRFDNRIKSRRPGWVAPSVKYKVDAHIRVVENVCSILPISRIVIEVAQFDTQKIKNPNISGKEYQEGDQLGFWNVREYVLARDGHKCQYCKGKSKDHVLNVHHIESRKTGGNSPSNLITLCETCHKEYHKGNIDLKIKRGSSLRDAAVMGIMKWRLYEELRSKYDRVSMTFGYVTKYNRINHDIEKSHVSDAFVISKNFNAIRLGYYYKVRLVRRHNRQIHKQKIPKGGIKRLNQSPFEVFGFRLFDRVMFENNCYFIFARRKTGSFNIRDINGKNKRDITYKKLKLSRCKRFMIEKS

SEQ ID NO: 3824 - protein, 457 aa, Tolypothrix sp.; identical to SEQ ID NO: 2930

SEQ ID NO: 3825 - protein, 468 aa, Petrotoga sp.
MWTYRCEADLFPKGDLKMVYVLSKDGAPLMPTKRHGKVKHMLKDGKAKVVRNKPFTIQLTYDTPHYTQPITLGIDSGYKYIGFSAVTEKGNTPNGVKEEVLSGEVNLRSNVSELLKERSMYRRIRRNKLRYRKSKFDNRVSSRKETPRKGFKESWLAPSIKHKLDTHIRFIEFIKKILPITNIVIEVAKFDTQKIKNPEIKGKEYQQGEQQNFYNLREYILYRDNYTCQLCGKSNVPLEVHHIGFWKGDRTNRPSNLITLCTKCHDPKNHLKGGKLYGMKPVQKPLKEATFMSTVRWKLVNILDCKYTYGYITKSKRIKLNLDKTHYNDAYCIAGGTSQRRIEPIYFEQIRRNNRSLEKFYDAKYIDTRDGSIKKGQELFNGRRTRNKNYNTENLRKFRGQKISKGRRSIRTQRYFYQPKDLVIYEGKKYTVKGIHCCGKRIILAELSKSFKIETVEPYMFRKGLCIT

SEQ ID NO: 3826 - protein, 442 aa, Lactobacillus sp.
MKHENANRVFLLNRDGKPLMPCRPRKARLLLKSGKAFVVKKYPFTIQLKYGSYGYKQKASLGVDTGQRHIGFAIVSQNKVLYQSEVELRQDVHKNLYTRKIYRRSKRNRKTRYRQARFLNRVHGKRDGLWLPPSIKGKVSHNIAWIKRYLAVLPNTDLHIEVGKFDMAKMINPEISGKQYQEGSLKDWKNYEYYVLARDEYTCQLCHKHGEGVKLVVHHIVYRSHGGTDRISNLITLCTDCHTTKNHQPGGKLYKWMKAKKKVTKQLKGATFMNILRKRIMTAFPEASFQYGSQTYVDRKNLLLPKGHFMDAIAISGIKSVGQMPDTVTLISQFRKKKRSLHEATARKGRKQPNKSSKRNEKNMNHARGLWLNDYVRVIGNHAKGYVKGFKSKGYYVYLTDGLGNYVLSNGKNYINRKQCRLIMHNGNWQKAEQKLSLYEFK

SEQ ID NO: 3827 - protein, 375 aa, unidentified
LGVDAGSKTIGVSALTKKEELFAANVIPRNDVVDLLSTRREFRRARRNCKTRYRKPRFDNRVRSKHKGWLAPSVEVKIQGHITAIRRVCGILPVSKVVVETAEFDLQLLKAIEKGKPVPQGEDYQQGEMYGHYNVRQYVLWRDDYTCQCCGAHTTKKKEVRLHVHHLESRKTGGDAPSNLITLCDSCHEKLHKGLIAEKDFKKRKRRSTWDATFMGIMRKTLMQRLCSELPIHVVETRGYITKATREKLLVLPKSHINDALAIAQGKHGFNVGYLPGILQIDMIYTIRPVRHHNRQLHKATILKGGIRKSNQTGKYVFGYRLFDKVQFNGQDCFIWGRRTTGIFTIKTINGKMIKDGISFKKLKLVEKSTSYLIA

SEQ ID NO: 3828 - protein, 399 aa, unidentified
  source 1..399: note = Bacterium sp.
LTVFVLDINRNPPNPVHPAEARLLLSQQKAAVLRQYPFTIILKEASADVEPEPLRVKIDPGSKVTGFAVINDNTGEIVFAMELEHRGGYIKKSLESRRAIRRSRRNRKVRYREPRCENRSRPKGWLPPSLKSRVHNLETWVNRLSRYCNVKGISLELVRFDMPKIQHPEISGVEYQQGELMGYEVREYLLEKWRRKCAYCGEGDVPLEIEHIVPKSKGGSNRVSNLTLACTPCNQKKGNKPVEQFLLKKPELLKKISAKAKAPLKDAAAVNATRWNLFRTLKETGISVETGSGGLTKFNRTTRELPKTHWLDAACIGKSTPEKLFQIHKSVLVVKAGGHGSRQVCRVDKFGFPRTKAKSKNPKIKAFQTGDIVKAVVTSGKKSERTWGVSQSEVVNPLI

SEQ ID NO: 3829 - protein, 512 aa, unidentified
MSTVYVLNKDGKPLMPTTRCGHVRRLLKEQKARAVASKPFTIQLLYETDDVVQPLYLGIDPGRTNIGVAVVKTDGTAVFTAHLETRNKEIPKLMKKRKDSRRARRTNGRRCRRQRRAKANGTLSKKCVKQTTAQNGSVSKRANEIGVIKRHLPGCEKEVLCIGIKNKEAKFNNRTRPEGWLTPTANQLLQTHINLVKKIQKFLPISDVVLEVNKFAFMRLDNPNIQKWQYQQGPLHQKASLEEAVSEMQEHHCLFCKNTIDHYHHVVPQHKNGSNTIDNIVGLCTKHHDLVHKETEWQEKLAKKKTGLNKKYGALSVLNQIIPALTKELSSLFPKHFFVTTGKSTYDYRAAHGISKDHWLDAYCIAGSVLPNDVCDNSINNRIPYELKQFRRHDRRASHKENVNRVYTLNGKKVATNRHKAIEQTADSLEEFRQRQPNDVYKLKVKEHHPEYRNPKRNFPGCVFLVGKHTHVMQGTSGSHNGKADGYYDTNGNSYSSGKCKFVVKNKGIVFA

SEQ ID NO: 3830 - protein, 420 aa, unidentified
MQYVYVLSKHGEPMMPCSPGKARLLLKQQKACVVRRTPFTIKLLYGSVGYKQPITLGVDAGSKHVGLSASTEKRELYREEFTPRNDVVELLSTRRQNRRSRRNRKTRYRAPRFDNRVHSKHKGWLAPSVEVKIQEHITIIKRICKILPISLVRVETAEFDTQRLKAMLAGKPLPVGTDYQLGEMYDEYNVRQYVLKRDNYTCQCCGAHTTAKKLVKLHVHHLESRKTGGNAPSNLVTLCTTCHKNLHKGNVTLDGKERGKPLRDAAFMGIMRKTLMARLKEELPIPVQGTYGYITKMRREQNDIKKGHTNDARCISKHPLAEPCSVCYRTKAIRHHNRQTHKANFSKKGIRKRSQMPYLVEGYRLWDKVLYKEQECFVSGRRSSGSFTLKKLDGTSVSKGVTFKKLRLLEPATNYLIERM

SEQ ID NO: 3831 - protein, 473 aa, unidentified; identical to SEQ ID NO: 3562
  source 1..473: note = uncultured beta proteobacterium

SEQ ID NO: 3832 - protein, 442 aa, Anaerostipes sp.; identical to SEQ ID NO: 3218

SEQ ID NO: 3833 - protein, 512 aa, unidentified
MSTVYVLNKDGKPLMPTTRGGHVRHLLKEQKARVVRTNPFTIQLLYETDNLVQPLYLGIDPGRTNIGVAVVKTDGTAVFTAHLETRNKEIPKLMQGRKKARRARRTNGRRCRRQRRAKANGTISKKCVKHDTAQNGSVSKRAKEIGVIKRHLPGCEKDVLCIGIKNKEAKFSNRTRPEGWLTPTANQLLQTHINLVKKIQKFLPISDVVLEINKFAFMRLDNPNVQKWQYQQGPLYQKANLEETVSEMQEHHCLFCKKKIDHYHHVVPQSENGSDTIGNIVGLCTKHHDLIHKDTAWQKKLAKKKTGLNKKYGALSVLNQIIPALTKELSSLFPKHFFVTNGKSTYDYRAAHGVSKDHWLDAYCIACSVLPNDTCDKTINSRVPYELKQFRRHDRRALNNENMSRVYTFNGKMVATNRHKATEQTTDSLEEFRQRQPNDVCNLKVKEHHPTYRSMNRNYPGSVFLVGNQVHVMQGIAGSKDGEATTYKDTNANSIAAGKCKFVAKNSGILFV

SEQ ID NO: 3834 - protein, 551 aa, unidentified; identical to SEQ ID NO: 3262

SEQ ID NO: 3835 - protein, 429 aa, Ktedonobacter sp.; identical to SEQ ID NO: 3098

SEQ ID NO: 3836 - protein, 497 aa, unidentified
VIVEIQLQYKGVTAKKERIIMVIALDKRKRPIGFITERRCRILMEKKRAVLYRLFPTVIVLKDVDARTIPSPPSYRIKLDPGAKHTGVAIVRNDTNEHAFSMQIEHRGDAIKAGLTTRQAARRNRRSRETGYRRAKWGNQCLSKEAKKSYDSARKDGWLPPSIRSTAENVISWVRRLSRWINLTECSVEAVRFDTQLLENPNIQGVEYQQGTLFGYEIKEYLLEKYGHTCQYCGGQSGDDILEWEHIHPRSRGGSDRVKNATLACSKCNHDKNNQTLTEWLAAIKMRVSTEKGKTKELDQARLLYIQKVLDGKPETKPLRYAAWVTSSRRYLEKYLFAHFSNVECSSGGKTKYNRRQLGYPKDHHYDALCVGTIPEHGFVDRTSGYCLYAKATGRGTRLRGKLNKCGIIVFKWKNRSKTINGFQTGDIVVADVPHNDKKTYKNEGQFVGRVMVRSSGRFDIKTIRGELVNVKMQFCKLLQNNSGYHYTVGRAIPLGH

SEQ ID NO: 3837 - protein, 464 aa, unidentified; identical to SEQ ID NO: 3503

SEQ ID NO: 3838 - protein, 459 aa, Ktedonobacter sp.; identical to SEQ ID NO: 3797

SEQ ID NO: 3839 - protein, 424 aa, Anabaena sp.
MSNYALVLDTNKQPLSPCHPSVARKLLDSGKAALFRMYPFTIILNKSCSDIVNQAIELKIDPGSKTTGIALVQGEKIIFGAELSHRGSAIKASLESRRSLRRGRRNRHTRYRQARFLNRTRTENWLAPSLQHRVETTLTWVNKLIKFIPITRISQELVRFDLQQIDNPEISGIEYQQGTLSGYEVREYLLEKWQRKCAYCGIENVPLQVEHIHPQARGGTNRISNLCLACEKCNIKKGTQDIKDFLAKKPDLLKCILAQAKRPLKDAAAVNSTRWALFSRLQETGLPVFTGSGGQTKFNRTRLNFPKTHWLDAACVGQIGELEILTNKPLLIKATGHGTRQMCRTDKFGFPSRYVPRIKFVKGFQTGDIVKAIVTTGKKIGKYIGRVAVRATGSFNISASKLVQGISYKYCKIIHRKDGYDYAF

SEQ ID NO: 3840 - protein, 431 aa, unidentified
MDAWDIIVVLTKRGKPLMPCSPAKARLLLKEKKAIVKRRTPFTIQLTIATGETKQPVSLGVDAGYKHVGLSASTEKAELYASEVELRQDITDLLSARRALRQSRRNRKTRYRAPRFDNRIRTKRKGWLAPSVENRINAHLSRIEAVLRLLPVTKISVETASFDMQLLKNPDISGKEYQEGEQLGFWNIREYVLCRDGHVCQHCYGRSKDPVLNVHHLESRRTGGDSPVNLITLCETCHKALHRGEITLKAKRGQSFRAEAFMGIMRWEVLNRLKASHSELKVHNTYGYRTKHTRIVNGIDKSHCADAFCIAGNFGAKRLGEFFFQKQTRRNNRQIHKLSILKGGIRKRNQAPFEVKGFRLFDKVACQGEEGFIFGRRSSGFFDVRKLDGTRISAGISYKKLHLLEKRRTYLTEIRKEEALPPLPEGRGLRA

SEQ ID NO: 3841 - protein, 447 aa, unidentified
MKGKLFMVFVLNKSKKPLDMITNAEARILLRKKLAVIHKIYPFTIRLKDNSAVSKDRSYTVKVDPGSRHTGIAIVDDRDQVVMLAEIEHRGNLIKKDLDSRRVVRRSRRNRKTRYRPARFLNRTKPEGWLTPSVKSRADNVINFIRKYKKLINISKVMIENVSFDTAQMTSNNYLIGTAYQQGPLYQKELRSFIFSRSNGKCVYCGAKATEIDHIVPRAKGGSNSIYNLVASCRSCNEKKSNLSLKEFGKRMNKDYSHLKPKKLPRDAAIVQSARNYMIKEVAKLVPDTTLHDAWLTKYNRDELGLPKEHYYDALSVGKIPTKFDFSTDKILLISAKGRGSRQMCRVDKFGFPRTSAKVSKSVEGFQTGDIVKAVVTKGLKKGEYFGRVIIKSSGYFKIGYNNCLVQGIGYKYCRLIQRGDGYSYNYKECDFLSAMNCRVPIAKGKK

SEQ ID NO: 3842 - protein, 447 aa, Marinobacter sp.
MSVFVLDKRKHPLMPCTERRARLLLSRRRAVVVRAYPFTIRLKNRTGDVTQPLRIKIDPGSKATGIAVVRENGQKQHVLALMELVHRGRQISKSLDQRRAFRRRRRNQLRYRAPRFLNRTKPKGWLAPSLQHRVDTTRSLVNRLRSLVPVVSISQELVRFDTQKMENPEVSGVEYQQGTLLGYEIREYLLEKWGRECAYCADTDTPLQIEHIDPKANGGSNRISNLTLACRPCNQEKDRKSLVSFFATSKRLKNHQAKLDRILKQCKKPLRDASAVNSTRWALHQTLKQTGLPVEVGTGGRTKFNRRRLNIPKTHALDAACVGEVEIVEGWDVPTLAIKATGRGSYKRTRLTKHGFPRGYLMRQKQVQGFQTGDMVRAVVPAGTKAGTWQGRVAVRKTGSFNIQTSSGAIQGISHRHCVLTQRADGYGYHIQPNQRKEEGDRENESR

SEQ ID NO: 3843 - protein, 499 aa, unidentified
MRYVYVLDVDGKPLMPTCRYGKVRRMLKSGQAKTVDTLPFTIQLTYQTKTKILQPVTAGQDPGRTNIGLAAAREDGTDLYRSHCETRNKEIPKLMAERLAHRRASRRGERLARKRLAKKFGTIAKKLNGRLLPGYKEPLAVKDIINTEAKFNARLRPEGWLTPTATQLLRTHLNLLERVSRILPVTDVAIEINRFAFMELADPDKKHSEIDFQHGALFGTGGLEQAIREQQQDRCLLCGKRDIEHFHHIIPRTKRGSNTIANLAGLCEQCHTLVHQSEEAKNRLEEKKQGLTKQYGGTSVLNQIIPSLVKELEKRYPGQLHLMTGRDTKAFREKHGLEKDHDVDAYCIAASRMENIKPKIQTEPFEIQQFRKHNRANIHHQTERTYKLDGKVIAKNRKKRMDQKTDSLEDWFATMTEQYGLEKAMRLRARLTVKKSTRHYNTKDRIMPGLVFRYGTKRYVMTGQITGGRYYRAYGAGNQNFPAQKVTMLKQNTGLVYVA

SEQ ID NO: 3844 - protein, 512 aa, unidentified
MSTVYVLNKDGKPLMPTTRGGHVRHLLKNQKARVVRTKPFTIQLLYETNDVVQPLYLGIDPGRTNIGVAVVKANGTAVFTAHLETRNKEVPKLMQDRKKARRARRTNGRRCRRQRRAKANGTISKKCVKQTTAQNGSVSKRAKDIGVIKRRLPGCEKDVLCIGIKNKETKFTNRTRPEGWLTPTANQLLQTHINLVKKIQKFLPISDVVLEANKFAFMRLDNPNIQKWQYQQGPLYKKESLESAVSEIQEHHCLFCKKPIDHYHHVVPQSENGSNTIANIVGLCSEHHNLVHKDVAWQEKLAEEKTGLNKKYGALSVLNQIIPALTNKLSVLFPKHFFVTAGKSTHDYRAAHGVSKDHWLDAYCIACSVLPSDVCDSNINNHMPYELKQFRRHDRRVLNNENMNRVYTLNNKAVAINRHKAKDQKTVSLEEFRKEHPDDVCKLKVKEHHPTYRNMNRNYPGSIFLVGKHVHIMQGIAGSKDGKATKYNDTSATAIAAGKCKFVAKNTGILFV

SEQ ID NO: 3845 - protein, 515 aa, unidentified
VAYMSTVYVLNKDGKPLMPTTRCGHVRHLLKEQKARVVTSKPFTIQLLYETDDVVQPLYLGIDPGRTNIGVAVVKTDGTAVFTAHLETRNKEIPKLMQGRKKARRTRRTNGRRCRRQRRAKANGTISKKCVKQTTAQNGSVSKRAKEIGVIKRHLPGCEKDVLCVGIKNKEAKFSNRTRQEGWLTPTANQLLQTHINLIKKIRKFLPISNVVLEINKFAFMRLDNPNIQKWQYRQGPLYQKASLEEAVSEMQEHHCLFCKKPIAHYHHVVPQSENGSNTIGNIVGLCTKHHDLVHKDTTWQKKLAKKKTGLNKKYGALSVLNQIIPALTKELSSLFPKHFFATNGKSTYDYRAAHSVSKDHWLDAYCIACSVLANDVCDSNINSRVPYELKQFRRHDRRALNNENMSRVYTLNGKVVATNRHKATKQTTDSLEEFRQNHSDDVCKLKVKEHHPTYRNMNRNYPGSVFLIGKQVHVMQGIAGSKNGEATTYKDTNANSIAAGKCKFVAKNSGILFV

SEQ ID NO: 3846 - protein, 442 aa, unidentified; identical to SEQ ID NO: 2637

SEQ ID NO: 3847 - protein, 447 aa, Marinobacter sp.; identical to SEQ ID NO: 2652

SEQ ID NO: 3848 - protein, 325 aa, unidentified
RKTRYRAPRFDNRIRTKRKGWLAPSVENRINAHLSRIEAVLRLLPVTKITVETASFDMQLLKNPDISGKEYQEGEQLGFWNIREYVLCRDGHVCQHCYGRSKDPVLNVHHLESRRTGGDSPGNLITLCETCHKALHRGEITLKAKRGQSFRAEAFMGIMRWEVLNRLKASHPELEVNNTYGYRTKHARIANDIAKSHCADAFCIAGNLGAERLGEFFFQKQTRRNNRQIHKLSILKGGIRKRNQAPFEVKGFRLFDKVACKGEEGFIFGRRSSGFFDVRKLDGTRISAGISYKKLHLLEKRRTYLTEIRKEEALPPLPEGRGLRA

SEQ ID NO: 3849 - protein, 464 aa, Ktedonobacter sp.; identical to SEQ ID NO: 3814

SEQ ID NO: 3850 - protein, 464 aa, unidentified; identical to SEQ ID NO: 3503

SEQ ID NO: 3851 - protein, 421 aa, unidentified
MQNCIFVLDANKQPLSSTHPARARKLLKQGKAAVFRTYPFTIILRKTVGTPGNEPYRIKLDPGAKVTGIALVNERTGTVVWAAELSHRGDIIRQKLSFRRVVRRNRRNRKTRYRPARFNNRKRPLGWLTPSLQHRVETTMTWVKRLRKYCPITDISMELVRFDMQKLQNPEISGVEYQQGVLFGYELREYLLTKWRHQCAYCGAKEVPLEIEHIHPKSKGGSDRVSNLAIACHKCNQKKAASAVEQFLKKRPEVLKRLLAQAKAPLKDAAAVNSTRWALFNRLKETGLTIETGTGGLTKYNRTLQGLPKTHWLDAACVGKSTPMLKISTTQPLLITCKGRGGRQKAALNKYGYPIRHNPLKPIKGWQTGDIAKHKVHGIGRITPRSRGSFVLTKPDKTQKSVKPIDLKPVFRRDGYAYKWG

SEQ ID NO: 3852 - protein, 442 aa, unidentified; identical to SEQ ID NO: 3037

SEQ ID NO: 3853 - protein, 429 aa, Ktedonobacter sp.; identical to SEQ ID NO: 3703

SEQ ID NO: 3854 - protein, 504 aa, unidentified
MAWEAIQTRRIKPHDIGEGTLRRHAAGTVSFPVLCKNRKETLMSVLVIGRNGRALMPTNPRKARLLLKKKTASVVCRHPFTIQLLYKTGCATQEGCIGIDTGSQHIGVGITCGDRVILKDEHALRSSMEKRSLLATRTVMRRGRRYRKVRYRKPKWRHHTKRMYFEKANRRGQHWRKVKTTTQSPRLKGWLPPSLQSKCDHHFRIIDRYLKYLPDPITRNLVIEAGRFDMARMNDPTIHGEMYQRGPMYDAENLRAYIFARDNYQCACCKAKAGTTRKADGTTVKLVAHHILFRSRGATDNPKYIISVCDHCHTTKAHQPGGILYSWMENNKKVARGLRDATFMNILRKRLFARYPQAAFTYGNITAADRKQLRLPKSHANDAVAISLFGKEASTVKNICQTMHYKQIRKSKRSLHEAIPRKGRKNPNTKAVRNKKNTTQANGFKLWDSVLADGKKLFICSFTGTSAYLIDKNGCYISQPGKTYKQWPLSKLKRLHPNGNWLMA

SEQ ID NO: 3855 - protein, 486 aa, unidentified
MKEAEPTQQLGRRDTYTPRDAAPVPGSVAARLNSSERVGAVPRSLKTRPNNSEEHLTPKPKGGGGQDLRVPVLNMRGEPLMPTTPRKARILLKQGKARVVSRTPFVIQLLYPTGENKQDITLGIDAGYSVIGYSAVTAKRELIAGELELRNDIRRLLEKRRKYRRDRRSRKWYRKPRFDNRRKKDGWLPPSLEHKLQSHIRLIERLKRILPITRVVVEVASFDTQKMQNPEIKGVEYQRGELAGYEVREYLLEKWGHKCAYCGKTDVPLEIDHIVPKSRGGSNRVSNLTIACHKCNQRKGNRTAEEFGYPEVQAKAKEPLRAAAFMNNIRWELVNRLGCDWTYGSITKYKREKLNLEKSHVNDAFVIAGGNSNHIRTGYVYKAKQVRRQNRSLFKANILKGGRKRRNTIKEVNGFRRFDKVLYGKLKCFIFALRTSGYFRLRDIEGNKIGASVNSKKLKLLERARGRIEEVIRATCAEPRGILAHG

SEQ ID NO: 3856 - protein, 465 aa, unidentified
MSTCVCVLSNNGERLMPTIRLGRVRHLLKDGKAKIIKHHPFTIQLLYDSKTNTQPIEICEDVGYNYIGISVKSQSHEYVSAQYDTLQDEKACHDSCRKLRRTRRNRLRYRKPRFDNRKRGEGWLAPSLKHKKELNVNVVKMYCTVMPITHATVEVGSFDTMLVKAIQEGKVIPEGADYQKGPRYNLATLREAVFYRDNYVCKICGRKATEGAILHMHHMFYWKGRHGNSLNELLTVCEKCHTPANHQKSGKLYGFGEKIKFADLSGAAFMNTVRWQIVNELYVAFGKPFVTITYGAMTKEKRIALQLEKSHNNDAYAMGEFHPNLRCMFEHYEKARRNNRILEKFYDSRYIDIRTGEIATGKELFNGRINRNHKKDSENLHKYRGKRTYAGHRALLRKKVNLNPGDLVSLNGENLIVHSTHTKKNGAVNVEFETPAKSGQKSASLKKLKIVKAANSIHPAWKKIS

SEQ ID NO: 3857 - protein, 470 aa, unidentified; identical to SEQ ID NO: 2825

SEQ ID NO: 3858 - protein, 387 aa, unidentified
MVYVVANDGQPLMPTERHGKVCRMLKSGMAKVVKKCPFTIQLQYESERNVQPVALGIDAGSKHVGVSATTKAKVLYESDVELRDDIVKLLATRRQLRRRRRSRKTRYRPARFDNRRRKEGWLAPSIRQKIESHLTVVANACKILPINQIIVETASFDIQKIKDPEIQGIEYQQGEQMDFWNIREYVLFRDGHTCQCCKGKSKDKVLNVHHIESRKTGGNAPNNLITLCETCHKGYHNGTVTLPKNIKRGMKFKDAAFMGIMRWTFYNTLKEQYEPDIPVHYTYGYITKNTRINHNLLKGHCIDARCISGNPDAVSDGTYYYQKKVRCHNRQIHKQTILKGGIRKSNQAEYLVRGFRLFDKVRYQGREYFIFGRRKSGFFDIRTLSGE

SEQ ID NO: 3859 - protein, 460 aa, unidentified
MHVFVLDKDKNPLAPCHPAKARRLLKSGRASVFRRYPFTLILHEIEAKDCVVPETQLKIDPGSQTTGLAILSENRVIWASELSHRGQQIKNDLEKRRALRRSRRHRKTRYRKPRCLNRTRPKGWLLPSLNASAPLSVESERSRGLNHRVETTMTWVNRLRKLCPIVSIAQELVRFDTQKLQNPEVSGIEYQQGELLGYEIREFLLEKWGRKCASLGARSLAPCDGAGSHRYCGAENLPLEVEHIHPKSQGGSDRVSNLTLACHTCNQAKGNRDIREFLSGKPTVLNRILKQAKAPLKDAAAVNATRWKLYQQLKETGLPVEVGTGGQTKFNRTRLGLPKTHWFDAACVGKSTPDRLDVAVEKPLLVAAKGHGVRQRCRSDRYGFPRTHAPKAKSFQGFQTGDIVKATIPQGKFAGNYTGRIAIRFRPSFRLNAGVKPFDVHPKYLTTVQKSDGYEYRFSK

SEQ ID NO: 3860 - protein, 323 aa, unidentified
TRYRAPRFDNRIRTKRKGWLAPSVENRINAHLSRIETVIRLLPVTKITVETTSFDMQLLKNSDIAGKKYQEGEQLGFWNVREYVLFRDGHVCQHCHGRSKDPVLNVHHLESRRTGGDSPGNLITLCETCHKALHRGEITLKAKRGQSFRAEAFMGIMRWEVLNRLKASHPEQEVQNTYGYRTKHARIENGIAKSHCADAFCIAGNLGAERLGEFFFQKQTRRNNRQIHKLSVLKHGLRKRNQAPFEIKGFRLFDKVACKGEEGFIFGRRSSGYFDVRKLDGTHISAGISYKKLRLLEKRQTYITEIRKEEALPPLSEGRGLRA

SEQ ID NO: 3861 - protein, 436 aa, Ktedonobacter sp.
MSKVLVVDTTHKPLDPVHPGQARRLLKQGKAAVWRRFPFTIILKKEVTQPQTQPFRLKLDPGSRTTGIALVNDASGEVVFAAELTHRGEQVKEALETRRGARRGRRARKTRYRRARFHNRRRPKGWLPPSLESRLSNILTWVRRLCRYAPVACISQELVRFDMQLLENPSIQGEEYQQGELAGYEAREYLLEKWERRCAYCGKSHLPLQIEHIVPRVKGGTNRLSNLTLACESCNQAKGSQDLEDFLKKHPKRLQQIQAQAKAPLKDAAAVNATRWALFERLMAMGLPVEVGSGGLTKYNRSIRGLPKTHWLDAVCVGRSTPEQLQTSGVVPLEIRAQGHGCRRVRNVNGLGFPCSAPKRAKKVQGFQTGDICRARVTRGKKQGTYTGRVLVRTSGSFDLTTRSGRITGLNMRFFTPLHRCDGYSYQKGGVHSSPA

SEQ ID NO: 3862 - protein, 477 aa, Acidithiobacillus sp.
MFVFVMDQYGRPGHPTRRMDWVRKQLKHKRGKIVGGGISGKPAVLVLREQSFDRSKTVKRRFFVTLDTGFRNVGYAVTELLADGTLRVLLKGTLTARTPELRGLMDERKMYRRARRYRRRLNVRKKGQTPKHRPPRYESRGKRDSVTLQHGLETHRNLYARLARLVPLPDHQVTRGFESVSFDLRALAHGRPRTGSGYQVSPADKEKGEKTGRFIVRRDGGCVICGGKEHLQVHHLRKRSQQGSHRVGNQVALCEDCHDDVHAGLIDLPITDGAQWRDASMVNAVCGKLRKLSAEAGMVPVPVEISVAARRRLGLEKTHALDAVSVAAALTGAGTVDQRDTLDMDLAQYRRHRRAHIHAQRDRLYYLPGEKRPVAHNRRKRCDQGDVDSLAEFRRTHPKDVGRLQVKRAVRLYTPHRAKAPAVGGDVWNIGGLRVVAKGVHSKTNLYVPSLRSITGKVYASPKEGVRLFRNSGMVVA

SEQ ID NO: 3863 - protein, 420 aa, unidentified
MQYVYVLNKHGEPLMPCSPGKARLLLKQQKACVVRRTPFTIKLLYGSAGYKQPITLGVDAGSKHVGLSASTEKRELYSEEFTPRSDVVKLLSTRKQNRRSRRYRKTRYRAPRFDNRVHSKHKGWLAPSVEVKIQEHITVIKRICKILPISLVRVETAEFDTQRLKAMLAGKPLPVGTDYQLGEMYDEYNVRQYVLKRDHYTCQCCGAHNTAKKVVKLHVHHLESRKTGGNAPSNLVTLCTTCHKNLHKGKVTLDGKERGKPLRDAAFMGIMRKTLMARLKEELPIPVQGTYGYITKMRREQNDIKKSHTNDARCISKHPLAEPCSVCYRTKAIRHHNRQTHKANFSKKGIRKRSQMPYFVEGFRLWDKVLYKGQECFVSGRRSSGSFALKKLDGTSISKGVTFKKLRLLEPATNYLIERM

SEQ ID NO: 3864 - protein, 570 aa, unidentified
  source 1..570: note = Candidatus Collierbacteria bacterium
MKQSKQSNKKFKAQALNSKEKSALDILGLRPDLVYQTQESMPKGIATPEGVTTTFKITSKDALRDDNSSPGPCKNETSKALTKAERLAKATERQLTEAQRNLNIVEENIASKATVPSREIARKGIHTQGRVLVIGQDSNPCMPCNPARARKLLKAGKAKIHLYFPFVIQLNYSPTGTQPVQLKGDPGTRTTGICLNILTQHGWRTVWAMHLVHHPDDIRNSLTKRRSQRNGRRSRNTRYRPPRWNNRKRAKGWLAPSLMTNVINLVTWVKRLKKHAPVTQITIEDVKFDTQLMQNPDISGLEYQYGTLHGTDIREHTFWKCNYTCSYCGKKNVPLTVDHIKSQSPRTPDRQAGTNTPSNLTAACKPCNQEKSNYSVEEFAIMRGVKSFPLLKINNEKNLKAVGISNSIRLRIIEETKNATGINPELGSGGRTKFNRENQKYPKTHFIDAACAGESGAKVSLNPNMQIYIVKACSRNARRMQQPDSFGFPKGKAKEFSCIHGVRTGDIGKAVVTKGKNKGTWIGRISIRSTGTFKVGNKDGVNYKKIKVIQRNNGYSYNFAYPPLFQNPKP

SEQ ID NO: 3865 - protein, 423 aa, Moorena sp.
MRVFVLNKNRQPLDPCKPARARILLSTGKAKVYRRYPFTIFLTEEIKEPITHEHQLKIDPGAKTSGLAIVQGKRVIWGAELTHRGFQIREALTSRRQLRCSRRNRKNRYRKPRFLNRTRPKGWLAPSLMSRVQNILTWVKKLTRLCPVTGISQELVRFDTQKLQNPEISGIEYQQGTLYGYELREYLLEKWNRKCAYCGATGTQLEIEHIKPKSKGGSDRVSNLAIACRPCNQAKSNQDIELFLSKKPSILKRILNQAKRPLADAASVNTTRWKLYHELKSIGLPIEVGSGGLTKFNRCRQSLPKTHWLDAANVGKVETLIIEVTHPLIMTAKGHGTRQLCRTNKYGFPIRHCSRIKFHKGFQTGDIVRAVVTKGKNIGTYVGRVATRKSGSFNISTKSGLVQGISHKYCQFIHRKDGYAYTN

SEQ ID NO: 3866 - protein, 458 aa, Microcoleus sp.
LQSNKLKVTLVSAANLTSLYNQVEANITRKWRDTTMSNFIFVVDTNKKPLTPCKSSMARKLLTAGKAAIFRRFPCTIILKKAVTATIESITLKLDPGSKTTGIALLQGEKVIFGAELTHRGQTIKASLESRRSLRRGRRNRNTRYRQARFLNRTRKKGWLAPSLQHRVETTLTWVEKLRRLAPIGLIVQELVRFDLQQLENPEISAIEYHQGELQGYEVRQYLLNKWNRKCAYCDAENVPLQVEHIHPKSQGGSNRISNLCLACQKCNQKKGTQKIEQFLAKKPDILSRILTQSKRPLKDAAAVNSTRWTLFDHLKETGLPVLTGSGGLTKFNRSRLQLPKTHWLDAACVGQVEALELLTNKPLLIKATGHGTRQMCRTDKFGFPSRYIPRNKFVKGFQTGDIVKAIVISGNKIGEYVGLVAVRTTGSFNISASELVQGISHKYCKIVHRKDGYSYAY

SEQ ID NO: 3867 - protein, 419 aa, unidentified
MVYVISQDSKPLMPCSNVIARLSLKQGKAKVKRREPFTIKLTCETTNYTQDLTLGVDTGSGTIGTAVSKNNGDIVYMAEVVVRNDITDKMTQRAKYRRNRRNRKTHYRKARWLNRANSIRNDRFSPTMQSKLHSHIKEIEYIKSILPVTEMVFETGQFDTHLMKNPSLINPKVKHWGYQKGTNYGFENTKAFVLNRDNYTCQYCKGKHKDSKLEVHHIVFRSQGGSDEESNLITLCHTCHKDLHSGKINTKLSGKIKGNLKYATQMNSIRKQLFRLYPNAIETFGYVTKANRLHLGVDKEHYYDACTIATQGNAFNVKSNLYKKKCVSDGDFQQTKGIRSEQPIVTDKICGFRKYDKVKYFGREYFIKGRMSTGYAILMNINGEKADFSYLPRGFKTPKLSNCKRITARTSQMVQAVAI

SEQ ID NO: 3868 - protein, 471 aa, Acidithiobacillus sp.
MAVFVLDKRKKPLMPCSEKRARILLERGRARVHRMVPFTIRLVDRLQEDSVLQPLRLKVAPGSKTTGLALVREQETEDADTGEIIRTLAVVTLLELQHRGHAISKALKQRRGHRRFRRNQLRYRPARFLNRKRPTGWLSPSLQHRVDTVTAWVSRLQRWAPVSALSTLLHRFDTQALQNPEISGAEYQHGTLFGYEVREYLLEKWGRKCAYCDAEHTPLTIDHIHPKSKGGSDRVSNLTLACVPCNQRKSNLDVRDYLAHDPKRLARIEAQRKAPLKDAAAVNSTHWALFNRLKDTGLDLEVGTGARCKWNRKRHNMPKAHSLDAACIGPVDGIAHWQQPVLQIKATGRGSYQRTRPTKHGFPRGYLMRSKSAFGFQTGDLVKAIVTKGKKAGVYLGRVAIRASGSFDIQAKNERVQSISHRFCTLIQRADGYGYFWDKIATSQGDAGTGAACAAALSLPGIHAGVSRANG

SEQ ID NO: 3869 - protein, 443 aa, Bacillus sp.
MVEENMTCFMQRKGEYPMVFVLDTNKCPLAPCHEAVARKLLKQGKAAIYKRYPFTIILKEIVDNFRPKTPYRLKIDHGSKHTGLAILRGQEVVWLGQLDHRTDIKERMDKRRAFRRARRNRKTRYRKPRFLNRRRKDGWLPPSLESRVQNIQTWVNRLKKLCPIGYISYENTKFDTQLMRNPEISGIEYQQGTLQGYEVREYLLEKFGRKCCYCGKENVPLEVEHIIPKSRGGTDRVDNLCLACHDCNQRKGSKTAEEFGYPHIQKQVKESLKDASAVNSTRWKVYEVLKQSGCEVECGTGARTKMNRIRLDLPKTHYFDACCVGESTPNHLYFKTKEVLFIRAKGRGSRSRTNLDRYGFPRGYLARQKFFFGFQTGDMVKAVIPRGKYQGVWFGEVSCRKTGSFDIKGKDGKRIAQGINYRYVQVIQRFDGYTYRREGMNIA

SEQ ID NO: 3870 - protein, 512 aa, unidentified
MSTIYVLNKDGKPLMPTTRGGHVRHLLKEQKARVVQSNPFTIQLLYETNDVVQPLYLGIDPGRTNIGVAVVKADGTAVFAAHLETRNKKIPKLMQDRKKARRARRTNGRRCRRQRRAKANGTISKKCVKQDTAQSKNPSKRAKEIGVIKRHLPGCKKDVLCVGIKNKEAKYTNRARLEGWLTPTANQLLQTHINLVKKIQKFLPISDAVLEVNKFAFMRLDNPNIQKWQYQQGPLYQKGSLENAVSEMQEHHCLFCEKPIEHYHHVVPKSENGSNTIANIVGLCAEHHNLVHKDVAWQEKLVEEKTGLNKKYGALSVLNQIIPALTKELSFLFPKHSFMTNGKSTHDYRAAHGISKDHWLDAYCIACSVLPIDVCDSTINNCVPYELKQFRRHDRRALNNENMNRVYTLNDKVVATNRHKATEQEAASLEEFRKEHPNDVCKLKVKEHHPTYRNMNRNYPGSVFLVGKQIHVMQGIASSKDGKATKYNDTRATTIAAGKCKFVAKNSGILFV

SEQ ID NO: 3871 - protein, 427 aa, Enterococcus sp.
MVYVLSIDNEPLMPCSNVIARLLLKQGKAKVKYREPFTIKLTYETTTYTQPLTLGVDTGSQTFATAVADEKGNILYTSEVTLREDKNNSIKKKMDQRRMYRRNRRSCKTRYCKARFNNRKNSKRKERFSPTMTSKLHSHQKEIEFIKSILPIAKLIFETGTFDPHLMKNPSLANPKVKPWGYQQGPNYGFENTKARVLVRDNHTCQICNKKPKNERLEVHHIVFRSQGGSDEENNLVTVCHSCHVELHKGLIHPNFEGSLKSALKYATQMNSIRIQLLKLYPDAIETFGYVTKANRLNLGLPKEHYVDAAVIATAGNQVKFACNLMIKRCIPKGDFQRTKGVRSEKTIPKGKIDGFKKYDKVRYFGNEYFIKGRRTSGYFTLMDIYGQTISFNHMSKGQKTPKAKNCHRISARKSWIVTTKKLENIA

SEQ ID NO: 3872 - protein, 430 aa, unidentified
  source 1..430: note = Candidatus Falkowbacteria bacterium
MVFVLDKNRKPLAPCHPARARKLLKTGKAKIFRKYPFTIILEKEIEEENEEEYRLKIDYGSRHTGLAILKNNKEAIWLAQIEHRTNIKDKLDTRRGHRKFRRNKLRYREKRFNNRKRKKGWIPPSLQSRVDNIQSWVEKLQKLVPLTYISYENVRFDTQLMQNAEISGIEYQQGTLTGYNTREYLLEKFNRKCCYCGKQNIPLEIEHIIPKSRGGSNKVDNLCIACHDCNQKKGNKTAEEYGYPNIQKQVKKSLKDCAILNATRWKVYKALISTGLEVECGTGARTKMNRINLGLPKDHHYDAVCIGQSTPKEIVFKTNKVLYIKALGRGSYSRTTLDKYGFPRAYLLRQKYFFGFMSGDMVKAVVPKGKNKGIWYGSVACRSTGSFNINLIKGRIQGINHKYCRIVQRFDGYKYTLERREMELSHSSHT

SEQ ID NO: 3873 - protein, 323 aa, Ktedonobacter sp.; identical to SEQ ID NO: 3819

SEQ ID NO: 3874 - protein, 417 aa, unidentified
MPCSPAKARLLLKERKAIVKRRTPFTIQLTIATGEAKQPVALGVDSGYKHIGLSATTEKAELYASEVELRQDITDLLSARLALRRSRRSRKTRYRAPRFDNRVASKCEGWLAPSVENRIVAHMSRVEAVMRVLPVTAITVETAAFDTQLLKNPDIAGEAYQQGEQLGFWNVREYVLFRDGHVCQHCRGKYKDPILNVHHIESRRTGGDAPNNLITLCETCHKAFHRGEIKLKVKRGKSFKAATFMGIMRWTLFERLKKAHPELSVRNTYGYLTKHKRISHGIAKSHCADAYCIADNLGAKRLEGFFFQKQTRKHNRQIHKLSILKGGLRKKNQAPYEVKGFRLFDKVICKGKEAFIFGRRTSGSFDVRRLDGTRISAGISYKKLRLLEPRTTYLTEFRREAALPPLPKCRGFRAEFL

SEQ ID NO: 3875 - protein, 429 aa, Ktedonobacter sp.; identical to SEQ ID NO: 3296

SEQ ID NO: 3876 - protein, 414 aa, Parasutterella sp.
MPCSPAKARLLLKEKKAIVVRRTPFTIQLTIATGESKQPVSLGVDAGYKHVGLSASTEKAELYESEVELRQDVSDLLSARRALRQSRRNRKTRYRAPRFDNRIRTKRKGWLAPSVENRINAHLSRVETVIRLLPVTKITVETTSFDMQLLKNSDIAGKEYQEGEQLGFWNVREYVLFRDGHVCQHCHGRSKDPVLNVHHLESRRTGGNSPGNLITLCETCHKALHRGEIKLKAKRGHSFRAQAFMGIMRWEVLNRLKASHPELEVNNTYGYRTKHARIANDIAKSHCADAFCIAGNLGAERLGEFLFQKQTRRNNRQIHKLSILKGGIRKRNQVPFEVKGFRLFDKVAYKGEEGFIFGRRSSGYFDVRKLDGTHISAGISYKKLRLLEKRQTYLTEIRKEEALPPLPEGRGLRA

SEQ ID NO: 3877 - protein, 448 aa, unidentified
MYWLIASNISKKKGSALHGICTRYQRTTTYANHKAWKSKRLLNSHLAKVVKRCPFTIQLLYQSTKEIQPVSLGVDAGSKHIGMAATTEKKVVYQEELSARNDVVKLLSARRTLRRTRRNRKTRYRKPRFNNRAHSKHKGWRAPSVEVKIQEHITTIKRICQILPISEIQVETAEFDLQRLKAMKEGKPLPVGTDYQLGEQYDFYNTRQYVLHRDGYTCQCCGTHDNNIKLHVHHIESRQTGGDAPNNLIILCEHCHKALHEGKLELSKGKKRGKSYRDATFMGVIRKTLLERLKKEIDVPVEGTYGYITKYWRERAGLEKSHIHDSVCISKYPYAKPLDIYYLTKTVRHHNRQIHKSNFSKGGIRKRNQAPYLVKGFRLFDKVLYQGKEYFIFGRRATGYFDIRTLDGTKVNKGSISYKKLRIQDTAKAYLKEARAIPHMNKFTCILA

SEQ ID NO: 3878 - protein, 518 aa, Anaerostipes sp.
MTPKKRKEASRMSEYIYVIGVDGDPQMPTKRKRHVEQLLQTGRARIFRQVPFTIQLTYENEPVLQPVTIAEDPGRSNIGMAVVSLSGELLSAAVVQTRNKEIAKLMEKRKQHRRASRNGERRARQRLAKKYHTMITAGFLMRKLPMYGKDKRVRCNVIKNTESRFCNRKRENGWLTPSAEHLVRTHINLIHKMQKFLPITDVAIEINRFAFLSLEDPSISGVDFQNGPLKGYDDLNAAVEDLQDGHCLMCNSPIEHRHHIVPRSMQGSNTIGNIAGLCCKCHERVHKDTRFEDRLKKKKAGLDKRYAAVSVLNQAIPFICKRLEQEFEKEHVHYCSGRDTGMVRRPFGYHKTKEEQLHEVDAWCIAVLALQHVPEKAPEFDHVHEILQFRRQDRSRIKAQTSRAYYHEGKKIAKNRKKAEGQRDDSLQEWRKRQVERYGKEQTRKMISQLEVKESIRRYNRLDRLMPGAVFYYQGVRYVMRGQHSNGQYLQAVGMGSKDFPAKKCKIVANNEGLVFVS

SEQ ID NO: 3879 - protein, 458 aa, unidentified
LVLDNQKQPLMPCRPARARQLLRDGKAAVFRRYPFTIILKDRQGGDTQPVSLNVDPGSKTTGIALVALFQRGHVAVYGHHIVHRGQQIKDALESRRAIRRLRRNRKTRYRKPRFLNRPRPAGWLPPSLMSRVYNVDTWTKRLNRLTPVTSANVETVRFDTQLIENPDIAGKDYQQGSLFGWELREYLLYRHQHTCAYCHGLTKDVVLEKEHVIPKSLGGSNRLANHVISCRECNVDKGSLHPNAWMSLCKQRGDKLNLTRARNMQRIMDGYRPSLRDAAAVNATRYAVGNSIKSIIPNTQFWSGGLTKKNRSEQGYTKDHWIDAACIGQNGSEVALECHHILVSSAKGHGSRQMCRVDKYGFPRTSAKTSSVVYGFRTGDLVTANVPTGKKQGLHIGRVAVRKNGYFNIQSESGAVQGISHKHCRITQHSDGYNFNYGAAIPPTTDSKNSVAVFLPNF

SEQ ID NO: 3880 - protein, 447 aa, Marinobacter sp.
MSVFVLDKRKHPLMPCTERRARLLLSRRRAVVVRAYPFTIRLKNRTGDVTQPLRIKIDPGSKATGIAVVRENGQKQHVLALMELVHRGRQISKSLDQRRAFRRRRRNQLRYRAPRFLNRTKPKGWLAPSLQHRVDTTRSLVNRLRSLVPVVSISQELVRFDRQKMENPEVSGVEYQQGTLLGYEIREYLLEKWGRECAYCADTDTPLQIEHIDPKANGGSNRISNLTLACRPCNQEKDRKSLVSFFATSKRLKNHQAKLDRILKQCKKPLRDASAVNSTRWALHQTLKQTGLPVEVGTGGRTKFNRRRLNIPKTHALDAACVGEVEIVEGWDVPTLAIKATGRGSYKRTRLTKHGFPRGYLMRQKQVQGFQTRDMVRAVVPAGTKAGTWQGRVAVRKTGSFNIQTSSGAIQGISHRHCVLTQRADGYGYHIQPNQRKEEGDRENESR

SEQ ID NO: 3881 - protein, 453 aa, unidentified
MLMAVAVVSRTGVPLMPTSPYRARKLLASGKAEKYGYDPFTIRLTERETGDTQPVELCMDTGYIHIGVSVKSEKHEYLALQIDTLTDEKKKHEKCREKRRNRRSRKRYRKPRFDNRKRDKGWLAPSLEHKKEIHVRAAERICRVVPVTDITMEMGNFDTQVLKAREEGRPLPQGTDYQQGERYGTATLREAVFSRDNYTCLCCGRTMKDGAYFHVHHIRYRSQGGTDRMANLATVCEKCHTPANHQPGGKLYNWKLEIKSFKGATFMTAVRWQMYREIKEKIPDISVHLTYGAATKERRRALDIEKSHVNDAFVMGRFHPGHRARPELYIKKRRNNRVLESFYDARYIDSRDGKRKSGKELFNGRISRNHKKDSENLHKYRLRKVSKGKRSIRKKHYPIQPHDILVYCGRKYETAGCHNLGTGAILLPERKSIAVSKLKIYRYSGGYYKAEFN

SEQ ID NO: 3882 - protein, 493 aa, unidentified; identical to SEQ ID NO: 3781

SEQ ID NO: 3883 - protein, 427 aa, Nitrosococcus sp.
MNRVFVLDTDRKPLMPCSPARARRLLRDGKAAVYRMQPFTIILKYRVDPNPQPVEFKVDPGSKITGLALVGNFPQQGRVVLWAANLTHRGYAIRERLASRRSLRRGRRGRKTRYRAPRFLNRTKPKGWLPPSLNSRVENVSSWFNRLLDRVPISECHIETVRFDTQKIQNPEINGVEYQQGELMGYEVREYLLEKWDRKCAYCNKKDIPLEVEHIIPRSRGGSNRVSNLTLARAPCNKKKNSKTAAEFGYTQIQSKSKLPLKDAAAVNATRYAIGCTIQSVGLPTSFWSGGRTKKNRISQGYTKDHWIDAACVGESAEQVTITEGYRALHIKATGRGTRQVVRTDKYGFPRGKAGRCRRVKGFQTGDLVRLSQPQGKYAGDHVGILASIRASGTFDVKAKAGKISANWINFKLIQRGDGYDYSLSAV

SEQ ID NO: 3884 - protein, 420 aa, unidentified
MIYVRSKDGKALMPSERGGRIGYLLRHGKAHVVSRVPFVVQLDYESTTYTQEVSLGIDAGSKHIGVSASSEKKELLAAQVELRSDVVNLLSARMELRRTRRNRKTRYRKSRFDNRKRMDGWLAPSVKQKVESHLKVIRLVHKLLPITKTTIEVAQFDAQKIKNPDIKGDKYQQGEQMGFWNVREYVLARDGHRCVHCKGKSKDPILNVHHLESRKVGGNSPSNLVVLCETCHKAYHRGEFDLKIKRATTLRDAAVMNIMHWSVYERAKAEFGNVYLTYGYITKHTRIENGIAKTHAADAFCIAKNVNAMRLSFFFMCRCIPRHTRVLHVANPKKDGIRRSTIASHKIGKSRFQRFDMVRWRGKECFIFGSTHGRPVLCDIEGIKMHDKQAVNIKTIKFLKRLRNDILVEEKTSESFHNYK

SEQ ID NO: 3885 - protein, 423 aa, Microcoleus sp.
MSNHVFVLDTNRKPLTPCQPGVARSLLKAGKASVFRRYPFTIILNKEVDANPEPVEFKLDPGSNVTGIALKQGNRIIFAAELQHRGQQIVEALRSRRQLRRSRRNRKTRYRPARFLNRTRSEGWLAPSLQHRVDTLMTWVNRFRRLAPIGRIAQELVRFDLQLMKNPDISGVEYQQGALQGYEVREYLLEKWGRTCAYCGVQNVPLEVEHIQPRSKGGSDRVSNLTMACRSCNQAKGNGDIRDFLSGQPDVLSRLLRQAKSPLNDAAAVNSTRWALFNALNATGLRVTTGTGGQTKFNRLRLNLPKAHWLDAACVGPVESLDIVTSKPLLIVAKGHGTRRMCGTNKYGFPTRHRSRRQIHNGFQTGDIVTATVTAGKKIGSYIGRVLCRASGSFDITTASGRVAGINHKYCKPIHRKDGYAYA

SEQ ID NO: 3886 - protein, 464 aa, unidentified; identical to SEQ ID NO: 3503

SEQ ID NO: 3887 - protein, 501 aa, Nonomuraea sp.
VPHQQRALEFESADNPGIRDETGLEGRKAPGAGHVRGETSGSSPAAGGATPDHPVREAGRESHPYVFVLDKHGRPLQPCTPARARQLLKKGRAVVHRHTPFVIRLKDRSIDSSEVDGVEMGVDPGSQHTGVSVFTAQAGERRARFAIQLDHRGATIRKMLQQRAAYRRRRRTQNLRYRAPRFSNRTRPPGWLPPSLRHRVITTVSWIDRLVRWAPVRAVHIERAAFDTHAIAAGKPLEGVEYQLGTLHGTEVREYLLAKWGRACAYCGSSGMPLNIDHIHPRSRGGSDRVSNLTLACVSCNQAKGNRPIEDFLTRKPELLAKIIAQAKAPLRDAAAAQSTRWALWRALDSRLPTHVASGGRTKWNRTRNHLPKTHTLDALAVGKLDSISETVSAVLVAGCAGRGTHARTRLDKYGFPRLRMPRRKLYFGFQTGDFARAVVPTGKKQGTHIGRVAARTNGYFNVTTIHGTVQGVHHRHFRLLQRADGYAYTTQKEGRASSSG

SEQ ID NO: 3888 - protein, 442 aa, unidentified
MSTTVFVLDKKHRPLMPCRPARARRLLRAGRARVVKRFPFVIRLVDRTVEQSEVQPVLIKLDPGSRETGAAVVRDDEKKRHHALAFFVIKHRGGAIRDALKARSAFRRRRRSQNLRCRSPRFLNRVKPKGWLPPSLRHRVETTLSFVRRMCRYLPVSGIAAELVKFDSQKLQTPEVSGIEYQQGTLFEYEVREYLLEKFGRKCVYCGAEGVPLNIDHVVPRAKGGSNRVSNLVLACVSCNQKKGARSLEDFLKGKPEVLARVRRELKTPLRDAAAVNATRWVLFNELKATGLPVETGSGALTKLNRHAFGVEKEHWLDALCVGRLNGVVTRKGLNVLEIRCMGRGSRQRTRLTKYGFPRGYLMRQKCVHGFATGDMVEANVPKGKKAGLWRGRVAVRVSGSFNIQTPKGVIQGVGWKHCRLISHNDGYGYAWLGHAPHSSPA

SEQ ID NO: 3889 - protein, 425 aa, unidentified
MENTLKVFVLNMRGQPLMPCSPPKARKLLRAGKAVPVRRTPFVIQLTVPTGETKQPITLGVDAGYKRVGLSATTAKEELLASEVELRQDVTGLLSDRLALRRARRNRKMRCRAPRFDNRVRSKHKGWLAPSVENRIHAHLSRIEAVLRLLPVTSVTVETAAFDMQKIKNPEIEGEGYQQGEQLGFWNVREYVLFRDGHVCQACKGRSKDLILNVHHIESRKTGGDAPGNLITLCEACHKAYHAGKLKQFSPRRGASFRAETFMGLMRWTVINRLRERHPELPVTNTYGYLTKHKRNVAGLPKTHCADAFCIAGVLDAKRRGEYLFQKQTRRHNRQIHKLTILKGGVRKRHQAPYLVHGFGLFDKVLCKGEVGFIFGRRSSGAFDVRRLDGTKISAGISYKKLSLLEKRKMFLTELRKEGRDSSRV

SEQ ID NO: 3890 - protein, 461 aa, Clostridium sp.
MVFVLSKNKKSQSMCSNAKARVLLSKGYAVVHKVYPFTIRLKKEVDNPQQPKEYKLKIDPGSKGTGLSIIDNKDNVVFLATIEHRGQVIVSKLETRSGARRNRRQRETRYRKCKFINYYLKKGSKYKATSPRPLGWLPPSIKSIEQNIVSWTKKLSKLCNITSASIEVVSFDMQFMDNPNIEGVEYQQGTLLGYEIRAYLFEKYGHKCQYCNGVSDDNKLEIEHMISVKNGGSYAIKNLSLACHTCNDAKGSLNLAEWFEILKSSRKTKLNIERIKYIEPILKNATIHKPKRFGAWVNSYKNALIDDVRKLIDNVELSSGGRTMYNRIGLKLPKEHYYDALCVGEIPKTFKFKTNDVLSIKAYGRGSHFRGRTNKCGIITNNLPRQKYFFGFQTGDIVTAIVLKGKKQGKYFGRVAVRSSGFFNIQTKDNVVQGISRKYFTIIQRNDGYSYNIITRNKKNA

SEQ ID NO: 3891 - protein, 424 aa, Fervidobacterium sp.
VISKDGKPLMPTKRHGKVRRLLKQGLAKVVNREPFTIQLLYETTNYTQPVTVGIDIGSKVVGVSAITDKEEIFSAQIQLRQDISKLLLERRQHRRFRRYRKTRYRKPRFLNRRKEDGWLPPSLQWKVDAHVRIVNKLSKIIPITKVVVEVAPFDIQKVQNPDIEGEDYQNGPQKGFADVREYCLWRAGYKSELSGKTGVLEVHHIIPRSEGGADTPSNLIVLTTQEHKMLHEGKIKIPKSRLEQVKVLKDAAHVSAIGWYIVNKLKQNYQVAITYGSITKARRATYGLEKSHRDDAFVIAGGNIQERANEWYFGKLLRRQNRSLHKANPIKGGKRPLNTIKQVKGFRRFDRVECEGKIGIVSGLRSSGYFSISSLNGEKISDSVKYTKLRLLERAKTLMFERRERATCSWLKPRVSVARRYEIP

SEQ ID NO: 3892 - protein, 426 aa, unidentified; identical to SEQ ID NO: 3614

SEQ ID NO: 3893 - protein, 461 aa, unidentified
MSRVFVLDARGEALMPCHPARARKLLTQGRAVVVHQQPFTIKLLDRVGGETQPVTLKLDPGSRVSGLVLVGHFARGAEVLWAGEITHRGQLIRDKLLKRAGVRRSRRSRQTRYRPPRFRNRRRRVGWLAPSLQSRVDNSLSWVRRLRGWCPVSGLAMELVRFDMQAMQNPEISGIEYQQGTLQGYEIREYLLEKWGRQCAYCAASGLPLQVEHIQARGQRGSHRVSNLTLACEHCNQRKGTQDIRDFLAHDPVRLARILAQAQAPLRDAAATGSTRWALYEALQATGLLLEVGTGGRTKYNRSQQDYPKAHWIDAACVGASGEQVSLDPAMPILQVKAMGCGSRQMCRMDKYGFPRTGPKRFKRVQGFQTGDLVEAIVPTGKPTVGALGEGGALCRARGGARLRLVQYFDAAGGVGAGHPCPLLPLTSTRRWLSLCHRACLARRGIASSRHCLAAPFLLRL

SEQ ID NO: 3894 - protein, 429 aa, Ktedonobacter sp.; identical to SEQ ID NO: 3591

SEQ ID NO: 3895 - protein, 455 aa, Ktedonobacter sp.; identical to SEQ ID NO: 3806

SEQ ID NO: 3896 - protein, 394 aa, unidentified
MPTTPAKARRLLRDGKAKVVKKEPFTIQLQYATGETKQEINLGVDAGSKIVGLFATTEKEELFSAEVELRNDIVKLLAQRKAYRRNRRSRKTRYRQARFLNRKKEKGWFAPSIQHKINTHLKVVADIHKILPVSKIIVEVASFDIQKIKNPDIQGEEYQQGDQLEFWNVREYVLWRDGHRCHGKKGCKNNILNVHHIESCSTGGNAPDNLITLCKECHKAYHRGELKLNLKRGKSFRDAAFMGVMRRAFYNKLKDLYLDVNLTYGYITKTVRIKHNLPKSHRIDALCIGGNVSVKPNNVWFYIKKIRNQNRRLHKDTILKGGYRKANKATKYVFGYKLFDKVLFNNNKYFILGRRNNGYFSLGKLSGEKITVSYKKIKVIRMSQSLLCERRQTA

SEQ ID NO: 3897 - protein, 406 aa, unidentified; identical to SEQ ID NO: 2752

SEQ ID NO: 3898 - protein, 442 aa, unidentified
MVTVQQSTHHLPFGRVFIRRNLFMVYVISQDGKPLMPCSDPIARLLLKQGKAKVKKREPFTIKLTYETTNYTQGLTLGVDTGSGTIGTAVSKDNGDIVYMSEVVVRNDITDKMTQRAKYRRNRRNRKTRYRKARWLNRASSIKKDRFSPTMQSKLHSHVREIEYIQSILPITEMVFETGQFDMQLMKNPSLANPKVRPWGYQKGANYGFENTKAMVLNRDNYTCQCCKGKHKDSKLEVHHIVFRSQGGSDEESNLLTLCHTCHKDLHSGKINPKLSGKVKGNLKYATQMNSIRKQLFRLYPNAIETFGYVTKANRLHLGVDKEHYYDACTIATQGNAFNVKSNLYKKKCVSDGDFQKTKGIRSEQPIVTDKICGFRKFDKVRYFGNDYFIKGRMSTGYAILMDIDGNKIDFSTMPRGYKTPKLSNCKRITARSTVMTQVKVV

SEQ ID NO: 3899 - protein, 473 aa, Acidithiobacillus sp.
MFMHILVLDKRKKPLMPCHPARARELLREGRARVHRIVPFTIRLVDRLQADSVLQPLRLKLDPGSKTTGLALAREKETVDPTTGEVLRTLTILMLLELKHRGHAIRDALTSRSALRRRRRGNLRYRPARFDNRTKPEGWLAPSLQHRVDTTLAWVKRLMRWAPVTALSQELVRFDMQQMQNPEISGTEYQQGTLAGYEVREYLLEKWGRECVYCRAQHTPLEIDHIHPRSKGGSDRVNNLTVSCHDCNQRKGNRPLEQFLAKAPERAEKILKQAKARLNDAAAVNSTRWTLFQRLKATGLDVEVASGGRTKWNRIRLGLPKAHCIDAACVGHLDAIKNWQQPVLSIKATGRGSYQRTRLTKYGFPRGVLTRSKSAFGFQTGDMVKAVVTRGKKAGAWLGRVAIRVSGSFNIQTATGLVQGIHHRFCTLIQRADGYSYSWTKIASTQGDAGLGRSQTAALSLPGLNPGVSRATG

SEQ ID NO: 3900 - protein, 413 aa, unidentified; identical to SEQ ID NO: 3290

SEQ ID NO: 3901 - protein, 431 aa, unidentified; identical to SEQ ID NO: 3507

SEQ ID NO: 3902 - protein, 421 aa, Ktedonobacter sp.; identical to SEQ ID NO: 2376

SEQ ID NO: 3903 - protein, 473 aa, unidentified; identical to SEQ ID NO: 3562
  source 1..473: note = uncultured beta proteobacterium

SEQ ID NO: 3904 - protein, 414 aa, unidentified
MVYVINKQGQALMPTERFGKVRRLLKNSLAHVVCRIPFTIQLDYDTTDYTQPVSLGVDAGSKHIGISATTSEKELYAADVELRNDIVDKLYTRRELRRTRRSRLRYRKARFNNRVSSKRKGWLAPSVENKIQTHLTVVEKIHKFLPITNIVVETASFDIQKINNPSISGVEYQQGEQLDFFNVREYVLFRDNHICQHCKSKSKDEVLNVHHIESRKTGGDSPNNLITLCETCHKAYHRGEFELNVKRGKSFRDAAFMGIMRWKLYDRLKNIYPNVSMTFGYITKNTRITNNLPKEHYVDARCISGNPVAKPLGYYFYQKKVRCQNRQIHKANFLKGGRKKLNQAPFLVKGFRLFDLVEYQKELYYIFGRRSNGSFDIRKLDGTKVNKGSINCKYLRLIDKRKSILTEKRTQVNL

SEQ ID NO: 3905 - protein, 374 aa, Halomonas sp.
LNWSIAAFRSKKALQQRAAFRRRRRSANLRYRAPRFNNRTKPKGWLAPSLQHRVDTVTAWVKRLSRLAPVTAISQELVRFDTQKLENPEISGVEYQQGTLLGYEVREYLLEKWERECAYCGTGDTPLEIEHVVPRSRGGSNRVSNLTLSCHPCNAEKDSQTLTDFFATNKGLKKRLKANGHAADARLDRVQRQLKQPMRDASAVNATRWALFSALKTTDLPVAVSSGGHTKYNRQRLNIPKTHALDAACVGAFEKLHDWTVPTLTIKAMGRGSYQRTRLTKHGFPRGYLMRQKQVHGFQTGDMVRAIVPTGKKAGTYTGRVAVRKRGSFNIQRSAGTVSDISYKYCTLIQRSDGYGYYVTPFTNLTGGAGQAVA

SEQ ID NO: 3906 - protein, 415 aa, unidentified
MVYVVANDGQPLMPTERHGKVCRMLKSGIAKVVKKCPFTIQLQYKSERNVQPVALGIDAGSKHVGVSATTKAKVLYESDVELRDDIVKLLATRRQLRRRRRSRKTRYRPARFDNRRRKEGWLAPSIRQKIESHLTVVANVCKILPVSQIIVETASFDIQKIKNPDIQGIEYQQGEQMDFWNIREYVLFRDGHTCQCCKGKSKDKVLNVHHIESRKTGGNAPNNLITLCETCHKGYHNGTVTLPKNIKRGMKFKDAAFMGIMRWTFYNTLKEQYEPDIPVHYTYGYITKNTRINHNLPKGHCIDARCISGNPDAVSDGTYYYQKKVRCHNRQIHKQTILKGGIRKSNQAEYLVRGFRLFDKVRYQGREYFIFGRRKSGFFDIRTLSGEKVNKGSINVKRLTFVDTRKNYLTERRTV

SEQ ID NO: 3907 - protein, 457 aa, unidentified; identical to SEQ ID NO: 3236

SEQ ID NO: 3908 - protein, 433 aa, Ktedonobacter sp.; identical to SEQ ID NO: 2375

SEQ ID NO: 3909 - protein, 465 aa, unidentified
MSTCACVLSKNGKRLMPTIRLGKVRHLLKDGKAKIIKHHPFTIQLLYDSEANTQPIEICEDVGYNYIGISVKSESHEYVSAQYDTLQDEKDCHDDCRRMRHTRRNRLRYRQARFDNRKRDDGWLAPSLEHKKELNVNVIKMYCEVMPIAHATVEVGSFDTMLVKAIEEGKVTPEGADYQKGPRYNLATLREAVFYRDNYTCQVCGRKANEGAILHVHHMFYWMSRHGNSLSELVTACEKCHTPANHQKGGKLYGFGENIKLANLSGAAFMNTVRWQIVNELYAAFGKPFVTFTYGAMTKEKRITLHLEKSHNNDAYAMGSFHPADRCAFEHYEKVKRNNRILERFYASQYIDIRTGEVTTGKSLFNGRINRSHKKDSENLHKYRGKRIRKGYRALRRKKVALNPGDLVSLNGETLIVHGTHTNKKGTVRVEFKTPSKGGKKSASLKNVEIVKTANSMHSAWKKVS

SEQ ID NO: 3910 - protein, 417 aa, unidentified
MPCSPAKARLLLKEKKAIVKRRTPFTIQLTIATGEAKQPITLGVDSGYKHIGLSATTEKAELYASQVELRQDITDLLSARLALRRSRRSRKTRYRAPRFNNRVASKRKGRLAPSVENRIAAHMSSVEAVMRVLPVTAITVETAAFDTQLLKNPDIAGEAYQQGEQLGFWNVREYVLFRDGHVCQHCRGKSKDPILNVHHIESRRTGGDAPNNLITLCETCHKAFHRGEIELKVRRGKSFKAETFMGIMRWTLFERLKKAHPELSVRNTYGYLTKHKRISHGIAKSHCADAYCIADNLGAKRLEGFFFQKQTRKHNRQIHKLSILKGGLRKKNQAPYEVKGFRLFDKVICKGEEAFIFGRRTSGSFDVRRLDGTRISAGINYKKLRLLEPRTTYLTEFRKEAALPPLHKCRGFRAEFL

SEQ ID NO: 3911 - protein, 461 aa, Desulfotignum sp.
MGAFAVNGVSRVFVLDKKGKPLMPCHPARARKFLAQGRARVHQMFPFTIRLVDRIREDSDVQPVNVKLDPGAKTTGMAVVRQDGGHAQILHLSELTHRGAVIRKKLDQRSNYRRRRRTANLWYRKKRFDNRTRPKGWLPPSLRSRVDNTLSWVKKYQRFCPVTGIVLERVRFDTQKLQNPDISGIEYQQGTLFGYEVKEYLLEKFNRTCAYCNGLSKDPVLEIEHFIPRNPSKGDKGSNRISNLAIACKTCNQESKKNLQPADWISLLSRSRKKIDQVRLKNATRFLEGKRPSLASTAAVNATRNAIFFELRDLGLPVECSTGGRTKYNRSRLDIPKTHCLDAACTGHVDSVSGWKQNVFLIKAMGRGSYQRTRVDKYGFPRGTLMAQKTVKGFATGDMVKAIVPTGKKKGTYICRVAVRKSGSFNIQTNTETVQGISWKYCKIISRQNGYNFASQVSSPT

SEQ ID NO: 3912 - protein, 425 aa, Caldicellulosiruptor sp.
MVYVISKEGKPLMPTKRHGKVRKLLKQGLAKVVRREPFTIQLLYDTTTYTQPVTVGVDIGSKVAGISAITEKEEVFSAEVELRQDIKKLLLERRELRRARRYRKTRYRKPRFLNRRKPEGWLAPSLQWKVDAHFRFVNFVAKILPVTKVVVEIALFDIHKVVNPEVEGKGYQEGPQKGFWDIREFCLWRAGYKSELSGKKGVLEVHHIIPQSQGGPDNPSNLIVLTVEEHKAVHEGKLKIPESKLAKVKIFKDASHVSTIGWHIVNKLKQQYDVEITYGSITKQKRKEIELQKTHRNDAFVIAGGNKNIKRADEWYFGKFFRRQNRSLHKTNPIKGGKRPVSTIKEVKGFRKFDRVLYNGQVGIIYGLRSTGYFDIRILSGEKIHSSAKWSDLKLLEKAKTLMLERRVQRTCLHLAEDGVSCAEV

SEQ ID NO: 3913 - protein, 471 aa, Caldicellulosiruptor sp.; identical to SEQ ID NO: 3268

SEQ ID NO: 3914 - protein, 433 aa, Ktedonobacter sp.; identical to SEQ ID NO: 2375

SEQ ID NO: 3915 - protein, 447 aa, unidentified
VPAYRFKHITKKEVPYMVYVLDIDGQPLMPTSRHGKVRRLLNSHLAKVVKRCPFTIQLLYQSTKETQPVSLGVDAGSRHIGLSATTEREVVYQEELVPRNDIVKLLSARRALRRSRRNRKTRYRRVRFNNRVHSKHKGWLAPSVEVKIQEHITATKRICQILPIFDIHVETAEFDLQRLKAMEEGRLLPAGTDYQLGEQYDFYNTRQYVLHRDEYTCQCCGTHDNNVKLHVHHVESRQTGGEAPNNLITLCEHCHKSIHAGKMMLPKGKKRGKSYRDAAFMGIMRNTLLERLRKEVNVPVTMTYGYITKYWREKAGLEKSHINDAICISKHPYARPLETYYLTKAVRHHNRQIHKTKFSKGGIRKRNQAPYLVKGFRLFDKVLYQGESYFIFGRRITGYFDIRTLDGTKVNKGSTSYKKLRIQDTAEAYLTEVRAIPHMNEFTCVLA

SEQ ID NO: 3916 - protein, 424 aa, unidentified
MSNFILVLDTNRKPLNPCTPGIARGLLKSGKARVFRRFPFVIILNKAVLSSPAQMQLKLDPGSKTTGIALLQGEQVVFGAELTHRGQQIKNALESRRALRRGRRSRKTRYRKPRFLNRTRQCGWLAPSLQHRVETILTWVNRLRRYAPITNISTELVRFDMLALDNPEISGIEYQQGTLFGYEVREYLLAKWDRKCAYCSAENVPLQIEHIHPKAKGGTNRISNLCVACEPCNIKKGTQDVEVFLTKKPDVLKRILAQAKRPLKDASAVNSTRWALMNRLKQTGLPVLAASGGKTKFNRCRLLLPKTHWLDAACVGEVEQLEVKTTQPLLIKATGHGTRQMCGTDRFGFPTRHRKTIQIHKGFQTGDIVKAAVREGKKFGTYVGRVLCRATGSFDIATKSGRVAGISHKFCTHIHRKDGYNYAY

SEQ ID NO: 3917 - protein, 411 aa, unidentified
MVYVQDIDGKPMMPTTRHGKVRRLLKDNKAVVVNTCPFTIKLTYKTSDYKQEIVLGVDSGTKHVGLSATTKSKELYASEVILRSDVVDLLSTRRGLRRTRRSRLRYRKQRFNNRVKSKKDGWIAPSVRHKIDSHIRIISFVYSILPVSKLIVEVAQFDTQKIKNPEISGKEYQEGEQLGFWNVREYVLARDGHKCQHCKGKSKDPILNIHHIESRKIGGDSPSNLITLCETCHKEFHKGNIKLKVSRGKSLRDAAVMGIMKWKLYEELKSRYDNVSMTFGYITKYNRINHGIEKSHVSDAFVISRNFNSCRLGYYYKRKLVRRHNRQIHKMKILKGGIRKRNQAPFKVFGFKLFDKVMFQGEEHFIYARRLSGQFNIRDINGENKKDVSCKKLKYVSHGLVSVKTNLFLSQ

SEQ ID NO: 3918 - protein, 417 aa, unidentified
MPCSPAKARLLLKERKAIVKRRTPFTIQLTIATGEAKQPVTLGVDFGYKHIGLSATTEKAELYASQVELRQDITDLLSARLALRRSRRSRKTRYRAPRFDNRVASKREGWLAPSVENRIAAHMSRVEAVMRVLPVTAITVETAAFDTQLLKNPDITGAAYQQGEQLGFWNVREYVLFRDGHVCQHCRGKSKDPILNVHHIESRRTGGDAPNNLITLCETCHKAFHRGEIKLKVRRGKSFKAETFMGIMRRTLFERLEKAHPELNVRNTYGYLTKHKRISYGIAKSHCADAYCIADNLGAKRLEGFFFQKQTRKHNRQIHKLSILKGGLRKKNQAPYELKGFRLFDKVICKGEEAFIFGRRTSGSFDVRRLDGTRISAGINYKKLRLLEPRTTYLTEFRKEAALPPLHKCRGVCAEFL

SEQ ID NO: 3919 - protein, 470 aa, unidentified; identical to SEQ ID NO: 2825

SEQ ID NO: 3920 - protein, 452 aa, Lactobacillus sp.; identical to SEQ ID NO: 3322

SEQ ID NO: 3921 - protein, 452 aa, Ktedonobacter sp.; identical to SEQ ID NO: 3544

SEQ ID NO: 3922 - protein, 422 aa, unidentified
MQNFVFVLDANKQPISPCHPSVARKLLRDRKAAVYRRFPFTIILKRAVDKPIVEPITVKVDPGSKTTGIALIQSNKVVFAAEVEHRGQAIKDALESRRAIRRGRRQRKTRYRQPRFLNRTKKKGWLAPSLKSRVDNLQTWLVRFLKLCNVRSISMELVRFDMQLMQDAEISGVEYQQGELAGYEVREYLLEKFNRKCCYCGKSDIPLEIEHITPKSRGGSNRVSNLCLACRSCNVSKGNQTATEFGFPNIQAHAKKPLKDAGAVNSVRWAIWRMFDASGLPVEVGTGGRTKFNRAQRAPAQNYPKAHWIDAACVGESGQAVKLCPEQKPLRIKAVGRQSRQMCRPNKFGFPRTASKQSRVVKGGFQTGDIVKAVLPSGKYVGTHIGAVAVRATGSFRVGKTDGISWKYCQRLHALDGYSYAN

SEQ ID NO: 3923 - protein, 420 aa, unidentified
MQYAYVLNKHGEPLMPCSPGKARILLKQQKACVVKRTPFTIKLLHGSAGYKQPITLGVDAGSKHVGLSASTEKRELYSEEFTPRSDVAELLSTRRQNRRSRRYRKTRYRAPRFNNRVHSKHNGWLAPSVEVKIQEHITVIKRICRILPITLVRVETAEFDTQRLKAMLAGKPLPVGTDYQLGEMYDEYNVRQYVLKRDNYTCQCCGAHTTAKKTVKLHVHHLESRKVGGNAPSNLITLCTTCHNNLHKGKITLDGKKRGKTLRDAAFMGIMRNTLLTRLRNELHIPVQNTYGYITKLLREQNDIKKSHVNDARCISKHPLAEPCSICYRTKAIRHHNRQIHKAKILKYGIRKANQAPYIVKGFRLWDKVLYNGQECFISGRRTSGYFALRKLDGTTITNSISFKKLRLLEPATNYLIERK

SEQ ID NO: 3924 - protein, 413 aa, unidentified
MVYVLNENGQPLMPTENHAKVRVLLRQGKAKVVNNCPFTIQLLYSSTNYTQPVTLGVDAGSKHIGLSATTEDKELYAADVELRNDIVKLLATRRASRRSRRNRKTRYRKPRFNNRKRDKGWLAPSIKEKIGTHLKVVDDTCKLLPVSKIIVETASFDIQKIKNPDVKGTDYQQGEQLGFWNVREYVLFRDGHKCQCCKGKSKDKILNVHHIESRQTGGNAPNNLITLCETCHTGYHKGTIKLPAKIKRGMKFKDAAFMGIMRWAFYGELKKRYPDVSLTYGYITKNTRIENELPKEHYVDARCISGHPLARPLGTVFYIKKVRCHNRQIYKFKILKKGVRKRNQAEYEVYGFRLYDKVSWKGRTCFVFSRKSTGYITLRLLDGTRVKESASYKKIKLLRMRSGYLIESRSVIF

SEQ ID NO: 3925 - protein, 430 aa, unidentified
LETRNKEIPKLMQDRKKARRARRTNGRRCRRQRRAKANGTISKKCVKQTTAQNGSVSKRAKDIGVIKRRLPGCEKDVLCIGIKNKETKFTNRTRPEGWLTPTANQLLQTHINLVKKIQKFLPISDVVLEVNKFAFMRLDNPNIQKWQYQQGPLYKKESLESAVSEIQEHHCLFCKKPIDHYHHVVPQHKNGSNTIGNIVGLCAKHHDLVHKDSAWEKKLAKKSTGLYKKYGALGVLNQIIPTLTNELSSLFPKHSFVTNGKSTYDYRAAHGVSKDHWLDAYCIACSVLPSNVCDSNINNHMPYVLKQFRRHDRRVLNNENMTRVYTLNNKAVAINRHKAKDQKTVSLEEFRKEHPDDVCKLKVKEHHPTYRNMNRNFPGSVFLVGKQIHVMQGIASSKDGKATKYNDTSATAIAAGKCKFVAKNTGILFV

SEQ ID NO: 3926 - protein, 429 aa, Ktedonobacter sp.; identical to SEQ ID NO: 3200

SEQ ID NO: 3927 - protein, 419 aa, Butyricicoccus sp.
MYVYVLNKHGEPLMPCSAHKARVLLKNKKACVVKRTPFTVKLLYGSAGYKQPITLGVDAGSKHVGLSASTETHELYREEFTPRNDVVDLLSTRREFRRARRNRKTRYRAPRFNNRVHSKHKGWLAPSVEVKIQEHITVIKHVCQIMPILLVRVETAEFDTQRLKAMLEGKPLPVGTDYQLGEMYDEYNVRQYVLKRDNYTCQCCGAHATKTKQVKLHVHHLESRKTGGNAPSNLITLCPTCHKAIHEGKKTLGTKKRGKPLRDAVFMGIMRKTLLARLHKELSIPVQQTYGYITKMLREKNNLPKSHMNDALCIAKHPKAAPCENCYRSKAVRHHNRQIHKATILKGGIRKTNQAPYLVKGFRLWDKVRYNGQECFISGRRATGYFALRKLDGAIVTNSASYKKLRLLETAKNYLRERM

SEQ ID NO: 3928 - protein, 336 aa, unidentified
MHVFVLDKDKNPLAPCHPAKARRLLKSGRASVFRPYPFTIILHEIEAKDCVVPETQLNASAPLSVESERSRGLKIDPGSQTTGLAILSENRVIWASELSHRGQQIKNDLEKRRALRRSRRHRKTRYRKPRCLNRTRPKGWLPPSLNASAPLASTSLASTSLSVESERSRGLNHRVETTMTWVNRLRKLLKETGLPVEVGTGGQTKFNRTRLGLPKTHGFDAACVGKSTPDRLDVAIEKPLLVAAKGHGVRQRCRSDKYGFPRTHAPKAKSFQGFQTGDIVKATIPQGKFAGNYTGRIAIRFRPSFRLNAGVKPFDVHPKYLTTVQKSDGYEYRFSK

SEQ ID NO: 3929 - protein, 424 aa, unidentified
MRVFVFNMRGRPLMPCSQRKARLLLRENKAMIYKYHPFTIQLTYTTGETKQDCHIGIDTGSKYIGAAVRSEDKVFWKGEIELRQDIRSNLDTKRIYRRSRRNRKTRYRKPRFLNRKRRDEWLPPSLQSRINHTFHWIDTLSSLVPNPILHIEVGKFDVAKMINPEIHGVDYQHGQTYGFFDERYFVFARDKYTCQCCGKSKNKILNTHHIIYRSNGGTNRVDNLITVCTDCHTSQNHRKGGIFYQWQEQHKKVKQYKEPPFMNTLRKRIFVAYPDAEITYGSETTPKRKAMKLDKTHYNDAIVISGINEIKENPEEWLLIKQFRKKKRSLHEATARKGRKKPNRNQTRNSKNTPYYKGFYLNDKVSVFGKSGYITGFTSNAAYIKDENNDYITLPNKTYKQVSINKMKLECHNNNWQYIIKNAV

SEQ ID NO: 3930 - protein, 400 aa, Lactobacillus sp.
PVTTNTQELTLGVDAGFHLGLSVVGNNREYYVSESLRKSEKDRITSRRELRRTRRNRLRYRKARFNNRRRKDGWLAPSIQHRLDFTIKEIKRLYKFLPITNLVVEVTPFDNQKLLNPDIQGWQYQKGKMYGFKTIKDYLLARDNYRDALDGKQYPASQLRVHHLVQRKDGGSNQPDNLVLLSDINHNQANHNNGILAKLRENRQKTLDYRGAYFMSILATRLSNYFEHYTTTQGYLTANLRQKYEIEKSHLNDAFVIAGGTDTTLRTNNVYSRQKLRNNNRVLQKFYDAKYIDSRDGKQKAGKELSSGRTRRSQELNYDNLRQLRKEKVKKGRVSIRRGHYQLRPHDVVLNTRTNRIETVKGVQNSGTVIKFQTGKTCSIKSVVSLYHVNGILEKKMKNI

SEQ ID NO: 3931 - protein, 551 aa, unidentified; identical to SEQ ID NO: 3262

SEQ ID NO: 3932 - protein, 436 aa, unidentified
MTKTLTTQTTQVCVLDQNGKPLMPTTRLGKVYRLLKTKKAHIVSYEPFTIQLDYEPDTHIIQPITLGVDSGAIHSGYSIANEHREYYSAEVISRDDISKRLSDRRMYRQNRRYRKTRYRKPRFNNRKNKEKGWLPPSLEQKVTVQLNEIDHLHRYFPIGKIIVEVAEFDIQKIKNPNISGIEYQQGTLQGYNIRNYLLEKHGRKCFYCGKTVSDFEVEHMLPKSRGGSNRIDNLTLSCHECNQKKDTLTAEEFIKQTLPAKKAAAKLKQLPNEKRLFKYMAHMNATRWTLYSAIDEKYPNVEMTYGYITKYNRIKAELPKAHHIDAKCITGFVTVPSIDQTIVKVKMRRHNRQLHRTTFSKGHVRKTACLSTVVFGFQLYDLVLFNNRRYYIKSRKSSGYFRLASLEGLKEENRSYKKLTLLAHTNAYLINHYIIK

SEQ ID NO: 3933 - protein, 415 aa, unidentified
MVYVVANDGQPLMPTERHGKVCRMLKSGMAKVVKKCPFTIQLQYESERNVQPVSLGVDAGSKHIGISATTKTKVLYESDVELRDDIVKLLATRRQLRLSRRSRKTRYRPVRFDNRKRKEGWLAPSIRQKIGSHLTVVANVCKILPINQIIVETASFDIQKIKDPEIQGIEYQQGEQMDFWNIREYVLFRDGHTCQCCKGRSKDKILNVHHIESRKTGGNAPNNLITLCETCHKGYHNGTVILPKNIKHGMQFKDAAFMGIMRWTFYNTLKEQYEPDIPVSMTYGYLTKNTRIEHGLPKEHYIDARCISGNPDAVSDGTYYYQKKVRCHNRQIHKQTILKDGVRKSNQAEYLVKGYRLFDKVRYQGREYFIFGRRKSGFFDIRTLSGEKVNKGSISVKKLTFADTRKNYLTERRTV

SEQ ID NO: 3934 - protein, 512 aa, unidentified
MSTVYVLNKDGKPLMPTTRCGHVRHLLKEQKARVVTSKPFTIQLLYETDDVVQPLYLGIDPGRTNISVAVVKADGTAVFTAHLETRNKEIPKLMKKRKNSRRARRTNGRRCRRQRRAKANGTISKKCVKQDTAQNGSVSKHAKKIGVIKRHLPGCEKEVLCIGIKNKEAKFSNRVRPEGWLTPTANQLLQTHINLVKKIQKFLPISDVVLEVNKFAFMQLDNPNIQKWQYQQGPLYQKANLEEAVSEMQEHHCLFCKKPIAHYHHVVPQSENGSDTIGNIVGLCTKHHDLVHKDTTWQKKLAKKKTGLNKKYGALSVLNQIIPALTKELSSLFPKHFFATNGKSTYDYRAAHGVSKDHWLDAYCIACSVLADDVCDNNINSHVPYELKQFRRHDRRALHKENMSRVYTLNGKSVATNRHKATKQTTDSLEEFRQNHSDDVCKLKVKEHHPTYRNMNRNYPGSVFLIGKQVHVMQGIAGSKNGEATTYKDTNANSIAAGKCKFVAKNSGILFV

SEQ ID NO: 3935 - protein, 419 aa, Geobacillus sp.; identical to SEQ ID NO: 2623

SEQ ID NO: 3936 - protein, 347 aa, Ktedonobacter sp.; identical to SEQ ID NO: 3790

SEQ ID NO: 3937 - protein, 518 aa, unidentified; identical to SEQ ID NO: 3878

SEQ ID NO: 3938 - protein, 339 aa, unidentified
LLSARRALRQSRRNRKTRYRAPRFDNRIRTKRKGWLAPSVENRINAHLSRIEAVLRLLPVTKITVETASFDLQLLKNPDISGKEYQEGEQLGFWNIREYVLCRDGHVCQHCYGRSKDPVLNVHHLESRRTGGDSPGNLITLCETCHKALHRGEITLKAKRGQSFRAEAFMGIMRWEVLNRLKASHPELEVNNTYGYRTKHARIANDIAKSHCADAFCIAGNLGAERLGEFFFQKQTRRNNRQIHKLSILKGGIRKRNQAPFEVNGFRLFDKVACKGEEGFIFGRRSSGYFDVRKLDGTCISAGISYKKLHLLEKRRTYLTEIRKEEALPPLPEGSGLRA

SEQ ID NO: 3939 - protein, 433 aa, Anabaena sp.
MSKVFVIDTDKRPLDPIHSAQARQLLRNKKAAVFRRFPFTIILKESHSDSAVSPLRLKLDPGAKHTGIALINDVTGEVVFAAELKHRGFAIRESLTSRRQLRRSRRGRKTRYRQPRFLNRTRPEGWLAPSLQSRIENIKTWVKKLCNLARIEAISQELVRFDMQLMANHDIQGKEYQQGTLAGYETREYLLENWDRQCGYCGVKDVPFQVEHIHPRAKGGSNSITNLTLSCEKCNTKKGTKDIKDFLKKDPLKLEKILKQAKRPLADAAAVNTTRFALLEVLKATGLPVETGSGGLTKFNRSKQKLKKTHWIDAACVGQSTPILNIKGVKPLLITANGHGTRQSCRTDKFGFPNRHCSRIKFHFGFQTGDIVKSVVKTGKKVGEYVGRIATRATGSFNISTRNGLVQGISYKTCRTIHKKDGYGYSSQKIQCG

SEQ ID NO: 3940 - protein, 468 aa, unidentified
MSTCVCVLSNSGERLMPTFRLGKVRHLLKDGKAKIVKHHPFTIQLLYDSKTNTQPIEICEDVGYNYIGISVKSQSHEYVSAQYDTLQDEKACHDSCRKLRRTRRNRLRYRKPRFDNRKRGEGWLAPSLRHKKELNANVVKMYCEVMPITHATVEVGSFDTMLVKAIQEGKAIPEGADYQKGPRYNLATLREAVFYRDNYTCQVCGRKVADGAILHMHHMFYWKGRHGDSLNELLTVCEKCHTPANHQKGGKLYGFGENVKFADLSGAAFMNTVRWQIVNELYAAFGKDFVTVTYGAMTKEKRIALRLEKSHNNDAYAMGEFHPNCRCTFEHYEKVRRNNRILEKFYDSRYIDIRTGEIATGKELFNGRINRNHKKDSENLHRYRGKRTYAGHRALLRKKVNLNPGDLVSLNGEVLVVHSTHTNKKGAVNVEFKTPGKSGQKSASLKKLKIVKAADSMHSAWEKNILII

SEQ ID NO: 3941 - protein, 480 aa, Dorea longicatena; identical to SEQ ID NO: 2726

SEQ ID NO: 3942 - protein, 417 aa, unidentified
MPCSPAKARLLLKEKKAIVKRRTPFTIQLTIATGEAKQPVALGVDSGYKHIGLSATTEKAELYASQVELRQDITDLLSARLALRRSRRSRKTRYRAPRFNNRVASKRKGWLAPSVKNRITAHMSRVEAVMRVLPVTAITVETAAFDTQLLKNPDIAGEAYQQGEQLGFWNVREYVLFRDGHVCQHCRGKYKDPILNVHHIESRRTGGDAPNNLITLCETCHKAFHRGEIKLKVKRGKSFKAATFMGIMRWTLFERLKKAHPELSVRNTYGYLTKHKRISHGIAKSHCADAYCIADNLGAKRLSGYLFQKQTRKHNRQLHKLSILKGGLRKKNQAPYEVKGFRLFDKVICKGEEAFIFGRRTSGSFDVRRLDGTRISAGINYKKLRLLEPRTTYLTEFRKEAALPPLHKCRGFRAEFL

SEQ ID NO: 3943 - protein, 466 aa, unidentified
MTVFVISKNGERLMPTIRYGRVRHLLKEGKAIIYSHKPFAIQLTYDVTPHNQPIEICVDTGYKHIGVSVKSESREYASAQYDLLPNEKEKHDTQRKNRCNRRNRKRYRKSRFDNRRASKKSGWIAPSLKNKADRHVDIIKRIAAVVPIISITVEMGEFDTQVLKAVTEGKPVPEGKDYQQGARYGIETLRAAVFQRDGYKCLFCGRGIDDGVILHVHHAYFWRSQHGDSLNELASCCEKCHTSANHKPGGKLWGYDKYLPRYAGAAFMNTVRWYIYNQIKDQIQGADVHITYGTATKLARKEYGVDKSHANDAYAMGVFHPEARAKTEYFEKKRRNNRILEKFYDASYVDIRDGKTKKATALGCERTNRKEPRMSEKNLRGFRGKKRSRGRRTIRQQRYSIRSGDRLLVASQSRVSKGVQNKGAVVALLGKPGWKNTVAVKNVQVIYHTGGWEKVAAPKIKSKKKN

SEQ ID NO: 3944 - protein, 459 aa, unidentified
MVITLDKHKKPLSVCSERRARILLTKKRACIYRHYPFTIIVKDADINKMESRDEYRIKIDPGAKYTGIAVVRIKDGAVVFYQQIEHRGEMVKSNLDTRRMARRNRRSRETRYRKPKWGNNQKNKDSKASYDSSRPAGWLPPSVKSVTDNVINWIIRLKKLFNITQCSFEAVRFDTQLLDNPDIEGVEYQHGTLFGYEVREYLLDKYGHTCQYCGGKSGDPILEWEHIIPASRGGSNSIKNATLSCRTCNSLKGAKTPAEWLSAIKGKSALADARRKGIQNVLDHKISGVSNRYCAWVSAYRRYVENKLFSMFEDVECSSGGRTKYNREKLGLPKDHHYDALCVGNIPSDGYKDLTNGYCFITKAVGRGTRFRGKINKCGIITVKLPKGTKRRFGFQNGDIVKAVSPHGKYAGTHVGRVMTRSSGSFDIRKSDGTLVTVNQRYCMILQRDNGFLCYYRKP

SEQ ID NO: 3945 - protein, 426 aa, Ktedonobacter sp.; identical to SEQ ID NO: 3418

SEQ ID NO: 3946 - protein, 443 aa, Anoxybacillus sp.; identical to SEQ ID NO: 2800

SEQ ID NO: 3947 - protein, 448 aa, Thiohalospira sp.
MQQQRVFVQGREGSPLMPCHPARARRLLRVGRAKVVRRVPFTVRLIDRDQKDSAVQPVSLRLDPGARTTGVALVAEGGRGARAVWAAELTHRSQSIRSRLTDRRMYRRGRRSRKTRHRPPRLQNRARPKGWLPPSLQSRVDNTRTWAERLACRAPVSTVVVETTRFDVHALSAGKPLAGVEYQQGTLQGWELREYLLHRHGHTCAYCQGESRDPVLEVEHVHPRSRGGSNRVANLVIACQTCNTAKGNRTPGEWAVALGRTKFDQARAKTAPAIEAGKPSSLRDAAAMNASRYAVGRAVKTLGLPVTFTSGGRTKANRSSQGYRKAHWIDAACVGPAGDSVHLDPNAPVLSITATGRGQRRVTKPDRYGFPRGAAGRVKRVQGLQTGDRVRAVVPTGKYRGSHVGRVAGVRADGRMDVATTRQKFTTTAARLARLQAADGYHYEGAGL

SEQ ID NO: 3948 - protein, 429 aa, Ktedonobacter sp.; identical to SEQ ID NO: 3812

SEQ ID NO: 3949 - protein, 512 aa, unidentified
MSTVYVLNKDGKPLMPTTRGGHVRHLLKEQKARVVRAKPFTIQLLYETDNLVQPLYLGIDPGRTNIGVAVVKTDGTAVFTAHLETRNKEIPKLMQGRKKARRARRTNGRRCRRQRRAKANGTISKKCVKQATAQSKNPSKRAKEIGIIKRRLPGYKKDVLCIGIKNKEAKYTNRTRPEGWLTPTANQLLQTHINLVRKIQKFLPISDVVLEVNKFAFMRLDNPDIQKWQYQQGPLYQKGSLENAVSEMQEHHCLFCDKPIDHYHHVVPQSENGSNTIANIVGLCAEHHNLVHKDAAWQKKLAEEKVGLNKKYGALSVLNQIIPALTNKLSVLFPKHFFVTAGKSTHDYRATHGVSKDHWLDAYCIACSVLPSDVCDSNINNHMPYELKQFRRHARRALNNENMNRVYTLNDKAVAINRHKATEQEAASLEEFRKEHPNDVCKLKVKEHHPTYRNMNRNYPGSIFLVGKHVHIMQGIAGSKDGKATTYKDSNANSITASKCKFVAKNSGILFV

SEQ ID NO: 3950 - protein, 413 aa, unidentified; identical to SEQ ID NO: 2636

SEQ ID NO: 3951 - protein, 423 aa, unidentified
MRVFVFNMRGEPLMPCTQRKARLLLKTGKAKIYKYNPFTIQLKYVTGENKQECHVGIDTGSKYIGLAVTSENKVLFKGEVELRQDVKSKIDTKRIYRRSRRNRKTRYRRCRFLNRKRFGKWLPPSLQNRINHTFKWIDKLCSFIPESILHIEVGKFDIAKMINPEVHSVDYSQGQTYGYQGERYFIFARDNYTCQVCGERNKPLQTHHIIYVSNGGTNRVDNQITVCKECHTSTNHKNGGIFYKWQKEHKKVKQYKAPPFMNVLRQQILNQYPQALITYGFETTIKRKNIGLEKTHYNDAIVISGVSTISENLHEWLLIRQFRKKKRSLHEGVPRKGRKEPNRIQKRNSKNTPYYRGFYLNDKVSVFGKSGYITGFTNSGAYVKGVDGEYIVLPNKSYKRVNIASLKFICHNNNWQYITKNAV

SEQ ID NO: 3952 - protein, 470 aa, Acidithiobacillus sp.
MAVLVLDKRKRPLMPCSEKRARLLLESGRARVHRMVPFTIRLVDRLQAESVLQPLRLKLHPGSKTTGMALVREKETVDATTGEILRTFTVLMLLELKHRGHAIRDALTQRRAFRRRRRGNLRYRPARFDNRTKPEGWLAPSLQHRVDTMLAWVNRLMRLAPVTALSQELVRFDTQALQNPEIAGSEYQQGTLAGYEVREYLLEKWGRECAYCGAKNTPLEIDHIHPRSKGGSNRVSNLTIACRDCNQAKGNMPLEQFLAKAPERVRKILAQAKAPLKDAAAVNSTRWALFQRLKATGLDVEVASGGRTKWNRHQMSIPKAHCLDAACVGCVDAIQNWQQPVLGIKATGRGSYQRTRLTKHGFPRGYLTRSKSVFGFQTGDLVKAIVTTGKKTGTYLGRVAIRASGSFNLQTGNGLVQGIHHRFCALIQRADGYGYLWTKIALDRGDAGLGQATPAALSLPGMNAGVSRAN

SEQ ID NO: 3953 - protein, 507 aa, unidentified
MSEYIYVIGMDGDPQMPTKRKRHVEQLLQTGRARVFRQVPFTIQLTYKNEPVLQPVTIAEDPGRSNIGMAVVSLSGELLSAAVVQTRNKEIVKLMEKRKQHRRTSRNGERKARQRLAKKCHTMVKAGFLMRKLPMYGKDKRVRCNMIKNTEARFCNRKREDGWLTPSAEHLVRTQINLIHKMQKFLPITDVAIEINRFAFLSLEDPSISGVDFQNGPLKGYDDLNAAVEDLQDGHCLMCNSPIEHRHHIVPRSMQGSNSIGNIAGLCCKCHERVHKDSAFEDSLKKKKAGLNKRYAAVSVLNQAIPFICKRLEQEFRKEHVHYCSGRDTSMVRRSLGYHKTKEEQLHEVDAWCIAVLSLQQIPEKAPSFDHVHEILQFRRQDRSRIKAQTSRAYYHERKKIAKNRKKAEGQREDSLQEWRKRQVERYGEEQTRKMISQLKVKKSIRRYNRLDRLMPGAVFYYQGVRYVMRGQHCEGTYLQAVGMGSKDFPAKKCKIVAHNEGLVFVS

SEQ ID NO: 3954 - protein, 414 aa, unidentified
MPCSPAKARLLLKEKKAIVKRRTPFTIQLTIATGESKQPVTLGVDAGYKHVGLSASTEKAELYASEVELRQDVSDLLSARRALRQSRRSRNTRYRAPRFDNRIRTKRKGWLAPTVENRINVHLSRIETVLRLLPVTKITVETASFDTQLLKNPDIAGKEYQEGEQLGFWNVREYVLFRDGHVCQHCHGRSKDPVLNVHHLESRRTGGDSPGNLITLCETCHKALHRGEIKLRAKRGQSFRAETFMGIMRWGVLNRLKASHPKLEVHNTYGYRTKHARIANGIAKSHCADAFCIAGNFGAKRLGEFFFQKQTRRNNRQIHKLSILKGGIRKRNQAPFEVKGFRLFDKVACQGEEGFIFGRRSTGYFDVRKLDGTRISASISCKKLRLLEKRRTYLTEIRKEVALPSLSEGRGLRA

SEQ ID NO: 3955 - protein, 419 aa, Moorena sp.
MQNYVFVIDTNFQPLNPIHPKKARRLLEKGKAAVFRMYPFTVILKTAIANPTISPCQVKIDPGSKVTGFALVQKDQVIWAMELEHRGGLIKKKLESRRAVRRGRRNRNTRYRKPRFLNRKRPEGWLPPSLEHRILTTQTWVKRLIKFCPVSEIWVERVKFDTQKMQSPEISGVEYQQGELAGYEVREYLLEKWGRECAYCGKQNVPLQIEHIHPKSKGGSNRVSNLCLACEKCNQRKGNKPVEDFLKKKPKLLQKIKAKAKQPLKDAAAVNATRNRLVKVLQGIKPVITGTGAQTKYNRTKLGFPKQHWVDAACVGNIETLTLKISQPLLVTCKGQGGRQKAALNKCGYPIRHNPLKPIKGWVTGDIVRHQRLGIGKVTPRSKGSFGFTPLGMKGYKSCKPQDISAIHRKDGYIYSFCG

SEQ ID NO: 3956 - protein, 456 aa, unidentified
MSTCVCVLSNSGERLMPTFRLGKVRRLLKDGKAKIVKHHPFTIQLLYDSKANTQPIEICEDVGYNYIGISVKSQSHEYASAQYDTLQDEKACHDSCRKLRRTRRNRLRYRKPRFDNRKRGEGWLAPSLRHKKELNVNVVKMYCAVMPITHATIEVGSFDTMLVKAIQEGKAIPEGADYQKGPRYNLATLREAVFYRDNYVCKVCGRKATEGAILHVHHMFYWKGRHGNSLSELITVCEKCHTSANHQKGGKLFGFGEDKEFANLSGAAFMNAVRWQIVNALYATYGKEFVTITYGAMTKEKRIILGIEKTHNNDAYAMGDYHPAHRCVFRHYQKRRRNNRVLEKFYDATYIDARTGNKAKGKELFNGRINRNHKKDSENFHKYRSKKVSKGRRSIRRQRYAIQPYDTVHLEGKTYITSGCHNKGTRLLIPVNGKSKSVAISKVQVVCHAGAWIQII

SEQ ID NO: 3957 - protein, 427 aa, Nitrosococcus sp.
MNRVFVLDTDRKPLMPCSPARARRLLRDGKAAVYRMQPFTIILKYRVDPNPQPVEFKVDPGSKITGLALVGNFPQQGRVVLWAANLTHRGYAIRERLASRRSLRRGRRGRKTRYRAPRFLNRTKPKGWLPPSLNSRVENVSSWFNRLLDRVPISECHIETVRFDTQKIQNPEINGVEYQQGELMGYEVREYLLEKWDRKCAYCNKKDIPLEVEHIIPRSRGGSNRVSNLTLARAPCNKKKNSKTAAEFGYTQIQSKSKLPLKDAAAVNATRYAIGCTIQSVGLPTSFWSGGRTKKNRISQGYTKDHWIDAACVGESAGQVTITEGYRALHIKATGRGTRQVVRTDKYGFPRGKAGRCRRVKGFQTGDLVRPSQPQGKYAGDHVGILASIRASGTFDVKAKAGKISANWKNFKLIQRGDGYDYSLSAV

SEQ ID NO: 3958 - protein, 468 aa, unidentified; identical to SEQ ID NO: 2760

SEQ ID NO: 3959 - protein, 562 aa, Streptomyces sp.
MTTFRTGAQTHQAVLPQQPALESGSADTPGSRDETAHGLPAVRPGTGVEHGRGETGGVRTRTRRRHARSDATAAETAETGSGDAPRLAASRVFVPAKAGEPLMPCHPARARELLAGGRAVVARRAPFTIRLRQRTRAESTVEGVQLRIDPGSKATGIAITEEQHRNGPKGRSAIARRGLITIELRHRGQKIHSGMMRRAAYRRRRRSANLRYRAPRHDNRPRPHGWLPPSLRHRIDSTMAVVVRLCRYAPVLEIHVEHVAFDTSAFTEVMPSGAQGGESTHGASEIREFLLAKWERSCAYCDATGVPLNIDHVRARSRGGSDRVSNLVLACVPCNQAKGTTSVHAFLADRPARLERVIAQLRRPLQDVAATNATRLQLVTALAAQGVPVHTWSGGRTHWNRVAMGLPKSHTLDALVTGFFDHERGDSLVRIPAQVLVVGSTGRGSYARTTPDRFGFPRLRRPRRKIQHGYATGDLVSAVVPKGKWAGRWVGRIAVRTGGQHRITTLTSRFDVSHRNVRLLQRADGYTYGFAHEIRLSGRRGPAYSGPTLKGGDPGNVRTPDA

SEQ ID NO: 3960 - protein, 431 aa, Klebsiella sp.; identical to SEQ ID NO: 2435

SEQ ID NO: 3961 - protein, 426 aa, unidentified
MVYVLNKQGKPLMPCKEAKARKLLKQNKAKIVKYEPFTIQLLFDCENQTQEVNLGIDAGSKYIGVSVTTEKQVLYEAEVELRNDIVNKLSARRAARRTRRNRLRYRSARFNNRVHSKHKGWLAPSVEQKINAHIQVIRHLYEILPITKLIVETAQFDIQKINNPEISGEEYQHGNQLGFWNVREYVLARDNHECQCCHGKSRDNVLNVHHLESRKTGGNAPNNLITLCETCHKAYHKGEVELKPKRGKSYRDAAFMGILRKTLLIRLKQMYPNVHETFGYITKNTRIENSLPKEHHVDARCISGSPLAKPLEYYLYQKCVRRQNRKMTKDKFLKGGTKKNNQLIGNVFGFKLFDTVEYQNKQYFIFGKRKSGRLDIRHLDGEKVNNGAISYKKLKRIKHNSTKLTERRRQFLHTSKEDVISLPKIL

SEQ ID NO: 3962 - protein, 515 aa, unidentified
LTALEELLSKTEYIYVIGTDGRPQMPTKRKRHVLKLLNTGKARIAEKVPFTIQLKYDNIPVLQPVILAADPGRANIGVAALSPFGDLMFAAVIETRNKEIKKLMADRKAHRQASRRGERKARQRLAKKYETMIKAGMIMRKLPQYAADKFVTCNVIRNTEARFCNRKRCSDWMTPTVNHLVQTHLNVIKKISRYLPVTDIAIEVNRFAFMQIENPNASGVDFQNGPLRGFDDVKAAIREQQNGKCLMCKNDIEHFHHMVPLSKGGSDTIQNQVGLCPKCHAKAHTEQTFKKKLKDKKSGLLKKYGALSALNQAIPFICKDLLAGYGKEHVHFCTGKETSLIRTSLGYEKTKDNQMHEVDAYCIGLASLELEDIKSQSFVNTYKIKQFRRQDRSIIHHQTERSYYLDEQKIATNRKPRFEQTGNALSDWYKKQVKACDKAKADKMLSTLKVKKSSRSYNSEGRLMPGAVFYYNGQRHVMSGQLTGGRYLRAYGDTKTNYPVSKCNILRSNEGLVFI

SEQ ID NO: 3963 - protein, 462 aa, Thioploca sp.
MAVFVLDQQKKPLMPCPEKRARRLLERDRAVVVKRYPFAIRLKDRVGGELQPIRIKLDPGSKQTGIAIVRESQGVDPETGEITSKISVFNLLQLHHRGLTISKNLTSRCAMRRRRRSNLRYRGARFDNRTKPKGWLAPSLQHRVNTTINWVNKLQRFAPIATLSQELVRFDLQQIESPEISGVEYQQGELQGYEVRKYLLDKWDRKCAYCGVEQVPLEIEHIVPKSAGGSNKVSNLTLACRPCNQKKGSQALDIFLANKPELLQRIKAQAKKPLKDAAIVNSTRWALANALKTTRLPVELASGGRTQFNRVRLDIPKSHALDAACVGVVEAVQDWNKPILEINCAGRGRYQRTRLDKFGFPRGYLMRKKSVFGFQTGDIVKAVVTKGKKVGEYVGRIAIRASGHFDITTGDEKVSGISYKYCQMISRNDGYGYFLQPKAVRRLATPVALSLPALKDGVSRAF

SEQ ID NO: 3964 - protein, 426 aa, unidentified
  source 1..426: note = Cyanobacteria bacterium UBA11370
MSKPNYVFVVDTNRKPLTPCKPSIARKLLTVGKAKVFRLYPFTIILNKEVVDTPEPLTLKIDPGSKVTGLAILLDSNLIWVAELSHRGQSIKASLESRRALRRGRRNRHTRYRQARFLNRTRSKGWLAPSLQHRVKTTITWVNRLLRCSPIKVVFQELVRFDLQQIENPEISGVEYQQGELAGYEVREYLLNKWDRKCAYCGAKNVPLQIEHIYPKAKGGSNRISNLCLACEPCNIRKGTKDIKVFLAKKPDVLKRVLAQAKHPLKDAAAVNSTRWTLFNQLKETGREISTGSGGLTKFNRTRLELPKTHFFDAACVGDTPELLVLANQPLNIKATGHGSRQMCRTDKFGFPSRYLPRFKFVKGFQTGDIVKAIVTSGKKIGTYAGRIAVRSTGRFNISATIGLIQGISHKHCQQIHQKDGYNYGF

SEQ ID NO: 3965 - protein, 323 aa, Ktedonobacter sp.; identical to SEQ ID NO: 2759

SEQ ID NO: 3966 - protein, 481 aa, Polaromonas sp.
MCRKACVTRPVRAEGFEMAVFVLDRSGRPLMPCTEKRARLLLERGRARVHKMLPFTIRVVDRFAESSEFQALRIKLDPGSKTTGIALVREAERGAVAVLNLFELAHRGRQISKALTARRGHRRLRRGKLRYRAPRFLNRDNKAKGWLAPSLQHRVDTTLAWVNRLEQLAPVSAISTEMVRFDMQALENPEIEGAQYQQGTLAGYEVREYLLEKWGRTCAYCGAKNVPLQIEHIHPKSKSGSDRIGNLTLACQCCNQKKAALPVEVFLARKPELLKRILGQAKRPLKDAAAVNSTRWALVNALKTTGLVVETASGGRTKFNRMALGIPKTHALDAACVGHVNAMTGWHKPTLRLKAMGRGSYQRTRLDKYGSARGYLTRSKSIQGFQTGDMVKAEVTQGKKTGIHTGRVAVRASGSFNIQTRHGLVQGVSHRYCTVVQRGDGYGYQLVAKTDATGTPPKQGDASHPALYLPGLKAEVSRANR

SEQ ID NO: 3967 - protein, 443 aa, Caldicellulosiruptor sp.; identical to SEQ ID NO: 2385

SEQ ID NO: 3968 - protein, 458 aa, Lactobacillus sp.
LKGVGMMSEIKKVDYIYVVDSNGTPLMPTSRLGMVRRWLKTGQAKWFGNSRKTIQFVRPVTTNTQELTLGVDAGFHLGLSVVGNNREYYAAESLRKSEKDRITSRRELRRTRRNRLRYRKARFDNRRRKDSWLAPSIQHRLDFTIKEIKRLYMFLPITNLVVEVTPFDNQKLLNPDIQGWQYQKGKMYGFKTIKDYLLARDNYRDALDGKQYLASQLRVHHLVQRKDGGSNQPDNLVLLSDINHNQTNHNNGILAKLKENRQKTIDYRGAYFMSVLATRLSNYFDNYTITQGYLTANLRQKYEIEKSHLNDAFVIAGGTDITLRTNNVYSRQKLRNNNRVLQKFYDAKYIDSRDGKQKTGKELSSGRTRRSQELNYDNLRQFRKEKVKKGRVSIRRGHYQLRPHDVVLNTRTNRIETVKGVQNSGTVIKFQTGKTCSIKSVVSLYHVNGILEKKMENI

SEQ ID NO: 3969 - protein, 443 aa, Oligella sp.
MAVFVLGKNKRPLMPCSEKRARLLLERGRARVHRLVPFTIRLVDRTVADCALQPLELKIDPGSKTSGLALVRNNEAINTETGEITATAHVLNLFELIHRGTQISQALTARSQMRRRRRSANLRYRAPRFLNRTRPTGWLAPSLQHRVDTIQSWVQRIRRYAPVMQLAQELVRFDMQQLENPEIAGVEYQQGELAGYEVREYLLEKWQRQCAYCDAINVPLQIEHIQPKARGGSNRISNLTLACAPCNTKKGAQSVSSFLANDPKRLAHTQAQAKRPLRNAAAVNTTRWKLLNALKATGLPVNTGSGGLTKFNRTRLQMPKTHALDAVCVGEVGHVKQWQKPTLVIKATGRGSYQRTRLNRFGFPRGYLTRKKRIHGFQTGDRVKAVVTQGKKIGTYVGRVAVRASGSFNIQTAQSLIQGISHRYCTLIQRGDGYGYSTRIDSF

SEQ ID NO: 3970 - protein, 428 aa, Chamaesiphon sp.
MEFIMSNFALIVDTNRRPLNPIHPAQARLLLKQRKASILRRFPFTIILKTASNAQTQPLEIKIDPGSKVTGLVLVTNSKVIWAAELTHRGAQIKAALLSRRQLRRNRRSRKTRYRKARFLNRTRPNGWLAPSLKHRVQTTLTWVNRLRRFAPVTAIAQELVKFDTQLMQDETISGPEYQSGTLAGYEIRSYLLEKFDRKCAYCGVEHVPFEIDHIIPRSKNGSDRPSNLCLSCHDCNQAKSNHPIQEFLADKPDVLKRLLALAKSPLRDAAAVNSTRWALFDALKATDLPITTGTGGRTRWNRFRFQLPKTHWIDAALVGAVETITLLTNRPLSIACNGHGTRQSCRTDRFGFPSRYVPQYKFVKGFQTGDLVKAVVTKGKKVGTYIGRCAVRSSGSFNISTKSGLIQGISHRYCQTVHSKDGYNYSF

SEQ ID NO: 3971 - protein, 512 aa, unidentified
MSTVYVLNKDGKPLMPTTRGGHVRHLLKEQKARVVRAKPFTIQLLYETNDVVQPLYLGIDPGRTNIGVAVVKANGTAVFTAHLETRNKEIPKLMQDRKKARRARRTNGRRCRRQRRAKANGTISKKCVKQTTAQNGSVSKRAKDIGVIKRRLPGCEKDVLCIGIKNKETKFTNRTRPEGWLTPTANQLLQTHINLVKKIQKFLPISDVVLEVNKFAFMRLDNPNIQKWQYQQGPLYKKESLESAVSEIQEHHCLFCKKPIDHYHHVVPQHKNGSNTIGNIVGLCAKHHDLVHKDSAWEKKLAKKSTGLYKKYGALGVLNQIIPTLTNELSSLFPKHSFVTNGKSTYDYRAAHGVSKDHWLDAYCIACSVLPSNVCDSNINNHMPYELKQFRRHDRRVLNNENMNRVYTLNNKAVAINRHKAKDQKTVSLEEFRKEHPDDVCKLKVKEHHPTYRNMNRNFPGSVFLVGKQIHVMQGIASSKDGKATKYNDTSATAIAAGKCKFVAKNTGILFV

SEQ ID NO: 3972 - protein, 464 aa, unidentified
MYVFVIGLDGTRLMPCKPRKARKLIEAHKAEIYKKQPFTIRLLYKTGCASQPITLGIDTGSQHIGIAVTSENKVLYQAEIELRSTMDKRSLMETRYSYRRSRRYRKTRYRSPKFRFHTKRTYSETLVKRKTTGIMTHWVKHTNSISTNRPDGWLAPSMQSKVDHHIRWINRFLDVLPPDTKLRLEIARFDMARMKNPEVHNELYQYGPQYDYENLKAYVFDRDHYKCVVCKRKLGSKQPDGHSLKGMMHHITFRSKGATDNPDQLVTVCEYCHIPQAHKEGGVLWNLKEKHKPVQRGLRDATQMNIIRTRLVKAFPDAELTYGNITAVDRKKMHLPKSHTGDAVAIAMKGKDVNICESTVYIKQIRKKKRSLHEATPRKGRKRPNTQAVRNSKNTKSIGIYHIYDTVRFQNETGFISGFTGKSAYVQDFDGNYITMPGKSYKQINLSSLELVKHNNNWIQKTRN

SEQ ID NO: 3973 - protein, 412 aa, unidentified
MMCLVYVINQNGQCLMPCKPSKARKLLRDGRARVKHRSPFTIQLLWDCEEHVQEVVVGIDKGSSITGFACVGNGELLLSGEIVHRKDVKEKMQTRRMHRRSRRNRRWYRSKRIRNRASSRLSGRLPPSIKTNVEEVIRVVERLPLPLAHIVIEDVQVDIARLNDPTLQARRYQDPTRLDENLRIACLMRDGYQCQYCHKRETRLEAHHLVFRQHGGKDTLSNLLTLCESCHHRVHEGKVTLSVTGVSGHLDHIAQRSMQGKSHLYATLEQGISLTTLFGYQTAIWRKHLDLPKAHDVDALCIATYDTGEVIPWQQDRFYQVRFRPRRTRRHYHDLPRKGQGRVRYQVNSELEGFRKGDVVRVKGTFVKQINSIYSDGYLAFPRVKGEPSKARPKDCVLLERGTTILWQRMAE

SEQ ID NO: 3974 - protein, 425 aa, Planktothrix sp.; identical to SEQ ID NO: 3728

SEQ ID NO: 3975 - protein, 413 aa, unidentified; identical to SEQ ID NO: 2636

SEQ ID NO: 3976 - protein, 406 aa, unidentified
MVYVQDINGKPMMPTTRHGKVRRLLKDKKAIVVNLCPFTIKLMYVTSDYKQEIVLGVDAGTKHVGLSATTKSKELYSSEVILRNDIVDLLSTRRELRRTRRNRLRYRKPRFNNRIKSKRPGWVAPSVKYKIDAHIRVIDNVCSILPISRIVIEVAQFDTQKIKNPDISGNEYQEGDQLGFWNTREYVLARDGHKCQYCKGKSKDKILNVHHLESRKTGGDSPSNLITLCETCHKEYHKGNIDLKIRRGKSLRDAAVMGIMKWRLYEELKSKYDNVSMTFGYVTKYNRINHGIEKSHVSDAFVISKNFNAKRIGCQYLKRLIRRHNRQIHKMKILKGGKKKNNQAPFEVFGFRLFDKVLYNNEIFFVYGRRKSGSFNIRDFNGENSKDVSHKKFKLIRGKRHPIILK

SEQ ID NO: 3977 - protein, 241 aa, unidentified
LQFYRKEHGIMQYVYVLNKHGEPLMPCSPGKARLLLKQQKACVVKRTPFTIKLLFGSAGYKQPITLGVDAGSKHVGLSASTEKRELYSEEFTPRSDVVELLSTRRQNRRSRRNRKTRYRVPRFDNRVHSKHKGWLAPSVEVKIQEHITVIKHICKILPISLVRVEKAEFDTQRLKAMLAGKPLPVGTDYQLGEMYDEYNVRQYVLKRDHYTCQCCGTHNTAKKVVKLHVHHLESRKTGGNA

SEQ ID NO: 3978 - protein, 414 aa, unidentified; identical to SEQ ID NO: 2588

SEQ ID NO: 3979 - protein, 444 aa, unidentified
CQHWRRITTGRKTEEQNLRVFVLNKRGKPLMPCSPAKARHLLKEKKAIVVRRTPFTIQLTIATGESKQPVSLGVDAGYKYVGLSASTEKAELYASEVELRQGITDLLSARRALRRARRNRKTRYRAPRFDNRIRTKRKGWLAPSVENRINAHLSRIEAVLRLLPVTRITVETASFDLQLLKNPDISGKEYQEGEQLGFWNIREYVLFRDGHVCQHCHGRSKDPVLNVHHLESRRTGGDSPGNLITLCETCHKALHHGEITLKTKRGQSFRAETFMGIMRWEVLNRLKASHSKLEVNNTYGYLTKHARIKSGITKSHCSDAFCIAGNLGAKRLGEFLFQKQTRRNNRQIHKLSILKGGIRKRNQAPFEVNGFRLFDKVACKGEEGFIFGRRSSGSFDVRRLDGTRISAGISYKKLRLLEKRQTYLTEIRKEEALPSLREGRGLRA

SEQ ID NO: 3980 - protein, 406 aa, unidentified
MVYVQDIDGKPMMPTTRHGKVRRLLKDNKAVVVNTCPFTIKLTYKTSDYKQEIVLGVDAGTKHVGLSATTKSKELYSGEVILRNDVVELLSTRRESRRARRNRLRYRKPRFENRVKSKRLGWVAPSVRHKVDAHIRVIDNICSTLPISRIIVEIAQFDTQKIKNPDISGNEYQEGDQLGFWNVREYVLARDGHKCQHCKGKSKDPILNVHHIESRKTGGDSPSNLITLCETCHKEYHKGNIDLKVKRGKSLRDAAVMGIMKWKLYEELKSRYPNVSMTFGYITKYNRIKYGIEKSHTSDAFVISRNFNAKRIERQYLKRLIRRHNRQIHKMKILKGGKKKNNQAPFEVFGFRLFDKVLYNNEICFIYGRRKSGCFDIRDFDGKNSKNVTYKKLKLIRGKRYPIILK

SEQ ID NO: 3981 - protein, 429 aa, Methanosarcina sp.
MLVFVINQNKKPLMPCKPSKARKLLQAGKAKVVRNTPFTIKLLFGSNGYTQPVIAGMDTGSKVVGCAAIANGKVLYQSEIYLRENVSKKMEQRKMYRRTRRGRKTRYRPARFDNRGNSRREGRLAPSIKSKLEAHFREKRFVESLLPVTRWKVELASFDIHKITNPEVSGVGYQEGDLKGFYNVKAYVLDRDGYTCQHCRGKSKDSRLHCHHIVFRSQKGSDAPENLITLCETCHKALHNGEFKLSGKKSKTKHATEIGILKSQIRKSGWSFAETFGYETKYRREQVLKLLKTHYFDAVAICCRDDQKVEVEDSVFLKRNVPAGDYQQRRGKRSEKKIPTGKLFGLRKFDIVKTENGTGFIRGKRSSGYFSISDIFGNKISDSVNVKKKCRRLSARSTTLVQMVQMTHSSPTCHFRQAGNVEEGGFLLR

SEQ ID NO: 3982 - protein, 413 aa, unidentified; identical to SEQ ID NO: 2605

SEQ ID NO: 3983 - protein, 521 aa, unidentified
MWLCPGYGNTTGTCSLAYSKGDTMNYVYVLDQRGSPLMPTRRYGWVRRTLKSGKAKAVRTLPFTIRLMYDPDTTKIQSLTLGIDPGRTNIGMATADETGRCLYSSQCETRNRVIPRLMEKRRQHRQASRRGERLARKRLARKLGTTMRDILERMLPGCEKPVRVKDIINTESRFNNRRRRESWLTPTATQLLRTHLNLVEKVCRILPISGIALEANRFAFMELEAGGHLESGVDYQRGPLYGYRSIREALEELQDGRCLLCGERAIEHDHHLVPRSKGGSDTIANMAGLCEHCHTLVHTDQTAAEKLETIKAGQNKTYGVLSVLNQIIPYLVEALSKKFNGNIRLVSGWETKQFRDENYIDKDHGIDAYCIAVIGQHPKKIDVPETHFQIRQFRRHDRARIKSQTERTYRLDGEKVAINRRKQLEQKTDSLEDWYQKMAAYYGRQQADRMRSKLQVQRSTRRYNNPNRLLPGTVFVYQGKAYIMTGQLTGGQYFRAAGCDRKNFSARSAQIVRYNQGLVYV

SEQ ID NO: 3984 - protein, 413 aa, unidentified; identical to SEQ ID NO: 3587

SEQ ID NO: 3985 - protein, 416 aa, unidentified
MVYVLDKNGQPLMPTDRHRKVRLMLQSGQAKVIKRCPFTIQLNYDSGHQTQEISLGIDAGSKHIGVSATTKIKVLYEADVELRNDIVDLLSSRRELRRGRRNRKTRYRQAKFNNRRRGNGWLAPSIRQKIGTHLTVVENICKILPISRIMVETASFDIQKIKNPDIQGAEYQQGDQLGFWNVREYVLFRDGHTCQCCKGKSKDKILNVHHIESRKTGGNAPNNLITLCETCHTGYHKGTVQLPKAIKRGMRFKDAAFMGIMRWAFYEALKQQYEPVGTPVHDTYGYITKHTRIAYNLPKEHYVDARCISGNPEASSNGEYYYQKKVRCHNRQIHKLTVLKGGIRKQNQATYLVKGYRLFDKVSYQGKGYFVFGRRQSGFFDIRTLSGEKVNKGSLSCKKLKFIATRTYYLTERRAV

SEQ ID NO: 3986 - protein, 443 aa, Caldicellulosiruptor sp.; identical to SEQ ID NO: 2385

SEQ ID NO: 3987 - protein, 420 aa, unidentified
MQYVYVLNKHGEPLMPCSPRKARLLLKQKKACVVKRTPFTIKLLYGSTGYKQPITLGVDAGSKHIGISATTEKHELYREEATPRNDVVDLLSARRAFRRSRRNRKTRYRAPHFNNRVHSKHEGWLAPSVEVKIREHITLIKRVCRTLPVTLVRVETAEFDTQRLKAMLEGKPLPVGTDYQLGEMYDEYNVRQYVLKRDNYTCQCCGAHSTKTKDVKLHVHHIETRRTGGNAPNNLITLCTDCHKALHAGKVTLDGKKRGKPLKDAAFMGVMRKTLMERLRKKLKIPVQGTYGYITKYLREKNGIPKSHTNDARCISKNPLAIPCDTCYYTKAVRHHNRQLHKATILKGGIRKANQAPYIVKGYRLWDKVSCNGTECFITGRRTSGYFALKKLDGTVVSNSTSYKKMRLLEVATNYITERR

SEQ ID NO: 3988 - protein, 322 aa, unidentified
MLFAHFGNRTARKIRKQSLLPATIAADLCFKPLYKHHITVIKRICRILPITLVRVETAEFDTQRLKAMLKGKPLPVGTDYQLGEMYDEYNVRQYVLKRDNYTCQCCGAHPTEKKPIRLHVHHIESRHVGGNAPNNLITLCVACHKALHEGKITLDKGKKRGKPLRDAAFMGIMRNTLLARLKDELNIPVKQTYGYITKLLREKNKIPKSHVNDARCIAKAPNAKPCDTMLYTRALRHHNRQIHKAKILKGGIRKKNQAPYLVKGFRLWDKVRYNGEECFITGRRSSGYFALKKYDGTVISNSASYKKLMLLKAATNYITERS

SEQ ID NO: 3989 - protein, 436 aa, Ktedonobacter sp.; identical to SEQ ID NO: 3861

SEQ ID NO: 3990 - protein, 429 aa, Methanosarcina sp.
MLVFVINQNKKPLMPCKPSKARKLLQAGKAKVVRNTPFTIKLLFGSSGYTQPVTAGMDTGSKVVGCAAIANGKVLYQSEIYLRENVSKKMEQRKMYRRTRRGRKTRYRPARFDNRKNSRREGRLAPSIKSKLESHFREKRFVESLLPVTGWKVELASFDIHKITNPEVSGVGYQEGDLKGFYNVKAYVLDRDGYTCQHCRGKSKDSRLHCHHIVFRSQKGSDAPENLITLCETCHKALHNGEFKLSGKKSKTKHATEIGILKSQIRKSGWSFAETFGYETKYRREQVLKLLKTHYFDAVAICCRDDQKVEVEDSVFLKRNVPAGDYQQRRGKRSEKKIPTGKLFGLRKFDIVKTENGTVFIRGKRSSGYFSISDIFGNKISDSVNVKKKCRRLSARSTTLVQMVQMTHSSPTCHFRQAGNVEEGGLLLR

SEQ ID NO: 3991 - protein, 419 aa, Moorena sp.
MQNYVFVIDTNKQPLNPITPKKARRLLDKGKAAVFRMYPFTIILKTAINNPTISPCQIKIDPGSKVTGFALIQNNQVIWGMELEHRGGLIKKKLESRRAVRRGRRNRNTRYRKPRFLNRKRPEGWLPPSLEHRILTTQTWVKRLIKFCPVNEIWVERVKFDTQKMQNPEISGVEYQQGELAGYEVREYLLEKWGRECTYCGKQNVPLQVEHIHPKSKGGSDRVSNLCLACEKCNQRKSDKPIEVFLKKKPSLLQKIKVKAKLPLKDAAAVNTTRNKLVKVLRNARPVVIGTGAQTKYNRTKLRLPKQHWIDAACVGDIETLMLKTSQPLLATCKGQGSRQKAALNKYGYPIRHNPLRPIKGWATGDIARHQKLGIGKVTPRSKGSFGFTPLGMKGYKSCKPQDISAIHRKDGYTYSFCQ

SEQ ID NO: 3992 - protein, 423 aa, Microcoleus sp.
MSNHVFVLDTNRKPLTPCQPGVARSLLKAGKASVFRRYPFTIILNKEVDANPEPVEFKLDPGSNVTGIALKQGNRIIFAAELQHRGQQIKEALLSRRQLRRSRRNRKTRYRPARFLNRTRPEGWLAPSLQHRVDTLMTWVHRFRGLAPVGQITQELVRFDLQLMENPEISGVEYQQGELQGYEVREYLLEKWGRTCAYCGVKHVPLEVEHIQPRSKGGSDRVSNLTLACCSCNQAKGHGDIRDFLSGQPDVLSRLLGQAKSPLKDAAAVNSTRWALFKALKATGLPVTTGTGGQTKFNRLRLNLPKAHWLDAACVGDVESLDILTSKPLLIVAKGHGTRRMCGTNKYGFPTRHRSRRQIHNGFQTGDIVTATVTAGKKIGSYVGRVLCRASGSFDITTASGRVAGINHKYCKPIHRKDGYAYA

SEQ ID NO: 3993 - protein, 419 aa, Geobacillus sp.
LFVYIINKHGKPLMPCSPRKARLLLKQKKAKVVRRTPFTIQLLYGSSGYKQPVSLGVDMGTRHVGISATTKKDVLFEAEAQLRTDIVELLAIRRQFRRSRRNRKTRYREARFLNRRKPEGWLPPSIQHKINSHIKLIDLVHNILPVTSVTIEVAAFDTQKLKNLNIRGVEYQQGEQMGFWNVREYVLYRDNHTCQYCKGKKKDPVLQVHHIESRKTGGDSPDNLITLCKTCHHEIHEKGLEHIFQRKRPPMRDASQMTAMRWAMFSRIREKYSHANITYGYITKCIRIANGLSKSHMVDARCISGDPLAKPSGTVYLLKFVRKNNRQLHKATILKGGKRKSNKAPRFVKGFQLFDKVVYERKECFIFGRRSSGYFDLRLLDGTKVHASASWKKLKRVEHASTLLIERRKGDSSPTFALA

SEQ ID NO: 3994 - protein, 414 aa, unidentified; identical to SEQ ID NO: 2588

SEQ ID NO: 3995 - protein, 447 aa, Marinobacter sp.; identical to SEQ ID NO: 2641

SEQ ID NO: 3996 - protein, 436 aa, Ktedonobacter sp.
MSHVFVVDANRNPLTPVHPGRARLLLTQKKAAVFRRYPFTIILKTMPEHPEVHPLRLKIDPGSQTTGLALVNDATGEIVFAAELSHRGQAIKHAMDQRRAVRRNRRQRKTRYRKARFANRRRRKGWLSPSLISRMANIVTWVQRLRRIAPISVLSQELVKFDLQQMDHPEISGMEYQQGTLAGYEVREYLLEKWKRACTYCGAQNVPLQVEHIQAKANGGTDRISNLCLACDSCNKAKGTQDIRVFLTEKPDLLGRILAQSKAPLKDAAAVNTIRWALYERLGTLGMPIECGSGGLTKFNRTVRELPKKHWLDAACVGKSTPEHVHLAGVVPLLIAATGHGSRQKCNVNEMGFPCSKPKGAKKVKGFQTGDIVKAVVTSGSKQGVYVGRVLVRASGSFDIRTNQGRVQGISYRFCAPVHRCDGYSYMKGAGHSSPV

SEQ ID NO: 3997 - protein, 473 aa, Calothrix sp.
MEYLPKNKMLTNHVFVLNADKSFLNMVHPARARKLLTQEKAAVLRTYPFVLILKKQVFNPTLKEYFLKIDPGSKWTGFAIQCGSDIVFRMELQHRGMQIRSDLLTRAGFRRGRRSRNLRHRKKRFNKRKRLGWLAPSLMHRVLTVKTWIKRFCKFCPIVVIEIEQVKFDMQKLANSLISGIEYQQGELMGYEIREYLLEKWGRECVYCGVKDVQLEIEHITPKSKGGSDRISNLTLACHNCNQRKGDMNISDFLDDRQKLSKILNQAKSPLRDAAAVNSTREAISNMASKYNNVKNWTGGRTKMNRVKQNLSKAHSIDAACVGESGSNIKILTYQPLIVISKGHGNRQSRKTNERGFPALITETCQKTGKEIVKKNPDGTVKTIAPKKKYTHIHTGDIVRFKLDKPCMTKGNKKKGIEKKVRVPCGSYTARVKTPTPKGFEVLINNERVNVSTMRNVSFAYRADGYDYKFAHV

SEQ ID NO: 3998 - protein, 443 aa, Bacillus sp.
MVEENMTCFMQRKGENPMVFVLDTNKRPLDPCHEAVARKLLKQGKAAIYKRFPFTIILKKSVDESEIKTTYRLKIDYGSRHTGLAIVRGEEVLWLAQLDHRTDIKEKMDKRRAFRRARRNRKTRYRKPRFLNRKRKEGWLPPSLESRVQNIQTWVNRLKKLCPIGYISYENAKFDTQLMRNPEINGVEYQQGTLQGYEVREYLLEKFGRKCCYCGKEGVPLEIEHIIPKSRGGTDRVDNLCLACRDCNKRKGKQTAEEFGYPHIQEMVKETLKDASAVNTTRWKMYEVLKQSGCEVECGTGARTKMNRIRLGLPKTHYFDACCVGKSTPLQLYFKTKEVLFIKAKGRGSRSRTNLNKHGFPRGYFARQKFFFGFQTGDMVKAVVSKGKYKGVWFGEVACRKSGSFDIKDKDGKRIAQGINYRYVQVIQRFDGYAYRREETELA

SEQ ID NO: 3999 - protein, 451 aa, unidentified; identical to SEQ ID NO: 3199

SEQ ID NO: 4000 - protein, 365 aa, unidentified
LGVDAGSKHIGISATTEKHELYREEATPRNDVVDLLSARRAFRRSRRNRKTRYRAPRFNNRVHSKHKGWLAPSVEVKIQEHITLIKHACRILPVTLVRVETAEFDTQRLKAMLEGKPLPVGTDYQLGEMYDEYNVRQYVLKRDNYTCQCCGAHSTKTKGVKLHVHHIETRRTGGNAPNNLITLCKACHKALHAEKVTLDGKKRGKPLKDAAFMGIMRKTLMERLRKELKIPVQGTYGYITKYLREKNGIPKSHTNDARCISKNLLAIPCDTCYYTKAVRHHNRQLHKATILKGGIRKANQAPYIVKGYRLWDKVAYNGTECFITGRRTSGCFALKKLDGTVVSNSISYKKMRLLEAATNYIIERK

SEQ ID NO: 4001 - protein, 424 aa, Bacillus sp.
MTHCFVLDAEGRKLSPTKEKRAWYLIRKQKAILKCKFPMVIQLAREVPEEEIDSTPIHLGIDDGSKLVGIALVQECGKENKPVFKGTIELRIDVKEKLAVRRGYRRYRRQHKKYRPARFDNRPSSRKEGWIPLSIRQKKDSILRVVRQLTKWVRINQIFLEDVLLDIRALETGYKPYRWEYQQSNRLDENIRKAAILRDQNTCQDCGATNTRMEVHHITPRRLNGSDSIHNLITLCSTCHEKIAGEELLHSQRFYQKIKGRSISFKDAMHVMQGKTYLQKALKEIAPLNLTTGGDTANKRIDWGIEKTHANDSIVICNLRVNQEQCEMKDWVIKPMKKRSNKKIKSANGIYHRDFVRYTKRNGESYIAYITALYPERNQCNMTTLDGKVLKRYGLSRLSLIWRFSKIFWFTNSMKEVNPGSIIG

SEQ ID NO: 4002 - protein, 430 aa, unidentified
MSNFVFVLDTNKQPLELVAPGQARRLLKLAQAAVYLRYPFTIILKYAVSHPKTQPTQLKIDPGSKTTGLAIVSGNKVLWGAHLSHRGQQIKNDLESRRNLRRNRRNRKTRYRKPRFLNRTRAPGWLPPSLESRVKNIVTWVNRIRRYVAITGISQELVKFDLLAMQNPEISGKEYQQGELAGYEVKEYLLAKWGRKCAYCGVENVPFEVEHIHPKSKGGSDRVSNLTLACRGCNQAKGNQDIRDFLFKKPDILSRILKQASQPLKDATAVNSTGWALFQQLKQTGLPIEVSTGGRTKYNRTRLGLAKTHWLDAACVGNVEVLQVLTDQPLLIAAKGWGSRQMCTTNKYGFPVKHRTRCKTFFGFGTGDMVSAILPSGRFAGTHVGRLTVRESGVFEMRTPLGKVSPVRHKYCKSIHRNDGYMYAFSTNVQ

SEQ ID NO: 4003 - protein, 437 aa, unidentified
MRVFVLDKNRKPLDPCHPAKARKLLKLGRAKVLRRYPFTIIIKDLEEENCVTHDHQLKIDPGAKTTGLAIIQDNRVIWGAELTHRGFQIREALTSRRQLRRSRRNRKTRYRQPRFLNRKRPKGWLAPSLMSRVYNILTWVNKLIKFCPVTGISQELVRFDTQKMLNPEISGIEYQQGTLYGYELREYLLAKWNRTCAYCSAIGTRLEIEHIKPKSKGGSNRVSNLAIACHNCNQAKGNQEIEQFLSKKPSILKRILSQAKKPLADAAAVNATRWKLHDELKLIGLPVEVGSGGLTKYNRCRQNLPKTHWLDAANVGNVDTLYIEDYQPLLITAKGHGTRQICRTDKFGFPRLHCSQKKIHKGFQTGDIVKAVVTKGKKIGTYVGRIATRKTGFFDITTHLEKFQELAISIVKLFIAKMDIATNFMADKSAASTSSAS

SEQ ID NO: 4004 - protein, 544 aa, Blautia sp.
MKQKKQKVMVYILNKKGKPLMPTTRCGHVRKLLDSKKAVVVSSNPFTIRLKYDTPNGVQDVFAGIDSGRENIGSGASNEDGDCLYLGELKTSNKSIKMKITERAGFRKERRRHDRQNKQRKARKDHTEIQNGNADICRTTISCKSVQISYPAAEKSVTHKIIRGKEGKFANRHRDEGWITPSARQLVQMHMNDLKSMCKILPISHVTLERVAFDFQKLENENIKAWEYGKGKLYGYDSPEEYIHDVQGGKCLICGKPHIDYLHHIIPRSKGGSNKVSNLAGLCYDCHYGPMGVHNCQNTQDRLPELKNEANKQYKVSLLNSVMPVLIEEMDKFCKANSIIFSICEGHDTAKVRDIYDLQKDHCVDGFAISLVGRNVKSVDVMPDRIHQKQRYKKKSKNIIKKRNCREYYDGKKLVAVNRHKGTDQKADSLEEYMNTYAETHTADECKKHFESLTVKPARRTYTFHKEGRICPFHIGDKVRYEKKNKIKGNTKVETFICEGIRFPKDENKAKVEHNKTKSKKMKFCRVLEPGCTPYIDYRKLVLI

SEQ ID NO: 4005 - protein, 324 aa, Parasutterella sp.; identical to SEQ ID NO: 3750

SEQ ID NO: 4006 - protein, 449 aa, Allochromatium sp.
MAVFVLDKQKHPLMPCTEKRARLLLERGRAVVVRLAPFTLRLKDRIGGAVQPLRLKLDPGSRVTGLALVRESETGDADTGAVERLEHGLWFGELVHRGQAIREALTLRRHYRRARRSRKTHYRAPRVLNRPRREGWLPPSLQHRLDTTLNWVERLRRLAPITALSQELVRFDTQALQNPEISGVEYQQGELAGYEVREYLLEMWHRSCAYCGATNVPLEIEHIVPRAKGGSDRASNLTLACRPCNQRKGSRSIEDFLQRQPVRLHQIQAQARAPLQDAAAVNATRWALLNALQTTGLAVETGSGGRTKFNRTRLDIPKTHALDAACVGAVDQVRDWNRPVLAIRATGRGAYRRTRTFNNGFPRGYLMRHKRVHGFQTGDWVSAVVPTGKKAGVHIGRVAVRQTGSFNIQAPAGTVQGIAYRHCCLIQRADGYGYAFQPKPDTEEARRAA

SEQ ID NO: 4007 - protein, 427 aa, unidentified
MHVFVLDKDKKPLAPCHPAKARRLLKSGRASVFRRYPFTLILHEIEAKDCVVPETQLKIDPGSQTTGLAILSENRVIWASELSYRGQQIKNDLEKRRALRRSRRHRKTRYRKPRFLNRTRPKGWLPPSLNHRVETTMTWVNRLRKLCPIVSISQELVRFDTQKLQNPEVSGIEYQQGELLGYEVREYVLQKWGRKCIYCGAEDLPLEVEHIHPKSKGGSDRVSNLTLACHTCNQAKGNRDIREFLSGKPTVLNRILKQAKAPLKDAAAVNATRWKLYQQLKETGLPVEVGTGGQTKFNRTRLGLPKTHWLDAACVGKSTPDRLDVAVEKPLLVAAKGHGVRQRCRPDRYGFPRAVAPKAKSFQGFQTGDIVKATIPQGKFAGNYTGRIAIRFRPSFRLNAGVKPFDVHPKYLTTVQKSDGYEYRFSK

SEQ ID NO: 4008 - protein, 427 aa, Moorena sp.
MQNYVFVIDASKQPLNPIHPKKARRLLDIGKAAVFRMYPFTIILKTAINNPTISPCKIKIDPGSKTTGFAIVQNDQVIWGMELEHRGGLIKKKLEYRRAVRHRRRNRNTRYRKPRFLNRKRPEGWLPPSLEHRILTTETWVKRLIKFCPVNEIWVERVKFDTQKMQNPEINGTEYQQGELAGYEVREYLLEKWGRKCTYCGKQNTPLQIEHIHPKSKGGSNRVSNLCLACDKCNQRKGNKPVEDFLRKKPSLLQKIKTKAKQPLSDAAAVNTTRNKIVKVLKGIKPVVTGTGAQTKYNRINFGLPKQHWIDAACVGDVEALVLKTSQPLLVTCIGPGGRQKAALNKYGYPIRHNPLKPIKGWITGDIAKHQKLGIGKVTPRSKGSFGFTPLGEKGYKSCRPQDISAVHRKDGYIYRFCQSLPGTAWK

SEQ ID NO: 4009 - protein, 423 aa, Marinobacter sp.
MSVFVLDRRKQPLMPCSEKRSRLLLGRGRALVVRAYPFTIRLKDRAGGITQPVRIKIDPGSKTSGIAVVRESGQKQHVLALMELAHRGRQISKSLEQRRAFRRRRRNQLRYRAPRFLNRLRSLVPVVSISQELVRFDTQKMENPEVSGVEYQQGTLLGYEIREYLLEKWGRECAYCADKDTPLQIEHIDPKANGGSNRISNLTLACGPCNREKGRQPLADFFASSKRLKNHQARPDRILKQCKKPLRDASAVNSTRWALHQTLKQMGLSVEVGTGGRTKFNRQRLEIPKTHALDAACVGEVEIVEGWDVPILAIKATGRGSYQRTRLTRYGFPRGYLMRQKKVQGFQTGDMVRAVVPTGTKAGTWLGRVAVRKTGSFNIQTSSGAIQGISHRHCALTQRADGYGYHIQPNQPKEEGGRKNESR

SEQ ID NO: 4010 - protein, 442 aa, unidentified
MVYVLNKDGQPLMPTSRHGKVRRLLKTNKAKVVKRCPFTIQLLYDTANHTQNITLGVDAGSKHIGLSATTEDKVLFEADVELRNDISRLLEARYKFRRSRRNRKTRYRKKRFDNRVSSKHKGWLAPSIEHKIQSHFAMVEKVHRILPVTKIVVETASFDTQLLKAQLEGKLIPQGTDYQNGELAGWNIREYIFHRDNYTCQWCKGKSKDPVLVTHHHAYWKGDHTNKPSSLITLCNTCNDSKYHKKEANRLWGWEPKITNSYKHAVFMGVMRWTFYNRLKEIYPNVSMTYGYITKNTRIENNLPKTHYVDARCISGHPEAKSSGEYFYYKKVRRHNRQLYKANTLKGGVRKRSQAEYIVKGFRLFDRVEYQNNEYFVFGRRASGFFDIRTLDGQKVNKGSISFKKLKLKETNKTYLIERRMADTGVSLAPLTTEVVSFRQTG

SEQ ID NO: 4011 - protein, 413 aa, unidentified
MTSYAFVLDANGKQLAPAKEQKAWFLIRKKRAALVSKYPMVIQLKKEIPENEICKDEIRCGIDDGGLHVGIALVQKCKTKNKVVFKGTIEQRNDVKHLMEVRRSYRHYHRYHKRYRPARFDNRKSSKRKKRIAPSILQKRQAIIRVINRLNKWINITNYWLEDVSIDIRALTDGYKPYRWQYQKSNRLDENIRKAAILRDGGKCMECGKLNCRLEVHHIKPRRRNGSNTLDNLITLCESCHQKTEGQEELYMDRYFSLLKSSDHKNLNYAQHVMIGKEWLRKQLSSLGVLYLTNGGDTANKRIDWNIEKSHANDAVCITNLQPDTYDMKEWTVKPMRRQSKAKTDNVLGIKHRDLVEYTFKNGETHRGYVTALYPEQKAINFQSPTKHCKKVNARKCKLLWKYSKIYWFENAS

SEQ ID NO: 4012 - protein, 413 aa, unidentified; identical to SEQ ID NO: 2636

SEQ ID NO: 4013 - protein, 441 aa, Scytonema sp.; identical to SEQ ID NO: 2725

SEQ ID NO: 4014 - protein, 469 aa, unidentified
MSKTNYVFVLDTNRQPLAPCHPARARELLAKGKAAVFRRYPFAIVLNRAVGDVPPESQLNASTSLSVESERSRGLKIDPGSQTTGLAVVNGDKLVWGAELQHRGDRIQAKLETRRACRRSRRNRQTRYRKPRFLNRTRPKGWLPPSLNASAPLSVESERSRGLNHRVETTLTWVNRLRKLCPIASISQELVRFDTQKLQNPEISGVEYQQGELFGYEVREFLLEKWGRKCAYCRAENVPLEVEHIVPKSKGGSDRVSNLTLSCRPCNQSKGNRDVREFLSGKPSVLERILRQAKTPLKNAAAVNATRWKLYQRLKETGLPVEVGTGGQTKFNRTRLEFPKAHWLDAACVGKTPSLHLATETPMAIASKGHSTRFRTLIDRYGFPRAVRKTKAQVNGLQAGDIVRAIVPNGKYRGQWTGAIAGVRKKRPPALRPFGKKQIDLTAKTQIQIVHKQDGYEYNINPCGHSSRR

SEQ ID NO: 4015 - protein, 414 aa, unidentified
MVYVINKQGQALMPTERFGKVRRLLKNSLAHVVCRIPFTIQLDYDTTDYTQPVSLGIDAGSKHIGISATTSEKELYAADVELRNDIVDKLSTRRELRRTRRSRLRYRKARFNNRVSSKRKGWLAPSVENKIQTHLTVVEKIHKFLPITNIVVETASFDIQKINNPSISGVEYQQGEQLDFFNVREYVLFRDNHTCQHCKGKSKDKVLNVHHIESRKTGGDSPKNLITLCETCHKAYHRGEFKLNIKRGKSFRDAAFMGIMRWKLYDRLKNIYPNVSMTFGYITKNTRITNNLPKEHYVDARCISGNPVAKPLGYYFYQKKVRCQNRQIHKANFLKGGRKKLNQAPFLVKGFRLFDLVEYQKELYYIFGRRSNGSFDIRKLDGTKVNKGSINCKYLRLIDKRKSILTEKRTQVNL

SEQ ID NO: 4016 - protein, 465 aa, Marinobacter sp.
MAVFVLDRQKNPLMPCSEKRARLLLARRRAVVVRVYPFTLRLKARTGGTVQKVVLKIDPGSKETGLAVSRVSAQGEHVLCLIELIHRGRQISKALGQRRGCRRRRRSQLRYRAPRFNNRTKPKGWLAPSLQHRVDTTTSVIKRLRALVPVTSISQELVRFNLQQMENPEISGVEYQQGTLLGYEVREYLLEKWGRECAYCTAIDTPLEIEHIVPKSNGGSNRISNLTIACHHCNEEKDTQTLADFFKTSSRLKDKQNRMDNVLIQCKRPLRDAAAVNSTRWDLFQSLKTTGLPVNVGTGGQTKFNRQRLGIPKTHAFDAVCVGVVEHVFDWEKPTLRIKATGRGSYKRTRLTKHGFPRGYLMREKSVHGFQTGDMVRAIVPIGKKEGTWLGRVAIRKTGSFNIQTSGGAVQGIHHRHCQLMQRADGYGYHLHHKKEKGNRKVCRADARRALPPRPKRTGFPAQNR

SEQ ID NO: 4017 - protein, 456 aa, unidentified
MNTCVCVLSNNGERLMPTFRLGKVRRLLKDGKAKIVKHHPFTIQLLYDSKTNKQPIEICEDVGYNYIGISVKSESHEYVSAQYDTLQDEKEHHDDCRKMRRARRNRLRYRKPRFDNRKRSEGWLAPSLEHKKQLNISLVERYVSVIPITHATVEVGSFDTMLLQAIQKGETKPEGADYQEGPRYNLATLREAVFYRDNYTCQVCGRKITDGAILHMHHMFYWKGRHGYKLDELVTACEKCHTPANHQKGGKLFGFGEDKEFADLSGAAFMNAVRWQIVNALHTTYSKEFVTITYGAMTKEKRIALQLEKSHNNDAYAMGDFHPVHRCGFRHYQKRRRNNRVLEKFYDATYIDARTGNKAKGKELFNGRISRNHKKDSENLHKYRSEKVSKGRRSIRKRRYAIQPYDTVRLKGKTYITSGCHNKGTRLLIPVNGKSKSVTISKVQVVCHAGPWIQII

SEQ ID NO: 4018 - protein, 534 aa, unidentified
MRKCVNTVAVLNGDGKPLSPTRPSRARWLLKQGRARVINIYPFVIQLTCTISNPVVNKAVLVLDDGETFGLAVVEHCRSHDRVVLGADGKTRGREISDNMRERKELRAARRNRRNKKRGRVGESKLAYRHGTEYPASIRADVQAKLNAVGDILRWFPVSRIILEPVKVDLVKERRPGVKGKDYQQGLSFGIEAESRNRKRRLAVLKRDGYRCLYCGTPVTEETARIHHFRARKSGGTNRYDIQGTLCEKCHTSVSTEQLALVFDPDRYPDTRAAGRLMHGRYLLEAGLKGFSLSLEVKYGYETQVKREEINLPKTHVNDAAALGAREGYPLRLPPALYKIEYRKRHANRKLFNTNPGVAHYRAEADRQPHVDQARMKVDDHDHETNRKNRSYRRYVRNKYYKKLKTEGRFNYDLLPGKKRLNEPYAVNEAVYVDEEGRPVVVKNRRIWRDQDLSGLPPRSKLFEKGDLVRTKEGWLAKVISLMSDGQVKVLFCERKEGRKCQFTQRHPATLRIVQKGRGRCWIPQKAALLPSMN

SEQ ID NO: 4019 - protein, 449 aa, unidentified
MVYVLSIDGKPLMPTSNAKARRLLKQKKAKVRELTPFTIQLTYKTKTEYTQPITLGIDSGYSNVGFSAIANNSELISGELKLLQGMKERLLERARYRKIRRSKLRYRKARFDNRTKSKPKGWLAPSLQYKLDSHIKFIDYLYSILPITRCVVEVANFDIQKIKNPDIQGEEYQQGEQMGFWNLREYIIHRDSHKCQNPNCKNRDKEQILETHHIKYKHLGGTDNPNNLITLCTKCHTSQNHKEGYFLWDWCQQGKKVRGFKDATFMSMIRWYLVNLLKERYSNIHVTYGYITKSHRINNKIEKTHYNDAFCIAKGINQKRSIEIFKVKQSRRNNRNLEMFYDAKYIDTRTGEKVSGSELNNGRRTRNKNLNSENLHQYRGQKLSKGQRRIRTKRHFYQPNDLVKYNGQTYSVRGTQNNGAYIRLNEIKKVPRVDLLTPYKFNKGIVWSM

SEQ ID NO: 4020 - protein, 451 aa, Scytonema sp.; identical to SEQ ID NO: 2763

SEQ ID NO: 4021 - protein, 443 aa, Caldicellulosiruptor sp.; identical to SEQ ID NO: 2385

SEQ ID NO: 4022 - protein, 470 aa, unidentified
MSVFVVGLNGCRLMPVSERKARLLLKGGKASVYRKVPFTIKLNYKTGSTVQPGYLGIDTGSQHIGVSVVRQDGTVLHKEEIGLRDSMSKRKLLESRASSRRGRRYRKTRYRHPKWKPKTKRIYSEKADRKGQHWKKQKNTFTSKRQAGWLPPSLQSKTDHHIQWIRKLLHLLPEGYRLSIELGRFDPARMKDPGIHGELYQKGPQYDYENVRAYVLARDGYTCRVCKKKGGKLHVHHILYRSRGASDDPKYMAAVCSNCHTTENHLPGGILYQWMQEQKKFTRGLRDATFMNILKKRLRRAFPDAVFTYGNITKADREKLGLPKSHGNDATAIALVKTGVTSVRDEEPVIHIQQVRRKKRSLHEETPRKGRKEPNRTASRNDKNTRSVTVSKGSREKKVSMTACLFDRVELDGKKGWITGFTGTSCYVKDKEDNYICTSPKYKQVSISRLRILHHCGNWAIGAEKPLGKG

SEQ ID NO: 4023 - protein, 258 aa, unidentified
MPNKVYVINKHGRPLMPCSPAKARHLLDAGKAKVKKRTPFTIQLVYGSSGYTQEVILGVDAGSKTIGVSALTKKEELFAANVIPRNDVVDLLSTRREFRRARRNCKTRYRKPRFDNRVRSKHKGWLAPSVEVKIQGHITAIRRVCGILPVSKVVVETAEFDLQLLKAIADGKSVPQGEDYQKGEMYGHYNVRQYVLWRDNYTCQCCGAHATKKKEVRLHVHHLESRKVGGDAPSNLITLCDSCHEKFHKGIILSLIHI

SEQ ID NO: 4024 - protein, 423 aa, unidentified
  source 1..423: note = Lachnospiraceae bacterium UBA7754
MVYVLSKDNKPLMPTQNHAKVRILLKTKKAETVRRYPFTIRLLYDSTEYTQDISLGVDAGSRHIGLSATTETKVLFEADIQLRNDIVDELSTRREYRRSRRSRKTRYRKPRFDNRRRGDGWLAPSVREKVETHLTAVQKVHEILPITKITVEVASFDIQKIKNPDIQGTEYQKGEQLDFWNVREYVLFRDGHQCQCCHGKSGDKILNVHHIESRKTGGNAPNNLITLCETCHRGYHMGVVKLPKAIHRGMSFKDATFMGIMRWALNDRLKGLYPDVHLTYGYITKNTRIEHNLPKDHYIDARCISGHPDAKSTCKDGDVVYAYRKIRCHNRQIHKAKILKDGIRKRNQAEYEIKGFRLFDHVSYKGWSHYFIFGRRKTGYFDIRLFNGTGKVNNGSVSCKKIHMIQPCSGYMVDRYIVPENNT

SEQ ID NO: 4025 - protein, 447 aa, Marinobacter sp.
MSVFVLDRCKQPLMPCSEKRSRLLLGRGRALVVRAYPFTIRLKDRAGGITQPVRIKIDPGSKTSGIAVVRESGQKQHVLALMELAHRGRQISKSLEQRRAFRRRRRSQLRYRAPRFLNRTKPRGWLAPSLQHRVDTTKSLVNRLRSLVPVESISQELVRFDTQKMENPEVSGVEYQQGTLLGYEIREYLLEKWGRECAYCADKDTPLQIEHIDPKANGGSNRISNLTLACGPCNREKGRQPLADFFASSKRLKNHQARPDRILEQCKKPLRDASAVNSTRWALHQTLKQMGLSVEVGTGGRTKFNRQRLEIPKTHALDAACVGEVEIVEGWNVPTLAIKATGRGSYQRTRLTRYGFPRGYLMRQKKVQGFQTGDMVRAVVPTGTKAGTWLGRVAVRKTGSFNIQTSSGAIQGISHRHCALTQRADGYGYHIQPNQPKEEGGRKNESR

SEQ ID NO: 4026 - protein, 413 aa, unidentified; identical to SEQ ID NO: 2605

SEQ ID NO: 4027 - protein, 412 aa, Lactobacillus sp.
VFNLFLQLAKKYPFTIQLKYGSYGYKQKVSLGVDTGQRHIGFAIVSQNKVLHQSEVELRQDVHKNLYTRKIYRRSKRNRKTRYRQARFLNRVHGKRDGLWLPPSIKGKVSHNIAWIKRYLAVLPNPDLHIEVGKFDMAKMVNLEISGKQYQEGSLKDWKNYEYYVLARDEYTCQLCHKHGEGVKLVVHHIVYRSQGGTDRVDNLITLCTNCHTTKNHQPGGKLYKWMKAKKKVIKQLKGATFMNILRKRIMTAFPEASFQYGSQTYADRKNLLLPKGHFMDAIAISGIKSVGQLSDTVTMISQFRKKKRSLHEATARKGRKQPNTSSKRNEKNTKHARGLWLNDYVRVIGNHAKGYVKGFKSNGYYVYLTDGLGNYVLNNGKNYINGQQCRLIMHNGNWQKAEQKLSLYKFK

SEQ ID NO: 4028 - protein, 269 aa, unidentified
  VARIANT 269: note = X can be any naturally occurring amino acid
MPNKVYVINKHGRPLMPCSPAKARHLLDEGKAKVKKRTPFTIQLVYGSSGYTQEVILGVDAGSKTIGMSASTTKEELLSAEVKPRNDVVDLLSTRREFRRAQRNRKTRYRKPRFDNRVRSKHKGWLAPSVEVKIQEHITSIKRVCRILPVSKVVIETAEFDLQLLKAIEEGKPVPQGEDYQQGEMYGHYNVRQYVLWRDGYTCQCCGAHATKKKEVRLHVHHLESRKVGGDAPDNQVTLCESCHEKLHKGLIAEKDFKKRKRKSTRDAX

SEQ ID NO: 4029 - protein, 465 aa, unidentified; identical to SEQ ID NO: 3306

SEQ ID NO: 4030 - protein, 420 aa, unidentified
MQYVYVLNKHGEPLMPCSPRKARLLLKQKKACVIKRTPFTIKLLYGSTGYKQPVTLGVDAGSKHIGISATTEKHELYREEATPRNDVVDLLSARRAFRRSRRNRKTRYRAPRFDNRVHSKHKGWLAPSVEVKIQEHITLVEHVCRILPVTLVRVETAEFDTQRLKAMLEGKPLPVGTDYQLGEMYDEYNVRQYVLKRDNYTCQCCGAHSTKTKGVKLHVHHIETRRTGGNAPNNLITLCTACHKALHAGKVTLDGKKRGKPLKDAAFMGIMRKTLMERLRKELKIPVQGTYGYITKCLREKNGIHKSHTNDARCISKNPLAIPCDTCYYTKAVRHHNRQLHKATILKGGIRKANQAPYIVKGYRLWDKVSCNGTECFITGRRTSGYFALKKLDGTVVSNSISYKKLRLLEAATNYIIERK

SEQ ID NO: 4031 - protein, 512 aa, unidentified
MSTIYVLNKDGKPLMPTTRGGHVRHLLKEQKARVVQSNPFTIQLLYETNDVVQPLYLGIDPGRTNIGVAVVKADGTAVFAAHLETRNKKIPKLMQDRKKARRARRTNGRRCRRQRRAKANGTISKKCVKQDTAQSKNPSKRAKEIGVIKRHLPGCKKDVLCVGIKNKEAKYTNRARLEGWLTPTANQLLQTHINLVKKIQKFLPISDVVLEVNKFAFMRLDNPNIQKWQYQRGPLYQKGSLENAVSEMQEHHCLFCEKPIEHYHHVVPKSENGSNTIANIVGLCAEHHNLVHKDVAWQEKLVEEKTGLNKKYGALSVLNQIIPALTKELSFLFPKHSFMTNGKSTHDYRAAHGISKDHWLDAYCIACSVLPIDVCDSTINNCVPYELKQFRRHDRRALNNENMNRVYTLNDKVVATNRHKATEQEAASLEEFRKEHPNDVCKLKVKEHHPTYRNMNRNYPGSVFLVGKQIHVMQGIASSKDGKATKYNDTRATTIAAGKCKFVAKNSGILFV

SEQ ID NO: 4032 - protein, 394 aa, unidentified
MNTCVCVLSNNGERLMPTFRLGKVRRLLKDGKAKIVKHHPFTIQLLYDSKTNKQPIEICEDVGYNYIGISVKSESHEYVSAQYDTLQDEKEHHDDCRKMRRARRNRLRYRKPRFDNRKRSEGWLAPSLEHKKQLNISLVERYVSVIPITHATVEVGSFDTMLLQAIQKGETKPEGADYQEGPRYNLATLREAVFYRDNYTCQVCGRKITDGAILHMHHMFYWKGRHGYKLDELVTACEKCHTPANHQKGGKLFGFGEDKEFADLSGAAFMNAVRWQIVNALHTTYSKEFVTITYGAMTKEKRIALQLEKSHNNDAYAMGDFHPVHRCGFRHYQKRRRNNRVLEKFYDATYIDARTGNKAKGKELFNGRISRNHKKDSENLHKYRSEKVSKGRRS

SEQ ID NO: 4033 - protein, 518 aa, unidentified
MTPKKRKEASRMSEYIYVIGVDGDPQMPTKRKRHVEQLLQTGRARVFRQVPFTIQLTYKNEPVLQPVTIAEDPGRSNVGMAVVSLSGELLSAAIVQTRNKEIVKLMEKRKQHRRASRNGERRARQRLAKKYHTMITAGFLMRKLPMYGKDKRVRCNVIKNTESRFCNRKRENGWLTPSAEHLVRTHINLIHKMQKFLPITDVAIEINRFAFLSLEDPSISGVDFQNGPLKGYDDLNAAVEDLQDGHCLMCNSPIEHRHHIVPRSMQGPNTIGNIAGLCCKCHERVHKDTRFEDRLKKKKAGLDKRYAAVSVLNQAIPFICKRLEQEFEKEHVHYCSGRDTGMVRRSFGYHKTKEEQLHEVDAWCIAVLALQHVPEKTPEFDHVHEILQFRRQDRSRIKAQTSRAYYHEGKKIAKNRKKAEGQRDDSLQEWRKRQVERYGKEQTRKMISQLEVKESIRRYNRLDRLMPGAVFYYQGVRYVMRGQHSNGQYLQAVGMGSKDFPAKKCKIVANNEGLVFVS

SEQ ID NO: 4034 - protein, 424 aa, Enterococcus sp.
MRVFVRNMQGKPLMPCSNRKARLLLKEGKAKIYQYNPFTIQLCYASREYVQECHIGIDTGAKHIGMAVTSEDKVLFKGEIELRQDVKSNLDTRRSYRRDRRNRKTRYRKARFLNRKKKESWLPPSIENRINHTFKWINKLVALLPNPKLHIEVGKFDVAKMINPNVQGVDYQHGQTYGFYNVRYFVFARDNYTCQCCKKSKNKILQTHHIIYRSNGGSNRADNLITVCTDCHTYENHQKGGILYQWQENHKKTKQYKEPPFMNVLRKRIFTQYPNAIITYGSETTPKRKELGLEKTHYNDAIVISGITKIKGNPNEWLLIKQFRKKKRSLHEATARKGRKEPNRLQKRNAKNTPYYKGFCLNDKVRVFNQVGHITGFTSSGAYIKNSKNEYITLPNKSYKQIGISNIRLLHHNNNWQYIHKHIA

SEQ ID NO: 4035 - protein, 419 aa, Geobacillus sp.; identical to SEQ ID NO: 2623

SEQ ID NO: 4036 - protein, 455 aa, unidentified
MVFVLDRHHKPLMPCHPARARRLLGKGRARIHKLYPFTIRLVDRELKDSTVQPVVLKLDPGSKETGMALVREDETKTHHALYFVNLKHRGSEIKPSLLQRSSFRRSRRSRNLHYRAPRFLNRTRPQGWLAPSLQHRVDTTLSWVERLRKLAPVATLEMELVKFDTQKMQNPEIDGVAYHQGELAGFEVREYLLEKFGRKCIYCGAEGVPLNIDHIVPKSAGGSNRVSNLVLACVDCNQKKNNLPFEVFLKGDKAKINRIRSQLKTPLKDAVSVNTTRWQLFEALKLTGQPLTTATGARTKYNRHQFGVPKEHWLDALCVGETAAVRGWQPLGVLVVKCTGRGAYKRTRLTKDGFPRGYLTRTKRFFGFGTGDMVVATVFASKKKGSYKGRVAVRKSGSFAIQTASRKVDGISYRYCRLLSRADGYGYSWHSSKSLINSTKETALLPRINTQVSAP

SEQ ID NO: 4037 - protein, 443 aa, Oligella sp.; identical to SEQ ID NO: 3678

SEQ ID NO: 4038 - protein, 512 aa, unidentified
MSTVYVLNKDGKPLMPTTRGGHVRHLLKEQKARVVRTKPFTIQLLYETNDVVQPLYLGIDPGRTNIGVAVVKTDGTAVFTAHLETRNKEIPKLMQGRKKARRARRTNGRRCRRQRRAKVNGTLSKKCVKQTTAQNGSVSKRAKKIGVIKRHLPDCEKEVLCIGIKNKEAKFSNRTRQEGWLTPTANQLLQTHINLVKKIQKFLPISDVVLEVNKFAFMQLDNPNIQKWQYQQGPLYQKASLEEAVSEMQEHHCLFCKKPIDHYHHVVPQHKNGSNTIGNIVGLCAKHYDLVHKDTTWQKKLAKKKTGLNKKYGALSVLNQIIPALTKELSSLFPKHFFATNGKSTYDYRAAHGVSKDHWLDAYCIACSVLPNDVCDSDINNRVPYELKQFRRHDRRALHKENMSRVYTLNGKSVATNRHKATEQTTDSLEEFRQCQPDDVCKLKVKEHHPEYRNPKRNFPGCVFLVGKHTHVMQGPSGSHNGKADGYYDTNGNSYSSGKCKFVAKNEGIVFT

SEQ ID NO: 4039 - protein, 416 aa, unidentified
MVYVLSQNGQPLMPTENHAKVRVFLKQGKAKVVQRCPFTIQLLYESTTHTQKINLGIDAGSKTIGISATTDSKVLYEAEVVLRNDIVELLSGRRALRRSRRNRKTRYRKPRFDNRKKPDGWLAPSIRQKIETHVTVVENITKILPMTKIIVETASFDIQKIKNPEIEGAEYQHGEQLDFWNVREYVLFRDGHTCQCCKGKSKDNILNVHHIESRKTGGNAPNNLITLCETCHKAYHKGIITLPKEIHRGMRFRDAAFMGVMRWAFYDRLKELYNLLGVEVINTYGYITKNTRITYDLPKEHYVDARCISGNPAAKPMDYYYLQKKVRCHNRQIHKCKINKGGTRKRNQAAYEVKGFRLYDQVLWKGQKCFIFARRSTGRMDLRLLDGTHVNASVGYKNLKLLSMRKNYLIEQRKAG

SEQ ID NO: 4040 - protein, 443 aa, unidentified
MDEAAALEKGRHSRMGRRLTYPMYVFVLSKTGKRLMPTHAAKARKLLKEKKAKIVSRNPFTIQLTYQTTEYTQNLTVKLDPGFRKGGVALQSNDKIIFQGEITHRRYINQPTKGQVLVVRRQRRRARRYRIRYRAPRFDNRRRPEGWLPPTIKAKADVLINVLKVLAKYAPITRAIIEAGSFDTHKMQDPDIKPEDYQNGRQKGFKNVKEYVKHRDRRCINCGAEIKEVHHLKQKAKGGTDNPDNLVALCEKCHRLVTLGKLKLDISPGREFKGAAFINAAKNYIVSEIKKFIPEVVIQKGWQTKEERERLNLPKTHINDAIAMGTYGQSVYIPDISGYEIRPRQRAVRQQYLSEPEKGGVFKRYRHPWQNIAGIKRGDLCRDKKTNQLVRVDTLLSSGRLNARVLKTGHRLVNIVPDRLQIVERAKGLMFLPRKEGKPALLP

SEQ ID NO: 4041 - protein, 443 aa, Anoxybacillus sp.
MVEENMTCFMQRKGENPMVFVLDTNKRPLAPCHEAVARKLLKQGKAAIYKRYPFTIILKEIVDNFRPKTPYRLKIDHGSKHTGLAILRGQEVVWLGQLDHRTDIKERMDKRRAFRRARRNRKTRYRKPRFLNRRRKDGWLPPSLESRVQNIQTWVNHLKKLCPIGYISYENTKFDTQLMRNPEINGVEYQQGTLQGYEVREYLLEKFGRKCCYCGKENVPLEVEHIIPKSRGGTDRVDNLCLACHDCNQRKGSKTAEEFGYPHIQKQVKESLKDASAVNSTRWKVYEVLKQSGCEVECGTGARTKMNRIRLDLPKTHYFDACCVGESTPNHLYFKTKEVLFIRAKGRGSRSRTNLDRYGFPRGYLARQKFFFGFQTGDMVKAVIPRGKYQGVWFGEVSCRKTGSFDIKGKDGKRIAQGINYRYVQVIQRFDGYTYRREGMNIA

SEQ ID NO: 4042 - protein, 424 aa, Scytonema sp.; identical to SEQ ID NO: 2747

SEQ ID NO: 4043 - protein, 417 aa, unidentified
MVYVLNKNSQPLMPTERHGKVRRMLRDGKAHVVRLEPFTIQLDYSSGETIQEISLGIDAGSKHIGVSATTKKKELLAIQVEERTDIVELLSTRREARRTRRNRKLRHRAARFDNRRRKEGWLTPSSENRVVAHLRIIHLVNSILPIAKTTIEVAQFDSQKIKNDKISGVEYQQGEQLGFWNVREYVLARDGHVCQHCKGKSKDKILNVHHIEGRKTGSNAPNNLITLCKTCHKACHDREITLKVRRGTSLRDAAAMSIMRWEVYNRAKQEFKNVHLTYGYVTKHTRIHNNIAKTHCADALCISGNVGAERLSWFYGVRLTRRHNRSLHLFKPKKGGIRQGNLAPHWIGKSRLQQYDYVEWNGQRAFVSGSSNGRPYLKNFDDKYIMTPKASVNAKTVKFIRRKRGSMIIEQLLKDSI

SEQ ID NO: 4044 - protein, 413 aa, unidentified
MTGYAFVLDVNGKQLAPTKEQKAWFLIRKKRATLVSKYPMVIQLNKEIPDEEICKDEIRCGIDDGGLHVGIALVQKCQTKNKVIFKGIIEQRNDVKHLMEVRRGYRNYHRYHKRYRQARFNNRSSSKRKGRIAPSILQKRQSIIRVINRLNKWINITNYWLEDVSIDIRALTDGYKSYSWQYQRSNRLDENIRKAVILRDNCKCKECGKSNCRLEVHHIKPRRLNGSNTLDNLITLCKNCHQKTEGQEELYMSKYFDLLMSSDNKGLNYAQHAMIGKKWLRKELSNLGILYLTNGGDTANKRIDWSIEKSHSNDAICITDLQPDICNIKEWTIKPMRRQSKAKTDNVLGIKHRDLVEYTFKNGETHKGYVTALYPEQKAINFQSPTKHCKKVNARKCKLLWKYSKIYWLENAG

SEQ ID NO: 4045 - protein, 447 aa, Marinobacter sp.; identical to SEQ ID NO: 3880

SEQ ID NO: 4046 - protein, 449 aa, Desulfobacter sp.
  source 1..449: note = isolate UBA2225
MKVYVKSQSGKWLMPTNPANARILLKQGKAKVIQRTPFAIHLLYETTEHIQPVTVGIDDGGINIGIAAVSNGKVLFQQEVVLRSDVKSKLDTRRQYRKSRRNRKTRYRKSRFLNRKSSIPTCKVCGGNAPASQVICRSCLNRADGVHQKYAKIKKSVFRIPPSIKAKKDAIIRVVKQIPLPICRIVLEDLYFDFQAMENPDISGEQYQHGDLLYHKNFKQACLVRDKFRCRVCGAQTKLQCHHICAGAKGGTDKLSNLMTLCDLCHDRHHKEGLKLPKQKSSFYMSAAHVQQGKHYLQAKLSRIAPLRTTFGYITSHFRNNAGIEKSHVNDAVIIADKQASPLDRQIQTKHVQSRKRSLHEATARKGRKTPNRTQKRNNKNVFTLKDFNRWDTVQYKGRVGFISGFTGSSSCYIVDIKGNYIKNPMKTYKQVDLREISLICKNQTIISQ

SEQ ID NO: 4047 - protein, 466 aa, unidentified
MSTCACVFSKSGKRLMPTIRLGKVRHLLKDGKAKIIKHHPFTIQLLYDSETNIQPIEICEDVGYNYIGISVKSQSHEYVSVQYDTLQDEKDCHDSCRKMRRIRRNRLRYRKPRFDNRKRNKGWLAPSLEHKKELNVNVIKMYCKVVPITHVTVEVGSFDTMLVKAIQEGKAIPEGADYQKGPRYNLATLREAVFYRDNYTCQVCGREVQKDGAILHVHHMFYWKGRHGNSLSELLTVCEKCHTPANHQKGGKLYGFGEDIKFANLSGAAFMNTVRWQIVNELYAVFGKPFVTFTYGAMTKEKRIAFHLEKCHNNDAYAMGNFHPVDRCAFEHYKKVKRNNRILEKFHDSQYIDIRTGKVANGRSLFNGRINRSHKKNSENLHKYRGKRTRKGYRALRRKKVALNPGDLVSLNGEILVVHSTHAGKNGYVGVEFKAPSKSGKKSASLKKLKIVKTSNSMRSAWTKVS

SEQ ID NO: 4048 - protein, 431 aa, unidentified
MPNKVYVINKHGRPLMPCSPAKARHLLDEGKAKVKKRTPFTIQLVYGSSGYTQEVILGVDAGSKTIGVSASTKKEELFAANVIPRNDVVDLLSTRRESRRARRNRKTRYRKPRFDNRVRSKHKGWLAPSVEVKIQEHITSIKRVCRILPVSKVVIETAEFDLQLLKAIADGKPVPQGEDYQKGEMYGHYNVRQYVLWRDGYTCQCCGAHATKKKEVRLHVHHLESRKVGGDAPDNQVTLCESCHEKLHKGLIAEKDFKKRKRRSTRDATFMGIMRKTLMQRLCSELPIPVIETRGYITKATREKLLVLPKSHTNDALAIAQGKQGFNVGYLPGIVQINKIYTIRPVRHHNRQLHKATILKGGIRKSNQTEKYVFGYCLFDKVQFNGQDCFIWGRRTTGIFTIKTINGKMIKDGISFKKLKLVEKSTSYLIA

SEQ ID NO: 4049 - protein, 512 aa, unidentified
MSTVYVLNKDGKPLMPTTRCGHVRHLLKEQKARVVTSKPFTIQLLYETDDVVQPLYLGIDPGRTNIGVAVVKADGSAVFTAHLETRNNEIPKLMKKRKESRRARRTNGRRCRRQRRAKANGTISKKCVKQATAQNGGASKRAKEIGVIKRHLPGCEKEILCIGIKNKEAKFNNRTRPEGWLTPTANQLLQTHVNLVKKIQKFLPISDVVLEINKFAFMQLDNPNIQKWQYQQGPLYQKANLESAVSEMQEHHCLFCKKPIDHFHHVVPQHKNGSNTIDNIVGLCTKHHDFMHKDTAWQEKLAKKKTGLNKKYDALSVLNQIIPALTKELSFLFPKHFFATNGKSTYDYRAAHGVSKDHWLDAYCIAGSVLPNDVCDNNINSRVPYELKQFRRHDRRALHKENMSRVYTFNNKVVATNRHKAIKQTINSLEEFRQCQPNDVSKLKAKEHYPEYRNPKRNFPGSVFLVGKHTHVMQGTSGSHNGKADGYYDTNGDSYSTGKCKFIAQNEGIVFA

SEQ ID NO: 4050 - protein, 453 aa, Lactobacillus sp.
MMSEVQKVNYIYVVDSNGTPLMPTSRLGMVRRWLKTGQARWFGNSRKIIQFVRPVTTNTQELTLGVDAGFHLGLAVVGNQREYYASESLRKSEKDRITSRRELRRTRRNRLRHRQARFDNRRRKDGWLAPSMQHRLDFTIKEIKCLYTFLPITKLVVEVTPFNNQKLVDSNIKPWEYTQGKMHGFKTIKDYLLARDNYRDALDGKQYPASQLRVHHLVQRRDGGSNQPDNLVLLSDINHSQANHHNGSLAKLRENRQKELDYRGAYFMSILATRLSDYFARYTTTQGYLTANLRQKYQLEKSHLNDAFIIAGGTNTTLRTNNVYSRQKLRNNNRVLQKFYDAKYIDSRDGKQKTGKELSSGRTRRTRELNYANLRQFRQEKVKKGRVSIRRNHYQLRPHDVVLNTKTNKVETVTGVQNNGTVIKFQTGKTCSLKNVVSLYHVNGMLEKKIEDI

SEQ ID NO: 4051 - protein, 412 aa, unidentified
MTQLVYVINQNGHPLMPCKPSKARKLLRDGRAKVKHRAPFTIQLRWDCEEQVQDVVVGIDKGSSTTGFACVGRGEILLSGEILHRKDVKEKLDARRAHRRSRRNRRWYRPCRILNRASSKRSGRLPPSIKTNVEEVIRVVQRLPLPITRIVIEDVQVDIARLNDPTVQGSRYQDSKRLDENLRIACLLRDRYQCQHCGKREVRLEAHHVQYRQHGGKDTLSNLLTLCESCHHGVHAGNITLEVSGVSGHLDHIAQRSMQGKTYLYTTLGSALPLSTLFGYQTATWRKHQELPKEHDSDALCIATYDTGERVPWQRERFYRIGFRPRQTRRQYHDLPRKGQGRVRYQLNTELEGFRKGDVVRVKGTWIKQINSIYSTGYLAFSRKKGEPANARPKDCVLLERGTTILWQRPQR

SEQ ID NO: 4052 - protein, 512 aa, unidentified; identical to SEQ ID NO: 3720

SEQ ID NO: 4053 - protein, 417 aa, Methanosarcina sp.
MPTNPAKARILLKAGKAKMVSRIPFTIKLNYNSKGYTQPVVAGMDSGSKKIGCAAVGNGKILYQSETEIRQDVSGKMQQRAMYRRTRRSRNTRYRPARFDNRRNSQREGRIPPSIRSKLESHFREKKFVESILPVTEWKVELASFDTHKITNPDVSGIGYQNGDQKGFYNLKAYVLSRDNHTCQHCKSKSKDPKLHCHHIIFRSQNGTDTPENLITLCSTCHQKLHEGKIKLFGNVSKTKHATDVGIIKSQIKKSEWNFKETFGYETKYKREQILELPKTHYNDGVAICCDFDQKVTTNPTIYFKKHVSKGDYQQTTGKRSEKKIPTGKLFGLRKFDLIRTEKGVGIVKGKRSTGYFVITDIFGNKIHDSVNVKRNCKRLKARTSTLIQMVAGLELTHSSPTCRAASSEEGVSCLWG

SEQ ID NO: 4054 - protein, 423 aa, Marinobacter sp.
MSVFVLDRRKQPLMPCSEKRSRLLLGRGRALVVRAYPFTIRLKDRAGGITQPVRIKIDPGSKTSGIAVVRESGQKQHVLVLMELAHRGRQISKSLEQRRAFRRRRRNQLRYRAPRFLNRLRSLVPVVSISQELVRFDTQKMENPEVSGVEYQQGTLLGYEVREYLLEKWGRECAYCTDKDTPLQIEHIDPKANGGSSRISNLTLACRPCNQEKGRQPLADFFASSKRLKNHQARLDRILKQCKKPLRDASAVNSARWTLYQTLKQTGLPVEVGTGGRTKFNRCRLRIPKTHALDAACVGEVEIVEGWDVPTLAIKATGRGSYKRTRLTKHGFPRGYLMRQKKVQGFQTGDRVRAIVPTGTKAGTWLGRVAVRKTGSFNIQTSGGAIQGVSYRHCTLTQRADGYGYHIQPNQPKEEGDRENESR

SEQ ID NO: 4055 - protein, 422 aa, unidentified
MRGKPLMPCSAAKARILLKEKKAAVARRTPFTIRLTTAGGESKQPVSLGVDAGYKHVGLSASTEKAELYASEIELRQDITDLLSARLALRRARRSRKTRYRAPRFDNRVRSKRKGWLAPSVENRIAAHLSRIEAVLRILPVTKITVETASFDMQLLKNPDISGKGYQQGEQLGFWNVREYVLFRDGHVCRHCGGRSKDPVLNVHHLESRRTGGDSPGNLITLCETCHKALHRGEIKLSIKRGASFRAEAFMGIMRWKVLDRLKAAHPELEVRNTYGYLTKHARIEHGIAKSHCADAFCIAGNLKADRLGSFYYQKQTRRHNRQIHKLSILKGGVRKRNQAPYEVKGFRLFDKVACKGETAFIFGRRSTGSFDVRKLDGTRISAGISFKKLRLHERRRTYLTELRKEAALPPLPEGRGLRADF

SEQ ID NO: 4056 - protein, 443 aa, Caldicellulosiruptor sp.; identical to SEQ ID NO: 2385

SEQ ID NO: 4057 - protein, 443 aa, Bacillus sp.
MVEENMTCFMQRKGENPMVFVLDTNKRPLAPCHEAVARKLLKQGKAAIYRRFPFTIILKKSVDESEIKATYRLKIDYGSKHTGLAILRGQEVVWLGQLDHRTDIKERMDKRRAFRRARRNRKTRYRKPRFLNRRRKDGWLPPSLESRVQNIQTWVNRLKKLCPIGYISYENTKFDTQLMRNPEISGIEYQQGTLQGYEVREYLLEKFGRKCCYCGKENVPLEVEHIIPKSRGGTDRIDNLCLACRDCNQRKGSQTAEEFGYPHIQKMVKKTLKDASVVNATRWKVYEVLKQSGCEVECGTGARTKMNRIRLDLPKTHYFDACCVGESTTNHLYFKTKEVLFIKAKGRGSRSRTNLDRYGFPRGYLARQKFFFGFQTGDMVKAVVPRGKYQGVWFGEVACRKTGSFDIKGKDGKRIAQGINYRYVQVIQRFDGYAYGKGVAELA

SEQ ID NO: 4058 - protein, 462 aa, unidentified
MSVLVIGRNGRALMPTTSRKARLLLKKKTASVVCRHPFTIQLLYKTGCATQEGCIGIDTGSQHIGVGVTCGDRVILKEEHELRSSMEKRSLLVTRAAMRRGRRYRKVRYRKPKWRHHTKRMYFEKPNRRGQHWRKVKTTTQSPRPKGWLPPSLQSKCDHHFCIIDRYLKYLPDSITRNLVIEAGRFDMARMNDPMIHGEMYQRGPMYDAENLRAYIFARDNYQCACCKAKAGTTRKTDGTTVKLVAHHILFRSQGATDNPKYMVSVCDHCHTTKAHQPGGVLYSWMENNKKVTRGLRDATFMNILRQRLFARYPQAAFTYGNITAADRKQLRLPKSHANDAVTISLFGKEIPSVRDTCQTVHYKQVRKSKRSLHEAIPRKGRKNPNTKAVRNKKNTTQVNGFKLWDSVLADGKKLFICSFTGTSAYLVDKNGCYVSQPGKTYKQWPLSKLKRLHPNGNWLMT

SEQ ID NO: 4059 - protein, 512 aa, unidentified
MSTVYVLNKDGKPLMPTTRCGHVRRLLKEQKARVVTSKPFTIQLLYETNDVVQPLYLGIDPGRTNIGVAAVKTDGTAVFTAHLETRNKEIPKLMQGRKKARRARRTNGRRCRRQRRAKANGTISKKCVKQTTAQNGSVSKRAKEIGVIKRHLPGCEKELLCIGIKNKEAKFSNRTRPEGWLTPTANHLLQTHINLVKKIQKFLPISDIVLEINKFAFMQLDNPNIQKWQYQQGPLYQKASLEEAVSEMQEHHCLFCKKPIAHYHHVVPQSENGSNTIGNIVGLCTKHHDLVHKDATWQKKLAKKKTGLNKKYGALSVLNQIIPALTKELSSLFPKHFFATNGKSTYDYRAAHGVSKDHWLDAYCIACSVLANDVCDSNINSHVPYELKQFRRHDRRALHKENMSRVYTLNGKSVATNRHKAIKQTTDSLEEFRQRQPNDVCKLKVKEHHPEYRNPERNFPGCVFLVGKHTHVVQGTSGSHNSKADGYYDTNGNSYSSGKCKFVAKNKGIVFA

SEQ ID NO: 4060 - protein, 370 aa, unidentified
VQREPFTIKILDRKKKSSYTKDVTLGIDAGYKEVGFSVINEDEELISGVLELRNDIPKKLEQKANYRRNRRHRNTRYRQPRFDNRKKSKPKGWLAPSIKHKMNSHIKLVNKLKEILPISKVIVEVAQFNTQKMQNPEIEGVEYQQGTLQGYNVRNYLLEKFNRQCAYCGKEDVPLEVEHIIPKSRGGSNRVDNLTISCHNCNQEKDSQTAKEFGYPNVQKQAKQTLKSTAFMNIVRWKIVNKLDCDYTFGHITKKNRIEQDLEKTHYNDAFIIANGKNQKRCKPIKAIINRRNNRSLQTNRKTYGRSVRKQKYLLSPGDLVKYEGKVCEVKGMFNYGKWVRMKDSDGNTVNSNVKDVELVKYRKGLCFVS

SEQ ID NO: 4061 - protein, 512 aa, unidentified
MSTVYVLNKDGKPLMPTTRCGHVRRLLKEQKARAVASKPFTIQLLYETDDVVQPLYLGIDPGRTNIGVAVVKTDGTAVFTAHLETRNKEIPKLMQGRKKARRTRRTNGRRCRRQRRAKANGTISKKCVKQTTAQNGSVSKRAKEIGVIKRHLPGCEKDVLCVGIKNKEAKFSNRTRQEGWLTPTANQLLQTHINLIKKIRKFLPISNVVLEINKFAFMRLDNPNIQKWQYRQGPLYQKASLEEAVSEMQEHHCLFCKKPIAHYHHVVPQSENGSNTIGNIVGLCTKHHDLVHKDTTWQKKLAKKKTGLNKKYGALSVLNQIIPALTKELSSLFPKHFFATNGKSTYDYRAAHSVSKDHWLDAYCIACSVLANDVCDSNINSRVPYELKQFRRHDRRALNNENMSRVYTLNGKVVATNRHKATKQTTDSLEEFRQNHSDDVCKLKVKEHHPTYRNMNRNYPGSVFLIGKQVHVMQGIAGSKNGEATTYKDTNANSIAAGKCKFVAKNSGILFV

SEQ ID NO: 4062 - protein, 423 aa, unidentified
MRVFVFNMRGEPLMPCTQRKARLLLKAGKAKIYKYNPFTIQLKYATGENKQECHVGIDTGSKHIGLAVTSENKVLFKGEVELRQDVKSKIDTKRIYRRSRRNRKTRYRRCRFLNRKRFGKWLPPSLQNRINHTFKWIDKLCSFIPESILHIEVGKFDIAKMINPEVHSMDYSQGQTYGYQGERYFIFARDNYTCQVCGERNKPLQTHHIIYVSNGGTNRVDNQITVCKNCHNSTNHKNGGIFYKWQKEHKKVKQYKEPPFMNVLRQQILNQYPQALITYGFETTIKRKNIGLEKTHYNDAIVISGISTISENLDEWLLIKQFRKKKRSLHEGVPRKGRKEPNRIQKRNSKNTPYYRGFYLNDKVSVFGKSGYITGFTNSGAYVKGVDGEYIVLPNKSYKRVNIASLKFICHNNNWQYITKNAV

SEQ ID NO: 4063 - protein, 429 aa, Ktedonobacter sp.
LSNVFVIDTNYKPLNPVHPARARLLLTQGKAAVFRRYPFTIVLKRSVEQPEVQPLRLKLDPGSKTTGIALVNDANGKIVFAAELEHRGHAVKDSLESRRASRRGRRQRKTRYRKPRFNNRRRKKGWLPPSLESRIANIETWVARLCRFAPIRALSQELVKFDLQLMENPDLAGIEYQQGTLQGYEVREYLLDKWERTCAYCGAQKVPLQVEHIYSRAKHGTKRISNLTLACEPCNLAKGTQDITVFLATKPEVLKRLLAQVKKPLKDASAVNSTRFALLERLKAFGLPVECGSGGLTKYNRTTRGLPKTHWLDAACVGKSTPVVLSQKGVIPLRIKATGHGRRQMCVPDKYGFPKQHKKRKKTFLGYQTGDMVKARTPKGVFEGRIALRHRPSFRLEKVDIHPKYMRCVQRADGYEYTQKGGCDVAPQV

SEQ ID NO: 4064 - protein, 512 aa, unidentified; identical to SEQ ID NO: 3720

SEQ ID NO: 4065 - protein, 447 aa, Marinobacter sp.; identical to SEQ ID NO: 3737

SEQ ID NO: 4066 - protein, 471 aa, Caldicellulosiruptor sp.; identical to SEQ ID NO: 3268

SEQ ID NO: 4067 - protein, 404 aa, unidentified
MSKKVYVQDKNGKALDPTTSTRARKLLSKGRAKVVQRELFTIKILDRKKENSYTKDVTLGIDAGYKEVGFSAINEDEELISGVLELRKNISKKLEQKANYRKNRRHRNTRYRQPRFDNRKKSKPKGWLAPSIKHKMDSHIKLVNKLKEILPITKVIIEVAQFNQQKMQNPEVEGVEYQQGKLQGYNVRNYLLKKFNRKCVYCGKKDVPLEVEHIIPKSRGGSNRVDNLTISCHDCNQKKGSQTAKEFGYPSVEKQAKKTLKSTAFMNIVRWKIVDKLDCDYTFGHITKKRRIEQDLEKTHNTDAFIIAGGKEQKRSKVFKVIIQRRNNRSIQTNRKRYGRSIRKQKYPLSPKDLIKYEGEICEVKGMFNYGTWVRMKDSEGNTINSNVKKVELIRYNKGLVFAS

SEQ ID NO: 4068 - protein, 430 aa, unidentified
LRVFVLNKRAKPLMPCSPAKARILLKEKKAVVTRRMPFTIRLTIATGETKQPVTLGVDAGYKHVGLSACTEKAELYASEVELRQDITELLSVRLALRRARRNRQTRYRAPRFDNRVRSKHKGWLAPSVENRINAHLSRIDAVLRILPISKIVIETAAFDTQLLKDTNIEGATYQQGEQFGFWNVREYVLFRDGHVCQHCHGKSKDPVLNVHHLESRRTGGDAPNNLITLCETCHKALHQGKLTLKVKRGFTYKAETFMGIMRWTVQDRLKTAYPDIEIRNTYGYLTKHSRISHGIAKSHCADAYCIAGHLKAKRLAGYYFQKQTRRHNRQIHKLTILKGGLRKSNQAAYEIKGFRLFDKVKVLGEEGFIFGRRASGYFDVRKLDGTRISAGISSKKLTLLEKRKTYLTEYRKEAALPPLNEFRVFLADVL

SEQ ID NO: 4069 - protein, 420 aa, unidentified
MQYVYVLNKHGEPLMPCSPGKARLLLKQQKAHVIKRTPFTIKLLYGSTGYKQPITLGVDAGSKHVGLSASTEKRELYREEFTPRNDVVDLLSTRKQNRRSRRNRKTRYRPPRFDNRVHSKHKGWLAPSVEVKIQEHITVIKRICRILPVALVRVETAEFDTQRLKAMLEGKPLPVGTDYQLGEMYDEYNVRQYVLKRDNYTCQCCGAHTTAKKAVKLHVHHLESRKMGGNAPGNLITLCITCHDALHKGKVSLDNKKRGKPMRDAAFMGIMRRTLMSRLREELPITVQGTYGYITKMQREQNDIKKSHVNDARCISKHPLAEPCSVCYRTKAIRHHNRQTHKANFSKGGIRKRSQMPYVVEGYRLWDKVLYKGQECFVSGRRASGSFTLKKLDGTRISKGVTFKKLRLLEPATNYLIERM

SEQ ID NO: 4070 - protein, 512 aa, unidentified
MSTVYVLNKDGKPLMPTTRGGHVRHLLKEQKARVVRAKPFTIQLLYETNDVVQPLYLGIDPGRTNIGVAVVKANGTAVFTAHLETRNKEIPKLMQDRKKARRARRTNGRRCRRQRRAKANGTISKKCVKQTTAQNGSVSKRAKEIGVIKRHLPGCEKDVLCIGIKNKETKFTNRTRPEGWLTPTANQLLQTHINLVKKIQKFLPISDVVLEVNKFAFMRLDNPNIQKWQYQQGPLYKKESLESAVSEIQEHHCLFCKKPIDHYHHVVPQSENGSNTIANIVGLCAEHHNLVHKDAAWQKKLAEEKVGLNKKYGALSVLNQIIPALTKELSSLFPKHSFVTNGKSTYDYRAAHGVSKDHWLDAYCIACSVLPSNVCDSNINNHMPYELKQFRRHDRRVLNNENMNRVYTLNNKAVAINRHKAKDQKTVSLEEFRKEHPDDVCKLKVKEHHPTYRNMNRNFPGSVFLVGKQIHVMQGIASSKDGKATTYKDSNANSITASKCKFVAKNSGILFV

SEQ ID NO: 4071 - protein, 380 aa, unidentified
VQEVTVGIDKGSHITGVSCVANGRILMSGEIHHRVDIKDKMDARRANRRNRRNRKWYRPKRFLNRASSRKSGRLPPSIKANVEEVIRVVRRIPLPISHIVIEDVQVDIARLNDPKRKDSETLSPRLIGKAYQQSNRLDENLRIATLMRDGFRCTQCEKKKTRLDAHHIIWKEHGGKDTIENLITLCKACHRKVHQGKLQLDVEGVSGFNDGIAQRTMQGKTYLYKELSKQASLDKVFGYQTSAYRKALDLPKRHDVDALCVATLETGEVIRGVIACETFRKPNRENFYRIKFRPRQTRRKYHDLPRKGKGRVRYQVNAELEGFRKGDIVRVKGKWVKQINSIYSNGYLAFARVKGEPNAAKPKDCLLLQRGQTLIWAKAV

SEQ ID NO: 4072 - protein, 431 aa, unidentified
VEQNLRVFVLNKRGKPLMPCSPAKARHLLKEKKAIVVRRTPFTIKLTIATGESKQPVSLGVDAGYKHVGLSASTEKAELYASEVELRQDITDLLSARLALRRSRRNRKTRYRAPRFDNRIRTKRKGWLAPSVENRINAHLSRIEAVLRLLPVTKITVETASFDLQLLKNPDISGKEYQEGEQLGFWNIREYVLCRDGHVCQHCYGRSKDPVLNVHHLESRRTGGDSPGNLITLCETCHKALHRGEITLKAKRGQSFRAEAFMGIMRWEVLNRLKASHPELEVNNTYGYWTKHARIANGIAKSHCADAFCIAGNLGAERLGEFFFQKQTRRNNRQIHKLSILKHGLRKRNQAPFEIKGFRLFDKVACKGEEGFIFGRRSSGFFDVRKLDGTRISAGISYKKLHLLEKRQTYLMEIRKEEAFPPLPEGRGLRA

SEQ ID NO: 4073 - protein, 428 aa, unidentified
LKVFVLNMRGQPLMPCSPAKARHLLKAGKAVVRRRTPFTIQLRIATGETKQSVTLGVDAGAKHVGLSATTEKEEVFASEVELRQDITGLLAARLSLRRDRRHRKTRYRAPRFLNRVRSKHKGWLAPSVENRIQAHMSRIDAICGLLPVTKIVIETASFDIQKIKHPDVEGTDYQQGDQLGFWNVREYVLFRDGHVCQHCHGHSKDKILNVHHLESRQTGGDAPNNLITLCETCHKAYHAGKIKLKVKRGQSFRAEAFMGIMRWTLLDRVRKAHPGLPVENTYGYLTKNTRITLGLPKAHCVDAYCIAGNLKAVRRGVHLYQRQVRKHNRQIHKCTVLSKTLKDGTKIGYRKLNQTPHLVKNFRLFDKVRCLGQTGFIFGRRSSGYFDVRRLDGVKLSPSISWRKLTLLEKRSTYLTELRKQDGTSSPV

SEQ ID NO: 4074 - protein, 413 aa, unidentified
MVYVLNENGQPLIPTENHAKVRVLLKQGKAKVVNNCPFTIQLLYSSTNYTQPVTLGVDAGSKHIGLSATTEDRELYAADVELRNDIVKLLAARRASRRSRRNRKTRYRKPRFNNRKRDKGWLAPSIREKIGTHLKVVDDTCKLLPVSKIIVETASFNIQKIKNPDVKSTDYQQGEQLGFWNVREYVLFRDGHKCQCCKGKSKDKILNVHHIESRQTGGNAPNNLITLCETCHTGYHKGTVKLPAKIKRGMKFKDAAFMGIMRWAFCGELKKRYPDVSLTYGYITKKTRIENGLPKEHYVDARCISGHPSAKPLGTVFYIKKVRCHNRQIHRLKILKKGVRKRNQAEYEVYGFRLYDKVSWKGRICFVFGRRSTGRMDLRLLDGTHVNASVSYKNIKLLRMRSNYLIEVKNAIG

SEQ ID NO: 4075 - protein, 441 aa, Sutterella sp.
MSVSVFVQDRKHRPLMPCRPARARRLLKSGRARVVRLFPFTIRLTDRLIEDSELQPVLVKIDPGSRRSGFAVVRVDEKGDHHALFFIELVHRGESIRDALTGRSAHRRWRRGNLRHRAPRFLNRTKPQGWLPPSLRHRVDTATAWVAKLVKLAPVTGIVEELVKFDTQKLQNPEISGIEYQQGTLFEYEVREYLLEKFGRKCVYCGAENVPLNIDHVVPKARGGSNRISNLVLSCVDCNQKKDAQPVDVFLKGRPDVLDRIKRQIKKPLRDATAVNATRWSLFNALQTFGLPVETGSGALTKFNRHTFRVPKEHWLDALCAGRVNGVHYPKGMGILQVRCTGRGSYQRTRVDKYGFPRGYLTRQKRIHGFATGDMVKAVVPSGRKAGTYRGRVAVRARGCFVIQTPEGKVDGIGWRHCRLLSFNDGYGYAWLRPASHSSPV

SEQ ID NO: 4076 - protein, 461 aa, Desulfotignum sp.; identical to SEQ ID NO: 3911

SEQ ID NO: 4077 - protein, 407 aa, unidentified
MHIFVLDKDKKPLAPCHPAKARRLLKSGRASVFRRYPFTLILHKIEAKDCVVPETQLNASAPLASTSLSVESERSRGLKIDPGSQTTGLAILSENRIIWASELSYRGQQIKNDLEKRRALRRSRRHRKTRYRKPRFLNRTRPKGWLPPSLNHRVETTMTWVNRLRKLCPIVSISQELVRFDTQKLQNPEVSGIEYQQGELLGYEVREFLLEKWGRKCASLGARSLAPCDGAGSHRYCGAENLPLEVEHIHPKSKGGSDRVSNLTLACHTCNQAKGNRDIREFLSGKPSVLDRILKQAKAPLKDAAAVNATRWKLYQQLKETGLPVEVGTGGQTKFNRTRLGLPKTHWLDAACVGKSTPDRLDVAVEKPLLVAAKGHGVRQRCRPDRYGFRGLLPRKPNLFKVSKPAI

SEQ ID NO: 4078 - protein, 472 aa, unidentified
MNTCVCVLTNNGERLMPTFRLGKVRHLLKDGKAKIVKHHPFTIQLLYDSKTNTQPIETCEDVGYNYIGISVKSESHEYVSAQYDTLQDEKEHHDDCRKYRRTRRNRLRYRKSRFDNRKRDKGWLAPSLEHKKHLNISLIERYVSVIPITHVTVEVGSFDTMLVKAIQEGKVIPEGADYQKGPRYNLATLREAVFYRDNYVCKVCGRKATEGAILHMHHMFYWKGRHGNSLNELLTVCEKCHTPANHQKSGKLYGFGEDVKFADLSGAAFMNTVRWQIVNELYAAFGKPFVTITYGAMTKEKRIALQLEKSHNNDAYAMGEFHPDHRCAFEHYEKVRRNNRILEKFYDSQYIDIRTGEIATGKELFNGRINRNHKKDSENLHKYRGKRTYAGHRALLRKKVNLNPGDLVSLNGEPLVVLGTHTRKNGAVNVEFETPSKSGRKSASLKKLKIVKAADSIHPAWEKVSQIIQRKE

SEQ ID NO: 4079 - protein, 408 aa, unidentified
MVYVQDIDGKPMMPTTRHGKVRRLLKDSKAIVVNTCPFTIKLMYKTSDYKQEIVLGVDAGTKHVGLSATTKSKELYSSEVILRSDIVELLSTRRESRRTRRNRLRYREPRFDNRIKSKRTGWVAPSVRHRIDAHIRIINNVCSILPISRIIIEVAQFDTQKIKNPDISGDEYQEGDQLGFWNVREYVLARDGHKCQHCKGKSKDPILNIHHIESRKTGGDSPSNLITLCETCHKEYHKGNIDLRVKRGKSLRDAAVMGIMKWKLYEELKSRYDNVSMTFGYITKHNRIKYGIEKSHTSDAFVISRNFNALMLKYHYKVRLVRRHNRQIHKQKVLKGGVKKPNQSPFEVFGFRLFDRVMFEGDCHFIFGRRKSGSFNIRDIDGGNQRDVTYKKLKLSRCKRFMIQNKIF

SEQ ID NO: 4080 - protein, 408 aa, unidentified
LKVFVLNMRGKPLMPCSPAKARHMLKAGKAFVVRRTPFTIKLTIATGETKQDVTLGVDAGARHVGISATTEKEEVFASEVALRQDITGLLADRLAFRRARRNRKTRYRAPRFNNRVRSKHKGWLAPSVENRIQAHISRIEAVCRLLPVTKIVIETASFDIQKIRNPEVEGTGYQQGDQLGFWNVREYVLFRDGHICQHCRGRSKDPILNVHHLESRKTGGDAPNNLITLCETCHKAYHAGKIKLKVKRGQSFRAEAFMGIMRWTLLNRMRKAHPSLPVENTYGYLTKHKRIALGLPKTHCADAFCIAGNLKALRRGDFLFQQQTRKHNRQIHKCSILKGGVRKLNQAPFLVKGFRLFDKVRIGGQIGFVFGRRVRGTFNIRRLDKTVIGTDINCKKTESSRNTQNFFD

SEQ ID NO: 4081 - protein, 410 aa, Tissierella sp.
MVYILNQEGKPLMPTNRHGKVKHLLREGRAKVVKRTPFTIQLLYATTDCVQPIVLGVDAGSKVIGLSATTEKEELFASEVVLRNDIVELLSTRRQNRRTRRNHLRYRKARFLNRVKSKNKGWLAPSIQHKVDSHLKAIANVYKILPISKIIIETASFDIQKIKNPQISGVDYQQGEQEGFWNVREYVLWRDGHECQHCHGKSKDKVLNVHHKESRKTGGDSPGNLVTLCENCHTLHHKGKIELNLTKNKSYRDATFMGIMRWQIYNKLKEIYPNISTTYGYITKNNRITNGIEKTHTADAFCIAGSLKAKRSSVVYFQTFKRRHNRQIHKANFLKGGKKKLNQSPYEVKGFRLFDKVLFQEKECFVFGRRATGYFDLRKLDGTVIHRSASVKNIKLLEKKSTLLIERQVA

SEQ ID NO: 4082 - protein, 406 aa, unidentified
MVYVQDIDSKPMMPTTRHGKVRRLLKDNKAVVVNTCPFTIKLTYKTSDYKQEIVLGVDAGTKHVGLSATTKSKELYSGEVILRNDVVELLSTRRESRRARRNRLRYRKPRFENRVKSKRLGWVAPSVRHRIDAHIRVIDNVCSILPISRIIIEVAQFDTQKINNPNISGNEYQKGDQLGFWNVREYVLARDGHKCQHCKGKSKDHILNVHHIESRKTGGDSPSNLITLCETCHKEYHKGNIDLKVKRGKSLRDAAVMGIMKWKLYDELKSKYDNVSMTFGYITKYNRIKYGIEKSHTSDAFVISRNFNAKRIERQYLKRLIRRHNRQIHKMKILKGGKKKNNQAPFEVFGFRLFDKVLYNNEICFIYGRRKSGCFDIRDFDGKNSKNVTYKKLKLIRGKRYPIILK

SEQ ID NO: 4083 - protein, 419 aa, unidentified
MFVYVLDKNGQPLMPTSRFGKVRRMLRDKKAKVVNRCPFTIRLLYEPETKVVQDVILGVDTGSKHVGVACIGNDKVLYQSQVELRDDIKRKMDSRRMYRRSRRNRKTRYRKARFLNRRNSIRKDRYCPTLISKCCGHEREIEFCKRILPVKDTVLETAKFDTQLIEKPWLQEHKWAYQKGVNYGYANAREHALVRDKYTCQCCGKKNCRVETHHIVFRSKNGSNDLENYITLCEDCHKAIHLGEIELEQKGKRKSNLRYATQMSIIRSMLLKKYPDAIETFGFVTKANQENLGLKKDHYLDACVIASGGLEFEQLDVLYRKRVVSVQDRVLTKGIRGEKKLPTGKVHGFKRYDKVKYLGEVCFVKGRRVKDGFVLMDIDNNSIDFRDRGGKQNPSYRFIERINTRRSVLCVKKRLEREV

SEQ ID NO: 4084 - protein, 417 aa, unidentified
MPCSPAKARLLLKEKKAIVKRRTPFTIQLTIATGEARQPVTLGVDSGYKHIGLSATTEKAELYASEVELRQDITDLLSARLALRRSRRSRKTRYRAPRFDNRVASKREGWLAPSVENRIAAHMSRVEAVMQVLPVTAITVETAAFDTQLLKNPNIAGEAYQQGEQLGFWNVREYVLFRDGHVCQHCRGKSKDPILNVHHIESRRTGGDAPNNLITLCETCHKAFHRGEIELKVRRGKSFKAETFMGIMRWTLFERLKKAHPELRVRNTYGYLTKHKRISHGIAKSHCADAYCIADNLGAKRLSGYLFQKQTRKHNRQLHKLSILKGGLRKKNQAPYEVKGFRLFDKVICKGEEAFIFGRRTSGSFDVRRLDGTRISAGINYKKLRLLEPRTTYLTEFRKEAALPPLHKCRGFRAEFL

SEQ ID NO: 4085 - protein, 425 aa, unidentified
MLVYVLKQNGQPFMPTERFGKVRRLLKEGKAKVVRREPFTIRLLYKPETDVVQECYCGVDTGSRHIGVAVVGNDRVLYQSQIELRSDIKKKMDARRASRRSRRNRKTRYRKKRFLNRRNSIKNDRLPPSVKHKVQSHIDEIEFCKKILPVSDLILEVSQFDTALMKNPSLINEKVKHWGYQQGFNYGYSSRRSAILHRDNYTCQRCGKKNCRLEVHHIKFRRNGGTDDEENLITLCKECHDGVHTGTIFLNKKPKKSKGLKHATHMSIIRSQLLKKYPDAIETFGFVTSENRNYLKLEKDHYIDACVIASGGLEFKELDMVYKKRRISNQSRILTKGIRGEIKLPTGKIHGFRRHDKVKYLGEICFIKSRRVGGNFTLMDIDSNSLDFRDMGGKQNPSYRYIKRIKAGRSILCVCKRIERRVLHE

SEQ ID NO: 4086 - protein, 447 aa, Marinobacter sp.; identical to SEQ ID NO: 3842

SEQ ID NO: 4087 - protein, 427 aa, Moorena sp.
MQNYVFVIDTKNQPLNPISPKKARRLLDKGKAAVFRMYPFTIILKTAIDNPTISPCQIKIDPGSKVTGFALVQNNQVIWGMELEHRGGLIKKKLESRKAVRHRRRNRNTRYRKPRFLNRRRKEGWLAPSLEHRVLTIETWVKRLIKFCPINQVWVERVKFDTQKMQNPEINGVEYQQGELAGYEVKEYLLEKWGRECTYCGKQSVPLQIEHIHPKSLGGSNRVSNLCLACEKCNQRKGNKPIEEFLKKKPNLLQKIKTKTKQPLPDAAAVNTTRNKLVKVLRSIKFVVTGTGAQTKYNRTRLGLPKQHWIDAACVGNIETLVLKTSQPLLVTCKGQGGRQKAALNKYGYPIRHNPLKPIKGWLTGDIAKHQKLGIGKVTPRSKGSFGFTPLGMKGYKSCFPQDISAIHRKDGYTYSFCQHMPEFTWK

SEQ ID NO: 4088 - protein, 413 aa, unidentified
MTNYAFVLDANGKQLAPTKEQKAWFLIRKKRATLVSKYPMVIQLKKEISDEQICKDEICCGIDDGGIHVGLALVQKCKTKNKVVFKGTIEQRNDVKHLIEVRKGYRNYHRFHKRYRQARFNNRKSSKRKGRIAPSIFQKRQATIRVIKQLNKWINIANYSLEDVTIDIRALTDGYKSYRWQYQQSNRLDENIRKAVILRDGCKCMECGKSNCRLEVHHIKPRRLNGSNTLDNLISLCEKCHQRTEGQEELYMDRYFSILSSTDNKNLDYAQHVMIGKKWLREQLSELGTLILTTGGDTANKRIDWNIEKSHANDAICITGLQSDACNVKEWTIKPMRRQSKAKTDNVLGIKHRDLVEYTFKNGETHRGYVTALYPKQNAINFQSPTKHCKKVNAKKCKLIWKYSKIYWLDNVL

SEQ ID NO: 4089 - protein, 465 aa, Marinobacter sp.; identical to SEQ ID NO: 4016

SEQ ID NO: 4090 - protein, 512 aa, unidentified
MSTVYVLNKDGKPLMPTTRCGHVRHLLKEQKARVVTSKPFTIQLLYEADDVVQSLYLGIDPGRTNIGVAVVKADGTAVFTAHLETRNKEIPKLMKKRKESRRARRTNGRRCRRQRRAKANGTISKKCVKQTTAQNGSISKHAKEIGVIKRRLPGCEKDILCIGIKNKEAKLNNRTRPEGWLTPTANQLLQTHINLVKKIRKFLPISDVVLEINKFAFMQLDNPNVQKWQYQQGPLYQKASLEEAVSEMQEHHCLFCKKPIAHYHHVVPQSENGSNTIGNIVGLCTKHHDLVHKDTAWQKKLTKKKTGLNKKYGALSVLNQIIPALTKELSSLFPKHFFVTNGKSTYDYRAAHGVSKDHWLDAYCIACSVLPNDTCDKTINSRVPYELKQFRRHDRRALNNENMSRVYTFNGKMVATNRHKATEQTTDSLEEFRQRQPNDVCNLKVKEHHPTYRNMNRNYPGSVFLIGKQVHVMQGIAGSKDGEATTYKDTNANSIAAGKCKFVAKNSGILFV

SEQ ID NO: 4091 - protein, 472 aa, Cupriavidus sp.
MSVFVLDKHGKPLMPCTEKRARLLLERRRARVHRVVPAVIRLVDRTVDDCEFQPLRIKLDPGSKMTGGALVRDTELACSVSGEIRRGAAVLNLFELVHRGGQISEGLTARRSMRRRRRGANLRYRAPRLLNRTRPAGWLAPSLQHRVDTTMAWVQRIRRWAPVNGVSSELVRFDMQAMENPEISGVEYQQGTLAGYEVREYLLEKWGRTCIYCDATDRPLQIEHLTATANGGTNRIGNLGLACGPCNQDKGANDVREYVDDPKRLARILAAASRPLKDAAAVNATRWALANALRATGLPLELASGGRTKFNRAAHTIPKTHALDAACVGDLNAITGWQRPTLEVKATGRGSYQRTRLTASGFPRGYLMRQKQVKGFQTGDRVHAVVPSGKKAGTYAGRVAVRASGSFNIQTPNGVVQGISHRHCSLVQRADGYGYHFRSKDRLYKGEAGEGRAAHAALSIPVLKDGVSRASR

SEQ ID NO: 4092 - protein, 470 aa, unidentified
MSVFVLDKQGSPLMPCSEKRARLLLARSRARVHRVMPFVIRLVDRHRDSCATQPLRLKLDPGSKTTGMALVRDSEVVVADSGEIQRGAAVLNLFELVHRGRQISEALSARRAMRRRRRSSLRYRAPRFLNRTRKTGWLPPSLQHRVDSTMAWVRRIQRWAPVTALSSELVRFDMQALENPEISGIEYQQGTLAGYEVREYLLEKWCRQCAYCDKTDVPLQVEHIVAKARGGSTRMSNLTLACRCCNKAKAALPVEVFLAKDPKRLARILAQAKRPLKDAAAVNVTRWALANALRATGLPVEFASGGRTKFNRAMLSVPKTHALDAACVGELAHIVAWQKPTLAVKCSGRGSYQRTRLDKYGFPRGYLTREKQHFGFQTGDLVRASVPTGKKAGTYVGRVAVRASGSFNIQGAGGVVQGVAHRHCRFVQRSDGYAYSRIATPEGVAGTGTASPRSALSLPGLKAEVSRAIG

SEQ ID NO: 4093 - protein, 521 aa, Streptomyces sp.
MTTFSSGEKTHRAVLPQRRALESAGADTPGSRDETACGLPATVPGAGAEHGRGEILSAGSHPAGRRPAPASAGKGETREGHPVVFVLDRHHQPLMPCPPARARKLLSHGRAVVHRHTPFVIRLKDRTAATSEVTGVQLGIDPGSRFTGIALFRAVDEADVSVRHGLFAIELVHRGGPISVRLTSRATLRRARRQRNLRYRAPRFNNRARPEGWLAPSLRHRVDTITAWVNRMTRWAPVRAVHVELSVFDPHAMSAGTSASDAEYRGGTLQGMEVREYLLMKWNRACAYCGATSTPLNIDHIHPRSRGGSDRVSNLTLACLPCNTRKSNMPVEGFLKKKPAVLSKILQQAKTPLRDAAAMNATRCAVLRALEAQHPDVRASTGGRTRWNRRRTATPKSHTLDALCVGVLASVARHPKAIQVVTATGRGTYRRTAPDRYGFPRLHLPRTKQYFGYATGDLVRANVPNGKRQGSHTGRVAVRATGNFNIKTRRGLVQGISQRHVRLLQRADGYAYTTRAEGTHA

SEQ ID NO: 4094 - protein, 512 aa, unidentified
MSTVYVLNKDGKPLMPTTRGGHVRHLLKEQKARVVQSNPFTIQLIYETNDAVQPLYLGIDPGRTNIGVAVVKANGTAVFTAHLKSRNKEIPKLMKKRKDSRRARRTNGRRSRRQRRAKANGTISKKCVKQTTAQNGSVSKRAKEIGVIKRHLPGCEKDVLCIGIKNKEAKFNNRTRPEGWLTPTANQLLQTHVNLVKKIQKFLPISDVVLEVNKFAFMQLDNPNIQKWQYQQGPLYQKANLEEAVSEMQEHHCLFCKKKIDHYHHVVPQHKNGSNTIDNIVGLCTKHHDLVHKETAWQEKLAKKKTGLNKKYGALSVLNQIIPALTKGLSSLSPKHFFVTTGKSTYDYRAAHDVCKDHWLDAYCIACSVLPNDVCDSNINSHVPYELKQFRRHDRRALHKENMNRVYTLNGKKVATNRHKAIEQTTDSLEEFRQRQPNDVCKLKVKEHHPEYRNPKRSFPGCVFLVGKQTHVMQGTSGSHNGKADGYYDTNGNSYSSGKCKFVAKNEGIVYA

SEQ ID NO: 4095 - protein, 419 aa, Geobacillus sp.; identical to SEQ ID NO: 2623

SEQ ID NO: 4096 - protein, 423 aa, Marinobacter sp.; identical to SEQ ID NO: 4054

SEQ ID NO: 4097 - protein, 426 aa, unidentified
MSKVFVVDLEKRPLNPVHPAQARQLLRNKKAAIFKRFPFTLILKESRPDAPIQPLRLKIDPGAKHTGIALVNDSTGEVVFAAELKHRGFAISFALTSRRQLRRGRRNRQTRYRKPRFLNRTRPDGWLAPSLQSRVENIKTWVNRLRKLTSINAISQELVRFDMQLMQNPDIQGKEYQQGTLAGYETREFLLEKWNRQCAYCGVKDVPLQIEHIYPRAKGGTNSITNLTLSCEKCNTKKGTKDIKDFLKKNSARLEKILKQAKRPLADAAAVNTTRFTLLEVLKATGFPVETGSGGLTKFNRNQQNLVKLHWLDAACVGKSTPILNIKGVKPLLITANGHGTRQSCRTDKFGFPNRHCSRTKFHFGFQTGDIVKAVVTSGKKVGGYVGRIATRATGSFNISTKNGLLQGINHKYCKHIHKKDGYSYA

SEQ ID NO: 4098 - protein, 414 aa, unidentified
MVYVINKQGQALMPTERFGEVRRLLKNSLAHVVCRIPFTIQLDYDTTDYTQPVSLGVDAGSKHIGISATTSEKELYAADVELRNDIVDKLSTRRELRRTRRSRIRYRKARFNNRVSSKRKGWLAPSVENKIQTHLTVVEKIHKFLPITNIVVETASFDIQKIKNPSISGSEYQQGEQLDFFNVREYVLFRDNHTCQHCKGKSKDKVLNVHHIESRKTGGDSPNNLITLCETCHKAYHRGEFELNVKRGKSFRDSAFMGIMRWSFYDRLKNIYPNVSMTFGYITKNTRITNNLPKEHYVDARCISGNPTAKPLGYYFYQKKVRCQNRQIHKANFLKGGRKKLNQAPFLVKGFRLFDLVEYKKELYYIFGRRSSGSFDIRKLDGTKVNKGSINCKYLRLVDKRKSILIEKRMQVNL

SEQ ID NO: 4099 - protein, 427 aa, Nitrosococcus sp.
MNRVFVLDTDRKPLMPCSPARARRLLRDGKAGVYRMQPFTIILKYRVDPNPQPVEFKVDPGSKITGLALVGNFPQQGRVVLWAANLTHRGYAIRERLASRRSLRRGRRGRKTRYRAPRFLNRTKPKGWLPPSLNSRVENVSSWFNRLLDRVPISECHIETVRFDTQKIQNPEINGVEYQQGELMGYEVREYLLEKWDRKCAYCNKKDIPLEVEHIIPRSRGGSNRVSNLTLARAPCNKKKNSKTAAEFGYTQIQSKSKLPLKDAAAVNATRYAIGCTIQSVGLPTSFWSGGRTKKNRISQGYTKDHWIDAACVGESAEQVTITEGYRALHIKATGRGTRQVVRTDKYGFPRGKAGRCRRVKGFQTGDLVRLSQPQGKYAGDHVGILASIRASGTFDVKAKAGKISANWINFKLIQRGDGYDYSLSAV

SEQ ID NO: 4100 - protein, 347 aa, unidentified
MTNYVFVLDANGKHLSPTKEQKAWFFIRKKRATLVSKYPMVIQLNKEIPDDKICKDEIRCGIDDGGLHTGIALVQKCQTKNKVLFKGVIEQRNDVKHLMDVRRGYRRYHRYHKRYRPARFNNRSSSKKEGKIAPSILQKRQATIRAVAQLNKWINITDYWLEDVAIDIRALTDGFKPYKWQYQKSNRLDENICKAVILRDGCQCVECGRTNCKLEVHHIKPRRLNGSNALSNLITLCERCHQNTEGREELFMDKYFALLNSSDNKYLNYAQHVMIGKKWLREQLSSLGILHLTNGGDTANKRIDWNIEKFHSNDAICITNLQPDTCDVKEWTIKPMRRQSKAKADNV

SEQ ID NO: 4101 - protein, 459 aa, Polaromonas sp.
MPCSEKRARKLLESGRARVHKLFPFGIRLVDRLVEDSVFQPLRLSLDPGSKTTGLAVCRVAETIDVTTGEIQPTMHIQFLMELMHRGATIKKSLGARSAMRRRRRGKLRYRAPRFSNRPKPQGWLAPSLRHRVETTMTQVKRLCRLAPITHLAQELVRFDMQKMQNPEISGAEYQQGTLQGYEVREYLLEKFNRTCAYCDAQNVPLQMEHIHPKAAGGTNRISNLALACQACNQKKGVQDIKDFLLKDPKRLAKVLKQAKAPLLDAAAVNTTRWTLFGALKQTGLPVETGTGGQTKYNRCRLSIPKTHALDAACVGQVQSVNNTNAPMLRVICTGRVSRSKTRLDKYGFPRTYLTHQKTAFGFKTGDMVIATVPKGVKKGIHKGRVAIRLTGSFNIQTGIAGAATVQGISYKHCRITQRADGYGYSHRAQTKKECGNKECALHTALSIPGLKAEVSRAI

SEQ ID NO: 4102 - protein, 445 aa, Burkholderia sp.
MPLMPCSEKRARLLLARGRARVHKVVPFVIRLTDRSTEDSEFQLLRLKLDPGSKTTGLALVLDKAGTSVGVLNLFELVHRGRQISEALMQRRRFRHRRRGANLRYRAPRFYNRARQRGWLAPSLRHRVETTMSWVRRVLRWAVVSAISMELVRFDMQALQSQNIAGVEYQQGALFGYEVREYLLEKWGRRCAYCDARDVPLQIEHVLAKARGGSNRVSNLTLGCGPCNLKKGERDVRGFVKDKARLARILAKAKTPLRDAAAVNATRWVLLNALRSTDLNVEIGSGGRTKWNRTRLGLPKTHALDAACVGTVHAIFGWQRPTLELKCSGRGSYQRTRLTGYGFPRGYLTRQKRIHGFQTGDRVRATVPTGKKAGTHVGRVAVRANGNFNIQTPQGVVQGIAHRHCTMMQRADGYAYAIVPLKRGKDQGPAQQQGAYRASCYPSPA

SEQ ID NO: 4103 - protein, 552 aa, Streptomyces sp.
MTTSLVGEQTHQAVLPQQPALESVGADTPGSRDETAHGHPATARGTGGTHGRGETGGHGTSARRRHAVTTASAVSEAANGSGDVPTGCDTYAGGIGAARVFVLSKDGKPLMPCHPARARELLDKKRAVVARQAPFVIRLKDRTRAESAVEGVHVRVDPGSKGTGFALTDEKEERSSHERKVVVRRGLVTVELQHRGDRIHRSMQRRAGYRHRRRSANCRYRPRRARNRARAQGWLPPSLRHRVDTTVSLVTRLCRYAPVTEIHLEHVAFDTHSMSAGRALRGAEHRHGSLVGTDARAYLRTKWGSACAYCGATGVPLNIDHLHARSRGGSDRISNLVLACVPCNQTKGSRPVTVFLAHEPERLATILEQVKAPLQDAAAMNTTRAGLLNALTALGRPVRCWSGSLTKQNRTVTGLPKTHSLDALCVGALDREGRNTIVRVPGHLLVVKAVGRGSYARTTPDRFGFPRLRRARSKRHYGFVSGDLAQATVPSGKWAGTWVGHISVRARGQHSLATPVGRINVSHRHLRLLQRGDGYSYARRDGILENPCEKSA

SEQ ID NO: 4104 - protein, 594 aa, unidentified
MTNFKLRLYYKGNKNMNYMDFVLIVDKNNKPCIPIKNGKAGYLLREHKAEIINHEPLVIKRTDDYNSDLENRDIFELKVDSGYLNIGFSVSDNEHEYIAGQVEMLNGMSNRLLERKSMRSSRRNRLRYRKNKNIDYKTVHNPTYKNGNEDGWFAPSIVHKMETHIRIIEQLKQWVPIDKVIVEVANFDIAAMDAYLKDGTILNGKDYQNGEMKGYENVVSYVRARDNYSCYFCNKKKKKDGTLKEKPKRIEVHHKIPRSWGGTNNPGNLICVCQGCHQKIHSNNNNNKYFKELLEQALQENTFKDSTYMNIVRWELLNRLTEKYPEFDIEAEYGYNTKINRKEAGLRKFHYNDAVCIKEFKNTTLSKKVFIVEQKRCNDRKMENFADAKYIDSRDGKKKSGNDLKVIRHSTKSKRSTNKEHIDNERVFRKEKVSKGKIQFECHSYCVKPGDLIYIKEGKHKGKIAEVSTIQIVGGKIPNPIIDINEINNKKIDFNRELKKRKTISNMTDYQKSFAKYQIRFTYKESDADGPSITLTQKEYEKLKENKSDRVKIIRTRRGLVWREYDRLTYEAENMDQEEKKLEVKNKKQELKAA

SEQ ID NO: 4105 - protein, 490 aa, unidentified
VPPQHDPLEATSVDKPGQARNGMWSNAGGQHVREETSEQARHRRSNSASGVSRVFVLAKNGKPLMPMRPARARRLLKDGRAVVHKRMPFTIRLKDRVDGDTRDLELRIDPGSKTTGMAIVRQDADSDEVMHLAEMSHRGAQIRKKMEQRSGHRRRRRSANLRYRKARFNNRTRKEGWLPPSLQSRVDNISSWIARYRKLAPISSIAVERVRFDMQKLENPEISGIEYQQGTLAGYEVREYLLEKWGRHCAYCGQTDAPLQIEHIVPRASNGSDRVSNLTLACQSCNQEKGSQPVEEFLKDRPALLRSIKAQAKKSLRDAAAVNATRNALWRTLNAIGLPVTGATGGLTKFNRSTQGIPKEHCLDAACVGPIQRLSGWDQPVLQISAMGRGSHQRTRLDKYGFPRGYLMSTKSIHGFQTGDIVKAIVPKGKKAGTHTGRVAIRKTGKFNVTTSTGVVQGISHKHCRIIQRNDGYGYHIVNPNRKGGVPSPD

SEQ ID NO: 4106 - protein, 442 aa, unidentified; identical to SEQ ID NO: 3234

SEQ ID NO: 4107 - protein, 419 aa, Geobacillus sp.; identical to SEQ ID NO: 2623

SEQ ID NO: 4108 - protein, 477 aa, Blautia sp.; identical to SEQ ID NO: 2707

SEQ ID NO: 4109 - protein, 431 aa, unidentified
MPGKVYVISRLGHPLMPCSPAKARHLLDDGKAKVVKRTPFTIKLLYGSTEYTQPVILGVDAGSKTIGLSASTTKEELFAAEVMPRNDVVENLSTRREFRRARRNRTTRYRKSRFNNRVHSKNNGWLAPSVEVKIQEHITSIKRVCAILPISKIVVETAEFDLQLLKAVQDGKPVPEGEDYQKGEMYGSYDVRQYVLWRDNYTCTCCGVKGTDKKPVKLHVHHFESRKHGGNAPDNYGTLCEDCHKKLHLGIITDISLKTRKRPSTRDAAFMGIMRKTLMQRLITGLSIPVAETKGYITKAAREEILKLPKTHTNDALAIAQGRHGFGIREQAYVKPTNRIYTVRPVRHHNRQLHKATILKGGIRKLNQASKYIFGFRLYDKVLYQGGECFVWGRRRSGSFLLRTIDGTKVKDGVGYRNLTLLERSTNYLIA

SEQ ID NO: 4110 - protein, 447 aa, Marinobacter sp.; identical to SEQ ID NO: 2615

SEQ ID NO: 4111 - protein, 430 aa, unidentified
MVYVLDISGNPLTPTKRHGKVRHLLETGKAVCVKRCPFTIRLTYQNAEPELEGLSLGVDCGSKHIGLSVSSEEQEYYSSEVELRQDIPANLSTRREFRRARRHRKMRYRKPRFLNRIASKKKGWLAPSVRQKVESHLNRIDKAVKMLPIREIKVEVAAFDLQKLQADLKGLKRPKGEEYQQGPQLDFWNVREYVLFRDHHECQCCHGKSGDKVLNVHHLRSRKVGGDAPDNLITLCEYCHGQYHKGELELPESAKKPKPLRDAVFMGIMRWTLYSRLKEIYEPQGIKVKLTYGYITKHTRIENGLEEKSHRLDALCIAGHPKAKRCREWFLQKKVRCHNRQLHKATIQKGGVRKANQLPAVIKGFRLYDKVLFQNRECFIWGRRKTGYFTLKTLDGIMICDGVSSKKLTLLEKRKSYLTERRKQELCNSF

SEQ ID NO: 4112 - protein, 423 aa, Marinobacter sp.; identical to SEQ ID NO: 4009

SEQ ID NO: 4113 - protein, 442 aa, unidentified
MSTSVFVLDKKHRPLMPCRPARARRLLRAGRARVVKRFPFVIRLVDRTVEQSEVQPVLIKLDPGSRETGAAVVRDDEKKRHHALAFFVIKHRGGAIRDALKARSAFRRRRRSQNFRCRSPRFLNRVKPKGWLPPSLRHRVETTLSFVRRMCRYLPVSGIAAELVKFDSQKLQTPEVSGIEYQQGTLFEYEVREYLLEKFGRKCVYCGAEGVPLNIDHVVPRAKGGSNRVSNLVLACVSCNQKKGARSLEDFLKGKPEVLARVRRELKTPLRDAAAVNATRWVLFNELKATGLPVETGSGALTKFNRHAFGVEKEHWLDALCVGRLNGVVTRKGLNVLEIRCMGRGSRQRTRLTKYGFPRGYLMRQKCVHGFATGDMVEANVPKGKKAGLWRGRVAVRVSGSFNIQTPKGVIQGVGWKHCRLISHNDGYGYAWLGHAPHSSPA

SEQ ID NO: 4114 - protein, 435 aa, unidentified
MTKTLITCTTQACVLDQQGKPLVPTTRLGKVYRLLKTQKAHIVSYEPFTIQLDYEPDTHVIQPMTLGVDSGAIHSGYSVANEHREYYNAEVIARNDISNRLSDRRMYRQNRRSRKTRYRKPRFNNRKNKKKGWLPPSLEQKVAVQVNEINHIHRYFPIETIIVEIAEFDIQKIKNPDITGIEYQQGTLQGYNIRNYLLEKHGRKCFYCGKTVSGFEVEHMLPKSKGGSNRIDNLTLSCHDCNQKKDTLTVEEFIRQILPAKKAAAKLKQLPNEKRLFKYMAYMNATRWALYDAIKERYPNVNMTYGYITKYNRIQAGLPKSHHVDAKCITGFATVPSMSQTVVKVKMRRHNRQLHRATFSKGHVRKAASLPTTVFGFQRYDLVCFDNHRYYIKGRRSSGAFALVSVEGLKDENRNYKKLTLLAHTNSYLTNHYVN

SEQ ID NO: 4115 - protein, 470 aa, unidentified; identical to SEQ ID NO: 2825

SEQ ID NO: 4116 - protein, 553 aa, Streptomyces sp.
MTTFPAGEQTHQAVLPQQPALESVGADNPGSRDETAHGHPAAARGTGREHGRGETGGQGTRARQRHAKSAATVAQAAENGSGDTPPHNSPPYQGGIGASRVFVLSKEGHPLMPCHPARARELLRKSRAVVARHVPFTIRLKDRTLAESEVDGVQLRIDPGSKGTGLVLTDEKKETSDNGAIVTVRRGLVAVELQHRADQIRHCMRQRAGYRHRRRSANCRYRAPRANKRAHPAGWLPPSLCHRVDTTLSLANRLCRYAPVTEIHLEAVAFDTHSLSAGRQLRGAEYAQGALAGTTARAYLQAKWDNACVYCDATGVPLNIDHLHPRSRGGTNRITNLVLACVPCNQAKGNTPVEIFLAHRPDRLARILQQVRKPLHDAAAMNATRWQLIDALDTLGKPVHSWPGGLTKGNRSAMGLAKTHTLDALSVGHLDHQGGDAIVRFPSQVLVAKATGRGSYARTTPDRYGFPRLRRARTKQHFGYVTGDLVQATVPTGRWAGTWTGRISVRARGQHSLSTPVGRFNVSHWNLRLLQRGDGYAYDLRPETGPSSSRKIG

SEQ ID NO: 4117 - protein, 434 aa, Bacillus sp.
MVFVLDTNKCPLAPCHEAVARKLLKQGKAAIYRRFPFTIILKKLVDESEIKATYRLKIDYGSRHTGLAILRGQEVVWLGQLDHRIDIKERIDKRRAFRRARRNRKTRYRKPRFLNHKRKEGWLPPSLESRVQNIQTWVNRLKKLCHIGNISYENAKFDTQLMRNPEISGIEYQQGTLQGYEVREYLLEKFGRKCCYCGKENVPLEVEHIIPKSRGGTDRIDNLCIACRDCNQRKGNQTAEEFGCPHIQKQVKESLKDTSVINATRWKVYEVLKQARLDVECGTGARTKMNRIRLGLPKTHYFDACCVGESTPSHLYFKTKEVLFIKAKGRGSRSRTNLDRYGFPRGYLARQKFFFGFQTGDMVKAIVPRGKYKGVWFGEVACRKTGNFDIKGKDGKRIAQGISYKYIQVIQRFDGYTYRKEEAELAQGAIPPRA

SEQ ID NO: 4118 - protein, 456 aa, Acidithiobacillus sp.
MAVLVLDKRKKPLMPCSEKRARILLERGRARVHRMVPFTIRLVDRRVENSVLQPVRVAAAPGSKTTGLALVRDAETVDAITGEVTLTVVVLMLLELKHRGHAIRDALTQRGGHRRFRRSKLRYRPARFNNRTKPKGWLAPSLQHRVDTTLAWVARLRRWAPVTSLSTMLHRFDTQLLQNPEISGVEYQQGELQGYEVREYLLEKWGRKCAYCDAEHTPLTIDHIHPKSTGGSDRVSNLTLACLPCNQRKSNQDVRAFLAHDTKRLAHIEAVRKAPLKDAAVINSTRWALWQRLVDTGMDVEAASGGRTKWNRTRFSMPKAHCLDAACVGHVDAIDAWRQPVLSVKSTGRGSYQRTRLTKHGFPRGYLTRTKSAFGFQTGDMVRAVVTTGKKKGEYLGRVAIRASGSFNIQTGNGLVQHVHHRFCKLVQRADGYGYAFTTRPQRQGLPHGLIWSKGS

SEQ ID NO: 4119 - protein, 472 aa, unidentified
VVDNRLLSIKPLINIGEGVIYSSICTGLSLQTYQKRKEVPCMVYVLDINGQPLMPTTRHGKVRRLLNSHLAKVVKRCPFTIQLLYQSTKEIQPVSLGVDAGSKHIGMAATTEKKVVYQEELSPRNDVVKLLSARRTLCRTRRNRKTRYRKPRFNNRVHSKHKGWLAPSVEVKIQEHITAIKRICQILPISEIHVEISEFDLQRLKAMEEGRTLPVGTDYQLGEQYDFYNTRQYVLHRDGYTFQCCGTHDNNIKLHVHHIESRQTGGDAPSNLITLCEHCHKALHKGKLELPKGKKRGKTYRDATFMGIMRKTLLERLRKEVDVPASGTYGYITKYWRERAGLEKSHINDAICISKYPYAKPLDTYYLTKAVRNHNRQIHKSNFSKGGIRKRNQAPYLVKGFRLFDKVLYQGKEYFIFGRRATGYFDIRTLDGTKVNKGSISYKKLRIQDTAKAYLKEARAIPHMNKFTCVLA

SEQ ID NO: 4120 - protein, 426 aa, Geoalkalibacter sp.
MQRVFVLDNNKQPLSPCSPARARMLLRGGKAAVIRRYPFTIILKDRTGGSTQPVELKLDPGSKTTGVALVQQKDNGAAVIFAAELQHRGASIKKALSTRRALRRSRRSRKTRYRAPRFNNRTRSKGWLPPSLQSRVDNVHSWAKRLQRLCPIANIAVETVRFDTQKVDNPEIRGVEYQQGTLAGYELREYLLEKWQRRCAYCGAENVPLEVEHVVPRSRGGSDRASNLTLSCRPCNEKKGSRAVQEFLADRPEVLRKILVGLKRPLKDAAAVNATRYAIGKALKTLELPISFWSGGRTKFNRTGQRYPKAHWIDAACVGESGASVRLQPGQVALSIKATGRGSRQMCRMDKYGFPRTGAKKVSSESGFCTGDIVAARVPKGKFAGRHTGRIAVRGRPSYRLTTQDQIFDVHPKYLTAIHRADGYAY

SEQ ID NO: 4121 - protein, 443 aa, Anoxybacillus sp.
MVEENMTCFMQRKGENPMVFVLDTNKRPLAPCHEAVARKLLKQGKAAIYRRFPFTIILKKSVDESEIKATYRLKIDYGSRHTGLAILRGQEVVWLGQLDHRTDIKERIDKRRAFRRARRNRKTRYRKPRFLNRRRKDGWLPPSLESRVQNIQTWVNRLKKLCPIGYISYENAKFDTQLMRNPEINGVEYQQGTLQGYEVREYLLEKFGRKCCYCGKENVPLEVEHIIPKSRGGTDRVDNLCLACHDCNQRKGSKTAEEFGYPHIQKQVKESLKDTSAINSTRWKAYEVLKQTGLDVECGTGARTKMNRICLDLPKTHYFDACCVGESTTNHLYFKTKEVLFIKAKGRGSRSRTNLDRYGFPRGYLARQKFFFGFQTGDMVKAVVPRGKYQGVWFGEVACRKTGSFDIKGKDGKRIAQGINYRYVQVIQRFDGYAYGKGVAELA

SEQ ID NO: 4122 - protein, 410 aa, Geobacillus sp.
MTYAFVLDKTGNKLSPTKENKAWYLIRKQRATLVQRFPMVIRLNKTIPKEAIDTTPIRAGIDDGAKYVGIALVQNGKTKNKPILKGFLEHRQDVKDKIDARRAYRRYRRSYKRYRPKRFHHRSSSKRTGRIPPTIRQKKEAVLRVIQQLHKWTRINFIHLEDVQIDIRAIENGYQPYRWEYHQSNRLDENIRKAVILRDQNTCQKCGRTNCRIEVHHIIPRRLGGSNSIYNLICLCSDCHKEVTGNELAYKDEFFQKINGRPVRYWDAMHVMQGKMYLRKELETVAPVILTTGGDTANKRIDWGIEKSHANDAIVITDSFVTNEQCAIKEWHIKPMRRRSNKKTDEVDGFRHRDVVRYTKRNGETYVGYITALYPDKKQCNLTTIDGKVLKRYGLNRLTLIHRFKNLYWF

SEQ ID NO: 4123 - protein, 460 aa, Petrotoga sp.
MWTYRYIADLFPKGDLRMVYVLSKDETPLMPTKRHGKVKHLLREGKAKVVRNKPFTIQLTYDTTHYTQPITLGIDSGHKYIGFSAVTGKEELLSGEVELRDDISELIKEKVMYRRIRRSRLRYREPKFDNRVSSRKETPRKGFKEGWLAPSIKHKLDTHIRFIEFIKKILPITDIIIEVAKFDTQKIKNPEIKGKEYQQGEQRDFYNLREYILYRDNYTCQLCGKSNVPLEVHHIGFWKGDRTNRPSNLITLCTKCHDPKNHLKGGKLYGMEPVQKPLKEATFMTTVRWKLVDMLGCGYTYGYITKVRRIALNLDKTHYNDAFCIAGGTNQRRIEPIYFEQIRRNNRSLEYFYDAKYIDTRDGSTKKGQELFNGRTTRNKNYNTENLKKYRGKKVSKGRRSIRKKRYFYQPKDLVIYEGRKYTVKGVHCRGERIILAELSKSVKIETVEPYMFRKGLCVV

SEQ ID NO: 4124 - protein, 422 aa, unidentified
MQYVYVVGSNGKPLMPCSPAKARKLLKSKSAAVLQRTPFTIKLLHHAGGYKQPITLGVDAGSKHVGLSACTDTEELYKEELTPRNDVVKLLSARRECRRGRRHRKTRYRAPRFNNRVHSKHKGWLAPSVEVKIQEHITAIHRICRRLPITKIVVETAEFDTQHLKAMLEGKPLPVGIDYKRGEMYDEYNVRQYVLKRDNYTCQHCGARGSAEKGIKLHVHHLETRQTGGNAPNNLITLCKDCHTALHDGKITLKLDKKKRGKPLRDSAFMGIMRKTLLSRIRKEVAIPVVETQGYITKLLREENHIQKSHTNDARCIAGCPKALPCDTTYHTKAIRHHNRKIHKTNILKGGVRKLNQAPYKVFGFRIWDKVKYKGQECFITGRRSSGYFALKKLGGTTISNSANYKKIHFLEPANHYIIERS

SEQ ID NO: 4125 - protein, 544 aa, Ruminococcus sp.; identical to SEQ ID NO: 2457

SEQ ID NO: 4126 - protein, 424 aa, Eubacterium sp.
MRVFVLNMRGEPLMPCSQRKARLLLKSNKAIIYKYNPFTIQLAYATGEAKQGCRIGVDTGSKHIGLAVTSEDKVMWKAEVELRQDVKSKIDKRRMYRGNRRYRKTRYRKPRFLNRKREPKWLPPSLQNRVNHTFHWIDVLSSLVPNPNLHIEVGKFDTAKMINPEINGVDYQHGQTYGFYDERYFVFARDNYTCQCCGKSKDKILNTHHIIYRSNGGTNRVDNLITICTDCHTSQNHKKGGILYKWQEQHKKVTQYKESPFMNTLRRRIFTAYPDAKITYGSETTPKRKDMGLNKTHYNDAIIISGINDINENDEEWLLIKQFRKKKRSLHEATARKGRKKPNSSQVRNSKNTPYYKGFYLNDKVVVFGKSGYITGFTSDGAYIKDGDDNYITLPNKNYKQVGISKMKFECHNNNWQYIVKTTV

SEQ ID NO: 4127 - protein, 427 aa, Nitrosococcus sp.
MNRVFVLDTDKTALMPCRPSRARRLLRDGKAGVYRMQPFTIILKYRVDSNPQPVEFRVDPGSKTTGLALVGNFPQQGRVVLWAANLEHRGQSVRDRLEKRRSLRRGRRGRKTRYRAPRFLNRTRPAGWLPPSLRSRVENVSTWFNRLLDRAPLSECHIETVRFDMQKIQNPEISGVEYQQGELMGYEVREYLLEKWGRKCAYCSNKDVPLEVEHIVPRSRGGSHRVSNLTLACTPCNQKKNSKTATEFGYSQIQSKANQPLKDAAAVNATRYAVGRAIQSVGLPTSFWSGGRTKKNRISQSYGKDHWIDAACVGEIGEQVTLTEGYRALQIKATGRGTRQVARTDKYGFPRGKAGRCKRVRGFQTGDLVRLIQPKGKYGGTHTGILAGIRANGAFDIKAKARKISANWKHFKLIQRGDGYDYGLSAV

SEQ ID NO: 4128 - protein, 475 aa, Blautia sp.
MVAVVTSTGKPLMPTSAYRARKLLKKGRAVIFKYRPYFTIQLVDRADGEVQEVEYKSDTGSVHVGISVCTEKKELLSEQRDLLENEPEDHNDRKKNRRTRRNRKRYRKPRFDNRKKKPQEGHEKWLPPTLLHKMEVQVRLFREFCRVVPVTSACFEMGKFDTQALKAVSKGEPVPEGEGYQKGERYGTDTLRAAVFLRDGHTCRFCGRSVKDGAILHVHHVGYWKGDRTNRPANLASACEQCHTPANHGKNGILYGKEPEFKTLKDASYMTSVRWIMLDEIKKAAPGVQVSVTYGVTTKRKRQELHLPKSHVNDAFSMASFHPKKRSDTEYWKKIPRHDRVLQKFYDAVYLDTRDGSEKKGSELSNGRISRNHKKDSENLHQYRGHKVSKGHNSIRRGASSLKPGSIVMYKGEKMTVHGTHTRYVKGKDGKTAKKVNVQFTCPASDGKKSASLEKCTPVSRVYNTGWKRYWPDKK

SEQ ID NO: 4129 - protein, 383 aa, unidentified
MVYVLDQSGQPLMPTERHGKVRHLLKSGKAKVIKRCPFTIQLLYNSTHYTQDITLGVDAGSKQIGLSATTKQKELYAAEIELRNDIVKLLAARRELRRSRRSRKTRYRKPRFQNRTHSRKPGWLAPSIRQRIQCHLTVIANVHKLLPTKTILIETASFDIQKIKHPDIHGVQYQKGEQLDFWNVREYVLFRDNHTCQCCKGRSKDNILNVHHIESRQTGGNAPNNLITLCETCHTGYHNGKVILPKTIKRGMSFKDAAFMGIMRWSCYDMLKNIYPDVHMTYGYITKNTRIGNNLAKEHYVDARCISKNPKAKPLPYYYYQKKVRCHNRQIHKTKPTKHGIRKRNQAEYVVHRYRLFDKVQYQNNEYFIFGRRKTGYFDIRTL

SEQ ID NO: 4130 - protein, 431 aa, unidentified
MPNKVYVINKHGRPLMPCSPAKARHLLDAGKAKVKKRTPFTIQLVYGSSGYTQEVILGVDAGSKTIGVSALTKKEELFAANVIPRNDVVDLLSTRREFRRARRNCKTRYRKPRFDNRVRSKHKGWLAPSVEVKIQGHITAIRRVCGILPVSKVVVETAEFDLQLLKAIEKGKPVPQGEDYQQGEMYGHYNVRQYVLWRDDYTCQCCGAHTTKKKEVRLHVHHLESRKTGGDAPSNLITLCDSCHEKLHKGLIAEKDFKKRKRRSTWDATFMGIMRKTLMQRLCSELPIHVVETRGYITKATREKLLVLPKSHINDALAIAQGKHGFNVGYLPGILQIDMIYTIRPVRHHNRQLHKATILKGGIRKSNQAEKYVFGYRLFDKVQFNGQDCFIWGRRTTGIFTIKTINGKMIKDGISFKKLKPVEKSTSYLIA

SEQ ID NO: 4131 - protein, 419 aa, unidentified
MVYVISQDSKPLMPCSNVIARLLLKQGKAKVKRREPFTIKLTCETTNYTQDLTLGVDTGSGTIGTAVSKNNGDIVYMAEVVVRNDITDKMTQRAKYRRNRRNRKTRYRKARWLNRANSIRNDRFSPTMQSKLHSHIKEIEYIKSILPVTEMVFETGQFDTHLMKNPSLINPKVKHWGYQKGTNYGFENTKAFVLNRDNYTCQYCKGKHKDSKLEVHHIVFRSQGGSDEESNLITLCHTCHKDLHSGKINTKLSGKIKGNLKYATQMNSIRKQLFRLYPNAIETFGYVTKANRLHLGVDKEHYYDACTIATQGNAFNVKSNLYKKKCVSDGDFQQTKGIRSEQPIVTDKICGFRKYDKVKYFGREYFIKGRMSTGYAILMNINGEKADFSYLPRGFKTPKLSNCKRITARTSQMVQAVAI

SEQ ID NO: 4132 - protein, 529 aa, unidentified; identical to SEQ ID NO: 3816

SEQ ID NO: 4133 - protein, 431 aa, unidentified
MPDKVYVISRLGHPLMPCSPANARHLLDDKKAKVVKRIPFTIRLLYGSTKYIQPIILGVDAGSKTIGLSASTAKEEVFAAEVMPRNDVVENLSTRREFRRARRNRTTRYRKPRSDNRVRSNHERWLAPSVKVKIQEHITSIKRVCTILPISKVVIETAEFDLQLLKAIQEGKPIPEGEDYQKGEMYGSYNVCQYVLWRDNYTCICCGVRGTPKNPVRLHVHHFESRKYGGNAPDNHGTLCDDCHKKFHLGIITDVKLKTRRRQSTRDAAFMGIMRKTLMWRLRTELFIPVAETKGYITKATREKLLVLPKSHTRDALAIAQGRHGFGIKEYAYVEPANHIYTVRPVRHHNRQLHKASILKGGIRKRNQASKYVFGFRLYDKVLYQGKACFVWGRRTSGTFLLRTIDGIKVKDGVSYRNLTLLERSSNYLIA

SEQ ID NO: 4134 - protein, 413 aa, Clostridium sp.
MTKNQKEYSFVKDQKGRKLASCLCNKAWVLIRKKKARLLQKYPMAIQLNYEVCPDEETEIICGIDDGSKHVGIALVQKCKTYNKPIFKGTIELRQNVKSLMETRKSYRRYHRTYKRYRKVRFDNRSASKRKGRVAPSILQKKQSTIRIINQLLKFVNIKEFHLEDVVVDIRALSEGKKLYGWQYQKSNRLDENIRKAVILRDNCECMECGKSNCMLEVHHIVPRRLKGSNAISNLITLCSGCHQKTEGKEELFIDKYYKTIDGKNIRFDYAQHVMQGKTYLRQELSKLGKLMLTTGGDTANKRIDWNIYKTHSNDAICITDLEVNMNECNIKDWIIKPMRRKSKANIAELNGFKHRDLIKYTKKNGEYYIGYITALYSNKNQCNITTMENKILKRYGIKSCKLLWRFNIIYWF

SEQ ID NO: 4135 - protein, 531 aa, unidentified
MPMLWKLNRSRQDRISTGPELAVPGLQQKRRTMRYVYVLDMNGKPLMPTCRHGKVRRMLKSGQAKAVDTLPFTIQLLKPTKTRILQPVIAGQDPGRTNIGMAAVRSDGTELYRAHIETRNKEIVSLMNDRRSFRQASRRGERLARKRLAKKLHTTAKHLNGRILPGCKEPLAVKDIINTEARFNNRLRPEGWLTPTATQLLRTHLEAFRKLSGILPVTEVVLEVNRFAFMQLDDPDMKKRDIDFCRGPLYGTGGVKAAVSLQQDGLCLLCWEREIEHYHHIVPRSRRGSNTISNIAGLCGKCHERIHKDQAAAEKLQSKKDGLSKKYGGTSVLNQIIPSLTEALGIRYPGHAHVTNGWSTKEFREKHELEKDHDVDAYCIAASILEDAQPVMQTEPYEIKQFRRHSRALINHQTERTYRYDGKIIAKNRKKRMDQKTDSLEDWVADMTKQYGQGTASRMLSKVTVQKSTRHYNTKGRMMPGAVFIYRGKRFVMTGQLTGGAYYRAYRQDKKNFPAKAVQVVQKNKGLVYVA

SEQ ID NO: 4136 - protein, 447 aa, Marinobacter sp.; identical to SEQ ID NO: 3683

SEQ ID NO: 4137 - protein, 416 aa, unidentified
MVYVLDIDGQPLMPTNRHGKVRHLLKDGMAKVVQRCPFTIQLLYNNTNYTQEITLGVDAGSKHIGLSATTERIVLYEAEVELRNDISKLLATRKQNRRSRRNRKTRYRKSRFDNRRRKEGWLAPSVQQKVDCHLKVVENVCKLLPVTKIIAEVASFDIQKIKNPKIEGTDYQKGDQLGFWNVREYVLFRDGHTCQCCKGKSKDKILNVHHIESRQTGGNAPDNLITLCETCHKRYHKGLIKLPEKIKRGMAFKDAAFMGIMRWAFYGRLKETYLPLGIDVSLTYGYLTKNTRISHQLPKKHHIDARCISGHPDAVSDGIYYHQKKMRCHNRQIYKAKTLKRGIRKRNQAEYLVIGFRLFDKVRYQGKDYFIFGRRKSGYFDIRDLNGEKVNKGSINYKKLRLVETRRSYLTERRLA

SEQ ID NO: 4138 - protein, 458 aa, Bacillus sp.
MVEENMTCFMQRKGENPMVFVLDTNKRPLAPCHEAVARKLLKQGKAAIYKRFPFTIILKKSVDESEIKATYRLKIDYGSRHTGLAILRGQEVVWLGQLDHRTDIKERIDKRRAFRRARRNRKTRYRKPRFLNRKRKEGWLPPSLESRVQNIQTWVNRLKKLCHIGNISYENAKFDTQLMRNPEISGIEYQQGTLQGYEVREYLLEKFGRKCCYCGKENVPLEVEHIIPKSRGGTDRVDNLCLACHDCNQRKGSKTAEEFGYPHIQKQVKETLKDTSAINSTRWKVYEVLKQARLDVECGTGARTKMNRIRLGLPKTHYFDACCVGESTTNHLYFKTKEVLFIKAKGRGSRSRTNLDRYGFPRGYLARQKFFFGFQTGDMVKAIVPRGKYKGVWFGEVACRKTGNFDIKGKDGKRIAQGISYKYIQVIQRFDGYTYRKEEAELAQGAIPPVPKGRGFLA

SEQ ID NO: 4139 - protein, 443 aa, Anoxybacillus sp.; identical to SEQ ID NO: 3426

SEQ ID NO: 4140 - protein, 428 aa, unidentified
LKVFVLNMRGRPLMPCSPAKARHLLKAGKAVVRRRTPFTIQLRIATGETKQSVTLGVDAGAKHVGLSAATEKEEVFAPEVELRQDITGLLAARLSLRRERRQRKTRYRAPRFLNRVRSKHNGWLPPSVENRIQAHLSRIDAICGLLPVTKIVIETASFDIQKIKHPDVEGTDYQQGDQLGFWNVREYVLFRDGHVCQHCHGHAKDKILNVHHLESRQTGGDAPNNLITLCERCHKACHAGKIKLKVKRGQSFREEAFIGIMRWTLLDRVRKAHPGLPVENTYGYLTKNTRITLGLPKAHCVDAYCIAGNLKAVRRGVYLHQRQVRKHNRQIHKCTVLSKTLKDGTKIGYRKLNQTPHLVKNFRLFDKVRCLGQTGFIFGRRSSGYFDVRRLDGVKISSCINYRKLTLLEKRGTCLTELRKEDGASSPV

SEQ ID NO: 4141 - protein, 427 aa, Nitrosococcus sp.
MNRVFVLDTDKTALMPCRPSRARRLLRDGKAGVYRMQPFTIILKYRVDSNPQPVEFRVDPGSKTTGLALVGNFPQQGRVVLWAANLEHRGQSVRDRLEKRRSLRRGRRGRKTRYRAPRFLNRTRPAGWLPPSLRSRVENVSTWFNRLLDRAPLSECHIETVRFDMQKIQNPEISGVEYQQGELMGYEVREYLLEKWGRKCAYCSNKDVPLEVEHIVPRSRGGSHRVSNLTLVCTPCNQKKNSKTATEFGYSQIQSKANQPLKDAAAVNATRYAVGRAIQSVGLPTSFWSGGRTKKNRISQSYGKDHWIDAACVGEIGEQVTLTEGYRALQIKATGRGTRQVARTDKYGFPRGKAGRCKRVRGFQTGDLVRLIQPKGKYGGTHTGILAGIRANGAFDIKAKARKISANWKHFKLIQRGDGYDYGLSAV

SEQ ID NO: 4142 - protein, 408 aa, unidentified
MVYVQDINGKPLMPTTRHGKVRRLLKDKKAVVVNLCPFTIKLTYVTSDYKQEIVLGVDAGTKHVGLSATTKSKELYSSEVILRNDIVDLLSTRRELRRARRDRMRYRKPRFNNRIKSKRPEWVAPSVRYKVDAHICVINNVCSILPISRIVIEVAQFDTQKIKNPNISGKEYQEGDQLGFWNVREYVLCRDGHKCQHCKGKSKDEILNVHHIESRKTGGNSPSNLITLCETCHKEYHKGNIDLKIRRGKSLRDAAVMGIMKWRLYEELKSKYSNVSMTFGYVTKYNRINHGIEKSHVSDSFTISKNFDAIRLGYYYKVRLVRRHNRQIHKQKIQKGGIKRLNQSPFEIFGFRLFDRIMFENSYYFIFGRRKTGYFNIRDIDGKNQRDITYKKLKLSRCKRFMIQNEMN

SEQ ID NO: 4143 - protein, 431 aa, unidentified
MPDKVYVISRLGHPLMPCSPAKARHLLDDGKAKVVKRTPFTIKLLYGSTEYTQPVILGVDAGNKTIGLSASTTKEELFAAEVMPRNDVVENLSTRREFRRARRNRTTRYRKPRFNNRVHSKNNGWLAPSVEVKIQEHITSIKRLCAILPISKIVVETAEFDLQLLKAVQDGKPVPEGEDYQKGEMYGSYDVRQYVLWRDNYTCTCCGVKGTDKKPVKLHVHHFESRKHGGNAPDNYGTLCEDCHKKLHLGIITDISLKTRKRPSTRDAAFMGIMRKTLMQRLITGLSIPVAETKGYITKAAREEILKLPKTHTNDALAIAQGRHGFGIREQAYVKPTNRIYTVRPVRHHNRQLHKATMLKGGIRKLNQASKYIFGFRLYDKVLYQGGECFVWGRRRSGSFLLRTIDGTKVKDGVGYRNLTLLERSTNYLIA

SEQ ID NO: 4144 - protein, 453 aa, unidentified
  source 1..453: note = Candidatus Dependentiae bacterium
MVHVLDTLKKPVNPCHPSKARLLLTRGKASVFRLYPFTIILKEVSKEEIKPQRLKIDPGSKTTGMAIVDDATGKVVHALEIQHRSDTISQALTSRRSSRCSRRARKTRYRPARFANRMRESGFLPPSLGGRIAQIKTWINKLIRSSPITAISIEDSKFDTQLMQNAEISHIEYQQGELYGYETKEYVLEKCKYMCSYCKQKEVPLEIDHIVPKSRGGSNRVSNLTLACRPCNQSKGNLTAAEFGYHEVQELAKAPLKNAAAMNVMRAALVKLLSTYGLPLETGTGALTKCNRTQQHFEKAHWIDAACVGASTPKELLLKDAMPLYVKATGHGSRQMCAVDRYGFPRSSSKGAKKQYGFQTGDIVRAIVPEGKKKGTYWGKVAVRARGYFNITTQDGEVVQGIKHSYCKLIHRSDGYRYSFIPLVKKNSLTTQRAKDTLSFPVLVSHGVSRVCQ

SEQ ID NO: 4145 - protein, 406 aa, unidentified
MVYVQDIDGRPLMPTTRHGKVRRLLKSKKATVVNLCPFTIRLLYDTTGYKQEITLGVDTGTKHVGLSATTKSKELYASEVILRSDVVDLLSTRRELRKIRRYRLRYRKPRFMNRIKSKKRGWIAPSIRQKIDSHIRIIGFVYSILPVSKLIIEVAQFDTQKIKNPEISGKEYQEGEQLGFWNVREYVLARDGHKCQYCKGKSKDPVLNVHHIESRKTGGDSPSNLITLCKTCHKEFHKGNIKLKVNRGESLRDAAVMSIMKWELYDELKSLYPNVKMTFGYITKYNRINHGIEKSHVSDAFVISRNFDSERLGYYYKRKLVRRHNRQIHKMKAPKGGNKRMNQFPFKVFGFRLFDKVMFQGKERFIYARRLRGIFNIRDINGENKKDISYKKLEYVSHGLISIVAG

SEQ ID NO: 4146 - protein, 443 aa, Bacillus sp.
MVEENMTCFMQRKGENPMVFVLDTNKRPLAPCHEAVARKLLKQGKAAIYRRFPFTIILKKSVDESEIKATYRLKIDYGSRHTGLAILRGQEVVWLGQLDHRTDVKERIDKRRAFRRARRNRKTRYRKPRFLNRKRKEGWLPSSLESRVQNIQTWVNRLKKLCPIGYISYENAKFDTQLMRNPEINGVEYQQGTLQGYEVREYLLEKFGRKCCYCGKENVPLEVEHIIPKSRGGTDRVDNLCLACHDCNQRKGSKTAEEFGYPHIQKQVKESLKDTSAINSTRWKAYEVLKQTGLDVECGTGARTKMNRIRLDLPKTHYFDACCVGESTTNHLYFKTKEVLFIKAKGRGSRSRTNLDRYGFPRGYLARQKFFFGFQTGDMVKAVVPRGKYQGVWFGEVACRKTGSFDIKGKDGKRIAQGINYRYVQVIQRFDGYAYGKGVAELA

SEQ ID NO: 4147 - protein, 424 aa, unidentified; identical to SEQ ID NO: 3434

SEQ ID NO: 4148 - protein, 431 aa, unidentified
MPNKVYVINKHGRPLMPCSPAKARHLLDAGKAKVKKRTPFTIQLVYGSSGYTQEVILGVDAGSKTIGMSASTTKEELLSAEVKPRNDVVDLLSTRREFRRVRRNRKTRYRKPRFDNRVRSKHKEWLAPSVEVKIQEHITSIKRVCRILPVSKVVIETAEFDLQLLKAIADGKSVPQGEDYQKGEMYGHYNVRQYVLWRDNYTCQCCGAHATKKKEVRLHVHHLESRKVGGDAPSNLITLCDSCHEKFHKGIITAANLKKRKRRSMRDATFMGIMRKTLIQRLRAELTIPVAETRGYITKTTREKLLVLPKSHTNDALAIALGKHGFNVGYLPGILQIDMIYTIRPVRHHNRQLHKVTILKGGIRKSNQAEKYVFGYRLFDKVQFNGQDCFIWGRRTTGIFTIKTINGKMIKDGISFKKLKPVEKSTSYLIA

SEQ ID NO: 4149 - protein, 458 aa, Lactobacillus sp.
LKGVGMMSEIKKVDYIYVVDSNGTPLMPTSRLGMVRRWLKTGQAKWFGNSRNTIQFVRLVTTNTQELTLGVDAGFHLSLSVVGNNREYYVSESLRKSEKDRITSRRELRRTRRNRLRYRKARFNNRRRKDGWLAPSIQHRLDFTIKEIKRLYKFLPITNLVVEVTPFDNQKLLNPDIQGWQYQEGKMYGFKTIKDYLLARDNYRDALDGKQYPTSQLKVHHLVQRKDGGSNQPDNLVLLSDINHNQANHNNGILAKLKENRQKTLDYRGAYFMSILATRLSNYFDNYTITQGYLTANLRQKYEIKKSHLNDAFIIAGGTDTTLRTNNVYSRQKLRNNNRVLQKFYDAKYIDSRDGKKKTGKELSSGRTRRSQELNYDNLRQFRKEKVKKGRVSIRRGHYQLRPHDVVLNTRTNRIETVKGVQNSGTVIKFQTGKTCSIKSVVSLYHVNGILEKKMKNI

SEQ ID NO: 4150 - protein, 426 aa, Sutterella sp.
MSVSVFVQDRKHRPLMPCRPARARRLLKSGRARVVRLFPFTIRLTDRLIEDSKLQPVLVKIDPGSRQTGVALVRADEKAHHHALFFINLVHRGESIRDALWARRNCRHRRRGNLRHRAPRFLNRTKPKGWLPPSLRHRVDTTTAWVAKLMKLAPVTEIVEELVKFDTQKLQNPEISGIEYQQGTLFEYEVREYLLEKFGRKCVYCGAENVPLNIEHVVPKARGGSNRISNLVLSCENCNKKKDAQPVEVFLKNRPEVLDRIKRGLKTPLRDAAAVNATRWSLFNALQAFGLPVETGSGALTKFNRHTFDVPKEHWLDALCAGRVNGVHYPEGMGILQVRCTGRGSYQRTRVDKYGFPRGYLTCQKRVHGFATGDMVKAVIPSGKKAGTYRGRVAVRARGCFVIQTPEGKVDGIGWRHCRLLSFNDG

SEQ ID NO: 4151 - protein, 419 aa, Bacillus sp.
LFVYMINKHGKPLMPCSPRKARLLLKQKKAKVVRRTPFTIQLLYGSSGYKQPVSLGVDMGTRHVGISATTEKDVLFEAEVQLRTDIVDLLAIRRQFRRSRRNRKTRYREARFLNRRKPEGWLPPSIQHKINSHIKLIDLVHNILPVTSVTIEVATFDTQKLKNPNIQGVEYQQGEQMGFWNVREYVLYRDNHTCQYCKGKKKDPVLQVHHIESRKTGGDSPDNLITLCKTCHHEIHEKGLEHILQRKRPPMRDASQMTAMRWAMFSRIREKYSHANITYGYITKCIRIANGLPKSHMVDARCISGNPLAKPSGTVYLLKFVRKNNRQLHKATILKGGKRKSNKAPRFVKGFQLFDKVVYEGKECFIFGRRSSGYFDLRLLDGTKVHASASWKKLKRVEYASTLLIERRKGDSSPTFANA

SEQ ID NO: 4152 - protein, 431 aa, Klebsiella sp.
MNRVFVLSKTGKTLMPCHPARARQLLHDKKAVIKRLYPFTIQLTHRSEEYIQPVELKFDPGSKQTGIGIVLHGKNRLSAIYGAVLTHRGNEIKNNLDSRRMIRRSRRNRKTRYRQVRFLNRVRSKHKGWLAPSVQSRVDNIVEWSKRFIRYVTVGFITVESVKFDMQKMENADVDGIEYQRGTLFDYEVKEYLLEKYNYSCVYCGAKNVPFEKEHVIPRSRGGSNRISNLVLSCRSCNEKKDNLPIEEYLKDNPALLKKIKAQLKSSLKDAAAVNITRKQIVKELENLNVPVLTGTGAETKYNRVSQGYKKEHYIDALCAGTTGTKVYIPSTLKPLLIKKERRNNRQMCLVDKYGFPRGKAKGSKIVHGFKTGDIVKAVVLKGKKKGTYKGKVAVRSSRSFNIKVKQGVVEGIGWKNCVMLYRFDGYSYAY

SEQ ID NO: 4153 - protein, 418 aa, Exiguobacterium sp.
MFVFVLNQHGKPLMPCKPQKARCLLTDKKAKVIKRTPFTIQLLYGSSGYKQPISLGVDTGTKRIGFSATTSTTVLVEGEVQLRTDIQKLLATRRAMRNSRRSRKTRYRQARFLNRKKPKGWLAPSIQHKVDAHLKLIQMLYRLLPICNLTLEIAQFDIQKIKNPDISGDLYQKGDQLGFWNVREYVFFRDKHTCQHCKGKTKDKILNVHHIESRRTGGNAPDNLVTLCETCHHKIHQQKLEHLFQRKSRSLRDASQMTVMRWFIYNATKETYPSVRLTYGFITKNTRIGNGLDKRHAIDARCISGNPLAEPPKVSYFFRQVRANNRQLHKMTIGKKGKRKANKAERLVHGYQLFDKVQYEGQTCFVFARRKTGYFDLRTIQGFSIHKSASYKKLTLLERATIWLVDIQPERGEGRILP

SEQ ID NO: 4154 - protein, 447 aa, Marinobacter sp.; identical to SEQ ID NO: 4025

SEQ ID NO: 4155 - protein, 431 aa, unidentified
MDAWDIIVVLNKRGKPLMPCSPAKARLLLKEKKAIVKRRTPFTIQLTIATGETKQPVSLGVDAGYKHVGLSASTDKAELYASQVELRQDITDLLSARRALRRARRNRKTRYRAPRFNNRLRTKRKGWLAPSVENRINAHLSRIEAVLRLLPVTKITVETASFDMLLLKNPDIAGKEYQEGEQLGFWNVREYVLFRDGHVCQHCYGRSKDPVLNVHHLESRRTGGDSPGNLITLCETCHEALHRGEIALKTKRGHSFRAEAFMGMMRWEVLNRLKASHSELEVNNTYGYRTKHARIVNGIDKSHCADAFCIAGNLGAERLCEFFFQKQTRRNNRQIHKLSILKGGIRKRNQAPFEAKGFRLFDKVACKGEESFIFGRRSSGSFDVRKLDGTRISAGISCKKLRLLEKRRTYLTEIRKEEALPPLPEGRGLRA

SEQ ID NO: 4156 - protein, 453 aa, Erysipelotrichaceae sp.
MSVAVLSSTGRKLMPTSNYRARKLLKSKRAVIECYRPIFTIRLTDREEGNTQPIEYACDTGYQHVGVSIKSEKHEFVHAQYDMLSDETERHNDCRKCRRTRRNRLRYRKPRFDNRSKKNKEMAPSLRHRKENQIRLFESFCKVMPITSAAFEMGKFDTQLLQAIADKKPLPKGKDYQRGSKYLYQTEREAVFGRDHYTCQVCGKSVKDGVILHTHHIGFWKGYRSNRISNLLTVCEHCHTAKNHQPGGKLWGLEPKSTNLAPATYMSTVRWAMYRDLVLTHPELDIYFQYGAKTAVTRKSLHLEKTHANDAYCIGSLHPKHRTAELVYQKKRRNNRILAKFYDAKYIDIRDGEKKSGSALSCGRTNRRESRRSDKNQRIYRGKKCSSGRTSVRKKRYSYQPGDAILFRSQRFTVNGAHCNGTRVILNTGKSVKMADLTCIKMEGGWCFLPAQA

SEQ ID NO: 4157 - protein, 470 aa, unidentified
MSVFVVGLNGCRLMPTSERKARLLLKQGKAFVEQKVPFTIRLNYKTGSTTQPSYLGIDTGSQHIGVSVVREDGTVLHKEEIGLRDSMSKRKLLEAKASLRRGRRYRKTRYRHPKWRPKTKRVYCEVPDRKGRHWQKKKITFTSKRPKGWLPPSLQSKTDHHIRWIKKLQDLLPEGYRLSIELGRFDPARMKNPEIHGDLYQKGPQYDYENVRAYVLDRDRYTCQICKKKGGKLHVHHILYRSHGATDDPQYMVTVCSDCHSAQNHLPGGILYQWMQEQKRFSRGLRDATFMNILRKRLIRAFPEAVFTYGNVTKVDREKLKLPKSHGNDATAIALVKTGITAVKDKESVICIQQVRRKKRSLHEETPRKGRKEPNRTAARNNKNTKAVTVTKRQNKKKVSMTGCLFDRVELNGKKGWISGFTGKSCYVKDADDQYLSTSPKYKQVSLSKLRILHHCGNWIIGAKKTLGKG

SEQ ID NO: 4158 - protein, 437 aa, Haloactinospora sp.
VHPYVFVLDAHHRPLQPCPPARARKLLAKGRAVVHRRVPFTIRLKDRTAEASEMEGVEVGIDPGSKHTGIAVFTAQEGQRRNRYSIQLDHRGAAIRKKLDQRCAYRRRRRTANVRYRAPRFNNRARPQGWLPPSLRHRVDTTVSWVERLARWTPVRHVHVERVAFDTHALSAGSPLEGREYQHGTLHGYEVREYLLAKFDRACVYCGAMNTPLNVDHVHPKSRGGSDRVSNLVLACIRCNQTKGEKPVKEFAPKAAARILAQAKAPLRDAAAAQSTRWALWRVLESRLPTRVGSGGRTKYNRTRNHLPKTHTLDALCVGETGAVAEVVNRVVVAACTGRGTHARTRPDKHGFPRLRLPRQKTFFGYQTGDLVQAVVPAGKKAGTYTGRVAVRARGSFNITTAHGTAKDIHYRHVRLLQRADGYGYTMRKEEAASSPA

SEQ ID NO: 4159 - protein, 463 aa, Cupriavidus sp.
MAVFVLDKHGKPLMPCSEKRARLLLERGRARVHRLMPFAIRLIDRWLNDSEVQPLRLKLDPGSKETGVAIVREATFGADGARRAYVLSLAEIIHRGRQISEALTARRSMRRARRGRKTRYRAARFDNRRRPEGWLAPSLRHRVVTTEAWVRRFIKLAPITALSLELVRFDMQAMENPEISGVEYQQGTLLGYEVKEYLLAKFGRTCSYCDAADRPLETEHIVAKACGGSNRVSNLTLACRPCNEKKGKLPLEVFLRKDPARAKRILARAKAPLRDAAAVNATRLALLDALKSFGLPVETGSGGQTKYNHRRLEIPKSHALDAACVGQVHSVLDWQRPVLRIQCTGRGSYQRTRLSANGFPRGYLMRSKRAFGFQTGDMVKAIVPTGKKAGTYVGRVAIRATGFFNIQTAAGAVQGMHCKVFQRGDGYGYQLVVQTAKESENRGDASRRALSLPGLKAEVSRAN

SEQ ID NO: 4160 - protein, 425 aa, unidentified
MKAYVISNDGYPLMPCKPVIARLLLKSKRAKVIRREPFTIKLLYETTSYVQKLTLGVDTGSGTIGTAVADEDGNILYMSEVQVRNDISRKMTQRAKYRRSRRNRKTRYRKSRFMNRKNSIRKERFSPTMVSKIQSHVKEIEFIKSVLPVHTIVLETGQFDTHLMKNPSLTNPKVKHWGYQKGPNYGFENTKAMVLNRDDYTCQCCHGKHKDSHLEVHHIVFRSQGGSDESENLITLCHTCHKALHDGKIHPSLKGKVKGTLKYATQMNSIRKQLLEIYPEAIETFGYVTKANRLNLGVDKEHYYDACVIATQGKAFKVKTVLFQKKCVPDGDFQKTKGVRSEQGICTDKILGFRKFDKVKYLGKEYFIKGRMSSGYAFLMDIFGNKIDFSDMPKGFKTPKMKNMTRVQARSSWMTTSIQVLGGMQ

SEQ ID NO: 4161 - protein, 431 aa, unidentified; identical to SEQ ID NO: 3507

SEQ ID NO: 4162 - protein, 412 aa, Fervidobacterium sp.
MVFVISKNGTPLMPTKRHGKVRRLLKQGLAKVVNREPFTIQLLYETTSYTQPVTVGIDIGSKTVGVSAVTDKEEIFSAEVQLRQDIKKLLLERRQHRRFRRYRKTRYRKPRFLNRRKKDGWLPPSLQWKVDAHVRIINKLGKIIPITKVVVEVAPFDIQKVQNPDIEGKNYQNDPQKGFADVREYCLWRAGYKSELSGKTGILEVHHIIPRSKGGTDAPSNLIVLTAEEHKMLHEGKIKIPKSRLEQIKVFKDAAHVSTIGWHIVNKLRQNYHVEITYGSITKERRDMYGLEKSHRDDAFVIAGGNIQERASEWYFGKFFRRQNRSLHKANPIKGGKRPINTVKQVRGFRRFDKVECEGKIGIVTGLRSSGYFSISELSGEKISDTVKYTKLRVIERSKTLMFERMVEAAWS

SEQ ID NO: 4163 - protein, 448 aa, unidentified
MSVYVINQRKQPLMPTTERKARLLIKQGKAKVIEIKPFTIQLLCATGETKQPITLGIDSGYNNIGFSAITDKKELITGELKLLQGMKERLQERLQYRRIRRQRLRYRKPRWNNRIKSKQKGWLAPSLQHKLNSHIKFIDYLYSILPITKCIVEIANFDIQKIKNPNIKGIEYQQGDMMGFWNLREYVLYRDGHKCQNLNCKNKDKNPILEVHHIKYKSLGGTNNPNNLITLCTKCHTSDNHKKGKFLYKWCQEGKKVRGFKDATFMSMIRWRLVNQLNEKYNNVSFTYGYITKSHRIEYKIEKSHYNDAFCIAKGINQIRCDKIWQLQQCRRNNRSLENFYDAKYIDTRTGHKVSGSELNCGRRTRNKNKNSENLHQYRGQKLSKGQRRIRKQKYFYQPNDLIKYEGKIYTVKGTQNGGKYVALKEIKKVPRIELIKPYKFQKGIVWN

SEQ ID NO: 4164 - protein, 378 aa, Moorena sp.; identical to SEQ ID NO: 2642

SEQ ID NO: 4165 - protein, 465 aa, unidentified
MSTCVCVLSNSGERLMPTFRLGKVRHLLKDGKAKIIKHHPFTIQLLYDSKMNTQPIEICEDVGYNYIGISVKSQSHEYVSAQYDTLQDEKEHHDDCRKMRRARRNRLRYRKPRFDNRKRSEGWLAPSLEHKKQLNIRLVEQYVSVIPITHATVEVGSFDTMLVKAIEEGKATPESADYQKGPRYNLATLREAVFYRDNYICKVCGRKATEGAILHMHHMFYWKGRHGNSLSELITVCEKCHTPANHQKSGKLYGFGENVKFADLSGAAFMNTVRWQIVNELYAAFGKDFVTVTYGAMTKEKRIALHLEKSHNNDAYAMGSFHPVNRCAFEHYEKVKRNNRILEKFYDSQYIDTRTGELTNGKSLFNGRISRSHKKDSENLHKYRGKRICKGHRALRRKKLALNPGDLVSLNGEILVVHGTHTKKNGSVNVEFKTPSRGGKKSASLKKLKIVKTSNLMHSAWTKVS

SEQ ID NO: 4166 - protein, 317 aa, unidentified
MVYVQDINGKPMMPTTRHGKVRRLLKENKAVVVSLCPFTIKLTYVTSDYKQEIVLGVDAGTKHVGLSATTKSKELYSSEVILRNDIVDLLSTRRELRKTRRNRLRYRKPRFNNRIKSKRSGWIAPSVKYKVDAHIRVIDNVCSILPIFRIVIEVAQFDTQKIKNPNISGKEYQEGDQLGFWNTREYVLARDGHKCQYCKGKSKDKILNVHHIESRKTGGNSPSNLITLCETCHKEYHKGNIDLKIRRGKSLRDAAVMGIMKWRLYEELKSKYDNISMTFGYVTKYNRINHDIEKSHVSDAFVISKNFNAIRLGYYYK

SEQ ID NO: 4167 - protein, 469 aa, Burkholderia sp.
LAVFVLDRSGKALMPCSEKRARLLLARGRARVHRVVPFCIRLIDRQHASSAMQSLRLKLDPGSKTTGIALVRDVTQPDASIGEIQRGAAVLNLFELIHRGRQISETLTARRSMRQRRRGNLRYRAPRFLNRTRPTGWLAPSMQHRVDTTMAWVKRLMRWAPVCAVTSELVRFDLQALENPEIEGVEYQQGALAGYEVREYLLAKWGRACAYCDAENTPLQIEHIHARARGGTNRVSNLTLACAPCNTKKAARALPDFLTRDPKRAARILAQAKRPLKDAAAVNATRWQLVQSLRATGLPVELGSGGRTKFNRTRFDIPKTHALDAVCVGEVEWVRTWQRPTQTVKCTGRGSYQRTRLDKYGFPRGYLTRSRRVHGFQTGDLVRADVPTGKKAGIHVGRVAVRATGSFNIQGDGAVVQGIAHRHCRLVQRSDGYGYSRIATSKGDARTGTASLSALSLPAVNDGVSRATG

SEQ ID NO: 4168 - protein, 413 aa, unidentified; identical to SEQ ID NO: 2636

SEQ ID NO: 4169 - protein, 430 aa, Desulfobacter sp.
LNVFVLDTNKKPQNPVHPAKARLLLTEGKAAVFRQFPFTIILKETVLDVASNPLRIKIDPGSRETGIAVINDDSGEIIFAMELRHRGQQIKNNLESRRAIRRSRRNRKTRYRKPRFDNRTRAEGWLPPSLKSRVHNIETWVNRLCRFCNIQAISMELVRFDMQKIQNPEISGVAYQQGELMGYEVREYLLEKWDRTCAYCGKTDIPLEIEHIVPRSKGGSNRVSNLTLACTACNRKKGNKPLEQFLSRKPRLLKRIQKQSKVPLKDAGAVNTTRWDLFRTLKKTGLPVETGSGGLTKFNRTTRGLHKTHWLDAACVGKSTPEKMFQIDKAVLIVKADGHGSRQMCRVNKFGFPRTTAKSTEKKVKGFQTGDIVKAVVTSGKKVGTYTGRVAVRKSGSFNIKTVDKTVQGISWKYCRLLHASDGYSYNTTC

SEQ ID NO: 4170 - protein, 431 aa, Escherichia sp.
MNRVFVLSKTGKTLMPCRPARARQLLHNKKARVKRLYPFTIQLTQRSEGYIQPVELKFDPGSKQTGVGLVLHGKNRLSAIYGAVLTHRGQEIKGNLDSRRMIRRARRNRKTRYRQERFLNRVRSKHKGWLAPSVHSRVDNIVEWSKRFMRLSPVGFITVESVKFDMRKMENAAVEGLEYQRGTLFDYEVKEYLLEKYNYSCVYCGAKNVPFEKEHVIPRSRGGSNRISNLVLSCHDCNQKKDNLPIEEFLKDNPALLKKIKAQLKSSLKDAAAVNITRKQIVKELRILNVPVLTGTGAETKYNRVSQKYPKEHYIDALCVGATGAKVYIPSKLRPLLIKKERRNNRQMCLVDKYGFPRGKAKGSKIVRGFKTGDIVKAVVLKGKKKGVYKGKVAVRLSGSFNINVKQGRIEGIGWKNCVMLHRFDGYSYTY

SEQ ID NO: 4171 - protein, 358 aa, unidentified
EVFYMSEIEIRNDISDKMDKRAKYRRTRRNRKTRYRKPRFNNRKNSIKKDRFSPTMTSKINSHLKEIEFVKSILPIKNIIIETATFDPHALKNPAVLNNKWLYQKGTNYGFANTKAYVLSRDGYTCQHCKGKSKDNRLEVHHIIFRKNGGSDDAENLIVLCKTCHDSLHKGKIKLKKNGKIKGQLKHATQMNSIRQQLLKILPDAKETFGFITKEHRYLMGLPKEHYCDAIAIACLNNIEDTGLIDVSFKTEEVVLKKCISKGDYQQTKGVRSHQKIPTGKIEGFRKFDKVRYLGDEYFIKGRMSTGYAVLMDIDGDKIDFSNAPRGMKTPKMSNMQRISARKSWIICEQNRANSSHD

SEQ ID NO: 4172 - protein, 497 aa, unidentified
LVWNVQAPWDVYPSPTLCGLCLKVLRGRNGDADKKPIPTLTKDENRPSGRTTGLRAEQAEPAGIRKGDTLKVFVLNMRGKPLMPCSPAKARHMLKAGKAFVVRRTPFTIKLTIATGETKQDVTLGVDAGARHVGISATTEKEEVFASEVALRQDITGLLADRLAFRRARRNRKTRYRAPRFNNRVRSKHKGWLAPSVENRIQAHISRIEAVCRLLPVTKIVIETASFDIQKIRNPEVEGTGYQQGDQLGFWNVREYVLFRDGHICQHCRGRSKDPILNVHHLESRKTGGDAPNNLITLCETCHKAYHAGKIKLKVKRGQSFRAEAFMGIMRWTLLDRVRKAHPGLPVENTYGYLTKNTRITLGLPKAHCVDAYCIAGNLKAVQRGVYRHQRQVRKHNRQIHKCTVLSKTLKDGTKIGYRKLNQTPHLVKNFRLFDKVRCLGQTGFIFGRRSSGYFDVRRLDGVKISSCINYRKLTLLEKRGTCLTELRKEDGASSPV

SEQ ID NO: 4173 - protein, 431 aa, unidentified
VEQNLRVFVLNKRGKPLMPCSPAKARHLLKEKKAIVVRRTPFTIKLTIATGESKQPVSLGVDAGYKHVGLSASTEKAELYASEVELRQDITDLLSARLALRRSRRNRKTRYRAPRFDNRIRTKRKGWLAPSVENRINAHLSRIEAVLRLLPVTKITVETASFDLQLLKNPDISGKEYQEGEQLGFWNIREYVLCRDGHVCQHCYGRSKDPVLNVHHLESRRTGGDSPGNLITLCETCHKALHRGEITLKAKRGQSFRAEAFMGIMRWEVLNRLKASHPELEVNNTYGYWTKHARIANGIAKSHCADAFCIAGNLGAERLGEFFFQKQTRRNNRQIHKLSILKGGLRKRNQAPFEVKGFRLFDKVACKGEEGFIFGRRSSGFFDVRKLDGTRISAGISYKKLHLLEKRQTYLMEIRKEEAFPPLPEGRGLRA

SEQ ID NO: 4174 - protein, 456 aa, unidentified
MSTCVCVLSNSGERLMPTFRLGKVRRLLKDGKAKIVKHHPFTIQLLYDSKTNTQPIEICEDVGYNYIGISVKSESHEYVSAQYDTLQDEKEHHDDCRKYRRTRRNRLRYRKPRFDNRKRSEGWLAPSLEHKKQLNIRLIERYVSVIPITRATVEVGSFDTMLLQAIQKGESKPEGVDYQKGPRYNLATLREAVFYRDNYTCQVCGRKIADGAILHMHHMFYWKGRHGYQLDELVTACEKCHTPANHQKGGKLFGFGEDKEFANLSGAAFMNAVRWQIVNALYATYGKEFVTITYGAMTKEKRIILGIEKTHNNDAYAMGDYHPAHRCVFRHYQKRRRNNRVLEKFYDATYIDARTGNKAKGKELFNGRINRNHKKDSENFHKYRSKKVSKGRRSIRRQRYAIQPYDTVRLEGKTYITSGCHNKGTRLLIPANGKSKSVAISKVQVVCHAGAWIQII

SEQ ID NO: 4175 - protein, 438 aa, unidentified
VAVFVLDRRGKPLMPCNEKRARLLLARGRARVHRVMPFVIRLVDRQIGVCSFQPLRLKLDPGSRVTGMALVRETDDAIAVLNLFELVHRGRQIGEALTARRACRRRRRTNLRYRTPRFLNRTRPSGWLPPSLMHRVHITIAWVNRMRRWAPVTALSSEQVRFDMQALANPEISGVMYQQGTLAGYEVREYLLGKWSRTCIYCDATDRPLQVEHLTARARNGSNRIGNLGLACGECNQDKGALDVREYVKDPKRLARILATASRPLNDAAAVNATRRALSSALRTTGLPLELASGGQTKFNRVTHNIPKTHALDAVCVGEVAALRGWQRPSLTIRATGRGSYQRTRLTRHGFPRGYLMRQKQVQGFQTGDHVRADVPHGKKAGVHTGRVAVRATGSFNIQTAMTVVQGISHRYCKLVQRGDGYAYSLQPNDSFRQDGGG

SEQ ID NO: 4176 - protein, 420 aa, unidentified; identical to SEQ ID NO: 3288

SEQ ID NO: 4177 - protein, 462 aa, unidentified
VLCAWKPWNNIGEGHLTDFPVWAACSFVAATQKEIQMVYVQNRSGQPLMPTEDHRKVRLLLKNGFAVVVKRTPFTIRLATGSKNYVQPVILGVDSGSRTVGLSASTKQRELFAAEVTLRNDVVNNLSARREFRRARRHRKTRYRKPRFHNRVHSKQKGWLAPSVEVKIQEHITVIKRVCRILPVSRVVVETAEFDLQLLKAIADGRPVPQGKDYQKGEQAGFYNVRQYVLWRDGYRCQCCKEHGKGIKLHIHHKESRNTGGDAPENLVTLCEVCHRKLHQGLIAEQGLKKRSRMSTRDAAFMGIMRRTLTERLYRELKVPVAGTKGYITKYTSVELLHLPKSHAGDALAIAQGRHGFGIRQATFIKPAERIYQIKPVRHHNRQLHKATILKGGKRKLNQAPKYVKGFQLFDKVLYQGQECFIWGRRTTGSFLLKLLDGTKVKDGVSCKHLKLLERSSQYLAA

SEQ ID NO: 4178 - protein, 466 aa, unidentified
MKILVIGRNGLGLAPTTPRKARILLKEKRAEVAYRQPFTIRLKYKTGCAHPKMCLGEDTGSQHIGFAILTEKGQVLDKTEYELRSTMEKRSLLETRKEYRRGRRYRKVRYRHSKFHPTTKRLYVEKPIKYNKHTTHWKKQTNSFDSSRPEGWLPPSIQSKLDHHIRLTSRYKEALPPDTMIRIEVGRFDVAHMKDPTINGKMYQQGPMYESENVKAYVFARDSYTCKCCKAKAGSIRKDGTQVKLKAHHIDFRSKGATDNPERMVSVCDRCHTTAAHQLGGILYQWMIEGKKFSRGYRDPAFMNILRRRMWKAFPEAAFTYGNITAADRKGLLIEKSHANDAVAIAAHGMELIRNSTETTFYKQLRKQKRSLHEATPRKGRREPNRTAKRNRKNTCVVKGWYLNDKVTVFGKTGWISGFSGKSSVYIRDCENEYITVLGKNYKLVPISQIKMITHCNNWAVYTKIA

SEQ ID NO: 4179 - protein, 342 aa, Methanosarcina sp.
VFVLNKNQKPLMPTNPAKARILLKAGKAKVVSRIPFTIKLTYNSKGYTQPVVAGMDSGSKKIGCAAVGNGKVLYQSEAEIRQDVSAKMKQRAMYRRTRRSRKTRYRPARFDNRRNSLREGRIPPSIRSKLESHFREKKFVESILPVTKWGVELASFDIHKITDPSVSGIEHQNGDQKGFYNLKAYILNRDKHTCQHCKGKSKDPKLHCHHIIFRSQKGTDTPKNLICLCNTCHDALHRGEFQLSVKRSKTKHATEIGIIKSQIKKSDWNFIETFGYETKYKREQMLELPKTHYFDAVSICCNDQKVELEDIFYLKKHVSKGDYQQRTGKDQKRRFQLVNCLG

SEQ ID NO: 4180 - protein, 448 aa, unidentified
MVYVLNIEGKPLMPTSNAKARKLLKQKKAKVGELKPFTIQLTYEIEKEYKQEITLGIDSGYNNIGFSALTNNKELIVGELKLLQGMKERLLEKSRYRTIRRNRLRYRKPRWNNRIKTKPKGWLAPSLRHKLYSHIKFIDYLYSILPINKTIVEVANFDIQKMKDDDISGIEYQQGDMMGFWNTREYVLHRDNHKCQNPNCKNKSKKQILEVHHIKYKSKGGTDRPNNLITLCDKCHTSPNHRKGNFLYEWCQDGKKVRGFKDATFMSMIRWYLVNKLKEKYDNIFFTYGYITKNHRIINDIKKSHYNDAFAIAKGIGQIRNESIFNINQVRRNNRSLEKFYDSKYIDIRTGKKVSGGDLNNGRRTRNKNLNSENLHQYRGEKIQKGQRRIRKGKYFYQPNDLVKYEGKIYTVRGSQNGGEYIALREIKKVPRVKVLTPYKFQRGLIWC

SEQ ID NO: 4181 - protein, 443 aa, Bacillus sp.
MVEENMTCFMQRKGENPMVFVLDTNKRPLAPCHEAVARKLLKQGKAAIYRRFPFTIILKKSVDESEIKATYRLKIDYGSRHTGLAILRGQEVVWLGQLDHRTDIKERIDKRRAFRRARRNRKTRYRKPRFLNRKRKEGWLPSSLESRVQNIQTWVSRLKKLCPIGYISYENAKFDTQLMRNPEINGVEYQQGTLQGYEVREYLLEKFGRKCCYCGKENVPLEVEHIIPKSRGGTDRVDNLCLACHDCNQRKGSKTAEEFGYPHIQKQVKESLKDTSAINSTRWKAYEVLKQTGLDVECGTGARTKMNRIRLDLPKTHYFDACCVGESTTNHLYFKTKEVLFIKAKGRGSRSRTNLDRYGFPRGYLARQKFFFGFQTGDMVKAVVPRGKYQGVWFGEVACRKTGSFDIKGKDGKRIAQGINYRYVQVIQRFDGYAYGKGVAELA

SEQ ID NO: 4182 - protein, 433 aa, unidentified
MQNRVFVINKHGKALMPCKPRKARILLRDGKAKVLKKEPFTIQLLYGSSGYKQDISVGIDSGQRHIGLAVTSQDKVLFQGEVELRQDVKKLIDTRRTYRRSRRNRKTRYRKARFLNRIAKKKDNWLPPSVASKVNHNINWIKRLLSVLPKADLHIEVGKFDMQKMKNPAINGEGYQQGDLYGYQTVKQFVLARDNYTCQVCKKKGGKLKIHHIIYRSLGGTNTVDNLITVCSNCHTTKNHQTGILAKWCKDKKKVNKPYKGATFMNILRRRLFTSFPQARFQYGAWTTLQRADLDLTKSHYNDAVAISGIRKIKAKPTSIMMFKQFRKKKRSLHEATARKGRKIPNITSKRNAKNTRCAKGFWLNDYVKIKDSNKKGYISGFSQSSCYIKDIFGNYLTTSDRYKQVALSKLDRLSHYNNWSKQEINENMYQMN

SEQ ID NO: 4183 - protein, 446 aa, unidentified
MQKLQVKLKNVPKGVYQAPCSTSLQLNKEETLSVAGIVRTCNNLDGNLLQQAGGLKAAVFVLSSNGKPLMPCTSSKARKLLQNRKAKVVKLYPFTIRLNFDCENQTQDISMGIDAGYANIGFSCITTKSELVSGTIILDNKTSERLTERRMYRRGRRNKLWYREPRFDNRKRKEGSLPPSVQRRYDTNLKIINLMKSLMPITKVTVEVANFDIQKIENEAIEGVGYQQGEMLGYQNMRSYLMAREKGVCQLCGKEFEKGNPSHIHHIIERANGGTDRAKNLAILHEKCHDKLHKKGLKLKPNKTYKPNTFMSIIRNRFWNDIPNINVTYGYETFVKRIELRLEKTHYTDAFVIAGGEYQQRCKPIGIKQKHQHNRVLQVNRKGFAPAIRKQRYKIQPKDLVWINGKREVAVGVHCKGAAVIIERNKKSFLIKKVEKIYNFGTFAYS

SEQ ID NO: 4184 - protein, 408 aa, unidentified
MVYVQDIDGKPMMPTTRHGKVRQLLKDKKAVVINTCPFTIKLMYKTSDYKQEIVLGVDAGTKHVGLSATTKSKELYSSEVILRSDIVDLLSTRRELRRTRRNRLRYRKPRFDNRIKSKRTGWVAPSVRHRIDAHIRVIDNVCSILSISRIIVEVAQFDTQKIKNPNISGNEYQEGNQLGFWNVREYVLTRDGHKCQHCKGKSKDPILNVHHIESRKTGGDSPSNLITLCETCHKEYHKGKIDLRVKRGKSLRDAAVMGIMKWKLYEELRSRYDNVSMTFGYITKYNRIKYGIEKSHISDAFVISKNFNALMLEYHYKVRLIRRHNRQIHKQKVLKGGVKKPNQSSFEVFGFRLFDRVMFEGNCYFIFGRRKSGSFNIRDIDGGNQRDITYKKLKLLRCKRFMIQKETN

SEQ ID NO: 4185 - protein, 431 aa, unidentified
MPDKVYVISRLGHPLMPCSPAKARHLLDDGKAKVVKRTPFTIKLLYGSTEYTQPVILGVDAGSKTIGLSASTTKEELFAAEVMPRNDVVENLSTRREFRRARRNRTTRYRKSRFNNRVHSKNNGWLAPSVEVKIQEHITSIKRVCAILPISKIVVETAEFDLQLLKAVQDGKPVPEGEDYQKGEMYGSYDVRQYVLWRDNYTCTCCGVKGTDKKPVKLHVHHFESRKHGGNAPDNYGTLCEDCHKKLHLGIITDISLKTRKRPSTRGAAFMGIMRKTLMQRLITGLSIPVAETKGYITKAAREEILKLPKTHTNDALAIAQGRHGFGIREQAYVKPTNRIYTVRPVRHHNRQLHKATMLKGGIRKLNQASKYIFGFRLYDKVLYQGGECFVWGRRRSGSFLLRTIDGTKVKDGVGYRNLTLLERSTNYLIA

SEQ ID NO: 4186 - protein, 431 aa, unidentified
MSNFVFVLDTNKQPLDPVHPGKARRLLSRGNAAVFRRYPFTIILKEACPDIPMQDLELKLDPGSRVTGIAIVQGTKVIFGAELEHRGQQIKDALLSRRQLRRSRRNRKTRYRQARFLNRTRPKGWLPPSLQHRVDTTMTWVNRFRKLAPIARISQELVRFDLQLMQNPEISGIEYQQGELQGYEVREYLLEKWNRKCAYCGAKNVALEVDHIHPKSKGGTDQVSNLTLACHSCNQSKSNRDIRDFLSSKPDVLNRILKQSQLPLKDAAAVNSTQWALFNALKQTGLPVATGTGGQTKFNRTRLDLPKTHWLDAASVGEIDSLKVLTTKPLLIAAKGHGTRQMCGTDKFGFPKRHRSRVQTHKGFQTGDIITATVTKGKKIGSYVGRVLCRASGSFDVTTQSGRVSGISHRYCQPIHKRDGYAYAFSHTIGD

SEQ ID NO: 4187 - protein, 442 aa, unidentified; identical to SEQ ID NO: 2637

SEQ ID NO: 4188 - protein, 414 aa, unidentified
MPCSPAKARLLLKEKKAIVKRRTPFTIQLTIATGESKQPVTLGVDAGYKHVGLSASTEKAELYASEVELRQDVSDLLSARRALRQSRRNRKTRYRAPRFNNRLRTKRKGWLAPSVENRINAHLSRIEAVLRLLPVTKITVETASFDMQLLKNPDIAGKEYQEGEQLGFWNVREYVLFRDRHVCQHCYGRSKDPVLNVHHLESRRTGGDSPGNLITLCETCHKALHRGDITLKAKRGKSFRAEAFMGIMRWEVHNRLRALHPGIEVSNTYGYRTKHARIANGIAKSHCADAFCIAGNLGAERLCEFFFQKQTRRNNRQIHKLSILKGGIRKRNQAPFEVKGFRLFDKVACQGEEGFIFGRRSSGFFDVRKLDGTRISAGISCKKLHLLEKRRTYLTEIRKEEALPPLPEGRGLRA

SEQ ID NO: 4189 - protein, 319 aa, unidentified
APRFDNRIRTKRKGWLAPSVENRINAHLSRIKAVLRLLPITKITVETASFDMQRLKNPDISGKEYQEGEQLGFWNVREYVLFRDGHVCRHCHGRSKDPVLNVHHLESRRTGSDSPDNLITLCETCHKALHRGEITLKAKRGQSFRAQAFMGIMRREVLNRLKASYPELKVHETYGYLTKHARIANGIVKSHGADAFCIAGNLGAERLGEFFFQKQTRRNNRQIHKLSILKGGIRKRNQAPFEAKGFRLFDKVACQGEEGFIFGRRSSGSFDVRKLDGTRISAGISCKKLRLLEKRRTYLTEIRKEEALPPLPEGRGLRA

SEQ ID NO: 4190 - protein, 459 aa, Candidatus Methanoperedens sp.
  source 1..459: note = BLZ1
MQRLEERDTYTPPNASQVRCNCDPALNREETLSVPGLKTSSNNSDVNQLPDCKEKEGQNLRVSVHVLNMRGKPLMPTTPRKARKLLESGKAKVVQRTPFTIRLNYTTGETRQPIWFGIDPNYTKIGFSAVTDKRELVSGEVTLRDDIPEKLTERKQYRRNRRSKLEYRKPRFQNRKREEKFPQSIQQKLDIIVNFVDQIKRILPITSVFVEVASFDTQKMVNPEISGVEYQQGELEGYEIREYLLEKYNRTCAYCGKSNVPLQVEHIIPTSRGGSDRVSNLTIACRKCNQEKGDKTAEEFGHPEVQERAKEPLKAAAFMNAIRWKLVRLLGCEHTFGYITKHNRIKLNLKKSHVNDAFVIAGGTGQRARPYQGTQTRRNNRALQTNRKGFKPSIRKKRYPLGPKDLVFLKLSSVICTVKGVFNYGNWVRIVDPIGNIINANIKNVELIKYGKGLQLRFA

SEQ ID NO: 4191 - protein, 414 aa, unidentified
MPCSPAKARLLLKEKKAIVKRRTPFTIQLTIATGETKQPVSLGVDAGYKHVGLSASTEKAELYASEVELRQDITDLLSARRALRQSRRNRKTRYRAPRFDNRISTKRKGWLAPSVENRINAHLSRIEAVLRLLPVTKITVETASFDMQLLKNPDIAGKEYQEGEQLGFWNVREYVLFRDGHVCQHCHGRSKDPVLNVHHLESRRTGGDSPGNLITLCETCHKALHHGEITLKTKRGQSFRAEAFMGIMRWEVLNRLKVSHPELEVNNTYGYRTKHVRIANGIAKSHSADTFCIAGNLGAERLGEFFFQKQTRRNNRQIHKLSILKGGIRKRNQAPFEVKGFRLFDKVACQGEEGFIFGRRSSGSFDVRKLDGTRISAGISYKKLRLLEKRQTYLTEIRKEEALPPLPEGRDLRA

SEQ ID NO: 4192 - protein, 323 aa, Oscillatoria sp.
VSKVFVLDTKSQPLNPIHPGRARMLLSQGMAAVFRRFPFTLILKEEVSNPAVEPLRIKIDPGAKTTGLALVNNKTGEVVWVAELQHRGFQIRDALTSRRQLRRSRRSRKTRYRKPRFLNRTRPKGWLPPSLNSRVANILTWVKRLSSLCQINAISQELVRFDTQQMENPGISGIAYQQGTLLGYEVREFLLSKWNRTCAYCGAKDTKLEIEHIHPRSKGGSNRVSNLCLACVPCNREKGNQNIKDFLKGKPDLIKRILAQAKRPLANTAAVNTTRWNLYFHLKKMWLPVEVEGGEPSTTAPSEAWTRLITGTRPALENPLPSS

SEQ ID NO: 4193 - protein, 420 aa, unidentified
MQYVYVLNKHGEPLMPCSPRKARLLLKQKKACVIKRTPFTVKLLYGSTGYKQPVTLGVDAGSKHIGISATTEKHELYREEATPRNDVVDLLSARRAFRRSRRNRKTRYRAPRFDNRVHSKHKGWLAPSVEVKIQEHITLVEHVCRILPVTLVRVETAEFDTQRLKAMLEGKPLPVGTDYQLGEMYDEYNVRQYVLKRDNYTCQCCGAHSTKTKGVKLHVHHIETRRTGGNAPNNLITLCTACHKALHAGKVTLDGKKRGKPLKDAAFMGIMRKTLMERLRKELKIPVQGTYGYITKCLREKNGIPKSHTNDARCISKNPLAIPCDTCYYTKAVRHHNRQLHKATILKGGIRKANQAPYIVKGYRLWDKVSCNGTECFITGRRTSGYFALKKLDGTVVSNSISYKKMRLLEAATNYITERK

SEQ ID NO: 4194 - protein, 512 aa, Haloactinospora sp.
LATFHTGPQTHQAVPPQRPALEPDPADTPGNRDETGVGRHDAPGVEHVREETPGAAPGAGGATPAPSGVGEQPRERHPCVMVLDAHHRPLQPCHPARARTLLAKGRAVVHRRVPFTIRLKDRTVAESDVDGVEVGVDPGSKHTGLAVFTAQGGQRRGRFALRLDHRGAQIRKKMGQRSAYRSRRRTANVRYRAPRFNNRARAEEWLPPSLRHRVDTTVSWVVRLSRWAPVRQVHVERVAFDTHALSAGHPLEGREYQRGTLHGYEVREYLLAKFGRACVYCWAVHTPLNVDHVHPKSRGGSDRVSNLVLACIRCNQTKGEKPVEEFAPAAAPHILARAKTPLRDAAAVQSSRWALWRALDARLPVRTGSGGRTKYNRTRNHLPKTHTLDALCVGETGAVAEVVNRMLVAACTGRGTHARTRCDKHGFPRLRLPRTKTFFGYQTGDLVRAVVPAGKKAGTHSGRVAVRAKGVFNITTVHGTAKDIHHRYVRLLQRADGYAYTMRKEEAASSPA

SEQ ID NO: 4195 - protein, 421 aa, unidentified
MIYVRSKEGKALMPSERGGRIGYLLRHGKAHVVSRVPFVVQLDYESTTYTQDVSLGIDAGSKHIGVSASSERKELLAAQVELRSDVVNLLSTRRELRQTRRNRKTRYREQRFYNRKKKDGWLTPSVEQKVESHLKVIRLAHKLLPITKTTIEVAQFDAQKIKNPDIKGEEYQQGEQMGFWNVREYVLARDGHKCIHCKGKSKDPILNVHHLESRKVGGNSPSNLIVLCETCHKAYHRGEFDLKIKRGTTLRDAAVMNIMRWSVYERANAEFGNVYLTYGYITKHTRIENGIAKTHAADAFCIAKNVNAMRLSFFFMCRCIPRHTRVLHVANPKKGGIRRSTIASHKIGKSRFQRFDMVRWKGKECFIFGSTNGRPILRYIEGIQVANQPSVNIKTIKFLKRIRYNILVEERTSESWIENES

SEQ ID NO: 4196 - protein, 456 aa, Halomonas sp.; identical to SEQ ID NO: 2773

SEQ ID NO: 4197 - protein, 451 aa, unidentified
VLCDKPLDNSVEENFTWETSELEKAKELVLSYVFLVDANKQPLNPLHPARARRLLTAGKAVALMKHYPFTLMLKRMVEKPTLQPLRLKLDPGSKTTGVALVNDDSGEVVFAAELSHRGQAIKAALDDRRVVRRSRRQRKTRYRKARWANRKNKQKGWLPPSLESRIANVLTWVRRLSCSAPISAISMELVRFDMQLMENAEISGVEYQQGALMGYELREYLLEKWNRHCSYCGAKDIPLQIEHIHPRAHGGTNRVSNLCLACEKCNTAKGSKDIAVFLKKKPDLLKRIQAQARAPLKDAAAVNATRWALLERLKTTGLSVECGTGGLTKFNRAKRNLPKAHWLDAACVGKSTPETLVMTGIRPLLIKATGHGRRQMCVTDAYGFPKQHKERKGSYLGYRTGDMVKAITPKGTFHGRIAIRYRPSFHLGKEDIHPKYMRHVHRADGYEYRSA

SEQ ID NO: 4198 - protein, 420 aa, unidentified
MQYVYVLNKHGEPLMPCSPRKARLLLKQKKACVIKRTPFTVKLLHGSAGYKQPVTLGVDAGSKHIGISATTEKHELYREEATPRNDVVDLLSARRAFRRSRRNRKTRYRAPRFNNRVHSKHKGWLAPSVEVKIQEHITLIKHVFRILPVTLVRVETAEFDTQRLKAMLEGKPLPVGTDYQLGEMYDEYNVRQYVLKRDNYTCQCCGAHSTKTKGVKLHVHHIETRRTGGNAPNNLITLCKACHKALHAEKVTLDGKKRGKPLKDAAFMGIMRKTLMERLRKELKIPVQGTYGYITKYLREKNGIPKSHTNDARCISKNPLAIPCDTCYYTKAVRHHNRQLYRATILKGGIRKANQAPYIVKGYRLWDKVAYNGTECFITGRRTSGYFALKELDGTVVSNSISYKKLRLLEPATNYLIERM

SEQ ID NO: 4199 - protein, 512 aa, unidentified; identical to SEQ ID NO: 3720

SEQ ID NO: 4200 - protein, 431 aa, unidentified
MDAWDIIVVLNKRGKPLMPCSPAKARLLLKEKKAIVKRRTPFTIQLTIATGESKQPVTLGVDAGYKHVGLSASTEKAELYASEVELRQDVSDLLSARRALRQSRRNRKTRYRAPRFNNRLRTKRKGWLAPSVENRINAHLSRIEAVLRLLPVTKISVETASFDMQLLKNPDIAGKEYPEGEQLGFWNVREYVLFRDRHVCQHCYGRSKDPVLNVHHLESRRTGGDSPGNLITLCETCHKALHRGDITLKAKRGKSFRAEAFMGIMRWEVHNRLRALHPGIEVSNTYGYRTKHARIANGIAKSHCADAFCIAGNLGAERLCEFFFQKQTRRNHRQIHKLSILKGGIRKRNQAPFEVKGFRLFDKVACQGEEGFIFGRRSSGFFDVRKLDGTRISAGISCKKLHLLEKRRTYLTEIRKEEALPPLPEGRGLRA

SEQ ID NO: 4201 - protein, 471 aa, Caldicellulosiruptor sp.; identical to SEQ ID NO: 3375

SEQ ID NO: 4202 - protein, 414 aa, unidentified
MPCSPAKARLLLKEKKAIVVRRTPFTIQLTIATGESKQPVSLGVDAGYKHVGLSASTEKAELYASEVELRKDITDLLSARRALRQSRRNRKTRYRAPRFDNRIRTKRKGWLAPSVENRINAHLSRIEAVLRLLPITKITVETASFDMQRLKNPDISGKEYQEGEQLGFWNVREYVLFRDGHVCRHCHGRSKDPVLNVHHLESRRPGSDSPDNLITLCETCHKALHRGEITLKAKRGQSFRAQAFMGIMRREVLNRLKASYPELKVHETYGYLTKNARIANGIVKSHGADAFGIAGNLGAERLGEFFFQKQTRRNNRQIHKLSILKGGIRKRNQAPFEAKGFRLFDKVACQGEEGFIFGRRSSGSFDVRKLDGTRISAGISCKKLRLLEKRRTYLTEIRKEEALPPLPEGRGLRA

SEQ ID NO: 4203 - protein, 429 aa, Ktedonobacter sp.
LSNVFVIDSDYKPLNPVHPGHARRLLRQGKAAVFRRYPFTIVLKRVVEQPEVQPLRLKLDPGSKTTGIALVNDTNGKIVFAAELSHRGHAIKDSLDSRRASRQGRRQRKTRYRKPRFDNRRRKKGWLPPSLESRLANILTWVARLCRYAPIAALSQELVKFDMQLMENPDIAGVEYQQGTLQGYEVREYLLEKWERTCAYCGKQDVPLQVEHIHPRARSGTNRMSNLTLACEACNTAKGTQEIEVFLKKKPEVLKRLLAQVKKPLKDASAVNSTRCALLERLKALGLPVEWGSGGLTKWNRTTRGLPKTHWLDAACVGKSTPDVLLQKGVIPLRIKATGHGRRQMCVPDKYGFPKQHKERKKTFLGYQTGDLVKAITPKGTFEGRIAIRHRPSFRLEKVDIHPKYMRCVQRSDGYEYTQKGVRHAPPHG

SEQ ID NO: 4204 - protein, 442 aa, Blautia sp.
MVTVQQSTHHLPFGRVFIRRNLFMVYVISQDGKPLMPCSDPIARLLLKQGKAKVKKREPFTIKLTYETTNHTQGLTLGVDTGSGTIGTAVSKDNGDIVYMSEVVVRNDITDKMTQRAKYRRNRRNRKTRYRKARWLNRASSIKKDRFSPTMQSKLHSHVREIEYIQSILPVTEMVFETGQFDMHLMKNPSLANPKVRPWGYQKGANYGFENTKAMVLNRDNYTCQCCKGKHKDSKLEVHHIVFRSQGGSDEESNLLTLCHTCHKDLHSGKINPKLSGKVKGNLKYATQMNSIRKQLFRCYPNAIETFGYVTKANRLHLGVDKEHYYDACTIATQGNAFNVKSNLYKKKCVSDGDFQKTKGIHSEQPIVTDKICGFRKFDKVRYFGNDYFIKGRMSTGYAILMDIDGNKIDFSTMPRGYKTPKLSNCKRITARSTVMTQVKVV

SEQ ID NO: 4205 - protein, 450 aa, unidentified
MVYVINFEGKPLMPTTNAKARKLLKQKKATVKRVNPFIIQLLYKTDTEYIQTITLGIDSGYLNIGFSAITDSKELIVGEVKLLQGIKDRLLEKSQYRRIRRQRLRYRKPRWNNRKIKQGWLAPSLQHKLNTHLKFIDYLNSILPIRNIVIEVANFDIQKIKNPDISGVEYQQGEQMGFWNVREYVFHRDGHKCQNPNCKNKSKEQILEIHHIKYKSEGGSDAPSNLITLCNKCHTSPNHKKGKFLYDWCENGKKVRGFRDATFMSMIRWYLLEQLKEKYTNIKATYGYLTKNHRIEHGIEKSHFNDAFAIAKGVNQVRNLEVFKVEQSRLNNRSLEKFYDAKYIDNRTGEKVSASELNCGRRTRNKNLNSENLRMFRGQKISKGQRRIRKQKSLYQPNDLIKYNGNVYTVKGSQNEGKYIALKEIKKVPNVKLIKPYIFKKGLNWSHGLC

SEQ ID NO: 4206 - protein, 426 aa, unidentified
MVFVLDTKKRPLAPCHEAVARKLLKQGKAAIYKRYPFTIILKEIVDNFRPKTPYRLKIDYGSKHTGLVIVRGEEVLWLAQLDHRTDIKERLDKRLAFRRARRKRKTRYRKPRFLNRRRKDWWLPPSLESRVQNIQTWVERLRKICPIEHISYENAKFDTQLMRNPEINGVEYQQGTLQGYEVREYLLEKFGRKCCYCGKEGVPLEVEHIIPKSRGGTDRIDNLCLACRDCNQRKGSQAAEEFGYPHIQKQVKESLKDASAINSTRWKVYEVLKQTGLDVECGTGARTKMNRIRLDLPKTHYFDACCVGESTPNHLYFKTKEVLFIRAKGRGSRSRTNLDRYGFPRGYLARQKFFFGFQTGDMVKVVIPRGKYKGVWFGEVACRKTGSFDIKGKDGKRIAQGINYRYVQVIQRFDGYAYGKVVAELA

SEQ ID NO: 4207 - protein, 424 aa, Bacillus sp.; identical to SEQ ID NO: 4001

SEQ ID NO: 4208 - protein, 413 aa, Clostridium sp.
MIKNNNYAFVIDNKGNKLSPCKINKAWYLIRKNKAIQVNKYPMVIQLKREIKDKEDESEFVCGIDDGSLHVGIGIIQKCKTKNKVIFKGTIEQRQDVKHLMDIRRDYRRYHRYHKRYRPKKFNNRANSKRKNRIAPSIKQKKDAILRVINKLNKYINITEYHLEDVAIDIRALIEGKKLYKWQYQKSNRLDENIRKSVILRDGCECMECGKSSCVLEVHHVVPRRLHGNNNLSNLITLCSECHQKTEGKEELFIKHYQDMIKGKNIRFDYAQHVMQGKTYLRKELSKLAKLILTTGGDTANKRIDWNIEKNHSNDALVITDLKINSDDCNIKNWAIKLMRRKSKANIENLQGFKHRDLIKYTKKNGENYIGYITALYPKKKQCNITTIEERILKRYGIKSCKLLWRFNKIYWF

SEQ ID NO: 4209 - protein, 419 aa, unidentified
MYVYVLNKHGEPLMPCSSRKARVLLDNKKACVIKRTPFTIKLLHGSAGYKQPITLGVDAGSKHVGLSASTETHELYREEFTPRNDVVDLLSTRREFRRARRNRKTRHRAPRFDNRVHSKHKGWLAPSVEVKIQEHITVIKHVCQIMPVSLIRVETAEFDTQRLKAMLEGKPLPVGTDYQLGEMYDEYNVRQYVLKRDNYTCQCCGAHATKTKQVKLHVHHLESRKTGGNAPSNLIALCLTCHKAIHEGKKTLDTKKRGKPLRDAAFMGIMRKTLLMRLRKKLSIPVQQTYGYITKMLREKNNLPKSHMNDALCIAKHPKAAPCENCYRSKVVRHHNRQIHKAKILKGGIRKNNQASYIVKGFRLWDKVLCNGQECFISGRRATGYFALKKLDGTVVTNSVSYQKLRLLETAKNYLRERM

SEQ ID NO: 4210 - protein, 433 aa, Dactylococcopsis sp.
MQNYIFQLDSNKQPLDMIHPAKARRLQSQGKAATFRMYPYTIIRNISVKSPNTKSYILKIDPGATWTGFAIQCGEEIIFRMELKHRGGLIKKSLEQRADFRKGRRSRNLRYRKKRFNRKKPEGWLAPSLRHRLQTVETWVKKFLKLCPITCIEIEQVRFDLQKLENPEISGVQYQQGELQGYEIREYLLEKWGRQCVYCEKQDTPLQIEHIKPKSKGGSNRIGNLTLSCPECNQNKGNQDVEDFLSGKPDLLKRVLAEAPKPLDSGSAVNSTRYAIVEMAKNLCDHVKCWTGGRTKYNRVNQELPKSHSIDAACVGESGSKIKLLVSQPLIVESKGHGTKQARRANQQGFPALNKDNQPIKPKTKYTHCEAGDMIKFRLEKNRKTVRAGIYKGRVKTPTPKGFEVKIDGCRVSQKMEYLIRFMHRNDGYAYSF

SEQ ID NO: 4211 - protein, 417 aa, unidentified
MVYVINKQGQALMPTERFGKVRRLLKNSLAHVVCRIPFTIQLDYDTTDYTQPVSLGVDAGSKHIGISATTSEKELYAADVELRNDIVDKLSTRRELRRTRRGRLRYRKARFNNRVSSKRKGWLAPSVENKIQTHLTVVEKIHKFLPITNIVVETASFDIQKINNPSISSSEYQQGEQLDFFNVREYVLFRDNHICQHCKGKSKDKVLNVHHIESRKTGGDSPKNLITLCETCHKAYHRGEFELNVKRGKSFRDAAFMGIMRWSFYDRLKNIYPDVSMTFGYITKNTRITNNLPKDHYVDARCISGNPTAKPLGYYFYQKKVRCQNRQIHKANFLKGGRKKLNQAPFLVKGFRLFDLVEYKKDLYYIFGRRSNGSFDIRKLDGTKVNKGSINCKHLRLIDKRRSILTEKRTQGAYPCE

SEQ ID NO: 4212 - protein, 348 aa, Methanosarcina sp.
MPPQFQALRMPVKQSWEVGTVLASYKPFHIRSRGSRKTRYRPARFNNRGNSRREGRLAPSIKSKLESHFREKRFVESLLLVTKWKVELASFDIHKIKNPEVSGTGYQEGDLKGFYNVKAYVLHRDGYTCQHCRGKSKDSRLHCHHIVFRSKQGSDAPENLITLCETCHIALHAGEFELSGRRSNTKHATEVGIVKSQIKKSDWSFEEVFGYETKFRREQVLGLEKMHYFDALAICCGDKQKVEPDDTVYFKKHVPAGDYQQRKGKRSEKKIPTGKLFGLRKFDLVKTEKGIGIVRGKRSSGYFSISDLFGNKISDSVNIKKNSKRLRARTSTLIQKMELAECTHSSPV

SEQ ID NO: 4213 - protein, 427 aa, unidentified; identical to SEQ ID NO: 2799

SEQ ID NO: 4214 - protein, 490 aa, unidentified; identical to SEQ ID NO: 3566

SEQ ID NO: 4215 - protein, 424 aa, Lentibacillus sp.; identical to SEQ ID NO: 3608

SEQ ID NO: 4216 - protein, 512 aa, unidentified
MSTVYVLNKDGKPLMPTTRGGHVRHLLKEQKARVVRTKPFTIQLLYETDDVVQLLYLGIDPGRTNIGVAVVKTDGTAVFTAHLETRNKEIPKLMKKRKNSRRARRTNGRRCRRQRRAKANGTISKKCVKQDTAQNGSVSKRAKKIGVIKRHLPGCEKEVLCIGIKNKEAKFSNRVRPEGWLTPTANQLLQTHINLVKKIQKFLPISDVVLEVNKFAFMQLNNPNIQKWQYQQGPLYQKANLEEAVSEMQEHHCLFCKKPIAHYHHVVPQSENGSDTIGNIVGLCTKHHDLVHKDTEWQKKLAKKKTGLNKKYGALSVLNQIIPALTKELSSLFPKHFFATNGKSTYDYRAAHGVSKDHWLDAYCIACSVLADDVCDNNINSHVPYELKQFRRHDRRALHKENMSRVYTLNGKSVATNRHKATEQTTDSLEEFRQCQPDDVCKLKVKEHYPEYRNPKRNFPGCVFLVGKHTHVMQGTSGSHNGKADGYYDTNGNSYSSGECKFVAKNEGIVFA

SEQ ID NO: 4217 - protein, 517 aa, unidentified
MVYVLDMEGKPLMPTTRHGWVRRALKSGRAKAVQTLPFTIRLQYSLDDSALQDITLGIDPGRTNIGVAAVREDGTCLYAAHCETRNRQVRKQMDDRRMHRQASRRGERLRRKRRAKRNGTLKQVTFSMTAMGPRPNINNRGEFFRMLPGCKEVSVYKDIRNTEARFQNRARPEGWLSPTAGHLLRTHLNLVRKIQRILPVSRVSLELNRFSFMEMEAGGKLPHWAYQCGPLYGKGGVQDAISEMQDGKCLLCGKSPIDHCHHLTQRAWGGTDRLANLVGLCSGCHKKIHTDMAASRKLEAKAGRRNKGFRALSTLNQIIPSLADSLEGMFGNRFYIVNGWDTKQFREDHGIEKTHEQDAYCIACSTMPGVRNVSPVVATFQVRQYRRHDRALVKRQTERCYYLGKTKVAVNRRKRMDQKTDSLEDWYQDMRTEYGDKTADGMRSRLKVKKSQRSYNNPGRLLPGAKFHYGGKTYVMESQMTNGQYYRAVGQGKKNFPAAKSRILCRNQGLVTVGVSY

SEQ ID NO: 4218 - protein, 419 aa, unidentified
MVYVISQDSKPLMPCSNPIARLLLKQGKAKVKKREPFTIKLIYETTDYTQDLTLGVDTGSGTIGTAVSKDNGDIVYMSEVVVRNDITDKMTQRAKYRRNRRNRKTRYRKARWLNRSNSIKKDRFSPTMQSKLHSHVREIEYIQSILPITEMVFETGQFDMHLMKNPSLANPKVRPWGYQKGTNYGFENTKAMVLNRDNYTCQCCKGKHKDSKLEVHHIVFRSQGGSDEESNLITLCHTCHKDLHSGKINLKLSGKVKGNLKYATQMNSIRKQLFRLYPNAIETFGYVTKANRLHLGVDKEHYYDACTIATQGNAFNVKSNLYKKKCVSDGDFQKTKGICSEQPIVTDKICGFRKFDKVRYFGKDYFIKGRMSAGYAILMDIDGNKIDFSTMPRGYKTPKLSNCKRITARSTVMTQVKVV

SEQ ID NO: 4219 - protein, 456 aa, unidentified
MNTCVCVLSNNGERLMPTFRLGKVRHLLKDGKAKIVKHHPFTIQLLYNSKTNIQPIEICEDVGYNYIGISVKSESYEYVSAQYDTLQDEKEHHDDCRKMRRARRNRLRYRKPRFDNRKRSEGWLAPSLEHKKQLNISLVERYVSVIPITHATVEVGSFDTMLLQAIQKGETKPEGADYQEGPRYNLATLREAVFYRDNYTCQVCGRKITDGAILHMHHMFYWKGRHGYKLDELVTACEKCHTPANHQKGGKLFGFGEDKEFADLSGAAFMNAVRWQIVNALHTTYSKEFVTITYGAMTKEKRIALQLEKSHNNDAYAMGDFHPVHRCGFRHYQKRRRNNRVLEKFYDATYIDARTGNKAKGKELFNGRISRNHKKDSENLHKYRSEKVSKGRRSIRKRRYAIQPYDTVRLKGKTYITSGCHNKGTRLLIPVNGKSKSVTISKVQVVCHAGPWIQII

SEQ ID NO: 4220 - protein, 421 aa, unidentified
MVYVISISGRPLMPTAHCGKVKHLLKDGKAKVVHREPFTIQLLYETTEYTQTTTLGVDTGSGTFGAAVVTDDSHKVLYMSEVEVRNDISKKMKQRSKYRRNRRYRKTRYRKARFDNRKNSIKDNRFSPTMQSKINAHEREIKFIKSILPVTHLVLETGTFDVALMNNPTLANPKIARWGYQKGPNYGFANTKAMVKARDGYTCAICKGKHKDRRLDVHHIIFRSQGGSDEAKNLITLCHTCHKKLHDGEIIYSGKGKRKGSLSFATQMNSIRKQLLARHPEAIETFGYITSENCQLYGLPKTHCIDAVVIASDVYKPIFATQDVFYKRCIAKGTYQCTKGVRSEKSMPKTKIAGFKQFDKVKYQNNLYFIKGRMSVGYAVLSDIYGTKIDFPHVPKLKEMQRIAARKSIICITAKIDLKVS

SEQ ID NO: 4221 - protein, 419 aa, Bacillus sp.
LFVYMINKHGKPLMPCSSRKARLLLKQKKAKVVRRTPFTIQLLYGSSGYKQPVSLGVDMGTRHVGISATTEKDVLFEAEAQLRTDIVDLLAIRRQFRRSRRNRKTRYRETRFLNRRKPEGWLPPSIQHKINSHIKLIDLVHNILPVTSVTIEVATFDTQKLKNPNIQGVEYQQGEQMGFWNVREYVLYRDNHTCQYCKGKKKDPVLQVHHIESRKTGGDSPDNLITLCKTCHHEIHEKGLEHILQRKRPPMRDASQMTAIRWAMLSRIREKYSHANITYGYITKCIRIANGLPKSHMVDARCISGNPLAKPSGTVYLLKFVRKNNRQLHKATILKGGKRKSNKAPRFVKGFQLFDKVVYEGKECFIFGRRSSGYFDLRLLDGTKVHASASWKKLKRVEYASTLLIERRKGDSSRTFALA

SEQ ID NO: 4222 - protein, 415 aa, Bacillus sp.; identical to SEQ ID NO: 2431

SEQ ID NO: 4223 - protein, 441 aa, Ktedonobacter sp.
MSNVFVLDTMKRPLTPVHPGRARLLLKASKAAIYRTSPFTIILKREVEHPAPAPLRLKIDPGAHTTGLALVDDAGGDVVWAAELTHRGAAIKKALDTRRTVRRGRRSRKTRYRAPRFANRRRRAGWLPPSLVSRVENILTWVTRISRIAHVTALSQELVRFDLQKMEYPDISGIEYQQGTLFGYEVREYCLEKWGRACAYCGSTGVPLQLEHIVARAKGGSQRVSNLTLACEACNRKKGTQDIRVFLAHDPVRLERILRQAKTPLTAAAAVNVTRWELFERLKATGLPVETGSGGLTKYNRTTRALPKTHWLDAAVVGASTPERLRTADVVPLLVQATGRGHRRLCNVNALGFPVSHRKRHKRYFGYQMGDLVRAVVPERFACWGTHVGRVAVKASGYFTITTAHGKVTDVPHRFCWLIGRSTGYAYQVGTRHAAPTPTSP

SEQ ID NO: 4224 - protein, 443 aa, Bacillus sp.
MVEENMTCFMQRKGENPMVFVLDTNKRPLAPCHEAVARKLLKQGKAAIYRRFPFTIILKKSVDESEIKATYRLKIDYGSRHTGLAILRGQEVVWLGQLDHRTDIKERIDKRRAFRRARRNRKTRYRKPRFLNRRRKDGWLPSSLESRVQNIQTWVNRLKKLCPIGYISYENAKFDTQLMRNPEINGVEYQQGTLQGYEVREYLLEKFGRKCCYCGKENVPLEVEHIIPKSRGGTDRVDNLCLACHDCNQRKGSKTAEEFGYPHIQKQVKESLKDASAINSTRWKAYEVLKQTGLDVECGTGARTKMNRIRLDLPKTHYFDACCVGESTTNHLYFKTKEVLFIKAKGRGSRSRTNLDRYGFPRGYLARQKFFFGFQTGDMVKAVVPRGKYQGVWFGEVACRKTGSFDIKGKDGKRIAQGINYRYVQVIQRFDGYAYGKGVAELA

SEQ ID NO: 4225 - protein, 420 aa, unidentified
MQYVYVLNKHGEPLMPCSPRKARLLLKQKKACVIKRTPFTVKLLYGSTGYKQPVTLGVDAGSKHIGISATTEKHELYREEATPRNDVVDLLSARRAFRRSRRNRKTRYRAPRFDNRVHSKHKGWLAPSVEVKIQEHITLVEHVCRILPVTLVRVETAEFDTQRLKAMLEGKPLPVGTDYQLGEMYDEYNVRQYVLKRDNYTCQCCGAHSTKTKGVKLHVHHIETRRTGGNAPNNLITLCTACHKALHAGKVTLDGKKRGKPLKDAAFMGIMRKTLIERLRKELKIPVQGTYGYITKYLREKNGIPKSHTNDARCISKNPLAIPCDTCYYTKAVRHHNRQLHRATILKGGIRKANQAPYIVKGYRLWDKVAYNGTECFITGRRTSGYFALKELDGTVVSNSISYKKMRLLEAATNYIIERK

SEQ ID NO: 4226 - protein, 425 aa, unidentified
MSNSVLVIDANKQPLSPCHPSVARKLLNQGRAWVYRRYPFTIIITKTVENPNPEPIELKLDPGSKTTGIALVQGNKLLWGAELTHRGQTIKSSLESRRLLRRNRRNRHTRYRQARFLNRTRHKGWLAPSLQHRVETTLTWVNKLIKFVPIKGIYQELVRFDLQQLENPEISGVEYQQGELVGYELREYLLNKWERKCAYCGIENVPLQVEHIHPKAKGGSNRISNLCLACEKCNIKKGTQSIEQFLAKKPDVLKRIRSQAQRPLKDATAVNSTRWTLFNRLKETGLPVSTGSGGLTKFNRTRLNLPKTHWLDAACVGQVESLLVLTNKPLLIKATGHGTRQMCRTDKFGFPSRYVPMLKCVKGFQTGDIVRAIVTSGKKIGTYVGRVAVRTTGSFNVSTASGLIQGINQKYCSLIHRKDGYLYAT

SEQ ID NO: 4227 - protein, 435 aa, unidentified
LDKKHRPLMPCRPARARRLLRAGRARVVKRFPFVIRLVDRTVEQSEVQPVLIKLDPGSRETGAAVVRDDEKKRHHALAFFVIKHRGGAIRDALKARSAFRRRRRSQNFRCRSPRFLNRVKPKGWLPPSLRHRVETTLSFVRRMCRYLPVSGIATELVKFDSQKLQNPEVSGVKYQQGTLFEYEVREYLLEKFGRKCVYCGAEGVPLNIDHVVPRAKGGSNRVSNLVLACVSCNQKKGARSLEDFLKGKPEVLARVRRELKTPLRDAAAVNATRWVLFNELKATGLPVETGSGALTKLNRHAFGVEKEHWLDALCVGRLNGVVTRKGLNVLEIRCMGRGSRQRTRLTKYGFPRGYLMRQKCVHGFATGDMVEANVPKGKKAGLWRGRVAVRVSGSFNIQTPKGVIQGVGWKHCRLISHNDGYGYAWLGHAPHSSPA

SEQ ID NO: 4228 - protein, 408 aa, Bacillus sp.
MFVYIVNKQGEPLMPCSPRKAKILLKEKKAKVVKQTPFTLQLLFGSSGYKQPISLGVDAGTKYVGLSATTEKQVLLEGQSQLRNDIKELLATRLQFRRARRSRTTRYRKPRFLNRKRKEGWLAPSVQNKVDAHIKLVKLIYSILPVTKLTVEVAQFDTQLLKNPSIEGEQYQQGDQMGFWNVREYIFYRDGHTCQWCKGKKKEKILNVHHMESRKTGGDSPDNLITLCESCHNDLHQKGLEHLFKRKSKPLRDASQMTVMRWFIYNQIKEKYHDAQFTYGYITKHTRIAHGLAKEHSVDARCISGNPLANPTETVVQWKAVRKNNRQLHKATISKGGKRKNNKAPRFVKGFQLFDKVRYNGIECFIFGRRRSGYFDLRYLDGTKVHASANCKQLHLIEYANTLLCERR

SEQ ID NO: 4229 - protein, 355 aa, unidentified
LSASTEKRELYREEFTPRNDVVDLLSTRRQNRRSRRNRKTRYRAPRFDNRVHSKHKGWLAPSVEVKIQEHITVIKRICRILPITLVRVETAEFDTQRLKAMLKGKPLPVGTDYQLGEMYDEYNVRQYVLKRDNYTCQCCGAHPTEKKPVRLHVHHLESRHVGGNTPNNLITLCVACHKALHEGKITLDKGKKRGKPLRDAAFMGIMRNTLLARLKDELNIPVKQTYGYITKLLREKNKIPKSHVNDARCIAKTPNAKPCDTMLYTRALRHHNRQIHKAKILNGGIRKKNQAPYLVKGFRLWDKVRYNGEECFITGRRSSGYFALKKYDGTVISNSASYKKLMLLEAATNYITERS

SEQ ID NO: 4230 - protein, 456 aa, unidentified; identical to SEQ ID NO: 3495

SEQ ID NO: 4231 - protein, 441 aa, Sulfobacillus sp.
VLRARQAVPTLAKDNALRKEIDVMLVYVLNQYGKPLMPCAPRKARLLLKAGKAQVVRRTPFTIQLLYGSSGYQQAVSLGVDAGTMYIGLSATTEKKVLFEAEVMLRTDIQELLSTRREFRRARRHRKTRYRKPRFLNRQKPERWLAPSVQNKVDTHAKVIQRVLSILPITNITVEVAQFDIQKIKNPDIAGTEYQQGEQMGFWNVREYVLFRDKHTCQHCKGKSGDKILNVHHIESRKTGGDAPGNLITLCDACHVKIHREGLTHLFQRQQKSFRDASQMTVMRWFIYRGIQKVFPHAEVTYGYITKNTRIQNGLEKSHLVDARCISGNPTATSLAGTYLIKQVRGQNRQLHKATILKGGVRKANKSPSFVFGFQLFDKVRYNGQECFVFGRRLRGAFDLRLLDGTKITSGASHNKLTLLERASTLLIQLEKGGKAASSPA

SEQ ID NO: 4232 - protein, 462 aa, unidentified
LAKALKGVVYTRLPHKINQFKRKDFVKRMTTQKVIQVCVLDQNNIPLMPTQRLGKVYRLLKTKKAHIVNYEPFTIKLDYELKTHIIQPLTLGVDSGAIHSGYSLANEHREYYNAEIMARDNISKNISDKRMYRRNRRSRKTRYRKPRFNNRKNKGKGWIPPSLEQKVYVQVNEIEHLHKYFPINNIIIEVAEFDIQKIKNPDISGKEYQQGTLQGYNIRNYLLEKYHHKCFYCNKEVSAFEVEHMIPRARNGSNRIDNLTLSCHNCNQKKGTLTAEEFIRQTLTPQKAAQKLRQIPKTKQLLKYMAHMNATRWVLYNTIKETYNSVSLTYGYITKHNRINAGLPKAHHIDAKCITGFSTVPSFGVTVVKTKMRRHNRQLHRATFSKGHIRKAATLPRFVHGFQLYDIVMFNKHHYYIQSRRSSGSFRLVSLEGLKDENRNYKKITFLTHTNAYLTNYYVNGK

SEQ ID NO: 4233 - protein, 413 aa, unidentified; identical to SEQ ID NO: 2636

SEQ ID NO: 4234 - protein, 423 aa, Microcoleus sp.; identical to SEQ ID NO: 3992

SEQ ID NO: 4235 - protein, 421 aa, unidentified
MVYVLDITGQPLMPTDRHGKVKHLLKDGKAKVVKRCPFTIQLLYTTTTYTQEITLGVDAGSKVIGLSASTPRKELYSSEVTLRNDIVKLLSLRREYRRSRRNRTTRYRAARFNNRVHSKNKGWLAPSIENKINTHIKVVADIHKILPISKIVVETASFDIQKIKNPNISGEEYQQGEQLDFWNVRQYVLFRDNYTCQCCKGKSKDNRLAVHHIESRQTGGNAPNNLITLCITCHEKYHKGKIKLPDTIKRDKIFKDAVFMGIMRWAFYERLKNIYPNIRMTYGYITKNTRIQHNLPKTHYTDALCISGNPLAKPLEVLYIQKAIRTRNRQIHKATISKGGIRKLNQAPKYVFGFQLYDKVLYKGKECFIFGRRSSGSFDIRTLDGTKISPGVSHKKLKLLEKRKTILTERVFKNQEGGKQG

SEQ ID NO: 4236 - protein, 373 aa, Lyngbya sp.; identical to SEQ ID NO: 3006

SEQ ID NO: 4237 - protein, 427 aa, Nitrosococcus sp.
VNSVFILDTDKTPLMPCRPSRARRLLREGKAAVYRMQPFTIILKYRVDPSPQPVGFKVDPGSKTTGLALVGNFPQQGRVVLWGANLEHRGQSVRDRLEKRRLLRRGRRGRKTRYRAPRFLNRTRPKGWLAPSLRSRVENVSTWFNRLLDRAPISECHIETVRFDMQKIQNPEINGVEYQQGELQGYEVREYLLEKWGRKCAYCGKNSAPREVEHIVPRSRGGSHRVSNLTLACTPCNQKKNSKTATEFGYPQIQSKANRPLKDAAAVNATRYAIGGVIQSIGLPTSFWRGGRTKKNRISQGYAKDHWIDAACVGESGEQVTITKGHRALHIKATGRGTRQVVLTDKYGFPRGKAGRCKRVKGFQTGDLVRLSQPRGKYEGIHTGILASIRANGTFDIKAKAGKISANWKHFKLIQRGDGYDYGLSAV

SEQ ID NO: 4238 - protein, 421 aa, unidentified
MMVYVLSHTGQPLMPTEDYRKVRILLKQHKAKVLQRTPFTIKLLHYTHEYKQPVSLGVDAGSKVIGLSATTEQKELFASEVILRDDIVKLLSVRREFRRARRNRKTRYRAPRFNNRVHSKNKGWLAPSIENKISVHLKTVRNVCRILPITNIVAEVAAFDTQMLRAKELSLPLPEGVDYQQGEQLYAYNVREYVLFRDNHTCQHCKGKSKDPVLQVHHIESREVGGNAPNNLIALCKTCHAKYHAGLIKDLKVKRGASFRDAAFMGIMRWAFYDRLKTIYPNVSMTFGYITKHTRIEHNLEKKHCVDARCISGHPDALPTENFYLQKAVRKKNRQLHKATINKGGIRKSNQSPKYVYGFQLFDKVLYDNKECFIFGRRASGYFDIRMLDGTKLSASVSYKKLKLLERRKTILMQQVEDFAA

SEQ ID NO: 4239 - protein, 442 aa, unidentified; identical to SEQ ID NO: 2903

SEQ ID NO: 4240 - protein, 443 aa, Caldicellulosiruptor sp.; identical to SEQ ID NO: 2385

SEQ ID NO: 4241 - protein, 429 aa, Parasutterella sp.
LRVLVWNKRGKPLMPCSPAKARLLLKEKKAIVVRRTPFTIQLTIATGESKQPVSLDVDAGYKHVGLSASTEKAELYASEVELRQDITDLLSARRALRESRRNRKTRYRAPRFDNRIRTKRKGWLAPSVENRINAHLSRIESVLRLLPVTKITVETASFDTQLLKNPDISGKEYQEGEQLGFWNIREYVLCRDRHVCQHCYGRSKDPVLNVHHLESRRTGGDSPGNLITLCETCHKALHRGEITLKAKRGQSFRAEAFMGIMRSEVPNRLKASHPELEVNNTYGYRTKHARIANDIAKSHCADAFCIAGNLGAERLCEFFFQKQTRRNNRQIHKLSILKGGIRKRNQAPFEVKGFRLFDKVACQGEEGFIFGRRSSGFFDVRKLDGTRISAGISCKKLHLLEKRRTYLTEIRKEEALPPLPEGRGLRAKM

SEQ ID NO: 4242 - protein, 441 aa, Marinobacter sp.
MSVFVLDRQKKPLMPCSEKRARLLLTRKRAVVVRVYPFTIRLKDRTGGAVQKAVFKIDPGSKETGLAVSRVSAQGEHVLCLIELIHRGRQISKALDQRRGFRSRRRGKLRHRAPRFNNRTKPKGWLAPSLQHRVDTTTSVIKRLCALVPVTSISQELVRFDLQQMENPEISGVEYQQGTLLGYEVREYLLEKWGRECAYCTVTDTPLEIEHIVSKANGGSNRISNLTIACHDCNQEKGSQTLAEFFQTSSRLRDKQPRMDNVLIQCKRPLRDAAAVNSTRWALFQSLKNTELPVNVGTGGQTKFNRQRLGIPKTHALDAACVGVVEQVFDWEKPTLRIKATGRGSYKRTRLTKHGFPRGYLMREKSVHGFQTGDMIRAIVPIGKKEGTWLGRAAIRKTGNFNIQISDGAVQGIHHRHCHLMQRADGYGYHLQPTPQKGEGK

SEQ ID NO: 4243 - protein, 489 aa, unidentified
MTMVYVQNKDGKPLMPTTRYCYVRLLLKEKKARVVCTTPFTIQLNYDTPDVTQDLILGIDPGRTNIGVAVVKEDGSCVFSAHLETRNKEVPLLMKKRAAFRRQHRTQDRRRKRQRRAIAAGTTVESNTIERLLPGYEKPVVCHYIRNKEARFNNRSRPVGWLTPTANHLLQTHINLIAKIAKFLPITKVVVELNRFAFMAMDNPNIHRWEYQQGPLYGLGSVKDAVYAQQDGHCLFCKKPIDHYHHVVPRHKGGSETLANRCGLCERHHALVHKDKAWADKLVTRKEGMNKKYHALSVLNQIIPFLMEYLGSETLYDVYAIDGRSIKGFRIAKNVPKEHYTDAYCIACSTLDTDNKVSAPVEPFELKQFRRHDRQACIRQMVDRKYLLHGKVVAANRHKAFEQKSDSLQEFREAYSDVAVSQLTVKPHPPQYKDMSRIMPGAVMDFDGIVGVMQSSIVGQFYKSTKGHKATPRRCVLLAQNAGMVFLPA

SEQ ID NO: 4244 - protein, 432 aa, unidentified
MEGLMSKIFLIDTAKRPLNPIHPAQARQMLRNGKAAIFRRFPFTLILKTEQPETLVDKLRIKIDPGAKTTGLALINDLSGEVIFAAELQHRGFEIKHLLTSRSQLRRSRRSRKTRYRARRYKNRSRKEGWLAPSLQSRVDNILTWVSRLRKFAEIGAISQELVKFDTQIMQNPEITGKEYQQGTLAGYETREYLLEKWGRKCAYCDTENVPLQVEHICPLAKGGSNRISNLTLSCEKCNVKKGTKYIKDFLKKDPQRLDAILKQVKKPLADTAAVNTTKYALLKSLEATGLPVETGSGGLTKFNRTQQGLKKTHWIDAACVGQSTPRLIAKNIKPLLIKAEGNGNRKLCITDKFGFPKKHRPRKKLHFGFRTGDIVKAVVTKGKNVGSYIGRVAIRSNGSFDISIKDRHKKQGVSYKYCQTVHRKDGYSYLF

SEQ ID NO: 4245 - protein, 211 aa, unidentified
TRRSSDLYGGNAPDNHGTLCDDCHKKFHLGIITDVKLKTRRRQSTRDAAFMGIMRKTLMWRLRTELFIPVAETKGYITKATREKLLVLPKSHTRDALAIAQGRHGFGIKEYAYVEPANHIYTVRPVRHHNRQLHKASILKGGIRKRNQASKYIFGFRLYDKVLYQGKACFVWGRRTSGTFLLRTIDGIKVKDGVSYRNLTLLERSSNYLIA

SEQ ID NO: 4246 - protein, 477 aa, unidentified; identical to SEQ ID NO: 3241

SEQ ID NO: 4247 - protein, 424 aa, unidentified
MRVFVFNMRGRPLMPCSQRKARLLLRENKAMIYKYHPFTIQLTYTTGETKQDCHIGIDTGSKYIGAAVRSEDKVFWKGEIELRQDIRSNLDTKRIYRRSRRNRKTRYRKPRFLNRKRRDEWLPPSLQSRVNHTFHWIDTLSSLVPNPILHIEVGKFDVAKMINPEIHGVDYQHGQTYGFFDERYFVFARDNYTCQCCGKSKNKILNTHHIIYRSNGGTNRVDNLITVCTDCHTSQNHRKGGIFYQWQEQHKKVKQYKEPPFMNTLRKRIFVAYPDAEITYGSETTPKRKAMKLDKTHYNDAIVISGINEIKENPEEWLLIKQFRKKKRSLHEATARKGRKKPNRNQTRNSKNTPYYKGFYLNDKVSVFGKSGYITGFTSNAAYIKDENNDYITLPNKTYKQVSINKMKLECHNNNWQYIIKNAV

SEQ ID NO: 4248 - protein, 411 aa, unidentified; identical to SEQ ID NO: 2663

SEQ ID NO: 4249 - protein, 443 aa, Caldicellulosiruptor sp.; identical to SEQ ID NO: 2385

SEQ ID NO: 4250 - protein, 427 aa, Parasutterella sp.
LRVFLLNKRGKPLMPCSPAKARLLLKEKKAIVVRRTPFTIQLTIATGESKQPVSLGVDAGYKHVGLSASTEKAELYASEVELRPDVSDLLSARRTLRQSRRNRKTRYRAPRFDNRIRTKRKGWLAPSVENRINAHLSRIGAILRLLPVTKITVETASFDTQLLKNPDISGKEYQEGEQLGFWNVREYVLFRDGHACQHCHGRSKDPVLNVHHLESRRTGGDSPGNLLTLCETCHKALHRREIKLKTKCGQSFRAEAFMGIMRWEVLNRLKASHPELEVHNTYGYRTKHTRIVNGIDKSHCADAFCIAGNLGAKRLGEFFFQKQTRRNNRQIHKLSILKHGLRKRNQAPFEVKGFRLFDKVVCQGEEGFIFGRRSSGSFDVRKLDGTRISAGISYKKLRLLEKRRTYLKEIRKEEALPPLPEGRSLRA

SEQ ID NO: 4251 - protein, 552 aa, Streptomyces sp.
MTTFPAGEQTHQAVLPQQPALEPVRADTPGSRDETAHGHPATARGTGREHGRGETDGTGTKARRRHAKRAATVAQAAENGSGDAPTQPPEYAGGSGDSRVFVLSRDGHPLMPCHPARARELLRKGRAVVARQTPFAIRLKDRTRAESAVDGLQLRIDPGSKGTGLALTDEKKETGTDGRVVTVRRGLFSIELQHRGDQIHHTMGQRAGYRHRRRSANCRYRAPRSNNRGVAQGWLPPSLRHRVDTTFSLAKRLCRYAPVTEIHLERTAFDTHSMSAGRRLRGTEYSQGTLAGSTTRSYLHARWNSACAYCDATGVPLNIDHVRPRSQGGSNRITNLVLACIPCNKAKDSRSVESFLAHRPDRLAKILEQLRTPLRDAAAMNSTQSRLAEALETLGRPVHAWPGHLTMANRVRTGLGKTHALDALSVGHLDHESGDAIVRFPERVLVAKATGRGSYARTTPDRYGFPRLRRSRTKQHFGYVTGDLVRAVVPSGKWAGTWTGRISVRARGQHSLTTPQGRLNVSHWNLRLLQRGDGYGYSTQREAPPQASPKNS

SEQ ID NO: 4252 - protein, 414 aa, unidentified
MVYVLNMDGQPLMPTNRHGKVRHLLKDGMAEVVKRCPFTIKLLYRSTNYTQPVTLGVDAGSKHIGLSATTEDKELFASDVELRNDIVDLISTRRQNRRGRRSRKTRYRKPRFLNRTGNRKSGWVAPSIENKIQTHLTVVDKVCRMLPVSKIVVETASFDIQKIKNPDICGTEYQQGEQLNFWNVREYVLFRDGHKCQCCKGKSKDKILNVHHIESRKTGGDAPNNLITLCETCHTGYHKGTVKLPKTIHRGMVFRDAAFMGIMRWAFYNELKRRYPNVSHTYGYITKNIRIENNLPKYHYIDARCISGHPLAVPSGEVFYQKKVRCHNRQIHKNTIGKGGYRKRNQAEYIVKGFRLFDKVSYKGQECFIFGRRSSGSFDIRLLDGTKISAGVTYKKLRLLETRGSFLIERRLVG

SEQ ID NO: 4253 - protein, 624 aa, Streptomyces sp.
MAPISRPRVSSASALRAAHPPNPRRPTASSADHPRIRSASRFQCVIVPSASSAHSAASIPSSNAANRSAPAPGTEAVSLAAPVKALIPVPPMLRPFNWNVTQSTSPSSKSLRSGNGRGTGHDSRTTGARDPDHSPRSRGQDHRARSLGCSHGLVRSLAPRRQPDSRVERSGSHRVFVLSRDGMPLMPCHPARARALLARGRAVVARHTPFAIRLKDRRRAEAEVAGVELRIDPGSRGTGLALTETRTQASPGGSVATVRRGLVAIELRHRGPQIHQAMVRRAGYRRRRRSAGLRYRPPRFANRARRPGWLAPSLRHRVDSVRSVVARLRRYAPVVEIHVEDNSFDIPALSAAEESEALGGQARTRPRTGERCTYCGASGVPLNVDHIRARARGGTDRPANLVLACVPCNEAKAARPVEEFLAHRPEHLAAVLSRLRSPLGDSAAMNATKAQLLQLLEGTGLPVRCWPAALTSANRTAAGLAKSHTLDALCVGPLRSGAGDTIVRVVASVYVFASTGRGSYARTTPDRYGFPRLLRPRRKRHQGFASGDLVRATVPKGRWTGVWTGRVSVRSTGRHSVATPLGRFNASHENLRLLQRADGFAYAWRGEAEQNSSNKSVEPPERSS

SEQ ID NO: 4254 - protein, 448 aa, Clostridium sp.
MVAVLSKTGIRLMPTSSYRARKLLARKKAVICGYRPFTIRLTERETGDVQPVELAVDTGYFHVGNSLKTAKHELAAVEIRTLMDEKQRYDDRRRYRRMRRSRLRYRAQRFDNRRRPEGWLAPSIQGRMEQNLAFLRRVLSVVPVTRIVMEMGQFDTQVLKAVEEGRPIPEGTDYQQGERYGIATLREAVFTRDNYTCQCCEKTVHDGVILHVHHIVYRSQGGTNRMGNLITVCERCHTPKNHKPGGKLYKWKPTVKSFKGATFMTAVRWIMYRSVKDSFPDVDVRITYGAKTKLQRRTLDITKSHVNDAYVMGDFHPKHRVRPVILQKKRRNNRILEKFYDAKYIDTRDGSKKTGQQLFNGRTNRNHNTDTGNLRLYRGKKLSKGKRAIRTTRYRIQPHDILVYQGQEIEASGCHCKGTRVMTTAKKSLPIGKVRVRRYSGGYYAVAE

SEQ ID NO: 4255 - protein, 424 aa, Lentibacillus sp.
MIVFVINKHGKPLMPCKPRKARLLLKEKKAKIVSRNPFGIQLLYETNSYTQEVKIGIDLGAKYVGIAITSEDKVLAKGEVELRQDVKSAIDTRRTYRRSRRNRKTRYRKPRFQNRTRGKRWLPPSIQSRVENTFFWIDKFCDLVPNPKLTMEVSKFDVQKMIDPAIQGVAYQEGQTYGYHDVRYFVLARDHYTCQVCKKKGKILNTHHIIYRTHGGSNRADNLITVCTDCHTHDNHQRGNILWKWMVEGKRLPQYKEGPFMNIVRKRVFTKYPHARITYGSVTTPKRKALELEKTHANDAIAISGISSIKENAKTTFKIKQFRKKKRSLHEATARKGRKSKNITSKRNEKNKKYLKGFYLNDKVRLYEKTGYITGFTGTSGAYVKSIDGDYITMPNKSYKQVSLKKLTQISHHNNWQFEYKAFG

SEQ ID NO: 4256 - protein, 548 aa, Thermanaeromonas sp.
MTSLGAGPEGQGDEGTTLAAGPGPTPGCSSSSGPWKPRLQTAIGVRAKRAGASAGCQHWRGGCRGESAPARHQPRKGFPRKGEKMGVRSMIFVLDRKKKPLMPCSEKRARELLREGRAAVHRLVPFVIRLKDRVRGESSFQPLKLKIDPGYEVTGISVVRVAEGKEVVIFFIEVHHRTDISDALKARRDYRRNRRSRKTRYRAPRFDNRKRRRGWLPPSVEARIQEVMSVVEKLCRWLPIGEIVVESAKFDTQKLQNPEISGVEYQRGTLFGYEVREYLLEKWGRKCAYCGKEGVPLEIEHVIPESRGGTNRVSNLTLACRECNEAKDDRLPQEWLEELKKSERSIDRKRAENLEKVMGQLKEPLKAAAYMNATRYALVERLKALNLPISTATAARTKYNRARFNLPKTHYYDACCVGEIPGGLEIATEYVLQFRAVGRGSRQMSNVDDSGFSRGHRMKKKVYFGFMTGDLVLAEIPGGKYAGRHVGFVAVRASGYFDLKNFSGDRVCQGISWKHFRLLQRFDGWRYEKFKVAALSSPYLKAGASSAA

SEQ ID NO: 4257 - protein, 443 aa, unidentified
LTKDENRPSGRTTGLRAEQAEPAGIRKGDTLKVFVLNMRGKPLMPCSPAKARHMLKAGKAFVVRRTPFTIKLTIATGETKQDVTLGVDAGARHVGISATTEKEEVFASEVALRQDITGLLADRLAFRRARRNRKTRYRAPRFNNRVRSKHKGWLAPSVENRIQAHISRIEAVCRLLPVTKIVIETASFDIQKIRNPEVEGTGYQQGDQLGFWNVREYVLFRDGHICQHCRGRSKDPILNVHHLESRKTGGDAPNNLITLCETCHKAYHAGKIKLKVKRGQSFRAEAFMGIMRWTLLDRVRKTHPKLPVENTYGYLTKHKRIALGLPKTHCADAFCIAGNLKALRRGDFLFQQQTRKHNRQIHKCSILKGGVRKLNQAPFLVKGFRLFDKVRIGGQIGFVFGRRVRGTFNIRRLDKTVIGTDINCKKLSLLETRKTFLTELRKE

SEQ ID NO: 4258 - protein, 449 aa, Allochromatium sp.
MAVFVLDKQKHPLMPCTEKRARLLLERGRAVVVRLAPFTLRLKDRIGGAVQPLRLKLDPGSRVTGLAIVRESETCDPETGAIERLEHGLWFGELAHRGQAIREALTLRRHYRRARRSRKTRYRAPRFLNRTRREGWLPPSLQHRLDTTLNWVARLRRLAPITALSQELVRFDTQALQNPEISGVEYQQGELAGYEVREYLLETWHRTCAYCGATNVPLEIEHIVPRARGGSDRVSNLTLACRPCNQRKGNRSIEDFLKRQPALLHRIQAQAKAPLQDAAAVNATRWALLNALQTTGLAVETGSGGRTKFNRTRLDIPKTHALDAACVGAVDQVRDWNRPVLAICATGRGAYSRTRTFNNGFPRGYLMRHKRVHGFQTGDWVRAEVPKGKKAGVHVGRVAVRQTGSFNIQAQGGTVQGVSYRHCRVLQRADGYGYAFQPKPDTEKARRAA

SEQ ID NO: 4259 - protein, 421 aa, unidentified
MLVYVLSKNGQPLMPTHRCGFVRRLLNSQKAKVVRRCPFTIQLQYDTDCKTQPVTLGIDAGSKHIGVSATTESKVLYEADIELRNDIVDLLATRRQMRRARRSRKTRYRKARFDNRKRNDKWLAPSIQHKVNCHLEAVRFVHKLLPISKIIVEVASFDIQKIKNPLITSTDYQNGELLDWKNVRECVLFRDSHICQCCKGKSKDPVLQVHHIESRKTGGNAPNNLITLCKTCHNGYHHGTVKLPAKIKRGMKFNDATFMGIMRWGFYNQLKSLYPDVSLTYGYITKDIRISNGLAKTHFIDARCISGNPLATSDNTVYFLKKRRRHNRQIHKFNILKGGRKKRNQAAYLVKGYRLFDKVNYNRKEYFIFGRRASGFFDIRTLSGEKVNKGSISCKKLKLLEASKGYLTERRNAFLSPLNSV

SEQ ID NO: 4260 - protein, 406 aa, unidentified; identical to SEQ ID NO: 2752

SEQ ID NO: 4261 - protein, 424 aa, Anaerostipes sp.; identical to SEQ ID NO: 3434

SEQ ID NO: 4262 - protein, 355 aa, unidentified
MMDGRVGAIRDALKARSAFRRRRRSQNLRCRSPRFLNRVKPKGWLPPSLRHRVETTLSFVRRMCRYLPVSGIATELVKFDSQKLQNPEVSGVEYQQGTLFKYEVREYLLEKFGRKCVYCGAEGVLLNIDHVVPRAKGGSNRVSNLVLACMSCNQKKGARSLEDFLKGKPKVLARVRRELKTLLRDAAAVNATRWVLFNELKATGLPVETGSGALTKLNRHAFGVEKEHWLDALCVGRLNGVVTRKGLNVLEIRCMGRGSRQRTRLTKYGFPRGYLMRQKCVHGFATGDMVEANVPKGKKAGLWRGRVAVRVSGSFNIQTPKGVIQGVGWKHCRLISHNDGYGYAWLGHAPHSSPA

SEQ ID NO: 4263 - protein, 424 aa, Caldicoprobacter sp.
MVYVISKAGKPLMPTERHGKVRRLLKQGLAKVVKREPFTVQLLYDTTTYTQPVTVGLDIGSKTTGVSAVTEKKEIFSAEVELRDDIKGLLLERRQYRRMRRYRKVRYRKPRFLNRARDDGWLAPSLQWKVDAHIRIVDMLGRIMPIERVVVEVAPFDTQKILNPDIEGADYQNGAQKGFWDVREYCLWRAGYRSELSGKRGILEVHHIVPRSEGGTDTPSNLIVLTADEHKGVHEGRIRIPKSKVEKVKMFKDAAHVSTIGWHIVNRLRERYSVEVTYGSTTKAKRLSCGMEKSHRVDAFIIAGGDLQERLREWYLGKFLRRQNRSLHKANPIKGGVRPVNTIKEAYGFRRYDRVEYEGIIGIIAVLRSSGYFAVRSLSGEKIHDSAKHNRLRLVEKAKTLMLERREERIPLHLEEDGVSCARI

SEQ ID NO: 4264 - protein, 414 aa, unidentified
MVYVINKQGQALMPTERFGKVRRLLKNSLAHVVCRIPFTIQLDYDTTDYTQPVSLGVDAGSKHIGISATTSEKELYAADVELRNDIVDKLSTRRELRRTRRSRLRYRKARFNNRVSSKRKGWLAPSVENKIQTHLTVVEKINKFLPITNIVVEIASFDIQKINNPIISGSEYQQGEQLDFFNVREYVLFRDNHICQHCKGKSKDKVLNVHHIESRKAGGDSPNNLITLCETCHKAYHRGEFELNVKRGKSFRDSAFMGIMRWSFYDRLKNIYPNVSMTFGYITKNTRITNNLPKDHYVDARCISGNPTAKPLGYYFYQKKVRCQNRQIHKANFLKGGRKKLNQAPFLVKGFRLFDLVEYQKELYYIFGRRSSGSFDIRKLDGTKVNKGSINCKYLRLIATRKSILTEKRMQVNL

SEQ ID NO: 4265 - protein, 423 aa, unidentified; identical to SEQ ID NO: 3538

SEQ ID NO: 4266 - protein, 466 aa, Ralstonia sp.; identical to SEQ ID NO: 3625

SEQ ID NO: 4267 - protein, 476 aa, Ferroplasma sp.
MVKNMKEKQKLDWRNTYTPTDAPQVRGNCDHALNREETLSVHGLKTPSNNPDVDLQSGMTGQDLRVPVINMRNEPLMPTTLGKARKLLKGKKAKVAFSNPFTIQLLYATGETKQPVTLGIDAGYKHIGFSALTERKELVSGEAVIRTDMPKLNVEKSMYRKGRRDKLWYRKPRFMNWGNNREGWLAPSIDHKLQTHIRLIEKLKKILPISDIIIEVASFDTQKMKNPEMSGIEYQQGELQGYEIREYLLEKFHRKCVYCGKTNIPLEIEHLTPKSRGGSNTVDNLAISCHECNQKKNNLTAEEFGYPDLRKSALMPLRDAAFMNTVRWKLTQLTGADHTFGYITKRNRISLGLDKSHANDAFVIAGGTNQARTSPFTITQRRRNNRSIQTNRKGFRPSIRRRRYPLQPGDVVEFGESRYDVVGVHSYGNYVIIRNGEKKMNISTKKVKLARYGKGLRFSAQFLHTLPHGVSLGAVR

SEQ ID NO: 4268 - protein, 416 aa, unidentified
MVYVLDKNGQPLMPTDRHRKVRLMLQSGQAKVIKRCPFTIQLNYDSGHQTQEISLGIDAGSKHIGVSTTTKIKVLYEADVELRNDIVDLLSSRRELRRGRRNRKTRYRQAKFNNRRRGNGWLAPSIRQKIGTHLTVVENICKILPISRIMVETASFDIQKIKNPDIQGAEYQQGDQLGFWNVREYVLFRDGHTCQCCKGKSKDKILNVHHIESRKTGGNAPNNLITLCETCHTGYHKGTVQLPKAIKRGMRFKDAAFMGIMRWAFYEALKQQYEPVGTPVHNTYGYITKHTRIEHNLPKEHYVDARCISGNPDAFPNGEYYYQKKVRCHNRQMHKLTILKGGIRKQNQATYLVKGYRLFDKVSYQRKEYFVFGRRKSGFFDIRTLSGKQVNKGSLSCKKLKFIATRMYYLIERRAV

SEQ ID NO: 4269 - protein, 430 aa, unidentified
MVYVLDISGNPLTPTKRHGKVRHLLETGKAVCVKRCPFTIRLTYQNAGPEPEGLSLGVDCGSKHIGLSVSSEEQEYYSSEVELRQDIPANLSTRREFRRARRHRKTRYRKPRFLNRIASKKKGWLAPSVRQKVESHLNRIDKAVKMLPIREIKVEVAAFDLQKLQADLKGLKRPKGEEYQQGPQLDFWNVREYVLFRDHHECQCCHGKSGDKVLNVHHLRSRKVGGDAPDNLITLCEYCHGQYHKGELELPESTKKPKPLRDAVFMGIMRWTLYSRLKEIYEPQGIKVKLTYGYITKHTRIENGLEEKSHRLDALCIAGHPKAKRCREWFLQKKVRCHNRQLHKATIQKGGVRKANQLPAVIKGFRLYDKVLFQNRECFIWGRRKTGYFTLKTLDGIMICDGVSSKKLTLLEKRKSYLTERRKQELCNSF

SEQ ID NO: 4270 - protein, 413 aa, unidentified; identical to SEQ ID NO: 2636

SEQ ID NO: 4271 - protein, 406 aa, unidentified
MVYVQDIDGKPMMPTTRHGKVRRLLKDNKAVVVNTCPFTIKLTYKTSDYKQEIVLGVDAGTKHVGLSATTKSKELYSGEVILRNDVVELLSTRRESRRARRNRLRHRKPRFGNRVKSKHHGWVAPSVRHRIDAHIRVIDNVCSILPISRIIIEVAQFDTQKINNPNISGNEYQKGDQLGFWNVREYVLARDGHKCQHCKGKSKDHILNVHHIESRKTGGDSPSNLITLCETCHKEYHKGNIDLKVKRGKSLRDAAVMGIMKWKLYDELKSKYDNVSMTFGYITKYNRIKYGIEKSHTSDAFVISRNFNAKRIERQYLKRLIRRHNRQIHKMKILKGGKKKNNQAPFEVFGFRLFDKVLYNNEINFIYGRRKSGCFDIRDFDGKNSKNVTYKKLKLIRGKRYPIILK

SEQ ID NO: 4272 - protein, 436 aa, unidentified; identical to SEQ ID NO: 3599

SEQ ID NO: 4273 - protein, 291 aa, unidentified
EVKIQEHITIIKRICKILPISLVRVETAEFDTQRLKAMLAGKPLPVGTDYQLGEMYDEYNVRQYVLKRDNYTCQCCGAHTTAKKLVKLHVHHLESRKTGGNAPSNLVTLCTTCHKNLHKGKVTLDGKERGKPLRDAAFMGIMRKTLMARLKEELPIPVQGTYGYITKMRREQNDIKKGHTNDARCISKHPLAEPCSVCYRTKAIRHHNRQTHKANFSKGGIRKRSQMPYVVEGYRLWDKVLYKGQECFVSGRRASGSFTLKKLDGTRISKGVTFKKLRLLEPATNYLIERM

SEQ ID NO: 4274 - protein, 468 aa, unidentified
LAVFVLDKVGRPLMPCSEKRARLLLARGRARVHRLMPFAIRLVDRELHSSALQPLRIKLDPGSKATGLALVRDAEHVDTSTGEIHRGAVVLNLFELIHRGRQISEALTARRTMRRHRRSTLRYRAPRFLNRTRPAGWLPPSLQHRVDTTLAWVERLRCWAPIAAVSTELVRFDMQALDNPEVTGIEYQHGTLFGYELREYLLQKWTHKCCYCDAQNVPLNIEHLVPRARGGSKRVSNLAIACVACNVSKGARRLDVFVKDEARLARIIAQALRPLKDASAVNTTRWALVNALRATGVPVETASGGRTKHNRSQLGIPKTHALDAVCVGDVSTVLGWRKPTLQVKCTGRGSYQRTRRNKYGFPVGYLMRAKRVQGFGTGDVVRADVPTGKKAGPYHGRVAVRAKGNFNIQTHDRVVQGVAHRYCRLLQRADGYGYSRMATNKGEAGVGAVMRPAPSLPGPAAEVSRDEG

SEQ ID NO: 4275 - protein, 442 aa, unidentified; identical to SEQ ID NO: 2834

SEQ ID NO: 4276 - protein, 529 aa, Burkholderia sp.
LEVAAADKPRVGTKRAATGELTLTLCCTTWSRGAAPQGARHQARKGNAPDVFRRHNKELGLAVCVLDRSGKALMPCSEKRARLLLARGRARVHRVVPFIIRLVDRRAHASRFQPLRIKVDPGSRTTGLALVRDTQLVDATSGEIQRGAAVLNLFELVHRGRQISEALSARRAMRRRRRGNLRYRAPRFLNRTRPAGWLAPFLEHRVATTMAWVNRVMDWTPVAALSSELVRFDMQALENPEIASVEYQQGTLAGYEVREYLLAKWGRRCAYCDQEHVPLQIEHILARASGGTNRISNLTLACACCNAKKAARPIEAFLARDPKRLAVILAQAKRPLKDAAAVNATRWALANALRATGLPVELASGGCTQFNRKQLGLPKTHALDAVCVGKVASVSVWYKPTLAVKCTGRGSYQRTRLDRYGFPRGYLTRSRRVHGFQTGDLVRAEVPTGKKAGRHTGRVAVRATGSFNIQVAGNVVQGIAHRHCRLIQRSDGYGYSRIALLKGDASDGTASLSALSLPAVNDGVSRAAG

SEQ ID NO: 4277 - protein, 304 aa, unidentified
VEVIGRVKEHIKGSSSSLLLYNISRTVLANNNSAQDIPSGRSGKNLRVPVLNMSGKPLMPTSPRKARILLKQGKATVVQRMPFTIQLKYPSGETKQDITLDINNRYSTIGFSAVTEKSELISGELTLRKGISKPLEQKRNYRRVRRNKLLHRKPRLNNRSKPKSWLASGIHHKLNTHLRLIEKLKEVLPITKVIVEVSAFDTQKLQNPEIKDVEYQQEELQGHEVIEYLLEKWKHKCAYCGKDNLPLEIEHIIPKSRGGSDRVSNLTLACHKCNQNKGDKTAAEFGHPEIQKVGPYRKKTGVIL

SEQ ID NO: 4278 - protein, 532 aa, Nocardiopsis sp.
LWLRAAFTSTSRPTREVTRLATFRAGQKTHQAVLPQQPALESESADTPRIGHETGPGPRPTAEPGADHVRGETTRISPDAGGVTPNSVGEKPRERHPSVFVLDKDHTPLQPCHPARARKLLAKDRAVVARHTPFTIRIKDRSVQASEVDGVQVGIDPGPRHTGIAVFTAQGGERRGRYSIQLDHRGAQIRKKLGQRSAYRRRRRSANLRHRAPRFSNRTRPRGWLAPSLEHRVQTTTAWVARIARWAPVTAVHVERVVFDTHVLSARTPLEGVEYQQGTLAGYEVREYLLAEFDRACVYCAATDTPLNIDHVHPRARGGSDRVSNLVLACMPCNRAKSDRPVEEFITDTRTLARILARAKAPLRDAAAVQSTRWALWRALDERLPTRVASGGRTKWNRTRNHLPKSHTLDALAVGKADTLTRTVSRVRVAGCAGRGSYARTRTDKHGFARLRLPRTKGFFGFSTGDLVRAVVPKGKKAGTRTGRVAVRASGSFNITTSQGTVQGINRKYVRLLQRADGYGCTWKGEGVSSRP

SEQ ID NO: 4279 - protein, 449 aa, unidentified
MITPEITIKGNSVGRILRNQSKRASLAYPIQAAGSVRIHIVRNIKNRKEKKAKVVKRCPFTIQLLYDSTRYVQEINLGIDAGSKHIGVSATTKEKVLYEADVELRNDIVDLISTRRELRHLRRIRKTRYRKARFNNRVSTKKTGWLAPSVKQKIHTHLTVINNVYKILPIKNLIVETASFNIQKIKNPDISGEEYQQGEQKDFWNVREYVLFRDNHTCQCCKGKSKDKVLNVHHIESRKIGGNAPNNLITLCETCHKGYHNGSVKLPKSIHRGVSFRDAAFMGIMRKTLLSELRKIYPNVKETYGYITKDTRITHNLPKDHYVDARCISGNPDAKPLGYYFYQKKARCHNRQIQKMSILRGGLRKNNQAEYLVKGFRLFDKVKHNSKEYFIFGRRKTGYFDIRNFFGEKVNKGSVSYKKLKFLETRHNMLTERRKAISYPAIKAEGSLA

SEQ ID NO: 4280 - protein, 493 aa, unidentified; identical to SEQ ID NO: 2644

SEQ ID NO: 4281 - protein, 461 aa, unidentified
LKGVGMMSEKKKVNYIYVVDSNGTPLMPTSRLGMVRHWLKTGQARWFGNSRKTIQFVRPVTTNTQELTLGVDAGFHLGLSVVGNNCEYYASESLRKSEKDRITNRRELRRSRRGRLRYRKARFDNRRRKDGWLTPSIQHRLDFTIKEIKRLYTFLPITNLVVEVTPFDNQKLLNPNIKDWQYQKGKMYGFKTIKDYLLARDNYRDALDGKQYPASQLRVHHLVQRKNGGSNQPDNLVLLSDINHNQANHNNGVLAKLRENRQKTIDYRGAYFMSILATRLSNYFDNYTITQGYLTANLRQKYEIEKSHLNDAFIIAGGTDVTLRTNNIYSRQKLRNNNRSLQKFYDAKYIDSRDGKQKAGKGLSSGRTRRSKELNYDNLRQFRKEKVKKGRVSIRRNHYQLRPHDVVLNTRTNRIETVKGVNNKGKAVIFQTGKTCSINRIVSLYHVNGTLERRIGDENRR

SEQ ID NO: 4282 - protein, 359 aa, Bacillus sp.
MVEENMTCFMQRKGEYPMVFVLDTNKCPLAPCHEAVARKLLKQGKAAIYKRYPFTIILKEIVDNFRPKTPYRLKIDHGSKHTGLAILRGQEVVWLGQLDHRTDIKERMDKRRAFRRARRNRKTRYRKPRFLNRRRKDGWLPPSLESRVQNIQTWVNRLKKLCPIGYISYENTKFDTQLMRNPEISGIEYQQGTLQGYEVREYLLEKFGRKCCYCGKENVPLEVEHIIPKSRGGTDRVDNLCLACHDCNQRKGSKTAEEFGYPHIQKQVKESLKDASAVNSTRWKVYEVLKQSGCEVECGTGARTKMNRIRLDLPKTHYFDACCVGESTPNHLYFKTKEVLFIRAKGRGSRSRTNLDRLP

SEQ ID NO: 4283 - protein, 463 aa, Cupriavidus sp.
MAVFVLDKHGKPLMPCSEKRARLLLERGRARVHRLMPFAIRLIDRCLNDSEVPPLRLKLDPGSKETGVAIVREATFGADGARRAYVLSLAEIIHRGRQISEALTARRSMRRARRGRKTRYRAARFDNRRRPEGWLAPSLRHRVVTTEAWVRRFIKLAPITALSLELVRFDMQAMENPEISGVEYQQGTLLGYEVKEYLLAKFGRTCSYCDAADRPLETEHIVAKACGGSNRVSNLTLACRPCNEKKGKLPLEVFLRKDPARAKRILARAKAPLRDAAAVNATRLALLDALKSFGLPVETGSGGQTKYNHRRLEIPKSHALDAACVGQVHSVLDWQRPVLRIQCTGRGSYQRTRLSANGFPRGYLMRSKRAFGFQTGDMVKAIVPTGKKAGTYVGRVAIRATGFFNIQTAAGAVQGMHCKVIQRGDGYGYQLVVQTAKESENRGDASRRALSLPGLKAEVSRAN

SEQ ID NO: 4284 - protein, 423 aa, Arthrospira sp.; identical to SEQ ID NO: 3193

SEQ ID NO: 4285 - protein, 420 aa, unidentified; identical to SEQ ID NO: 3504

SEQ ID NO: 4286 - protein, 429 aa, Methanosarcina sp.; identical to SEQ ID NO: 3990

SEQ ID NO: 4287 - protein, 435 aa, Halobacteroides sp.
MILRQRREVPIMEVAEMPNKYAFVLDSKGKLLDPTKSKKAWYLIRKGKASLVEEYPLIIKLKREVPKDQVNSDKLILGIDDGTKKVGFALVQKCQTKNKVLFKAVMEQRQDVSKKMEERRGYRRYRRSHKRYRPARFDNRSSSKRKGRIPPSILQKKQAILRVVNKLKKYIRIDKIVLEDVSIDIRKLTEGRELYNWEYQESNRLDENLRKATLYRDDCTCQLCGTTETMLHAHHIMPRRDGGADSIYNLITLCKACHKDKVDNNEYQYKDQFLAIIDSKELSDLKSASHVMQGKTWLRDKLSKIAQLEITSGGNTANKRIDYEIEKSHSNDAICTTGLLPVDNIDDIKEYYIKPLRKKSKAKIKELKCFRQRDLVKYTKRNGETYTGYITSLRIKNNKYNSKVCNFSTLKGKIFRGYGFRNLTLLNRPKGLMIV

SEQ ID NO: 4288 - protein, 466 aa, unidentified
  source 1..466: note = Cyanobacteria bacterium UBA11368
MSNRNAVFVLDSSRNPCNPVHPAVARKMLSQGIAAVFRQYPFSIILKEGKCDNPKQLRIKIDPGARFTGLALVSDTNIVWAAELEHRGFAIRDSLTIRLQQRRSRRQRKTRYRKPRFLNRRRQDGWLPPSLMSRVYNIQTWVNRLCKLAPVFAISQELVKFDMQKIVNPEVNGIEYQHGELWGYEVKQYLLEKFNHTCVYCGATDKPFNLDHFHPKSKGGSDQVSNFVLSCVDCNQAKSNKLPAEFLSDRPDIFAKIDKQRKQPLADAAAVNTTRWKLKQVLESLGLPVELGSGGLTKYNRQRLGIQKSHWADAVCVGHSTPNSFNITGYQPLIIKAMGRGSRQMVNPDKYGFPRTKPKLRQKAFYGFQTGDIVKAVVTKGKKVGTYVGRIAVRKTGSFNIKTKTDTVQGISHKYCRILHKSDGYTYSFGEALNQKSSQLKPKVTETKLKEFQEFKGFQGEQLSLF

SEQ ID NO: 4289 - protein, 421 aa, unidentified
MNKVFVLDDRKRPLMPCRPARARRLLAAGKAAVYRRMPFTIILSYDVKPANQEIEFKVDPGSKTTGVALIGKFDRGNELLWGANLSHRGHTIKDAMESRRSLRRGRRNRKTRYRAKPEGWLPPSLQSRVDNVSSFLKKLCFRTPISECHVETVRFDMQKLVNPEISGVDYQQGELFGYEIREYLLEKWRRTCAYCDKKDVPLEIEHIHPKSKGGSDRVSNLTLACHCCNQAKGNLPIEQFVKDNTRLLRILAQAKAPLKDAAAVNATRYAIGHAIRAFGLPTAFWSGGRTKCNRTQQGYPKDHFIDAACVGESGASVMINADIKPLLIKATGRGTRQTVRTDKFGFPRNKAGRVKRVHGFSTGDLVRLTQPNGKYAGTYVARLAGIRADGRFDIATAMGKVTANFKHFSLIQRGDGYAYAH

SEQ ID NO: 4290 - protein, 451 aa, Burkholderia sp.; identical to SEQ ID NO: 3380

SEQ ID NO: 4291 - protein, 465 aa, unidentified
MSTCACVLSKNGERLMPTIRLGKVRHLLKDGKAKIIKHHPFTIQLLYDSETNIQPIEICEDVGYNYIGIGVKSQSHEYVSAQYDTLQDEKSCHDACRRMRRTRRNRLRYRQKRFDNRKRDKGWLAPSLKHKKELNVNVIKMYCEVVPITHATVEVGSFDTMLVKAIEEGKATPEGADYQKGPRYNLATLREAVFYRDNYTCQVCGREASEGAILHVHHMFYWKGRHDNSLSELITVCEKCHTPANHQKGGKLYGFGEDIKFANLSGAAFMNTVRWQIVNELYAAFGKPFVTFTYGAMTKEKRIALHLEKSHNNDAYAMGEFHPNCRCTFEHYEKVRRNNRILEKFYDSRYIDIRTGEIATGKELFNGRINRSHKKDSENLHKYRGKRIRKGYRALRRKKVALNPGDLVSLNGEILTVHGTHTKKNGSVNVEFKTPSKSGKKSTSLKKLKIIKTISPMRSAWDKVS

SEQ ID NO: 4292 - protein, 451 aa, unidentified
MSVAVISKTGERLMPTSEYRARKLLKLGKAVKYSYHPFTIQLTEREDGDVQPIELCMDTGYIHIGISVKSEKHEYLAEQIDTLTDERARHDACRMYRRQRRGRKRYRQPQFNNRKRDKGWIAPSLEHKKDIHVQAISRINKVMPLTDITMEMGNFDTQVLRAKEEGKPLPQGADYQHGERYGTATLREAVFSRDNYKCQCCGRTISDGAILHVHHIKYRSHGGTNSMVNLATVCDKCHTPKNHKPGGKLYNWKPKLPDFKGTTFMTTIRWQLYSEVKSLFPDVNIHVTYGAATKEQRRELSIGKSHVNDAFAMGKFHPKHRINAVLYKKKRRNNRCLEKFYDAKYIDSRDGSKKTGQELFNGRINRNHKKDSENLHQYRLQKTTAGKRTVRKQHYSIQPHDIVIYENRKRETLGCHNNGTRVMLLPDKKSVAIKKIKIYKYTGGYFKSAFN

SEQ ID NO: 4293 - protein, 440 aa, Fervidobacterium sp.
MVFVLDKNKKPLMPCSEKRARQLLSRGRAVVHKMHPFTIRLKDRTVQQSQLQPLRLKLDPGAKTTGVAVLREDGDVAETVFLCEIHHKTDIKQKLDARCAVRRSRRNRKTRYRKPRFLNRRRPEGWLPPSLKARVDQLINAVRKLTKLLPISAISIEDAKFDTQKLQNPETSGIEYQRGTLFGYEVREYLLEKWGRKCAYCGRSDVPLEIDHIVPRSRGGTDRVSNLTLACRECNQKKGNKTAAEFGYPHVEEQARQTYKQAAFMNSIRSYLSKSLSSFGIPVEYGTGALTKANRIRLGFPKEHYFDACCVGESTPSEIRITQRYVQIWRAVGRGTRQMCNTDKFGFPRGHRQRRKKHFGFQTGDIVKAIVPRGKYAGIWVGAVAVRASGFFDIKDKNGKRVCQGIRYKYCNLIQTADGWQYSKTKTNYSISHTTEVACL

SEQ ID NO: 4294 - protein, 376 aa, unidentified
MTIQLKKVVDTPNNDEIRMGIDDGAKYVGLALVQKCKTKNKVIFVATMEHRIDVHKKIVQRHEYRRYRRYLKRYRKDKSLNRANSRKQGWISPTIKQKRHAVIRIVDVLSKYICIDSIYLEDVAIDIRVLTEGHQIYGEQYQISNRLDENLRKATVLRDNCKCQLCGKKNCRLEVHHITPRRMNGSNTIGNLITLCSDCHSKVTGREMEFADQFYSKIGKKRNNYGLIYASHVMIGKTWLREELAKRAQLTLTTGGDTANKRINWNLEKSHEVDAVCITSLRPEFVNVKKWRIKPLRHQIKKRKTIEVLRFRHRDIVSYVYRNGEYHEGYVTAIFPLSKRRKENLSFQSQTKHCCRVAINKCKFICRPNKFYWLSS

SEQ ID NO: 4295 - protein, 413 aa, unidentified; identical to SEQ ID NO: 2636

SEQ ID NO: 4296 - protein, 502 aa, unidentified
  source 1..502: note = Bacteroidales bacterium
VQDKVYVVSMNKKPLMPTTNFGYVRILLKRKMAKVILSKPFTVQLLFETEENVVPTVLGLDPGRVNLAITVLEKESGNVLISSELVTRNKSVSNLMKERKAHRMIHRGCRRAKKIRRAKHSKTVFKNAKNIIQSGALKPIKVTYIKPKPARFLNRTRKENWLTPTANHLLETHLHYVNLICRIIPVSEIVIEYSKFDTQKLNNPAIQGNEYQEGLLKGYDSVHDYIYQAQDKHCLMCKNKIKHDHHIVPQHEGGSDHPDNIAGLCKKCHTKAHTDKTFVAEIKVKKEGSKKSYDSVGILNSIMPRVLQTIQELYGTENVTITTGDRTSQARKAYGLKKMHCNDSYVIALSNVDHVSRIRDILPYQFMQYRRHNRKVCDAVRERHYKNNDKKLVASNRTKRYEQKDNSLFEYKKQLKEAGLTKKKIKQSISNLNVEPSKKRLKTPTKKLAINAGCTVLYRSKRYVVNGTLNKGITLKFHGFDKETFSIEKCKLITRNSGLVCS

SEQ ID NO: 4297 - protein, 470 aa, unidentified; identical to SEQ ID NO: 2825

SEQ ID NO: 4298 - protein, 424 aa, unidentified; identical to SEQ ID NO: 3351

SEQ ID NO: 4299 - protein, 457 aa, unidentified
MDAVAVISASGKPLMPTNPVRARKLIKKGKAVIYKYRPLFTIRLTERTDGDIQTIEYCCDTGYQHIGLSIKSRKHEYVNERRDLLPNETERHNDSRKYRKARRRRKLRHRACRRDNRHDNQICKDGYAPSIRNKRDQHISLYRSYTEILPVERAVFEMGQFDTQVLKAIEKGEPLPQGKDYQHGERYGYATLREAVFARDDYTCICCGKNSFKDKRILCVHHLGFRIGDRTNRLANLATVCTKCHTPKNHQPKGKLYNLKPELKDFKGATFMTMVRWDMLDKLKVVSKDIQVDVTYGAATKEARRDLKIKKSHANDAYCMGSFHPSHRTDLKRYEKCRRNNRVLSKFYDATYIDIRDGKKKKANALGCNRTKRRESRRSEKNERIYRGEKVSKGRIVLRTKRAVIRPGDIVYVGKKKYIVASSKNLGAQLKLADGSLLTTSKVTKIIHCGGWKTVTL

SEQ ID NO: 4300 - protein, 471 aa, Caldicellulosiruptor sp.; identical to SEQ ID NO: 3375

SEQ ID NO: 4301 - protein, 428 aa, unidentified
MNRVFVLSRTRTPLMPCHPARARKLLRHGRAAVFRRQPFTIILSDREAGEIQPVVFKADPGSKTTGLALVAEFQRGRQVVWAANLTHRGHRIKAALTDRRMFRRGRRGRHCRYRPARFDNRTRKAGWLPPSLMSRVNNVSAWYSRLLDRTPITAAQVETVRFDTQAMQTPGISGVQYQQGTLAGYEVREYLLEKWCRRCAYCGAENVPLEIDHIHPKSRGGSERISNLTLACVPCNQAKSNRPVEDFLARDLKRLARIKAQAKAPLKDAAAVNATRYAIGDTLKTFGLPVSFWSGGRTKFNRTAQGYAKAHWIDAACVGEEGSDVKVPYGFQPLIIQATGRGRRRVRGNDRYGFPRGKPRTQKRVYGFQTGDLAELKCLAGKSAGAHVGRIKSIRSRGWFVLDKHDRPAREFRLLQRADGYAYTAATA

SEQ ID NO: 4302 - protein, 443 aa, Eubacterium sp.
MYWLIALNISKKEVSCMVYVLDIDGQPLMPTTRHGKVRRLLNSHLAKVVKRCSFTIQLLYQSTKETQPVSLGVDAGSKHIGLAATTDKKVVYQEELVSHNDVVKLISARRILRRSRRNRKTRYRKARFNNRVHSKHKGWLAPSVEVKIQEHITTIKRICQILPISEIQVETAEFDLQRLKAMKEGKPLPVGTDYQLGEQYDFYNTRQYVLHRDGYTCQCCGTHDNNIKLHVHHIESRQTGGDAPNNLIILCEHCHKALHEGKLELPKGKKRGKSYRDATFMGVMRKTLLERLKKEIDVPVEGTYGYITKCWREKTGLEKSHINDAICISKHPYAKPLDTYYLTKAVRHHNRQIHKSNFSKGGIRKRNQAPYLVKGFRLFDKVLYQGKEYFIFGRRATGYFDIRTLDGTKVNKGSIKYKKLRIQDTAKAYLKEARAIPHVNKFT

SEQ ID NO: 4303 - protein, 326 aa, unidentified
MDTGSKHIGSAAVANGQVVYQTQIEIRNDVSGKMEQRAMYRRTRRSRKTRYRPARFDNRGKVGKIAPSIKSKVDSHLREKKFVESILPISEWKVELASFDIHKISNPSVSKLQSVKLHVHHIKFRSQGGSDTPGNLITLCEDCHDSLHAGKLGDRVHEKLTKKTASKTKHATEMGIVKSQLKKSEWVFTETFGYETKFKRETCLNLPKTHFFDAIAICLGEGEIVNGSSFVYLKRHIANGDFQQTSGRRSEEKIPTGKIQGFKKFDKVLWEGKEFFIKGRMSTGYAILMGIDNKKVTLKPIPKFLFMKRLTARKSCLSMSRGLENS

SEQ ID NO: 4304 - protein, 463 aa, Cupriavidus sp.; identical to SEQ ID NO: 4283

SEQ ID NO: 4305 - protein, 407 aa, Succinivibrio sp.
MVYVLNCKGVPIMPTTRHGMVRRLLREHKAKVVKRCPFTIQLRYECANITQPITLGVDTGYENVGISACTEKKVLFEAKAKIRTDIVKLLSTRRETRHTRRVRKTRYRKARFLNRGIANGWLPPSIRAKVESHLRLVAKAHEILPIGKIVVEIASFDIQKIKNPEIKCAEYQQGDQLGFKNVKAYVLARDGCTCRCCNGKSKDKVLRVHHLESRLIGGDAPNNLVTLCDSCHTKFHKGLISLDDIKRGKSFKAETFMGLMRNFFFKELCNKYPCVKCTYGYITKHLREKYHLKKDHHVDARCICGVPQALPSDVYLMKKVRCHNRQIHKFTTLKGGRRKLNQAPYTVKGFRLFDKVKVGDRVGFIFGRRTSGAFDIRTVYGERINGSISYKKLQLIETRKIWLIEKC

SEQ ID NO: 4306 - protein, 431 aa, unidentified
MPDKVYVISRLGHPLMPCSPAKARHLLDDKKAKVVKRMPFTIRLLYGSTKYIQPIILGVDAGSKTIGLSASTAKGEVFAAEVMPRNDVVENLSTRREFRRARRNRTTRYRKPRSDNRVRSNHERWLAPSVKVKIQEHITSIKRVCTILPISKVVIETAEFDLQLLKAIQEGKPIPEGEDYQKGEMYGSYNVCQYVLWRDNYTCICCGVRGTPKNPVRLHVHHFESRKYGGNAPDNHGTLCDDCHKKFHLGIIADVKLKTRRRQSTRDAAFMGIMRKTLMWRLRTELFIPVAETKGYITKATREKLLVLPKSHTRDALAIAQGRHGFSIKEYAYVEPANHIYTVRPVRHHNRQLHKASILKGGIRKRNQASKYVFGFRLYDKVLYQGKACFVWGRRTSGTFLLRTIDGIKVKDGVSYRNLTLLERSSNYLIA

SEQ ID NO: 4307 - protein, 512 aa, unidentified
MSTIYVLNKDGKPLMPTTRGGHVRHLLKEQKARVVQSNPFTIQLLYETDDAVQPLYLGIDPGRTNIGVAVVKTDGTAVFTAHLGTRNKEIPKLMQGRKKARRARRTNGRRCRRQRRAKANGTISKKCVKQDTAQNGSVSKRAKKIGVIKRHLPGCEKEVLCIGIKNKEAKFNNRTRPEGWLTPTANQLLQTHVNLVKKIQKFLPISDVVLEVNKFAFMQLDNPNIQKWQYQQGPLYKKESLESAVSEMQEHHCLFCKKPIDHYHHVVPQHKNGSNTIGNIVGLCTKHHDLVHKDSAWEKKLAKKSTGLYKKYAALGVLNQIIPALTNKLSVLFPKHFFVTTGKSTHDYRESHGVSKDHWLDAYCIACSALPGSVCDSDINNHVPYELKQFRRHDRRALHKENMSRVYTLNGKKVATNRHKAVEQTTDSLEEFRQCQPNDVCKLKVKEHHPTYRNMNRNYPGSVFLVDGQIHVMQGVGGSHNGKADGYYDTNSNAYPYYKCKFVAKNEGIVFA

SEQ ID NO: 4308 - protein, 456 aa, Halomonas sp.; identical to SEQ ID NO: 3676

SEQ ID NO: 4309 - protein, 431 aa, unidentified
MPDKVYVISRLGHTLMPCSPAKARHLLDDGKAKVVKRTPFTIKLLYGSTEHTQPVILGVDAGSKTIGLSASTTKEELFAAEVMPRNDVVETLSTRREFRRARRTRTTRYRKPRFNNRVHSKNNGWLAPSVEVKIQEHITSIKRVCAILPISKIVVETAEFDLQLLKAVQDGKPVPEGEDYQKGEMYGSYDVRQYVLWRDNYTCTCCGVKGTDKKPVKLHVHHFESRKHGGNAPDNYGTLCEDCHKKLHLGIITDISLKTRKRPSTRDAAFMGIMRKTLMQRLITGLSIPVAETKGYITKAAREEILKLPKTHTNDALAIAQGRHGFGIREQAYVKPTNRIYTVRPVRHHNRQLHKATMLKGGIRKLNQASKYIFGFRLYDKVLYQGGECFVWGRRRSGSFLLRTIDGTKVKDGVGYRNLTLLERSTNYLIA

SEQ ID NO: 4310 - protein, 430 aa, unidentified
MVYVLDISGNPLTPTKRHGKVRHLLETGKAVCVKRCPFTIRLTYQNAGPELEGLSLGVDCGSKHIGLSVSSEEQEYYSSEVELRQDIPANLSTRREFRRARRHRKMRYRKPRFLNRIASKKKGWLAPSVRQKVESHLNRIDKAVKMLPIREIKVEVAAFDLQKLQADLKGLKRPKGEEYQQGPQLDFWNVREYVLFRDHHECQCCHGKSGDKVLNVHHLRSRKVGGDAPDNLITLCEYCHGQYHKGELELPESAKKPKPLRDAVFMGIMRWTLYSRLKEIYEPQGIKVKLTYGYITKHTRIENGLEEKSHRLDALCIAGHPKAKRCREWFLQKKVRCHNRQLHKATIQKGGVRKANQLPAVIKGFRLYDKVLFQNRECFIWGRRKTGYFTLKTLDGIMICDGVSSKKLTLLEKRKSYLTERRKQELCNSF

SEQ ID NO: 4311 - protein, 499 aa, unidentified
MRYVYVLDVDGKPLMPTCRFGKVRRMLKSRQAKAVDTLPFTIQLTYKPRTRILQPVTLGQDPGRTNIGMAAVRFDGKELGRFHCITRNQEIPKLMADRMAARKASRRGERLARKRLARKLHTTAKHLEGRMLPGCSEPIAVKDIINTESRFNNRLRPEGWLTPTATQLLRTHINLFRKLSGILPVTDVAVELNKFAFMQLDNPEMKKREIDFCHGPLCGTGGLEAAVKEQQDGKCLLCGKESIGHYHHIVPRSRRGSNTIANIAGLCPKCHELVHKDADTAERLTEMKTGLTKKYGGTSVLNQIIPKLVETLADLFPGHFHVTNGWNTKEFREKHHLEKDHDVDAYCIACSHLKPEETLVETEPFEILQFRKHNRAIIHHQTERTYKLDGVTVAKNRKKRMEQKTDSLEDWYVDMAKEHGKTQADAMRSRLTVIKSTRYYNTPGRMMPGTVFLYEGKRYVMTGQITNGKYYRAYDQEKRNFPAVKVRILTKNTGLVFVA

SEQ ID NO: 4312 - protein, 442 aa, unidentified; identical to SEQ ID NO: 2903

SEQ ID NO: 4313 - protein, 443 aa, Anoxybacillus sp.
MVEENMTCFMQRKGEYPMVFVLDTNKCPLAPCHEAVARKLLKQGKAAIYKRYPFTIILKEIVDNFRPKTPYRLKIDHGSKHTGLAILRGQEVVWLGQLDHRTDIKERMDKRRAFRRARRNRKTRYRKPRFLNRRRKDGWLPPSLESRVQNIQTWVNRLKKLCPIGYISYENTKFDTQLMRNPEISGIEYQQGTLQGYEVREYLLEKFGRKCCYCGKENVPLEVEHIIPKSRGGTDRVDNLCLACHDCNQRKGSKTAEEFGYPHIQKQVKESLKDASAVNSTRWKVYEVLKQSGCEVECGTGARTKMNRIRLDLPKTHYFDACCVGESTPNHLYFKTKEVLFIRAKGRGSRSRTNLDRYGFPRGYLARQKFFFGFQTGDMVKAVIPRGKYQGVWFGEVACRKTGSFDIKGKDGKRIAQGINYRYVQVIQRFDGYTYRREGMNIA

SEQ ID NO: 4314 - protein, 490 aa, unidentified; identical to SEQ ID NO: 3566

SEQ ID NO: 4315 - protein, 463 aa, Cupriavidus sp.; identical to SEQ ID NO: 4159

SEQ ID NO: 4316 - protein, 451 aa, unidentified; identical to SEQ ID NO: 3061

SEQ ID NO: 4317 - protein, 529 aa, Paraburkholderia hospita; identical to SEQ ID NO: 3816

SEQ ID NO: 4318 - skipped

SEQ ID NO: 4319 - protein, 415 aa, unidentified
MIYVRSKKGKALMPSERGGRIGYLLRHGKAHVVSRVPFVVQLDYESTTYTQEVSLGIDAGSKHIGVSASSEKKELLAAQVELRNDVVNLLSTRRELRRTRRNRKTRYRKVRFDNRKRKDGWLAPSIELKVESHLKVIRLVHKLLPITKTTIEVAQFDAQKIKNPDIKGEEYQQGEQMGFWNVREYVLARDGHRCIHCKGKSRDPILNVHHLESRKTGGNSHSNLVTLCETCHKAYHRGEFELKIKRGSSLRDAAVMNIMRWAVYERAKEEFGNVNLTYGYITKHTRIENGIAKTHAADAFCIAKNVHAMRLSSFFMCRCVPRHTRALHVANPKKGGIRRSCIASHKIGKSRFQRFDMVRWMGKECFIFGSTNGKPVLRDIKGIKMHENASVNIKTIKFLRRLRNNILMEEKTSES

SEQ ID NO: 4320 - protein, 430 aa, unidentified
MPKVYVLNRHGRPLMPCTPAKARHLLDAGKAKVKHRTPFTIQLLYGSTGYAQEVILGVDAGSKTIGLSASTETEELFSAEVKPRNDVVELMSVRRQFRRARRNRTTRYRKPRFDNRVRSKHKGWLAPSVEVKIQEHITAIKTVCRILPVSKVVVETAEFDLQLLKAIADGKPVPQGEDYQKGEMYGHYNVRQYVLWRDGYTCQCCGAHATQKKEVRLHVHHLESRRVGGDAPDNLVTLCTACHDKLHKGIIMAADIKKRKRRSTRDATFMGIMRMTLLRRLREQLPVPVVETRGYITKATRENLLVLPKSHTNDALAIAHGPQGFRAEYLPNIRQADRLYTIRPVRHHNRQLHKATILKGGVRKANQAEKYICGFRLYDKVLYNGIECFVWGRRTSGSFLLRQLNGEKVKDGVSYKHLKLLERSQSYLVA

SEQ ID NO: 4321 - protein, 407 aa, Sutterella sp.
VRLFPFTIRLTDRLIEDSKLQPVLVKIDPGSRRSGFAVVRVDEKGDHHALFFIELVHRGASIRDALTGRSACRRWRRGNLRHRAPRFLNRTKPQGWLPPSLRHRVDTATAWVAKLVKLAPVTGIVEELVKFDAQKVQNPEISGTEYQQGTLFEYEVREYLLEKFGRKCVYCGAENVPLNIDHVVPKARGGSNRVSNLVLSCVDCNQKKDAQPVDVFLKNRPEVLDRIKRQIKKPLRDAAAVNATRWSLFNALKAFGLPVKTGSGALTKFNRHTFGVPKEHWLDALCAGRVNGVHYPKGMGILQVRCTGRGSYQRTRVDKYGFPRGYLTRQKRVHGFATGDMVKAVVPSGKKAGAYLGRVSVRKSGSFNIQTPEGVIQGIGWRHCRLLSFNDGYGYAWLCPAPHSFPV

SEQ ID NO: 4322 - protein, 442 aa, Lactobacillus sp.
MKHENANRVFLLNKDGKPLMPCRPRKARLLLTSGKAFVVKKYPFTIQLKYGSYGYKQKVSLGVDTGQRHIGFAIVSQNKVLHQSEVELRQDVHKNLYTRKIYRRSKRNRKTRYRQAHFLNRVHGKRDGLWLPPSIKGKVSHNIAWIKRYLAVLPNPDLHIEVGKFDMAKMVNPEISGKQYQEGSLKDWKNYEYYVLARDEYTCQLCHKHGEGVKLVVHHIVYRSQGGTDRVDNLITLCTNCHTTKNHQPGGKLYKWMKAKKKVIKQLKGATFMNILRKRIMTAFPEASFQYGSQTYVDRKNLLLPKGHFMDAIAISGIKSVGQLSDTVTMISQFRKKKRSLHEATARKGRKQPNTSSKRNEKNTKHARGLWLNDYVRVIGNHAKGYVKGFKSNGYYVYLTDGLGNYVLNNGKNYINGQQCRLIMHNGNWQKAEQKLSLYKFK

SEQ ID NO: 4323 - protein, 445 aa, unidentified; identical to SEQ ID NO: 4102

SEQ ID NO: 4324 - protein, 427 aa, Enterococcus sp.; identical to SEQ ID NO: 2410

SEQ ID NO: 4325 - protein, 396 aa, unidentified
  REGION 1..396: note = Ga0373627_0011171
LRVSTNVYVLNKRGEPLMPCSPRKARVLIKENKAKVIKNYPFVIQLTESTGEQMQECSLGIDSGAKNVGFSVITDKKEIVSGTLILDQRASERLTEKRMYRRNRRNRLWYRKPRFNNRNRQEGWLPPSVQRRFNTHVSLINKLKKIIPIKRVTVEVGNFDIQKINNPEIEGVGYQRGDLFGYRNIKNFLMHRENGKCQLCGKESSKDNKFHIHHIILRKDGGTNSQKNLALLHEKCHKKLHKQNLYNLLKKNKIYKEATFMNIIKSKFQEFGFNLVYGYETFVKRNILGLEKAHYNDAFVIADGNIQERINPIEIEQKRRNNRILQTNRKGFIPSIRRKRYTIQNRDFVWIKGKMCLCGGIASKGYSVYVFDKKKIKSVISSKTIEKVYHTGNLVW

SEQ ID NO: 4326 - protein, 431 aa, unidentified
MPNKVYVINKHGRPLMPCSPAKARHLLDAGKAKVKKRTPFTIQLVYGSSGYTQEVILGVDAGSKTIGVSALTKKEELFAANVIPRNDVVDLLSTRREFRRARRNCKTRYRKPRFDNRVRSKHKGWLAPSVEVKIQGHITAIRRVCGILPVSKVVVETAEFDLQLLKAIEKGKPVPQGEDYQQGEMYGHYNVRQYVLWRDDYTCQCCGAHTTKKKEVRLHVHHLESRKTGGDAPSNLITLCDSCHEKLHKGLIAEKDFKKRKRRSTWDATFMGIMRKTLMQRLCSELPIHVVETRGYITKATREKLLVLPKSHTNDALAIALGKHGFNVGYLPEIAQIDKIYTIRPVRHHNRQLHKVTILKGGIRKSNQTGKYVFGYRLFDKVQFNGQDCFIWGRRTTGIFTIKTINGKMIKDGISFKKLKLVEKSTSYLIA

SEQ ID NO: 4327 - protein, 418 aa, unidentified
MVYVIGKEGQALMPTERFGKVRRLLKNGLAHVVCRIPFTIQLDYETTYFVQPISLGVDAGSKHIGISATTSEKELYAADVELRNDIVEKLSTRREQRRTRRNRLRYRKVRFNNRVSSKRKGWLAPSVENKIQTHLTVVEKIHKFLPITNIVVETASFNIQKIKNPSISSEEYQKGEQLGFWNVREYVLFRDNHTCQHCKGKSKDHILNVHHIESRKIGGNSPSNLITLCESCHKAYHNGKIDIKVKRGASFRDAAFMGITRWTTYERLKNIYPNVNMTFGYITKNNRITNGLPKDHYVDARCISGNSKAKPLGYYFYQKKVRCQNRQIHKVNFLKGGRKKLNQAPFLVKGYRLFDLVEYQNDLYYIFGRRDSGFFDIRKLDGTKVNKGSISCKYIRLVDIRRSVLTERRKSCSIPPTN

SEQ ID NO: 4328 - protein, 340 aa, Bacillus sp.
MVFVLDTNKCPLAPCHEAVARKLLKQGKAAIYKRYPFTIILKEIVDNFRPKTPYRLKIDHGSKHTGLAILRGQEVVWLGQLDHRTDIKERMDKRRAFRRARRNRKTRYRKPRFLNRRRKDGWLPPSLESRVQNIQTWVNRLKKLCPIGYISYENTKFDTQLMRNPEISGIEYQQGTLQGYEVREYLLEKFGRKCCYCGKENVPLEVEHIIPKSRGGTDRVDNLCLACHDCNQRKGSKTAEEFGYPHIQKQVKESLKDASAVNSTRWKVYEVLKQSGCEVECGTGARTKMNRIRLDLPKTHYFDACCVGESTPNHLYFKTKEVLFIRAKGRGSRSRTNLDR

SEQ ID NO: 4329 - protein, 512 aa, unidentified
MSTVYVLNKDGKPLMPTTRCGHVRHLLKEQKARVVTSKPFTIQLLYEADDVVQSLCLGIDPGRTNIGVAAVKADGTAVFTAHLETRNKEIPKLMKKRKESRRARRTNGRRCRRQRRAKANGTISKKCVKNDTAQNGSVSKRAKEIGVIKRHLPGCEKDVLCIGIKNKEAKFSNRTRPEGWLTPTANQLLQTHINLVKKIQKFLPISDVVLEINKFAFMRLDNPNVQKWQYQQGPLYQKANLEETVSEMQEHHCLFCKNTIDHYHHVVPQSENGSNTIGNIVGLCTKHHDLVHKDATWQKRLAKKKTGLNKKYGALSVLNQIIPALTKELSSLFPKHFFVTNGKSTYDYRAAHGVSKDHWLDAYCIACSVLPNDTCDKTINSRVPYELKQFRRHDRRALNNENMSRVYTFNGKMVATNRHKATEQTTDSLEEFRQRQPNDVCNLKVKEHHPTYRNMNRNYPGSVFLVGNQVHVMQGIAGSKDGEATTYKDTNANSIAAGKCKFVAKNSGILFV

SEQ ID NO: 4330 - protein, 521 aa, Mahella sp.
MSRIKPGETYQPVWLSIYLERGGKMVYVISKDGKPLMPTKRHDRVRILLKQKKACVVQSKPFTIQLLYDSTTYTQDVASAYDTGRTHQSITAIDSSTTDVLYSSVNHCRNKDVPKLMKERKMYRMIRRHNRRRKKIRRAIANHTYFRAPRKVVQPGTKEPITAKYVKPKQARFSNRKRPEGWLTPTAHQLLQTHINYFNKVAKILPIRKVVLEYGKFDIQKLENPDIAGKQYQQGTLYSYNNMREYIIAKQEGKCLLCGKRKIEHLHHIVPRSKGGSDTYKNIAGLCGKCHEKVHKDPKAKTKLAQKAAGAAKEYADPSILNIIMPYLYEYLKSKLGEENVEIRYGYETETMRRQLGLSKTHYNDSYALALMGAGHISRIEKIKPYEYKQYRRHNRSFTDAQRDRLYKQDSKIVARNRHKKTEQEEPSLEEYRQEIAEAAEKEEASCAISGLKVYRAVKRMRTPAKDVPITSGSSVLYKGQRFIVKGILHKGQSLLLEGHDGYVSTGSCRLMTRNTGIVCL

SEQ ID NO: 4331 - protein, 472 aa, Cupriavidus sp.
MSVFVLDKHGKPLMPCTEKRARLLLERRRARVHRVVPAVIRLVDRTVDDCEFQPLRIKLDPGSKMTGGALVRDTELACSVSGEIQRGAAVLSLFELVHRGGQISERLTARRSMRRRRRGANLRYRAPRFLNRTRPAGWLAPSLQHRVDTTMAWVQRIRRWAPVNGVSSELVRFDMQAMENPEISGVEYQQGTLAGYEVREYLLERWGRACIYCDAEGVPLQVEHLTSRARGGTNRVGNLGLACECCNQKKGSRDVREFVKDPTRLARILTTAARPLKDAAAINATRWALANALRATGLPLELASGGRTKFNRAAHTIPKTHALDAACVGDVNAITGWQRPTLEVKATGRGSYQRTRLTASGFPRGYLMRRKQVKGFQTGDRVHAVVPSGKKAGTYAGRVAVRASGSFNIQTPNGVVQGISHRHCSLVQRADGYGYHFRSKDSLYKGEAGEGRAAHAALSIPVLKDGVSRASR

SEQ ID NO: 4332 - protein, 493 aa, unidentified; identical to SEQ ID NO: 3154

SEQ ID NO: 4333 - protein, 456 aa, Halomonas sp.
MAVFVLDKHKRPLMPCSEKRARLLLARGRAVVHKRYPFTIRLKDRVSGETQPLRLGIDPGSKTTGLALMREPDSQQRHVLCLFELIHRGFQIKKALQQRAAFRRRRRSANLRYRAPRFNNRIKPKGWLAPSLQHRVDTVMAWVNRLSRLAPVTAISQELVRFDTQKLDNPEISGVEYQQGTLLGYEVREYLLEKWGRECAYCGTGDTPLEIEHVVPRSRGGSNRVSNLTLSCHPCNAEKDSQTLTDFFATNKGLKKRLKANGLSADAQLERVQRQLKQPMRDASAVNATRWALFSALKTTDLPVAVSSGGRTKYNRQRLNIPKTHALDAACVGAFGKLHDWTVPTLTIKAMGRGSYQRTRLTKHGFPRGYLMRQKQVHGFQTGDMVRAIVPTGKKAGTHTGRVAIRKTGSFNIQTEQGAVQGISHKYCTVIQRGDGYGYYITPFTNLTGGAGQAVA

SEQ ID NO: 4334 - protein, 426 aa, Dactylococcopsis sp.
MSNYVFVIDQKKTPLKPVHPKRARQLLSSGKAAVFRLFPFTLILKKEVPNPDIHPLTLKIDPGSKVTGFALVTDQGEVVWRMQLEHRGGIIKKRLEQRRALRRKRRSRLRYRQPRFLNRKRQEGWLPPSLMHRVQTTETWAKRLIKFCPVQEIWIEKVKFDTQAMENPEIDGKEYQQGTLQGYSVREYLLEKWDRKCAYCKKENVPLQVEHIHSKSKGGSNQVSNLCLACERCNQKKGDKSIKDFLKKKPTILESVLKQAKSPLKDASAVNATRNKIVEVISQHSSVKTATGAQTKMNRVRLGLPKEHCLDAACVGEVETLTILSHQPLMVTATGTGGRQKCQTNKYGYPIKHRPLRPIQGFQTGDIVQVDIPKGKNQGQWTGRLCPYSDGNCEICPKGRKRLGTKLSYVSRVVHQKDSYKYRHLS

SEQ ID NO: 4335 - protein, 428 aa, Enterococcus sp.
MVYVLSINNEPLMPCSNVIARLLLKQGKAKVKYREPFTIKLTYETTTYTQPLTLGVDTGSQTFATAVTNGKGNILYTSEVVLREDKNHSIKKKMDQRRMYRRNRRNRKTRYRKARFNNRKNSKRKNRFSPTMTSKLHSHQKEIEFIKSILPIAKLILETGTFDPHLMKNPSLANLKVKPWGYQQGPNYGFENMKARILARDNHTCQICKKKPKNERLEVHHIIFRSQGGSDEENNLVTVCHSCHVELHKGLIHPNFEGSLKNALKYATQMNSIRVQLLKLYPDAIETFGYVTKANRLNLGLPKEHYVDAAVIATAGNQVNFACNLMIKRCIPKGDFQRTKGIRSEKIIPKGKIDGFKKYDKVRYFGNEYFVKGRMTTGYIQLMNIYGEKISFNHMPKGFKTPKTKNCQRISARKTWITTTEPLIKNIA

SEQ ID NO: 4336 - protein, 480 aa, unidentified; identical to SEQ ID NO: 2726

SEQ ID NO: 4337 - protein, 437 aa, Haloactinospora sp.; identical to SEQ ID NO: 4158

SEQ ID NO: 4338 - protein, 423 aa, Moorena sp.
MRVFVLNKNRQPLDPCKPARARILLSVGKAKVYRRYPFTIILTEEVKQPITHDHQLKIDPGAKISGLAIVQGKRVIWGSELTHRGFQIQEALTSRRQLRRSRRNRKTRYRKPRFLNRTRSKGWLAPSLTSRVQNILTWVKKLIRFCPITGISQELVRFDTQKLQNPEISGIEYQQGTLYGYELREYLLEKWNRKCAYCGATGTQLEIEHIKPKSKGGSNRVSNLTIACHPCNQAKSNQDIELFLSKKPSILKRILSQSLRPLADAASVNSTRCTLYYELKSIGLPVEVGSGGLTKFNRCRQNLPKTHWLDAANVGKVETLIIEVTLPLVITAKGHGTRQLCRTNKYGFPIRHCSRIKFHKGFQTGDIVRAVVTKGKNIGTYVGRVATRKSGSFNISTKSGLVQGISHKYCRFIHRKDGYAYTN

SEQ ID NO: 4339 - protein, 491 aa, Pseudomonas sp.; identical to SEQ ID NO: 3597

SEQ ID NO: 4340 - protein, 451 aa, unidentified; identical to SEQ ID NO: 4197

SEQ ID NO: 4341 - protein, 418 aa, unidentified
MSNYVFLIDANKTQLNPVHPKQACKLMESGKAAVFRHYPFTLILNRAVDNTMVHPLTLKIDPGSKVTGISLVTDQSEVIWGMELEHRGQAIKDALQTRRAVRRARRSRNTRYRKARYLNRKRPKGWLAPSLMHRVLTVETWIKRLCKFVPIGEIRMELVRFDMQKLENPEISGVEYQQGTLAGYEVRQYLLEKWGRKCTYCSKENVPLQIEHITARANGGSNRVSNLCLACHKCNQKKGTKDLKGFLKGKPDLVAKILKQSKAPLKDASAVNSTRWKLFEVLRSTKLSVTTGTGGQTKYNRSRFGLAKEHWLDAACVGITESLAILTQKILSQKATGFGTRRLCRMDKFGFPCSKPRQTYNTPWKTGDIGRTIQGVVGRVVVQNEKRLEIRVNGVRHYCKPHEVKPMHRKDGYSYAEI

SEQ ID NO: 4342 - protein, 437 aa, unidentified
LIRGLKGKTFMQKFEAKFQNVPMDAPQVHSSTSTLLNRDQNLSEVSIVRTSNNLEVDLLQHKGEQGLRVPATAYVLNQRGRPLMPCSERKARVLLQKGEAKVIRNYPFVIQLMKATGEQVQQCFLGIDSGYKYVGFSAITDKKEIVCGTFTLDGKTSERLTERRMHRKNRRNRLWYRKPRFNNRMRKVGWLPPSIQRKFNTHITLINILKKLLPTERVTIEVGNFDIQRIENPDIKGIQYQQGSLFEHQNMRSFLMAREHGKCQLCGKEFSKTNPSHIHHIIPRNKGGTDREKNLALLHKKCHDKLHKKSLYNSLKKNKQYKEATFMSIIRNKFRETIVGCRIVFGNETFVKRQQLRLEKSHSNDAFVIAGGTTQIKTIPNDMGQKHKNNRSLQTVRRRLGICVRRKRYSIQPFDLVTVDNLKYVFRGCSNRGKIVL

SEQ ID NO: 4343 - protein, 443 aa, Anoxybacillus sp.
MVEENMTCFMQRKGENPMVFVLDTNKRPLAPCHEAVARKLLKQGKAAIYRRFPFTIILKKSVDESEIKATYRLKIDYGSRHTGLAILRGQEVVWLGQLDHRTDIKERIDKRRAFRRARRNRKTRYRKPRFLNRKRKEGWLPPSLESRVQNIQTWVERLRKICPIEHISYENAKFDTQLMRNPEINGVEYQQGTLQGYEVREYLLEKFGRKCCYCGKENVPLEVEHIIPKSRGGTDRVDNLCLACHDCNQRKGSKTAEEFGYPHIQKQVKESLKDASAINSTRWKAYEVLKQTGLDVECGTGARTKMNRIRLDLPKTHYFDACCVGESTPNHLYFKTKEVLFIRAKGRGSRSRTNLDRYGFPRGYLARQKFFFGFQTGDMVKAVVPRGKYQGVWFGEVACRKTGSFDIKGKDGKRIAQGINYRYVQVIQRFDGYAYGKGVAELA

SEQ ID NO: 4344 - protein, 529 aa, Burkholderia sp.; identical to SEQ ID NO: 3816

SEQ ID NO: 4345 - protein, 493 aa, unidentified
MAAVYVISASGKPLMPTTRCGHIRGLLNAGKARVVEREPFTIQLKYETPDVTQPLYLGIDPGRTNVGSAVVREDGECVFTAQLTTRNKDVPKLMKARKQFRMAHRRLKRRCKRQRRAKAAETLSQKGEFQRLLPGYEEPILCKGIRNKEARFNNRQRPAGWLTPTANHLLLTHLNMVKKLQKFLPITDVVLEVNRFAFMAMENPSIRRWQYQQGPLYGKGSVEDAVYAQQDGHCLFCGKPIAHYNHVVPQHKNGSETLENRVGLCNEHHDLVHKDRAWDAKMKETKAGLNKKYHALSVLNQIIPALTEQLTAMFPQHAFVTTGKDTADFREDYGIAKEHHLDAYCIACSVLAEPTKVAAPTGKPHRLMQFRRHDRQVCHKENIKRVYLSEGKAVATNRHKAIEQKDDSLEEFRKTHTQQEVSALTVKDHQPVYKDMRRFMPGGVFLFNGKVHTLQRSHGRYKGMPFYYIDTDGSKNHAKGCIFLQQNCGLRWV

SEQ ID NO: 4346 - protein, 445 aa, unidentified; identical to SEQ ID NO: 4102

SEQ ID NO: 4347 - protein, 414 aa, unidentified
MPCSPAKARLLLKEKKAIVVRRTPFTIQLTIATGEAKQPVSLGVDAGYKHVGLSASTEKAELYASEVELRQDVSDLLSARRALRQSRRSRNTRYRAPRFDNRIRTKRKGWLAPTVENRINVHLSRIETVLRLLPVTKITVETASFDTQLLKNPDIAGKEYQEGEQLGFWNVREYVLFRDGHVCQHCHGRSKDPVLNVHHLESRRTGGDSPGNLITLCETCHKALHRGEIKLKAKRGRSFRAETFMGIMRWGVLNRLKASHPKLEVHNTYGYRTKHARIANGIAKSHCADAFCIAGNFGAKRLGEFFFQKQTRRNNRQIHKLSILKGGIRKRNQAPFEVKGFRLFDKVACQGEEGFIFGRRSTGYFDVRKLDGTCISAGISYKKLHLLEKRRTYLTEIRKEEALPPPPEGRGLRA

SEQ ID NO: 4348 - protein, 415 aa, Bacillus sp.; identical to SEQ ID NO: 2431

SEQ ID NO: 4349 - protein, 406 aa, unidentified; identical to SEQ ID NO: 2752

SEQ ID NO: 4350 - protein, 512 aa, unidentified
MSTVYVLNKDGKPLMPTTRGGHVRYLLKEKKARVVTSKPFTIQLLYETDDVVQPLYLGIDPGRTNIGVAVVKTDGTAVFTAHLETRNKEIPKLMQGRKKARRARRTNGRRCRRQRRAKANGTISKKCVKQTTAQNGSVSKRAKKIGVIKRHLPGCEKKVLCIGIKNKEAKFSNRTRPEGWLTPTANQLLQTHINLIKKIRKFLPVNDVVLEINKFAFMQLDNPNIQKWQYQQGPLYQKASLEEAVSEMQEHHCLFCKQSIVHYHHVVPQSENGSDTIGNIVGLCTKHHDLVHKDTAWQKKLAKKKTGLNKKYGALSILNQIIPALTKELSSLFPKHFFATNGKSTHDYRAAHDVSKDHWLDAYCIACSILPNDTCDKNINGRVPYKLKQFRRHDRRALHKENMSRVYTLDGKKVATNRHKAIKQTTDSLEEFRQRQPNDVCKLKVKEHHPEYRNPERNFPGCVFLVGKHTHVMQGTSGSHNGKADGYYDTNGNSYPSGKCKFVAKNKGIVFA

SEQ ID NO: 4351 - protein, 427 aa, Methanosarcina sp.
MFVFVLSKGGNPLMPTKPAKARILLKTGKAKVVRTTPFTIKLLFESSSYTQPVIAGMDTGSKVVGCAAIANGKVLYQSEIHLRENVSKKMDQRKMYRRNRRGRKTRYRPARFANRGNSRREGRLAPSIKSKLEAHFREKRFVESLLPVTGWKVELASFDIHKITNPEVSGVGYQEGDLKGFYNVKAYVLDRDGYTCQHCMGKSKDFRLHCHHIVFRSQKGSDAPENLITLCETCHKALHNGEFKLSGKKSKTKHATEIGILKSQIRKSGWNFAETFGYETKYRREQVLKLLKTHYFDAVAICCRDDQKVEVEDSVFLKRNVPAGDYQQRRGKRSEKKMPTGKLFGFRKFDQVKTEKGIGFIRGKRSSGYFSISDIFGNKISDSVNVKKKCRRLSARSTTLVQIVQMTHSSPTCHFRQARNVEEGVSC

SEQ ID NO: 4352 - protein, 454 aa, Calothrix sp.
MNFLLVQLQTTKMKVLVINKHGQPLMPTSPRKARLLLSSGKAKIVGRDPFTIQLIYGSSGYKQEVTLGIDAGYQHIGFSAITEKEELIGGELELLDGVSERITERFKYRRQRRNRLRHRAPRFDNRTREEGWLTPSVQHKLDTHIKIVERIKSILPVTKIIIETANFDIQKIKNPKIEGKQYQEGEQLGYYNLTCYIRHRDGYKCQNPNCKGKSEVLQIHHIGYWKIPPDRSDRPGNLITLCEKCHTPANHEKGKLLFGWEPKVKSFKPETFMSTIYGKLLNILNAEQAYGYETKFNREQLQLPKTHHNDAFVIAGGSTQIRSTPLILEQIRRNKRSMEQFYDAKYIDTKTKEKTSGSILSSGRRTRNKNLNSENLRVYRGHKVSKGQRRIKKQRYPYNPNDYIEFENNKYRVIGMQNLGTGVKIANYPGVNNKVVSVSKVKPIKRRSGICTST

SEQ ID NO: 4353 - protein, 427 aa, Methanosarcina sp.
MFVFVLNTDGNPLMPTKPAKARILLKTGKAKVVRNTPFTIKLLFESISCTQPVTAGMDTGSKVVGCAAIASGKVLYQSEIYLREDVSKKMEQRRMYRRSRRSRKTRYRPARFDNRGNSRREGRLAPSIKSKLESHFREKRFVESLLTVTKWKVELASFDIHKIKNPEVSGTGYQEGDLKGFYNVKAYVLHRDGYTCQHCRGKSKDSRLHCHHIVFRSKQGTDSPENLITLCETCHEALHSGEFELSGRRSNTKHATEVGIVKSQIKKSGWNFEEVFGYETKFRREQVLGLEKKHYFDALAICCGDNQKVEPDDTIYFKKHVPAGDYQQRRGKRSEKKIPTGKLFGLRKFDLVKTEKGIGFIRGKRSSGYFSISDLFGNKISDSVNIKKKYRRLSARSTTLVQMVQLTHSSPTCHFRQAGTAEEGVSC

SEQ ID NO: 4354 - protein, 436 aa, unidentified
MTKTLTTQTTQVCVLDQQDKPLMPTTRLGKVYRLLKTKKAHIVSYEPFTIQLDYEPDTHIIQPMTLGVDSGAIHSGYSVANEHREYYNSEVIARNDISDRLSDRHMYRRNRRSRKTRYRKPRFNNRKNKKKSWLPPSLQQKVAAQINEIDHLHRYFPIEKIIVEVAEFDIQKIKNPDISGIEYQQGTLQGYNIRNYLLEKHKRKCFYCGKAVSDFEVEHMFPKSRGGSNSIDNLTLSCHDCNEKKGTLTAEEFIQQTLSAKKAAVKLKQLPNEKHLFKYMAHMNATRWTLYNTIKEKYPNVKITYGYITKYERIQAGLPKAHHIDAKCITSFATVPSMSQTVVKVKMRRHNRQLHRATFSKGHIRKAANLPTVTFGFQLYDLVLFNNHRYYIKGRRSSGYFALVSVEGLKNEERSYKKLKLLAHTNAYLTNRYVNA

SEQ ID NO: 4355 - protein, 469 aa, unidentified; identical to SEQ ID NO: 4167

SEQ ID NO: 4356 - protein, 431 aa, unidentified
MPNKVYVINKHGRPLMPCSPAKARHLLDGGKAKVKKRTPFTIQLLFGSTGYTQEVILGVDAGSKTIGLSASAETKELFSAEVKPRNDVVDLLSTRRESRRARRNRKTRYRKPRFDNRVRSKHKGWLAPSVEVKIQEHITSIKRVCRILPVSKVVIETAEFDLQLLKAIADGKPVPQGEDYQKGEMYGHYNVRQYVLWRDGYTCQCCGAHTTKKKEVRLHVHHLESRKTGGDAPGNLVTLCDSCHEKLHKGLITEDDFKKRKRRSTRDATFMGIMRKTLMQRLCSELPIPVIETRGYITKATREKLLVLPKSHTNDALAIALGKQGFNVGYLPGIAQIDKIYTIRPVRHHNRQLHKAAILKGGIRKSNQAGKYVFGYRLFDKVQFNGQDCFIWGRRTTGIFTIKTINGKMIKDGISFKKLKPVEKSTSYLIA

SEQ ID NO: 4357 - protein, 447 aa, Petrotoga sp.
VQRVFVLDKNKRPLMPCHPARARELLKKGKAAVFRYHPFTIILKDRAGGDTQPTHVKIDPGSKITGVALIGNFKNGKKVIWSAEIQHRGQSIKKALDTRRALRRSRRNRKTRYRKARFDNRERSKDWLPPSLMSRVENILTWIKRMRHFALITGISMELVRFDTQKLQNPEIKGIEYQRGTLYGYEIKEYLLEKWGRKCVYCGKENVPLEIEHIIPKSKGGSDRISNLTLAFHECNQKKGNQSIEEFLANNPERLNQIKSESKKSLKDTAAVNATRWYLFNQLKKERLLIEVGTGGKTKYNRETQNYPKKHWIDAACVGESGQNVQIEPDMQVLEITAMGHGTRKMCNVDKYGFPRSHRRAKNAPNGVKGRTYMGYKTGDIVLAVIPKGKNAGIHIGRIAIRQQPNFKLNDLDGINPKYLRLLQRNDGYGYQTARKEGEKLLHSSYH

SEQ ID NO: 4358 - protein, 453 aa, unidentified
  REGION 1..453: note = Ga0315279_10000169
MNMQTLQPKFKNVPTDASLVCSSTTLPLNRNESASVVEKVLSCNNPEVNLHWKRVSGLKVIVPVLSLKRSPLMPCGLIKARHLIKGGKAKVVKLNPLVIQLKFDCENQIQDVSLGIDSGYKTIGFSAVSEIREVSAGELNLDNGTSKKLIEKKMYRRHRRNRLRYRKPRFNNRKKSSGWLPPSIQRKFDTHLNLIKKIKAIVPVKKLTIEIGEFDIQKIMNPEISGKKYQQGNLFGYNNMRSFLIAREKGKCQLCGKKFSRDDPSHMHHIKPRIMGGTDRPDDLALVHKSCHDKIHKEKLFNKLKKAKEYKAETFMAIVGAKFKKVLDCDITYGYETKTKRDLLEIDKSHINDAFVIAGGSTQKRCKPYKIEQKRINNRTLQTNRKGFSKSIRKQRHKIQNRDFIWIDSKKYLSGGVACRGTQVYYFDANEKRLISSKKIEKVYHTGSLVWLN

SEQ ID NO: 4359 - protein, 475 aa, Blautia sp.; identical to SEQ ID NO: 4128

SEQ ID NO: 4360 - protein, 443 aa, Bacillus sp.
MVEENMTCFMQRKGENPMVFVLDTNKRPLAPCHEAVARKLLKQGKAAIYRRFPFTIILKKSVDESEIKATYRLKIDYGSRHTGLAILRGQEVVWLGQLDHRTDIKERMDKRRAFRRARRNRKTRYRKPRFLNRKRKEGWLPSSLESRVQNIQTWVNRLKKLCPIGNISYENAKFDTQLMRNPEISGIEYQQGTLQGYEVREYLLEKFGRKCCYCGKENVPLEVEHIIPKSRGGTDRVDNLCLACHDCNQRKGSKTAEEFGYPHIQKQVKESLKDASAINSTRWKAYEVLKQTGLDVECGTGARTKMNRIRLDLPKTHYFDACCVGESTTNHLYFKTKEVLFIKAKGRGSRSRTNLDRYGFPRGYLARQKFFFGFQTGDMVKAVVPRGKYQGVWFGEVACRKTGSFDIKGKDGKRIAQGINYRYVQVIQRFDGYAYGKGVAELA

SEQ ID NO: 4361 - protein, 421 aa, unidentified
MLVYVLSKNGQPLMPTHRCGFVRRLLNSQKAKVVRRCPFTIQLQYDTDCKTQPVTLGIDAGSKHIGVSATTESKVLYEADIELRNDIVDLLATRRQMRRARRSRKTRYRKARFDNRKRNDKWLAPSIQHKVNCHLEAVRFVHKLLPISKIIVEVASFDIQKIKNPLITSTDYQNGELLDWKNVREYVLFRDSHICQCCKGKSKDPVLQVHHIESRKTGGNAPNNLITLCKTCHNGYHHGTVKLPAKIKRGMKFNDATFMGIMRWGFYNQLKSLYPDVSLTYGYITKDIRISNGLAKTHFIDARCISGNPLATSDNTVYFLKKRRRHNRQIHKFNILKGGRKKRNQAAYLVKGYRLFDKVNYNRKEYFIFGRRASGFFDIRTLSGEKVNKGSISCKKLKLLEASKGYLTERRNAFLSPLNSA

SEQ ID NO: 4362 - protein, 431 aa, Escherichia sp.; identical to SEQ ID NO: 3801

SEQ ID NO: 4363 - protein, 443 aa, Anoxybacillus sp.
MVEENMTCFMQRKGENSMVFVLDTNKRPLAPCHEAVARKLLKQGKAAIYRRFPFTIILKKSVDESEIKATYRLKIDYGSRHTGLAILRGQEVVWLGQLDHRTDIKERIDKRRAFRRARRNRKTRYRKPRFLNRKRKEGWLPPSLESRMQNIKTWVERLRKICPIEHISYENAKFDTQLMRNPEINGVEYQQGTLQGYEVREYLLEKFGRKCCYCGKENVPLEVEHIIPKSRGGTDRIDNLCLACRDCNQRKGSQAAEEFGYPHIQEMVKKTLKDASVVNATRWKVYEVLKQSGCEVECGTGARTKMNRIRLGLPKIHYFDACCVGKSTPLQLHFKTKEVLFIKAKGRGSRSRTNLDRYGFPRGYLARQKYFFGFQTGDMVKANVPKGKYQGVWFGEVACRKTGSFDIKGKDGKRIAQGINYRYVQVIQRFDGYAYGKGVAELA

SEQ ID NO: 4364 - protein, 412 aa, unidentified
  source 1..412: note = Lachnospiraceae bacterium
MVYVLNQNGQPLMPTENHAKVRILLKQGKAKVVNKCPFTIQLLYSSTNYTQKVTLGVDSGSKHIGLSATTKNKVLFESDVELRNNIVDLLSTRRELRRSRRSRKLRYRKPRFNNRKRSDGWLAPSVKQKVDSHITMIAKVHKILPISNIIVEAASFDIQKIKNPAISGADYQQGEQLDFWNVREYVLFRDGHKCQCCHGKSKDKILTVHHIESRKTGGNAPNNLITLCETCHTGYHKGIVKLPKTIHRGMSFKDATFMGIMRWALYEKLKTIYSDVKLTYGYITKNIRIKNGLPKDHYIDARCISGNPNAVNNGDVYYYKKVRCHNRQIHKNTILKGGYRKRNQAAYEVKGFRLYDKVLWKGQKCFIFGRRSTGRMDLRLLDGTHLNASVGYKNLKLLKMRSNYLIEQRKVG

SEQ ID NO: 4365 - protein, 457 aa, unidentified
MSKTLPNQVFVLDTDKKPLTPCLPVIARKLLNAGKAKVFKLYPFTIILKKSVNDIPEPIEIRIDPGSKTTGIALIQGTQVIWGAQVTHRGQAIKSRLETRRAIRRSRRNRKTRYRKARFLNRTRPKGWLPPSWQHRVLTTMTWVSRLRKLAPIQSIAFELVSFDTQKMQNPEISGVEYQQGELQGYEVRQYLLEKWNRKCAYCGIENLPLQVEHINPRAKGGSNRVSNLCLACEKCNLKKGTQDVKDFLKKKPEILRKVMSQAKTPLKDAAAVNATKSALFQALKATAIELIYVGRGSLTKFNRTNLKFPKAHWIDAACCGDVSQGLTLAVNQPLLIKAMGWGSRQVVQTDKYGFPRSGYKPKKKVAGWNTGDIVSVIDGKHQGVKCKRIKTTRFKGNFDIRVNDSVISVSRNQIKPVHRNDGYNYSFVRDCREMSEKKVREHCVTYYRYEYLRRGC

SEQ ID NO: 4366 - protein, 529 aa, Burkholderia sp.; identical to SEQ ID NO: 3816

SEQ ID NO: 4367 - protein, 436 aa, unidentified
MTKTLTQKTTQACVLDLQGNPLMPTTRLGKVYRLLKTKKAHIVSYEPFTIQLDYEPDTNIIQPMTLGVDSGAIHSGYSVANEHREYYSAEVIARDDISRNLSDRHMYCRNRRSRKTRYRKPRFKNRKNKKKGWLAPSLQQKIAVQLNEIDHLHRYFPIETIIVEVAEFDIQKIKNPDIAGIEYQQGTLQGYNIRNYLLEKHGRKCFYCGKAVSDFEVEHMLPKSKGGSNRIDNLTLSCHDCNEKKGTLTAEEFIQQTLPAKKAASKLKQLPNEKRLFKYMAYMNATRWALYDAIKERYPNVKMTYGYITKYNRIQAGLPKAHHIDAKCITGFATVPSMEQTVVKVKMRRHNRQLHRATFSKGHVRKAASLPTVIFGFQLYDLVLFNNHRYYIKGRRSSGSFVLVSVEGLKNEERNYKKLTLLAHTNAYLTNRYVNT

SEQ ID NO: 4368 - protein, 420 aa, unidentified
MQYVYVLNKHSEPLMPCSPGKARLLLKRQKACVVKRTPFTIKLLHGSAGYKQPITLGVDAGSKHVGLSASTEKRELYSEEFTPRNDVVELLSTRRQNRCSRRNRKTRYRTPRFNNRVHSKHKGWLAPSVEVKIQEHITVIKRICRILPITLVRVETAEFDTQRLKAMLAGKPLPVGTDYQLGEMYDEYNVRQYVLKRDNYTCQYCGAHTTAKKAVKLHVHHLESRKVGGNAPSNLITLCVTCHNNLHKGKITLDGKKRGKTLRDAAFMGIMRNTLLTRLRNELNIPVQNTYGYITKLLREQNDIKKSHVNDARCISKHPLAEPCSVCYRTKAIRHHNRQIHKAKILKGGIRKANQAPYIVKGFRLWDKVLYDGQECFISGRRSSGYFALRKLDGTAITNSISFKKLWLLEPATNYLIERK

SEQ ID NO: 4369 - protein, 420 aa, unidentified
MQYVYVLNKHGEPLMPCFPGKARLLLKQQKACVVKRTPFTIKLLYGSAGYKQPITLGVDAGSKHVGLSASTEKRELYREEFTPRSDVAELLSTRKQNRRSRRNRKTRYRAPRFDNRVHSKHKGWLAPSVEVKIQEHITVIKHICRILPISLVRVETAEFDTQRLKAMLAGKPLPVGTDYQLGEMYDEYNVRQYVLKRDHYTCQCCGAHNTAKKVVKLHVHHLESRKTGGNAPGNLITLCATCHENLHKGKVTLDGKERGKPLRDAAFMGIMRKTLTARLKEELPIPVQGTYGYITKMSREQNDIKKSHTNDARCISKHPLAEPCSVCYRTKAIRHHNRQTHKANFSKGGYRKRSQTPYIVEGYRLWDKVLYKGQECFVSGRRSSGSFALKKLDGTTISKGVTFKKLRLLEPATNYLIERM

SEQ ID NO: 4370 - protein, 336 aa, unidentified
LRVFLEQTRKTADAGYKHVGLSASTEKAELYASQVELRQDITDLLSARRALRRARRNRKTRYRAPRFDNRIRTKCEGWLAPSVENRINAYLSRIEAVLRLLPITKITVETASFDTQLLKNPDIAGKEYQEGEQLGFWNVREYVLFRDGHVCQHCHGRSKDPVLNVHHLESRRTGGDSPGNLITLCETCHKALHRGEIKLRAKRGQSFRAETFMGIMRWGVLNRLKASHPKLEVHNTYGYRTKHARIANGIAKSHCADAFCIAGNFGAKRLGEFFFQKQTRRNNRQIHKLSILKGGIRKRNQAPFEVKGFRLFDKVACQGEEARVWQNLVNKKLSTL

SEQ ID NO: 4371 - protein, 443 aa, Oligella sp.; identical to SEQ ID NO: 3969

SEQ ID NO: 4372 - protein, 515 aa, unidentified
MTHQERRHLMPEYIYVLGMDGRPQMPTTRRRHVQKLLNIGKARIAEHVPFTIQLLYKNDPVLQSVMLAEDPGRTNIGLAVLSLEGDLLLSAVTETRNKEIAKLMLDRRKNRRASRNGERKARQRLAKKFGTVIKAGMLMRKLPKYAADKFVTCNLIRNTESRFCNRKRPEGWLNPTVNHLVETHIHLIHKMQKYLPVTDIAFEVNRFAFLLLEDPSVSGVDFQNGPLKGYDNLKDAVYDLQDGKCLMCGHEIEHYHHIVPRAKDGSNTLGNIAGLCKCCHDKVHKDAEFKKKLKDCKKGLDQKYGALSALNQAIPFICKRLEEEFGKEHIFYCTGRDTARVRNSLGYQNTKESQLHEVDAWCIGLLAVGKAPESLPDFSQTHRIRQFRRRDRSLIQAQVERTYKMNGKTVAKNRKKRMDQRTDSLEEWYQKQVRSVGKKEAERKRSQLTVVKSYRRYNELGRIMAGAILIYQGKRYVLQNRITNGQYYHVFGSEKNIPAKKCMIEKHNEGLVFLS

SEQ ID NO: 4373 - protein, 371 aa, unidentified
VDAGYKHVGLSASTEKAELYASEVELRQDITDLLSARRALRQSRRNCKTRYRAPRFDNRIRTKRKGWLAPSVENRINAHLSRIEAVLRLLPVTKITVETASFDLQLLKNPDISGKEYQEGEQLGFWNIREYVLCRDGHVCQHCYGRSKDPVLNVHHLESRRTGGDSPGNLITLCETCHKALHRGEITLKAKRGQSFRAEAFMGIMRWEVLGRLKASHPELEVNNTYGYRTKHARIANDIAKSHCADAFCIAGNLGAERLGEFFFQKQTRRNNRQIHKLSILKGGIRKRNQAPYEIKGFRLFDKVACQGEEGFIFGRRSSGYFDVRKLDGTRISAGISYKKLRLLEKRQTYLTEIRKEEALPPLPEGRGLRA

SEQ ID NO: 4374 - protein, 493 aa, unidentified; identical to SEQ ID NO: 2644

SEQ ID NO: 4375 - protein, 461 aa, unidentified
MSHVFVVDTNKQPCAPVHPGHACLLLKQGRAAVWRRYPFTIMLKGGVPAQEAQSLRLKIDPGSKTTGLALVNDESGVVVFAAELSHRGQQITKSLNTRRGVRRGRRQRKTRYRAPCWRNRRRPQGWLPPSLLSRIHNVVTWVERVRRLAPIQAISMELVRFDLQAMDNPEISGTQYQQGTLAGYETREYLLEKWQRKCAYCGKEGVPLQVEHIVPRAKGGSNCVSNLTLVCEACNRKKGTLDLSVFLKKKPEVLKRIQAQAKAPLKDAAAVNATRLALLERLKAVRLPIECGSGGRTKYNRVMRNLPKTHWLDAACVGASTPDVLQVAGVHPLRIEACGHGCRRMRNVNTISLPCSAPKGPKNVQGFQTGDITRAIVTRGKKQGIYVGRVLVRATGSFDITTRRGRIAGLDVRFFRHLHRSDGYSYAKGEGYANPAAQSTSTEGTALPPPLKRQGHPGPAG

SEQ ID NO: 4376 - protein, 424 aa, unidentified
MRVFVFNMRGRPLMPCSQRKARLLLRENKAMIYKYHPFTIQLTYTTGETKQDCHIGIDTGSKYIGAAVRSEDKVFWKGEIELRQDIRSNLDTKRIYRRSRRNRKTRYRKPRFLNRKRRDEWLPPSLQSRINHTFHWIDTLSSLVPNPILHIEVGKFDVAKMINPEIHGVDYQHGQTYGFFDERYFVFARDNYTCQCCGKSKNKILNTHHIIYRSNGGTNRVDNLITVCTDCHTLQNHRKGGIFYQWQEQHKKVKQYKEPPFMNTLRKRIFVAYPDAEITYGSETTPKRKAMKLDKTHYNDAIVISGINEIKENPEEWLLIKQFRKKKRSLHEATARKGRKKPNRNQTRNSKNTPYYKGFYLNDKVSVFGKSGYITGFTSNAAYIKDENNDYITLPNKTYKQVSINKMELECHNNNWQYIIKNAV

SEQ ID NO: 4377 - protein, 431 aa, unidentified
  source 1..431: note = uncultured cyanobacterium
MEGLMSKILLVDIKKQPLNPIHPAQARQFLKNGIAAIYRRFPFTLILKNERNTPSIEPLRIKLDPGAKTTGIALVNDTIGEVPFVAELEHRGFQIRDKLTSRRQLRRGRRARTTRYRAPRFDNRKRPGGWLAPSLQSRIDNTLTWVNRLRKFAPITAISQELVKFDMQLMQNPDIQGKEYQQGTLAGYETREYLLEKWDRQCTYCLKKDLPLQVEHIHPRAKGGSNRISNLTLACEKCNTDKGTQDISDFLSQKPDLLKKILAQAHIPLADAAAVNSTRWVLLNALKQTKLPVETGSGGLTKLNRTQQNLEKTHYFDAACVGLSTPKLIVKGVKPLLIKATGHGGCQSCRTDKFGFPDRHCARIKFHFGFQTGDIVKAVVTKGKKVGTYVGRIATRATGSFNISTKKGLVQGISHKCCQPIHKKDGYGYTF

SEQ ID NO: 4378 - protein, 423 aa, Moorena sp.; identical to SEQ ID NO: 3865

SEQ ID NO: 4379 - protein, 470 aa, unidentified; identical to SEQ ID NO: 4092

SEQ ID NO: 4380 - protein, 419 aa, unidentified; identical to SEQ ID NO: 3927

SEQ ID NO: 4381 - protein, 457 aa, Lactobacillus sp.; identical to SEQ ID NO: 2458

SEQ ID NO: 4382 - protein, 512 aa, unidentified
MPTVYVLNKDGKPLMPTTRCGHVRRLLKEQKAQVVTSKPFTIQLLYETDDVVQPLYLGIDPGRTNIGVAVVKIDGTAVFTAHLETRNKEIPKLMQGRKKARRARRTNGRRCRRQRRAKANGTISKKCVKQATAQNGSASKRAKKIGVIKRHLPGCEKEVLCIGIKNKEAKFSNRTRPEGWLTPTANQLLQTHINLVKKIQKFLPISDVVLEINKFAFMRLDNPNVQKWQYQQGPLYQKASLEEAVSEMQEHHCLFCKNTIDHYHHVVPQHKNGSNTIGNIVGLCAKHHDLVHKDTSWQEKLAKKKTGLNKRYGALSVLNQIIPALTKELSSLFPKHFFATNGKSTYDYRAAHGVSKDHWLDAYCIAGSVLPNDACDNNINSHVPYELKQFRRHDRRALHKENMSRVYTLNGKSVATNRHKAIKQTTDSLEEFRQRQPNDVCKLKVKEHHPEYRNPKRSFPGCVFLVGKQTHVMQGTSGSHNGKADGYYDTNGNSYSSGKCKFVAKNEGIVFA

SEQ ID NO: 4383 - protein, 424 aa, unidentified
MSNYALVLDTNKQPLSPCHPSVARKLLDSGKAALFRMYPFTIILNKSCSDIVNQAIELKIDPGSKTTGIALVQGEKIIFGVELSHRGSAIKASLESRRSLRRGRRNRHTRYRQARFLNRTRTENWLAPSLQHRVETTLTWVNKLIKFIPITRISQELVRFDLQQIDNPEISGIEYQQGTLSGYEVREYLLEKWQRKCAYCGIENVPLQVEHIHPQARGGTNRISNLCLACEKCNIKKGTQDIKDFLAKKPDLLKCILAQAKRPLKDAAAVNSTRWALFSRLQETGLPVFTGSGGQTKFNRTRLNFPKTHWLDAACVGQIGELEILTNKPLLIKATGHGTRQMCRTDKFGFPSRYVPRIKFVKGFQTGDIVKAIVTTGKKIGKYIGRVAVRATGSFNISASKLVQGISYKYCKIIHRKDGYDYAF

SEQ ID NO: 4384 - protein, 424 aa, Microcoleus sp.; identical to SEQ ID NO: 2643

SEQ ID NO: 4385 - protein, 393 aa, unidentified
HGTLSKKCKKQDTAQGGNISKRAQTIGVFERNLPGCENSVLCIGIKNKEARFNNRVRPARWLTPTANQLLLTHVNFVKKICKFLPISDVVLEVNKFAFMQLDNPNIQKWQYQQGPLYQKGSLENAVSEMQEHHCLFCEKPIEHYHHVVPKSENGSNTIANIVGLCTEHHNLVHKDATWQKKLVKEKVGLVKKYSALSVLNQIIPALTKEMNSLFPKHFFVTNGKSTYDYRTAHGVSKDHWLDAYCIACSVLPNDVCDSNINSHVPYELKQFRRHDRRVLHKANMSRVYTLNGKTVATNRHKAIKQTTDSLEEFRQSHPGDVCKLKVKEHHPAYRNLNRNYPGSVFLVDGQVHVMQGVSGSHNGKADGYYNTNGNAYPYYKCKFVVKNEGIVFA

SEQ ID NO: 4386 - protein, 529 aa, Burkholderia sp.; identical to SEQ ID NO: 3440
  source 1..529: note = str. CF145

SEQ ID NO: 4387 - protein, 434 aa, unidentified
MSNTNYVFVIDTNKKPLQPCKPSVARRLLNSGLAAVWRRFPFTLILKKAVETVAKTTLTLKIDPGSKFTGMALLEGNKVIWMLEIQHRGSLISEKLSKRSQRRRARRTKNLRYRKPGLPNKKKPTGWLAPSLIHRVETTMTWVKRLIKFCPIESISMELVRFDTQLIQNPEISGTEYQQGELAGYELREYLLEKWHRKCAYCGKTDTPLQVEHIYPKSKGGSDRASNLTLACTKCNQAKGNQDVKDFLSGQPELLKRIGNQAKAPLKDAAAVNSTKWKLFNTLKTMGLEVETASGGRTKFNRIKQELPKAHCIDAACVGVVDKLNFQTRQAILAICKGQGGRQKAAVNKYGYPIRYNPLKPIKGWNSGDLALNIETGQVGRVNPRSKSNSFNFTVPGQKAKSVHVSKLKVVHKKDGYTYTFCPHLCINVEENAV

SEQ ID NO: 4388 - protein, 520 aa, Thermanaeromonas sp.
MMVLVQNKDGSPLSPCHPARARIMLKKGKAKVVCTYPFTIKLTYKVENPVFAPTRAVLDDGKTCGLGVVQENRTHNLALCKAEMETRGEEISDNLKRRKELRAQRRRRRNKKRGREGRIKIRYRKGQEYPQSIVADVQAKVNAVKRLMKMYPITEIVLEPVKLDIVKELNPGVRGKDYQRGLSYGIEADTRNQKRRLAILRRDGYRCLYCGREVTEETARIHHFVQRKHGGTKRYDILGTLCEECHTSVSTGELALAFDLESYPNIRAAGRCMHGRHLLERELRKLGVPVVVKYGYEAQKLRERYGFPKSHGNDAVVLGCNPEKGLIDRSTVYKVKLHARHGGRKLFDANPGVAAYRGQADRQPHVDWARMVVDDHNHEWNRKNRSYRRHVRNKYYKKLKEEGKFNYDLLPGRKHLNEIFTVNRAMLLTEGGPVLVKNQRIREWRYPHPWPDRRRVIERYDLVRTQKGGVGIVTSIMSDCTVRVDFVKKREGYKTDFSFYRPEALEIIQKGSSQTWVIQE

SEQ ID NO: 4389 - protein, 476 aa, unidentified
MVFVLDKHKQPLMPCSEKRARLLLRRGRAVVHKLAPFTIRLKDRTVGQSEVQPLQVKLDPGSKISGVAVLRGDEVVFLGEIHHRTDIKDRLEKRRMIRRNRRNRKTRYRKPRFLNRRPEKCAGCGRNAKHGSRYCRKCGQQPKDNGYRETRLPPSLRARVDQVMNASRKIRVPIGGISMELIRFDMQKLENPEISGVEYQHGTLWGYEVKEYLLQKFGHRCAYCLGESGDPVLEVEHVVPRSRGGTDRVSNLAIACRTCNEEKDNLMPNEWLGTLQRSKRKLDQVRADNLPKVLGQLKAPLRDAAAVNTTRWALYRRLLSLCIPEEVGSGGRTKWNRERMELPKEHYWDAACVGESTPERFWNIPAWVQVWEAKGRGNRQVCRTDKHGFPIRHLSRQKRHYGFQTGDMVVAEIPRGKYAGKWRGRVTVRASGTFDVFVRAVRAVQGVNHKYCRVLQRGDGWAYEQTRTAIAVPPHA

SEQ ID NO: 4390 - protein, 442 aa, unidentified; identical to SEQ ID NO: 2637

SEQ ID NO: 4391 - protein, 266 aa, unidentified
KAVAEGKPVPQGEDYQKGEMYGHYNVRQYVLWRDSYTCRICGAHGSVRKGVPLHVHHLESRRVGGDAPDNLVTLCTACHDKLHKGIIMVADIKKRKRRSTRDTTFMGIMRMTLLRRLWEQLPVPVVETRGYITKATREKLLVLPKSHTNDALAIAHGPQGFRAEYLPNIRQADRLYTIRPVRHHNRQLHKATILKGGVRKANQAEKYICGFRLYDKVLYNGIECFVWGRRTSGSFLLRQLNGEKVKDGVSYKHLKLLERSQSYLVA

SEQ ID NO: 4392 - protein, 448 aa, unidentified; identical to SEQ ID NO: 3648

SEQ ID NO: 4393 - protein, 418 aa, Anoxybacillus sp.
MVEENMTCFMQRKGEYPMVFVLDTNKCPLAPCHEAVARKLLKQGKAAIYKRYPFTIILKEIVDNFRPKTPYRLKIDHGSKHTGLAILRGQEVVWLGQLDHRTDIKERMDKRRAFRRARRNRKTRYRKPRFLNRKRKEGWLPPSLESRVQNIQTWVNRLKKLCPIGYISYENAKFDTQLMRNPEINGVEYQQGTLQGYEVREYLLEKFGRKCCYCGKENVPLEVEHIIPKSRGGTDRVDNLCLACHDCNQRKGSKTAEEFGYPHIQKQVKETLKDTSAINSTRWKAYEVLKQTGLDVECGTGARTKMNRIRLDLPKTHYFDACCVGESTTNHLYFKTKEVLFIKAKGRGSRSRTNLDRPPCRKKFGTIGRMKTNIVEISPCSWGHEVDVSMVRKSPKDRRTPVAWCTTECRSRVGKHAG

SEQ ID NO: 4394 - protein, 416 aa, unidentified
MLVYVLNKHGKPLMPCKPSKARKLLKQDKAKITQREPFTIQLIYGSSGYKQPITLGIDAGSKFIGVSATTEKQELFSAEVELRNDIVQLLSERRQYRRSRRYRKTRYRKPRFSNRVRSKNKGWLAPSIENKIQTHLKIVEKIHKILPITKIITEVASFDIQKIKNPNIEGVEYQQGEQLGFWNVREYVLWRDNYTCQICKGKSKDNRLNVHHIESRQTGGNAPNNLITLCETCHNKYHKGELNVKLKRGQSFRDTAFMGIMRWTFYNRLKNIYPNVELTYGYITKNTRITHKLPKSHRIDALCISGNPKAKQLDYWYYIKQVRKHNRQIHKAKILKGGIRKLNQAPYLVKGFRLFDKVKYKGQECFIFGRRSSGYFDLRKLDGTVVHRSASYKDLKLLSKRKTLLWERRKGVSSPT

SEQ ID NO: 4395 - protein, 443 aa, Caldicellulosiruptor sp.; identical to SEQ ID NO: 2385

SEQ ID NO: 4396 - protein, 427 aa, Enterococcus sp.; identical to SEQ ID NO: 2410

SEQ ID NO: 4397 - protein, 420 aa, unidentified; identical to SEQ ID NO: 3089

SEQ ID NO: 4398 - protein, 511 aa, Halomonas sp.
MRAQGKTPKVLIAVGSAIVSRSRLSTFPRGDGAHASRHKTRKGIYTGENRMAVFVIDKQKQPLMPCSEKRARLLLGRGRAVVHKRYPFTIRLKDRVGGDMQPLRLGIDPGSKTTGLALMRESNSAKPDDQQRHVLRLFELVHRGYQIKKALQQRAAFRRRRRSKNLRYRAPRFNNRTKSKDWLAPSLQHRVDTVMAWVNRLSRLAPITGICQELVRFDTQQLENPEISGVEYQQGTLLGYEVREYLLEKWGRECAYCGDTDTPLEVEHVVPRSRSGSNRVSNLTLSCHPCNQAKNSQALADFFAHDKGLHRRLKANGHTAAIRLERVQRQLKQSLRDASAVNATRWALFSALKTTDLPVVVSSGGRTKYNRQRLGIPKTHGLDAACVGAFDTLHAWQVPTLTIKAMGRGSYQRTRLNKYGFPRGFLMRQKQVRGFQTGDMVRAMVPTGKKAGMHTGRVAVRKTGSFNIQTEHGAVQGVSHNYCTVIQRGDGYGYHHTPSINLTGGAGQAVA

SEQ ID NO: 4399 - protein, 419 aa, Geobacillus sp.; identical to SEQ ID NO: 3993

SEQ ID NO: 4400 - protein, 359 aa, unidentified
KDEVRCGIDDGGLHVGVALVQKCQTRNKVVFKGTIEQRNDVKHLMDVRRGYRRYHRYHKRYRPARFNNRDSSKREGRIAPSILQKRQATIRVINQLNRWINITNYWLEDVAIDIRALTDGYKPYRWQYQKSNRLDENIRKAVILRDGCRCMECGKSNCRLEVHHIKPRRLKGSSTLGNLITLCTKCHQKTEGIEELYMDRYFALLNSSDNRNLDYAQHVMIGKKWLREQLSNLGMLYLTNGGDTANKRIDWDITKSHSNDAICITDLRPDTCEIKEWVIKPMRRQSKAKTDNVLGIKHRDLVEYTFRNGETHRGYVTALYPEQNAINFQSPAKHCKKVNAGKCKVLWKYSKIYWLDNVS

SEQ ID NO: 4401 - protein, 427 aa, Methanosarcina sp.
MFVFVLSKGGNPLMPTKPAKARILLKTGKAKVVRTTPFTIKLLFESSSYTQPVIAGMDTGSKVVGCAAIANGKVLYQSEIHLRENVSKKMDQRKMYRRNRRGRKTRYRPARFANRGNSRREGRLAPSIKSKLEAHFREKRFVESLLPVTGWKVELASFDIHKITNPEVSGVGYQEGDLKGFYNVKAYVLDRDGYTCQHCMGKSKDFRLHCHHIVFRSQKGSDAPENLITLCETCHKALHNGEFKLSGKKSKTKHATEIGILKSQIRKSGWNFAETFGYETKYRREQVLKLLKTHYFDAVAICCRDDQKVEVEDSVFLKRNVPAGDYQQRRGKRSEKKMPTGKLFGLRKFDQVKTEKGIGFIRGKRSSGYFSISDIFGNKISDSVNVKKKCRRLSARSTTLVQIVQMTHSSPTCHFRQARNVEEGVSC

SEQ ID NO: 4402 - protein, 442 aa, Tepidiphilus sp.
MAVFVLDKRKKPLMPCSEKRARLLLERGRARVHRLMPFTIRLIDRTQEESVLQPLRLKLDPGSKTTGIAVVREAESVDEETGEIQRQVHVLWLAELVHRGRQISEALTARRQMRRRRRSMLRYRAPRFLNRRKPEGWLPPSLRHRVGTTLAWVRRLQRLAPVSGIAQELVRFDMQAMENPEISGIEYQQGTLAGYEVREYLLEKWGRKCAYCGAQDVPLQIEHIHPKARGGSDRVSNLTLACAPCNRKKDSQDVRVFLAKDPQRLAKLLEQAKRPLHDAAAVNSTRWALYEALKATNLPLETGSGGRTKFNRMRLGIPKTHALDAACVGVTHAAFDWGRPVLQIKATGRGSYQRTRLDRFGFPRGYLTRQKRHFGFQTGDWVRAEVTKGKKAGTYVGRVAVRASGSFNIQTREEVIQGIAHHHCTLLQRADGYGYSWIKRAT

SEQ ID NO: 4403 - protein, 441 aa, Sulfobacillus sp.; identical to SEQ ID NO: 4231

SEQ ID NO: 4404 - protein, 509 aa, unidentified
MVLTYVLSVDGKPLMPTTRCNRVAWLLKHSMAKVVSKNPFTIRLAYDTPDVTQSLILGIDPGRTNIGLTVIRETGESVYTAHLETRNKKIPKLMKARKQFRTERRTLKRRRKRQCRAIASNTVSPKCVKTSNSQSSNESKKGMKQGVLERLLPGCDTPILCIGIKNKEARFNNRIRKTGWLTPTANHLLQTHLNAMNKICKILPVTKTVLEINKFAFMQLDNPCVKKWQYQRGQLFGYGSVEEVVYEQQNSHCLFCDKAIDHYHHVVPRSKRGSETLANRVGLCAEHHTLVHNDEKWNTKLIAKKQGMNKQYHALSVLNQIIPALSNALVKLFPDRFYATSGKSTYTFREAYGINKDHHIDAYCIAASILPDVNVKLSQTVYEIKQFRRHDRQVCHKANLNRRYALNGKVVATNRHKAMNQKTDSLEEYTTNGGKTENLTVIEHKAQYKRLDRIMPGAIFELDNKRKVMFKTDGFHNNQSDYVCFIDGSKIGYSKCNKPVTLNSGLVYC

SEQ ID NO: 4405 - protein, 424 aa, Moorena sp.
MRVFVLDKNRKPLDPCKPARARILLKQGKARVIKRYPFTIIIQEKEVKNCVTHKHQLKIDPGAKTTGLAIVQDNQVIWGAELTHRGFQIKDALTSRRQLRRSRRNRKTRYRKPRFLNRKRPEGWLAPSLMSRVHNILTWTKKLIKLCPITGISQELVRFDTQKMENPEISSVEYQQGTLYGYELREYLLEKWNRKCAYCGAANTRLEIEHIKPLAKGGSNRVSNLAIACYKCNQTKGAQEIEQFLSGKPSILKRVLAQGKKPLADAAAVNSTRWKLYEELKSTGLPIETGSGGLTKYNRCRQNLPKTHWLDAANVGQVDNLHIEDFQPLLITAKGHGTRQMCRTDKFGFPSRYVTRLKFVKGFQTGDIVKAIVTKGNKIGTYTGRVAIRQTGSFNISTKNGLLQGISHKYCSTVHNKDGYSYSF

SEQ ID NO: 4406 - protein, 421 aa, unidentified
MQYVYVLNKHGEPLMPCSPGKARLLLKQQKACVVKRTPFTIKLLYGSAGYKQPITLGVDAGSKHVGLSASTEKRELYREEFTPRNDVVDLLSTRRQNRRSRRNRKTRYRAPRFDNRVHSKHKGWLAPSVEVKIQEHITVIKRICRILPITLVRVETAEFDTQRLKAMLKGKPLPVGTDYQLGEMYDEYNVRQYVLKRDNYTCQCCGAHPTEKKPVRLHVHHLESRHVGGNAPNNLITLCVACHKALHEGKITLDKGKKRGKPLRDAAFMGIMRNTLLARLKDELNIPVKQTYGYITKLLREKNKIPKSHVNDARCIAKTPNAKPCDTMLYTRALRHHNRQIHKAKILNGGIRKKNQAPYLVKGFRLWDKVRYNGEECFITGRRSSGYFALKKYDGTVISNSASYKKLMLLEAATNYITERS

SEQ ID NO: 4407 - protein, 363 aa, unidentified
GLSASTEKAELYASEVELRQDVSDLLSARRALRQSRRSRNTRYRAPRFDNRIRTKRKGWLAPTVENRINVHLSRIETVLRLLPVTKITVETASFDTQLLKNPDIAGKEYQEGEQLGFWNVREYVLFRDGHVCQHCHGRSKDPVLNVHHLESRRTGGDSPGNLITLCETCHKALHRGEIKLKAKRGRSFRAETFMGIMRWEVLNRLKASHPKLEVHNTYGYRTKHARIANGIAKSHCADAFCIAGNFGAKRLGEFFFQKQTRRNNRQIHKLSILKGGIRKRNQAPFEVKGFRLFDKVACQGEEGFIFGRRSSGFFDVRKVDGTRISAGISYKKLHLLEKRRTYLTEIRKEEVLPPLPEGRGLRA

SEQ ID NO: 4408 - protein, 427 aa, unidentified
VCKVFVLDTEKRHLDPIHSAQARQLLRNKKAAIYRRFPFTIILKESRPDSPVTPLRLKLDPGARTTGIALVNDTTGEVVFAAELKHRGFAIRDALTSRRQLRRGRRNRKTRYRKPRFLNRTRPLGWLAPSLQSRIENIKTWVEKLRKLAPITAISQELVKFDMQLMRNPDIEGKEYQQGTLAGYETREYLLEKWGRQCAYCGVKDVPLQIEHIHPRSKGGSNSITNLTLSCSKCNIKKGTKDIRDFLKKDPNKLQKILLQVKRPLTDAAAVNATRHALLEGLKATGLTVECGSGGLTKFNRSNQSLPKTHWIDAACVGKSTPILNIKGVKPLLITANGHGTRQMAGTDKFGFPNRHRSNKQIHFSFSTGDIVKAVVTSGKKIGEYVGRILCRATGSFDIATKLGRISGINYKYCLAIHKKDGYSYAF

SEQ ID NO: 4409 - protein, 413 aa, unidentified
MTNYAFVLDVNGKQLAPTKEQKAWFLIRKKRATLISKYPMVIQLKKEISDEQICKDEICCGIDDGGLYVGVALVQKCKTKNKVVFKGTIEQRNDVKHLMEVRKGYRGYHRFHKRYRQARFNNRKSSKRKERIAPSILQKRQATIRVIKQLNKWINIANYLLEDVAIDIRALTDGYKLYRWQYQQSNRLDENIRKTVILRDDCKCMECGKSNCRLEVHHIKPRRLNGSNTLDNLISLCETCHQRTEGQEELYMDRYFSILNSTDNKNLNYAQHVMIGKKWLREQLSELGILILTTGGDTANKRIDWNIEKSHSNDAICITGLQPDTCNVKEWTIKPMRRQSKAKTDNVLGIKHRDLVEYTFRNGETHRGYVTALYPEQNALNFQSPTKHCKRVNAKKCKLIWKYSKIYWLDNVS

SEQ ID NO: 4410 - protein, 424 aa, Enterococcus sp.
MRVFVRNMRGKPLMPCSNRKARLLLKEGKAKIYQYNPFTIQLCYATGEYMQECHIGIDTGSEHIGIAVTSEEKVLFKGEVELRQDVKSNLDTRRSYRRDRRNRKTRYRKARFLNRKKKESWLPPSIENRVNHTFKWINKLIALLPNPKLHIEVGKFDVAKMINPDIQGVDYQHGQTYGFYDMRYFVFARDNYTCQCCGKSKGKILQTHHIIYRSNGGSNRADNLITVCTDCHTYENHQKGGILYQWQEKHKKTKQYKEPSFMNVLRKRIFKKYPNAVITYGSETTPKRKELGLEKTHYNDAIIISGISTIKENPNEWLLIKQFRKKKRSLHEATARKGRKEPNRLQKRNAKNKPYYKGFYLNDKVEVFGRIGYITGFTSGGAYIKNAENEYIILPNKSYKQVGISNIKLLHHNNNWQYVNKRIS

SEQ ID NO: 4411 - protein, 441 aa, Marinobacter sp.; identical to SEQ ID NO: 4242

SEQ ID NO: 4412 - protein, 442 aa, unidentified; identical to SEQ ID NO: 2834

SEQ ID NO: 4413 - protein, 356 aa, unidentified
MENTLKVFVLNMRGQPLMPCSPPKARKLLRAGKAVPVRRTPFVIQLTVPTGETKQPITLGVDAGYKHVGLSATTAKEELLASEVELRQDVTGLLSNRLALRRARRNRKTRYRAPRFDNRVRSKHKGWLAPSVENRIQAHISRIEAVCRVLPITKIVIETASFDIQKIKNPEIEGEGYQQGEQLGFWNVREYVLFRDGHVCQACKGRSKDLILNVHHIESRKTGGDAPGNLITLCEACHKAYHAGKLKQFSPRRGASFRAETFMGIMRWTVLNRLRERHPELPVTNTYGYLTKHKRIVAGLPKTHCADAFCIAGVLDAKRRGEYLFQKQTRRHNRQIHKLTILKGGVRKRHQAPYLV

SEQ ID NO: 4414 - protein, 425 aa, Nodularia sp.; identical to SEQ ID NO: 3165

SEQ ID NO: 4415 - protein, 429 aa, Marinobacter sp.
  VARIANT 380: note = X can be any naturally occurring amino acid
LLGRGRAVVVRAYPFTIRLKDRTGGDTQPVRIKIDPGSKTTGMAVVRENGQKQHVLALMELAHRGRQISKSLEQRRAFRRRRRNQLRYRAPRFLNRTKPKGWLAPNLQHRVDTTKSLLNRLRSLVPVVSISQELVRFDTQRMTNPEISGVEYQQGTLLGYEIREYLLEKWGRECAYCTDKDTPLQIEHIDPKANGGSNRISNLTLACRPCNQEKDRQSLADFFASSKRLKNHQARLDRILKQCKKPLRDASAVNSTRWALYQTLKQTGLSVEVGTGGRTKFNRCRLRMPKTHALDAACVGEVEIVEGWDVPTLAVKATGRGSYKRTRLTKHGFPRGYLMRQKQVKGFQTGDMVRAVVPTGTKAGTWLGRVAVRKTGSFNXQTNSGAIQGISHRHCVLTQRADGYGYHIQPNQRKEEGDRKNESCYPSPS

SEQ ID NO: 4416 - protein, 427 aa, Methanosarcina sp.
MFVFVLNKDGTPLMPTKPAKARILLKTGKAKVVRTTPFTIKLLFESSSYTQPVTAGMDTGSKTVGCAAIASEKVLYQSEIYLRENVSKKMQQRQMYRRTRRSRKTRYRPARFNNRGNSRREGRLAPSIKSKLDSHFREKQFVESILPVTKWKVELASFDIHKIKNPEVSGKGYQEGDLKGFYNAKAYVLYRDGYTCQHCKGKSKDSRLNCHHIIFRSKQGSDAPENMIVLCETCHGSLHAGNFELSGRRSNTKHATEIGIVKSRIKKSGWNFENVFGYETKFRREQVLGLEKTHYFDAVAICCRDNQKVEPDDTVYFKKHVPAGDYQQRKGKRSEKKIPTGKLFGLRKFDLVNTEKGIGFIRGKRSSGYFSISDIFGNKISDSVNIKKKYRRLSARSTTLVQMVQLTHSSPTCHFRQAGNAEERVSC

SEQ ID NO: 4417 - protein, 425 aa, Burkholderia sp.
MPCNEKRARLLLARGRARVHRVMPFVVRLVDRQIGVCSFQPLRLKLDPGSRVTGMALVRETDDAIAVLNLFELVHRGRQIGEALTARRACRRRRRTNLRYRTPRFLNRTRPSGWLPPSLMHRVHITIAWVNRMRRWAPVTALSSEQVRFDMQALANPEISGVMYQQGTLAGYEVREYLLGKWSRTCIYCDATDRPLQVEHLTARARNGSNRIGNLGLACGECNQDKGALDVREYVKDPKRLARILATASRPLNDAAAVNATRRALSSALRTTGLPLELASGGQTKFNRVTHNIPKTHALDAVCVGEVAALRGWQRPSLTIRATGRGSYQRTRLTRHGFPRGYLMRQKQVQGFQTGDHVRADVPHGKKAGVHTGRVAVRATGSFNIQTAMTVVQGISHRYCKLVQRGDGYAYSLQPNDSFRQDGGG

SEQ ID NO: 4418 - protein, 442 aa, unidentified
MVTVQQSTHHLPFGRVFIRRNLFMVYVISQDGKPLMPCSDPIARLLLKQGKAKVKKREPFTIKLTYETTNYTQGLTLGVDTGSGTIGTAVSKDNGDIVYMSEVVVRNDITDKMTQRAKYRRNRRNRKTRYRKARWLNRASSIKKDRFSPTMQSKLHSHVREIEYIQSILPVTEMVFETGQFDMHLMKNPSLANPKVRPWGYQKGANYGFENTKAMVLNRDNYTCQCCKGKHKDSKLEVHHIVFRSQGGSDEESNLLTLCHTCHKDLHSGKINPKLSGKVKGNLKYATQMNSIRKQLFRFYPNAIETFGYVTKVNRLHLGVAKEHYYDACTIATQGNAFNVKSNLYKKKCVSDGDFQKTKGIRSEQPIVTDKICGFRKFDKVRYFGNDYFIKGRMSTGYAILMDIDGNKIDFSTMPRGYKTPKLSNCKRITARSTVMTQVKVV

SEQ ID NO: 4419 - protein, 449 aa, Allochromatium sp.
MAVFVLDKQKHPLMPCTEKRARLLLERGRAVVVRLAPFTLRLKDRIGGAVQPLRLKLDPGSRVTGLAIVRESETGDADTGAVERLEHGLWLGELAHRGQAIREALTLRRHYRRARRSRKTRYRAPRFLNRPRREGWLPPSLQHRLDTTLNWVARLRRLAPITALSQELVRFDTQALQNPEISGVEYQQGELAGYEVREYLLETWHRTCAYCGATHVPLEIEHIVPRARGGSDRVSNLTLACRACNQRKANQSIEDFLKRQPALLHRIQAQAQAPLQDAAAVNATRWALLNALQTTGLAVETGSGGRTKFNRTRLDIPKTHALDAACVGAVDQVRDWNRPVLAIRATGRGAYRRTRTFNNGFPRGYLMRHKRVHGFQTGDWVRAEVPKGKKAGVHVGRVAVRQTGSFNIQAQGGTVQGVSYRHCRVLQRADGYGYAFQPKPDAEKARRAA

SEQ ID NO: 4420 - protein, 518 aa, unidentified; identical to SEQ ID NO: 2751

SEQ ID NO: 4421 - protein, 456 aa, unidentified
MSTCACVLSKNGERLMPTIRLGKVRHLLKDGKAKIIKHHPFTIQLLYDSETNIQPIEICEDVGYNYIGISVKSQSHEYVSAQYDTLQDEKDCHDSCRKLRRTRRNRLRYRKPRFDNRKRGEGWLAPSLEHKKQLNIRLIERYVSVIPITHATVEVGSFDTMLLQAIQKGKSKPEGVDYQKGPRYNLATLREAVFYRDNYTCQVCGRKIADGAILHMHHMFYWKGRHGYQLDELVTACEKCHTPANHQKGGKLFGFGEDKEFANLSGAAFMNAVRWQIVDALHATYGKEFVTITYGAMTKEKRIILGIEKTHNNDAYAMGDYHPAHRCVFRHYQKRRRNNRVLEKFYDATYIDARTGNKAKGKELFNGRINRNHKKDSEDLHKYRSKKVSKGRRSIRRQRYAIQPYDTVRLESKTYITSGCHNKGTRLLIPVNGKSKSVAISKVQVACHAGAWIQII

SEQ ID NO: 4422 - protein, 511 aa, Halomonas sp.; identical to SEQ ID NO: 4398

SEQ ID NO: 4423 - protein, 379 aa, Arthrospira sp.; identical to SEQ ID NO: 3223

SEQ ID NO: 4424 - protein, 418 aa, unidentified
MVYVLGQDGHPLMPTCRHGKVRRMLKSGMAKVVKRCPFTIQLQYESTIHTQEINLGIDAGSKTIGVSATTEKKVLYESEVILRNDIVGLLSGRRALRSSRRNRKTRYRKPRFDNRKKPDGWLAPSIRQKIETHVTVVGNVIKILPVTKIIVETASFDIQKIKNPEIEGEGYQHGEQLNFWNVREYVLFRDGHTCQCCKGKSKDSILNVHHIESRKTGGNAPNNLITLCETCHKAYHKGIITLPKEIYRGMRFRDAAFMGVMRWAFYDRLKELYNPLGVEVINTYGYITKNTRIEYGLPKEHYVDARCISGNPAAKHLGHYYFQKKVRCHNRQIHKNTILKGGTRKRNQAAYLVKGFRLFDKVKYQDQEYFIFGRRTRGSFDIRTLDGTKVNKGSISCKKLQLVEKSKHYLTEQRKVTA

SEQ ID NO: 4425 - protein, 443 aa, Anoxybacillus sp.
MVEENMTCFMQRKGENPMVFVLDTNKRPLAPCHEAVARKLLKQGKAAIYRRFPFTIILKKSVDESEIKATYRLKIDYGSRHTGLAILRGQEVVWLGQLDHRTDIKERIDKRRAFRRARRNRKTRYRKPRFLNRKRKEGWLPSSLESRVQNIQTWVNRLKKLCPIGYISYENAKFDTQLMRNPEINGVEYQQGTLQGYEVREYLLEKFGRKCCYCEKENVPLEVEHIIPKSRGGTDRVDNLCLACHDCNQRKGSKTAEEFGYPHIQKQVKESLKDASAINSTRWKVYEVLKQTGLDVECGTGARTKMNRIRLDLPKTHYFDACCVGESTTNHLYFKTKEVLFIKAKGRGSRSRTNLDRYGFPRGYLARQKFFFGFQTGDMVKAVVPRGKYQGVWFGEVACRKTGSFDIKGKDGKRIAQGINYRYVQVIQRFDGYAYGKGVAELA

SEQ ID NO: 4426 - protein, 419 aa, Butyrivibrio sp.
MVYVISQDGKPLMPCSNTIARLLLKQGKAKVKRREPFTIKLTYETTSYTQDLTLGVDTGSGTIGTAVSKNNGDIVYISEIIVRNDITDKMTQRAKYRRNRRNRKTRYRKAKWLNRANSIKNDRFSPTMQSKLHSHVKEIEYIKSILPITKLVFETGQFDMHLMKNPSLASPKVKHWGYQKGANYGFENTKAMVLNRDNYTCQCCRGKHKDSKLEVHHIIYRSQGGSDEADNLITLCHTCHKALHDGKINPKLSGKTKGNLKYATQMNSIRKQLFRLYPGAIETFGYITKANRLRLGVNKEHYHDACTIATQGDSFTLKTNLYKKKCISDGDFQKTKGIRSEQPIETKKICGFRKFDKVRYFGKEYFIKGRMSTGYAILMDIEGKKIDFSSMPKGYKTPKLNNCMRIAARTSQIIQTVAM

SEQ ID NO: 4427 - protein, 424 aa, unidentified
MSNFVFVLDTNKQMLNPVHPGEARCLLSQGKAAVFRRYPFTIILKQEAESEIKPLQLKIDPGSKTTGLAILNGSKVVWAAELTHRGQAIKNALLSRSQLRRGRRNRKTRYRAPRFLNRTRAEGWLAPSLMHRVKTTLTWVNRLCRYAPVAGISQELVRFDTQVIQNPEISGTEYQQGTLAGYEVREYLLEKWGRKCAYCKAKNTPLQIEHIQPRSKGGSDRVSNLTLACEPCNKAKSNLPVQEFLSGKSDLLKRILAQAKAPLKDAAAVNSTRWALFNALKETGLPVSTGSGGQTKYNRTRLNLPKTHWLDAACVGMVNRLEILTTQPLLIKATGHGTRKMCGTNKYGFPFRHRSRVQIHKGFQTGDIIVANVTALKKIGSYLGRVLCRASGSFDIATKIGKVAGISHKYCKSIHKRDGYAYAL

SEQ ID NO: 4428 - protein, 423 aa, unidentified; identical to SEQ ID NO: 3576

SEQ ID NO: 4429 - protein, 439 aa, Campylobacter sp.
MVLVIDKHKHPCNAISKAYARILLHSKQAVIHRQYPFTIRLKNNNAVKKDTTYVIKIDPGASVTGISIVDNSNNVIMFAELIHRGKVIKRNLDSRRAVRRSRRQRKTRYRPARFQNRTKPQSWLAPSVKSRADNVINFVRKLKRFLNINKVEIERVSFDTAQMSSEKPLYGSDYQQGTLYQTELRSYLFKKYNCRCIYCGNKAEEIEHVIPKSKGGTNSVHNLVIACRKCNELKDKLSLKEFGKLVGKDFSHLEPKKLPKYAAIVQSARNYMFQEIIKIVPDTASYDAWLTKYNREELELPKQHYYDALSVGEINNYKFLTDKVLIISAKGRGSRQMCRMDSYGFPRTSAKAFKSVKGFQTGDIVKAIVPTGLKQGEYLGRVAVRVNGYFNITTQDGSTQQGVGYKFCRLLQRNDGYSYNYKERDFLSAMNCRVSVANF

SEQ ID NO: 4430 - protein, 443 aa, Anoxybacillus sp.
MVEENMTCFMQRKGEYPMVFVLDTNKCPLAPCHEAVARKLLKQGKAAIYKRYPFTIILKEIVDNFRPKTPYRLKIDHGSKHTGLAILRGQEVVWLGQLDHRTDIKERMDKRRAFRRARRNRKTRYRKPRFLNRRRKDGWLPPSLESRVQNIQTWVNHLKKLCPIGYISYENTKFDTQLMRNPEINGVEYQQGTLQGYEVREYLLEKFGRKCCYCGKENVPLEVEHIIPKSRGGTDRVDNLCLACHDCNQRKGSKTAEEFGYPHIQKQVKESLKDASAVNSTRWKVYEVLKQSGCEVECGTGARTKMNRIRLDLPKTHYFDACCVGESTPNHLYFKTKEVLFIRAKGRGSRSRTNLDRYGFPRGYLARQKFFFGFQTGDMVKAVIPRGKYQGVWFGEVACRKTGSFDIKGKDGKRIAQGINYRYVQVIQRFDGYTYRREGMNIA

SEQ ID NO: 4431 - protein, 441 aa, Sutterella sp.
MSVSVFVQDRKHRPLMPCRPARARRLLKSGRARVVRLFPFTIRLTDRLIEDSKLQPVLVKIDPGSRRSGFAVVRVDERGDHHALFFIELVHRGASIRDALTGRSACRRRRRGNLRHRAPRFLNRTKPQGWLPPSLRHRVDTATAWVAKLVKLAPVTGIVEELVKFDAQKLQNPEISGTEYQQGTLFEYEVREYLLEKFGRKCVYCGAENVPLNIDHVVPKARGGSNRVSNLVLSCVDCNQKKDAQPVDVFLKNRPEVLDRIKRQIKKPLRDAAAVNATRWSLFNALKAFGLPVETGSGALTKFNRHTFGVPKEHWLDALCAGRVNGVHYPEGMGILQVRCTGRGSYQRTRVDKYGSPRGYLTRQKRVHGFATGDMVEAVVPSGKKAGTHRGRVAVRASGSFNIQTPQGVIQGISWRRCRLLSYNDGYGYAWLRPAPHSSSV

SEQ ID NO: 4432 - protein, 472 aa, unidentified
VVGNRLLSIKPLINIGEGVIYSSICTGLSLQTYQKRKEVPCMVYVLDINGQPLMPTTRHGKVRRLLNSHLAKVVKRCPFTIQLLYQSTKEIQPVSLGVDAGSKHIGMAATTEKKVVYQEELSARNDVVKLLSARRTLRRTRRNRKTRYRKPRFNNRVHSKHKGWLAPSVEVKIQEHITTIKRICQILPISEIQVETAEFDLQRLKAMEEGRTPPVGTDYQLGEQYDFYNTRQYVLHRDGYTCQCCGTHDNNIKLHVHHIESRQTGGDAPNNLIILCEHCHKALHEGKLELPKGKKRGKSYRDATFMGVMRKTLLERLKKEIDVPVEGTYGYITKYWRERAGLEKSHIHDAVCISQYPYAKPLDIYYLTKTVRHHNRQIHKSNFSKGGIRKRNQAPYLVKGFRLFDKVLYQGKEYFIFGRRATGYFDIRTLDGTKVNKGSISYKKLRIQDTAKAYLKEARAIPHMNKFTCVLA

SEQ ID NO: 4433 - protein, 470 aa, Thermoanaerobacterium sp.
VWQTQKAEITLARRDYLLIALLVLYRTPKGEFYMVFVLDKHKKPLMPCTEKRARLLLESGRAVIHKINPFVIRLKDVTVDNCIIQPCRIKIDPDSKVTGIAILQGEKVLLLVELYHKQGIKKSLDDRRNHRRFRRNKLRYREPRFDNRKREKGWLPLSLEARVQQVINTVKKLAKYIPIDNISIEHVKFDTQLMQNPEISGVEYQQGELQGYEVREYLLVKWGRKCAYCGKENVPLEVEHIVPKSRGGTDRVSNLTIACHECNQKKGNMTAEEFGYPDIQKQAKQPLKDAAMINATRWKTYNLLKEMYPVECGTGALTKKNRIDRNLPKEHYCDACCVGQSTPKEFVFKADYILEFHAKGRGTRQRTLLNKYGFPRAYLSRQKEYFGFQNGDYVKAEVPKGKYKGQYTGYVAVRKSGYFDIRDANGKNIAQGISYQYCHIIQRYDGYKYGRRKRHILLHPSDAMDGVSCA

SEQ ID NO: 4434 - protein, 470 aa, Cupriavidus sp.
MSVFVLDKHGKPLMPCTEKRARLLLERRRARVHRVVPAVIRLVDRTVDDCEFQPLRIKLDPGSKMTGGALVRDTELACSVSGEIRRGAAVLNLFELVHRGRQISESLTARRSMRRRRRGANLRYRAPRFLNRTRPAGWLAPSLQHRVDTTMAWVQRIRRWAPVNGVSSELVRFDMQAMENPEISGVEYQQGTLAGYEVREYLLKKWGRTCIYCDATDRPLQIEHLTARAKGGTNRIGNLGLACGPCNQDKGANDVREYVDDPKRLARILAAASRPLKDAAAVNATRWALANALKSTGLAVELASGGRTKYNRVTLGVPKTHALDAMCVGDVCDVSGWRRPTLQIKAMGRGSYQRTRLTAHGFPRGYLMRRKQVKGFQTGDRVCANVPSGKKAGVHTGRVAVRASGSFNIQTDGAVVQGISHKYCRIIQRGDGYHYQTKDSYSQGETGEGRAKHAALSIPVLKDGVSRASR

SEQ ID NO: 4435 - protein, 427 aa, Parasutterella sp.
LRVFVRNKRGKPLMPCSPAKARLLLKEKKAIVVRRTPFTIQLTIATGETKQPVSLGVDAGYKHVGLSASTEKAELYASEVELRQDITDLLSARRALRQSRRNRKTRYRAPRFDNRIRTKRKGWLAPSVENRIDAHLSRIEAVLRLLPVTKITVETASFDLQLLKNPDISGKEYQEGEQLGFWNIREYVLCRDGHVCQHCYGRSKDPVLNVHHLESRRTGGDSPGNLITLCETCHKALHRGEITLKAKRGQSFRTEAFMGIMRWEVLNRLKASHPELEVNNTYGYRTKHARIANDIAKSHCADAFCIAGNLGAERLGEFFFQKQTRRNNRQIHKLSILKGGIRKRNQAPFEVNGFRLFDKVACQGEEGFIFGRRSSGFFDVRKLDGTRISAGISYKKLHLLEKRRTYLTEIRKEEVLPPLPEGRGLRA

SEQ ID NO: 4436 - protein, 466 aa, Cupriavidus sp.
MAVFVLDRHGKPLMPCSEKRARLLLERGRARVHHLIPFAIRLTDRRLVDSELQPLRLKLDPGSKETGVAIVRVTASDAGGAPVAFVLSLAEIIHRGRQISEALTARRAMRRARRGRMTRNRAARFDNRRKPEGWLAPSLRHRVETTAAWVRRFRKLAPITALSIELVRFDMQAMENPEISGVEYQQGTLLGYEVKEYLLAKLGRTCAYCDATDRPLETEHILAKANGGSNRVSNLTLACRPCNQKKGNLPLEVFLRKDPDRAKRILARAKAPLRDAAAVNATRFALLNALKSFGLPLETGSGAQTKYNRRRLDIPKSHALDAACVGNVHSVWTWQRPILRIKCAGRGSYQRTRLTAHGFARGYLMRSKRAFGFQTGDMVKAVVPSGKKAGTHIGRVAIRATGSFNIQTAAGAVQGISYKHCNLLQRGDGYGYSFITPTTKESETRGDASRRALSLPGLKAEVSRAN

SEQ ID NO: 4437 - protein, 443 aa, Oligella sp.; identical to SEQ ID NO: 3678

SEQ ID NO: 4438 - protein, 423 aa, unidentified; identical to SEQ ID NO: 3951

SEQ ID NO: 4439 - protein, 431 aa, unidentified
MPNKVYVINKHGRPLMPCSPAKARHLLDAGKAKVKKRTPFTIQLVYGSSGYTQEVILGVDAGSKTIGMSASTTKEELLSAEVKPRNDVVDLLSTRREFRRARRNRKTRYRKPRFDNRVRSKHKGWLAPSVEVKIQEHITAIRRVCGILPVSKVVIETAEFDLQLLKAIADGKPVPQGEDYQQGEMYGHYNVRQYVLWRDGYTCQCCGAHATKKKEVRLHVHHLESRKVDGDAPDNQVTLCESCHEKLHKGLIAEKDFKKRKRKSTRDATFMGIMRKTLMQRLCSELPIPVIETRGYITKATREKLLVLPKSHTNDALAIAQGKQGFNVGYLPGIVQINKIYTIRPVRHHNRQLHKATILKGGIRKSNQTEKYVFGYCLFDKVQFNGQDCFIWGRRTTGIFTIKTINGKMIKDGISFKKLKPVEKSTGYLIA

SEQ ID NO: 4440 - protein, 428 aa, unidentified
MEDFMSNFVFVLDSHKQPLNPIRPGMARKLLTTGKAAVFKRYPFTIILKVEITAPQEPITLKLDPGSKTTGIALVQGKNVIFGAELTHRGQSIKASLESRRSLRRGRRSRHTRYRKARFLNRTRSKGWLAPSLQHRVETTLTWVTRLMKVAPISFIVQELVRFDLQQLENPEISGLEYQQGILCGYEIREYLLNKWDRKCAYCGVADTPLQIEHIHPKAKGGSDRISNLCLACENCNTRKGTQDIEQFLSKKPDVLKKILSQAKRPLKDATVVNSTRWALFNRLRMTGLPVSTGSGGLTKFNRTRLQLPKSHWLDAACVGKVEELKVLTFQPLLIKATGHGTRQMCGTNKFGFPIRHKSRKQIHFGFQTGDIINATVTAGKKVGSYVGRILCRASGSFDIATMKGRVAGISHKYCQSIHKKDGYSYGV

SEQ ID NO: 4441 - protein, 462 aa, unidentified
MSVLVIGRNGRALMPTNPRKARLLLKKKTASVVCRHPFTIQLLYKTGCATQEGCIGIDTGSQHIGVGITCGDRVILKDEHALRSSMEKRSLLATRAVMRRGRRYRKVRYRKPKWRHHTKRMYFEKANRRGRHWRKVKTTTQSPRPKGWLPPSLQSKCDHHFRIIDRYLKYLPDPITRNLVIEAGRFDMARMNDPTIHGEMYQRGPMYDAENLRAYIFARDNYQCACCKAKAGTTRKADGTTVKLVAHHILFRSRGATDNPKYIISVCDHCHTTKAHQPGGILYSWMENNKKVARGLRDAVFMNILRKRLFARYPQSAFTYGNITAADRKQLRLPKSHANDAVAISLFGKEASTVKNICQTMHYKQIRKSKRSLHEAIPRKGRKNPNTKAVRNKKNTTQVNGFKLWDSVLANGKKLFICSFTGTSAYLIDKNGCYISQPGKTYKQWPLSKLKRLHPNGNWLMA

SEQ ID NO: 4442 - protein, 428 aa, Pseudomonas sp.
MCLKHIHTHNLKKEHVMFVFVLNKENTPLMPCKPRKARVLLEKGQAKVVARTPFTIKLIGGSSGYKQPLTAGMDTGSKAIGCAVVGLGQVIYQSQVQLRQDVSKKMQQRAMYRRGRRGRKCRYRPARWANRASMRATNRLAPSIKSKLDSHLREKTFVESIIPISEWKVETASFDIHKITRPDVSGAEYQHGNQKGFYNVKAFVLHRDGYTCRSGRKIRHSQKLHVHHIQFRAKGGTDTPANLVTLCETCHQDLHAGQFEIKTQRSKTKHATEIGVIKSQLYKHWSFRETFGYETKFKREQILGLPKEHYFDAVAICLEDDELVQPNATVYAKRHVSKGDYQLTKGARSEKRIPTGKLFGIRKHDFIQTPQGSGFVKGKRSTGYFALETLFGEKVHASANVKNNTIRLAARSTTLIQKLESASNSSSR

SEQ ID NO: 4443 - protein, 406 aa, Geobacillus sp.; identical to SEQ ID NO: 3747

SEQ ID NO: 4444 - protein, 431 aa, unidentified
MPNKVYVINKHGRPLMPCSPAKARHLLDEGKAKVKKRTPFTIQLVYGSSGYTQEVILGVDAGSKTIGMSASTTKEELLSAEVKPRNDVVDLLSTRREFRRARRNRKTRYRKPRFDNRVRSKHKGWLAPSVEVKIQEHITSIKMVCRILPVSKVVIETAEFDLQLLKAIEEGKPVPQGEDYQQGEMYGHYNVRQYVLWRDGYTCQCCGAHATKKKEVRLHVHHLESRKVGGDAPDNQVTLCESCHEKLHKGLIAEKDFKKRKRKSTRDATFMGIMRKTLMQRLCSELPIPVVKTRGYITKATREKLLVLPKSHTNDALAIAQGKQGFNVGYLPGILQIDKIYTIRPVRHHNRQLYKATILKGGIRKSNQTEKYVFGYRLFDKVQFNGQDCFIWGRRTTGIFTIKTINGKMIKDGISFKKLKLVEKSTSYLIA

SEQ ID NO: 4445 - protein, 529 aa, unidentified; identical to SEQ ID NO: 3816

SEQ ID NO: 4446 - protein, 512 aa, unidentified
MSTVYVLNKDSKPLMPTTRGGHVRHLLKEQKARVVRTNPFTIQLLYETDNLVQPLYLGIDPGRTNIGVAVVKTDGTAVFTAHLETRNKEIPKLMQGRKKARRARRTNGRRCRRQRRAKANGTISKKCVKQATAQNGSVSKRANEIGVIKRHHPGCEKEVLCIGIKNKEAKFSNRTRPEGWLTPTANQLLQTHINLVKKIQKFLPISDVVLEINKFAFMRLDNPNVQKWQYQQGPLYQKASLEEAVSEMQEHHCLFCKNTIDHYHHVVPQHKNGSNTIGNIVGLCAKHHDLVHKDTSWQEKLAKKKTGLNKRYGALSVLNQIIPALTKELSSLFPKHFFATNGKSTYDYRAAHGVSKDHWLDAYCIAGSVLPNDVCDNNINNHVPYELKQFRRHDRRALHKENMGRVYTLNGKSVATNRHKAIKQTTDSLEEFRQRQPNDVCKLKVKEHHPEYRNPKRSFPGCVFLVGKHTHVMQGTSGSHNGKADEYYDTNGNSYSSGKCKFVVKNEGIVFT

SEQ ID NO: 4447 - protein, 427 aa, unidentified
MRVFVLDKNRKPLDPCHPAKARKLLKSGRAKVLRRYPFTIIIKDLEAENCSTHNHQLKIDPGAKTTGLAIVQGDRVIWGAELTHRGFQIKEALTSRRQLRRSRRNRKTRYRQPRFLNRTRQKGWLAPSLMSRVHNILTWVNKLIKFCPIAGISQELVRFDTQKMLNPEISGIEYQQGTLYGYELREYLLEKWDRTCAYCGAKNTRLEIEHIKPKSKGGSDRVSNLAIACHNCNQAKGNLEIEEFLSSKPDILKRILSQAKKPLADAAAVNATRWRLHDELKLIGLPVEVGSGGLTKYNRCRQNLPKTHWLDAANVGKVETLYISDYQPLLIAAKGHGKRQVCGTNKYGFPIRHHSRKKIHKGFQTGDIVKAVVTKGKKIGTYIGRVATRKTGSFDITTVQGKVSGISYKYCQAIHRKDGYSYQFHGG

SEQ ID NO: 4448 - protein, 424 aa, unidentified
LVWNKRGKPLMPCSPAKARLLLKEKKAIVVRRTPFTIQLTIATGETKQPVSLGVDAGYKHVGLSASTEKAELYASEIELRQDITDLLSARRALRQSRRNRKTRYRAPRFDNRIRTKRKGWLAPSVENRINSHLSRIEAVLRLLPVTKITVETASFDLQLLKNPNISGKEYQEGEQLGFWNIREYVLCRDGHVCQHCYGRSKDPVLNVHHLESRRTGGDSPGNLITLCETCHKALHRGELTLKAKRGQSFRAEAFMGIMRWEVLNRLKASHPELEVNNTYGYRTKHARISNGIAKSHCADAFCIAGNLGAKRLGEFFFQKQTRRNNRQIHKLSVLKHGLRKRNQVPFEVNGFRLFDKVACKGEEGFIFGRRSSGYFDVRKLDGTRISAGISYKKLHLLEKRQTYLMEIRKEEAFPPLPEGRGLRA

SEQ ID NO: 4449 - protein, 442 aa, Ktedonobacter sp.
MNDASLGGPCIGENRKETMSRVLIVDQQRRPLMPCTPARARLLLKQKKAAVLRRCPFTLILHESRPEAVVQPLRLKIDPGSKVSGLALVNDTSGEVVWAAEVTHRGGQVHKDLQKRAGVRRGRRQRHTWYRPARYLNRRRPKGWLPPSLESRVQNVETWTQRLIFWAPVGSLSYEAVRFDTQALQNPEIEGTQYQHGTLAGLEVKEYLLLKWGQRCAYCEKMGLPLQLEHIIPKIRGGSNRVTNLTLACEQCNGKKGNQTAEEFGFPHLQAQAKAPLKDAAAVNSTRRVLHQRLMRTGLPIEASSGGHTKWNRGERDIAKTHWLDAANVGPSTPARLLFQHVRPWLIEANRRQDRQLCLVNALGFPRSKPKKKSPKHDFRTGDIVRAVVPAHLENPGIYVGRMAAKASGAFTITTKQRKVSDIGYRYCTRLQHTDGYSYLIK

SEQ ID NO: 4450 - protein, 432 aa, Ktedonobacter sp.
MSVFVVDRHHQPLMPCSEKRARLLLARKRAVVHRHVPFVIRLTDRKREQSEVQPVALKLDPGSKTSGMALVRVEQRGEGEVHHALHLAHLSHRGEQVHQALLQRRGYRRRRRTVNLRYRAARFANRRRKAGWLPPSLRSRIGNVLTWATRLQSWAPLTRIEVERVKFDMHLMQHPEVSGIAYQRGELVGWEIRAYLLEKFVRRCVYCGKQNVPFEIDHVRPRSRGGSHRVSNLVLSCHACNQAKGDLTAAEFGHAEVQKQARVPLKDAAAVNATRFALVEALRALGLPVGTWSGGRTRWNRDRFGVEKEHCLDALCVGDVVGITRGRSQMLLIQAQGRGSYQRTNVDGSGFPVGYFTRAKRMRGFATGDLVRAEVPQLPKPLKTEGTHVGRVAVRASGSFRVGKCDGINAKYCVVLQRADGYAYGQAPCPKP

SEQ ID NO: 4451 - protein, 438 aa, Geobacillus sp.; identical to SEQ ID NO: 3789

SEQ ID NO: 4452 - protein, 453 aa, unidentified
  REGION 1..453: note = Ga0315279_10001150
MNMQTLQREFKNVPTDASLVRSSTTLPLNRNESASVVGKVLSCNNPEVNLHWKRVSGLKVIVPVLSLKGSPLMPCGLIKARHLIKGGKAKVVKLNPLVIQLKFDCENQIQNVSLGIDSGYKTIGFSAVSEIREVSAGELNLDNGTSKKLIEKKMYRRSRRNRLRYRKPRFNNRRKFSGWLPPSIQRKFDTHLNIIKQVKAIIPIKKLTVEIGEFDIQKIMNPEISGKEYQQGNLFGYNNMRSFLMAREKGKCQLCEKKFNRDNPSHMHHIKLRSEGGTDRPDDLALVHKSCHDKIHKEKLFHKLKKAKEYKAETFMAIVGAKFKKVLDCDITYGYETKTKRDLLEMDKSHINDAFVIAGGSTQKRCKPYKLEQKRINNRILQTNRKGFSPSIRRQRHIIQNRDFVWIEGKKYLCGGVFNKGTWIYYFERAEKKLISLKKIEKVYHTGSLVWLN

SEQ ID NO: 4453 - protein, 414 aa, unidentified
MPCSPAKARLLLKEKKAIVKRRTPFTIQLTIATGETKQPVGLGVDAGYKHVGLSASTDKAELYASQVELRQDITDLLSARRALRRARRNRKTRYRAPRFNNRIRTKRKGWLAPSVENRINAHLSRIEAVLRLLPVTKITVETASFDMLLLKNPDIAGKEYQEGEQLGFWKVREYVLFRDGHVCQHCYGRSKDPVLNVHHLESRRTGGDSPGNLITLCETCHEALHRGEIALKTKRGHSFRAEAFMGMMRWEVLNRLKASHSELEVNNTYGYRTKHARIVNGIDKSHCADAFCIAGNLGAERLCEFFFQKQTRRNNRQIHKLSILKGGIRKRNQAPFEIKGFRLFDKVACKGEESFIFGRRSSGYFDVRKLDGTRISAGISYKKLRLLEKRRTYLTEMRKEEALPPLPEGRGLRA

SEQ ID NO: 4454 - protein, 424 aa, unidentified
MSNYVFVIDQNQTPLKPVHPKRARQLLSFGKAAVFRLFPFTLILKQEVSEPNVHPLILKIDPGSQVTGFALVTEGGEVVWRMQLEHRGGIIKKRLEQRRALRRQRRSRLRYRKPRFLNRKRKEGWLPPSLMHRVQTTETWVKRLLKFCPIQEIWIERVKFDTQLMENPEISGQEYQQGTLQGYTVREYLLEKWYRKCTYCKKEGIPLQVEHIYPRSKGGSNRVSNLGLACEKCNQKKGNTLIEDFLKRKPTLLESVLKQAKTPLKDTSAVNATRKKIVEVISKHSSLKTATGAQTKMNRVRLGLPKEHCLDAACVGEVERLTILSDQPLMVTATGTGGRQKCQTNKFGYPIKHRPLRPIQGFQTGDIVKVDIPKGKNQGQWRGRLCPYSDGNCEIYPKGRKRLGTKLSYVSEVMHRKDGYKYRH

SEQ ID NO: 4455 - protein, 421 aa, unidentified; identical to SEQ ID NO: 2738

SEQ ID NO: 4456 - protein, 515 aa, unidentified
MTALEEKLSKTEYIYVLGFDGKPQMPTRRKRHVLKLLKTGRARIAEDIPFTIRLTYRNSPVLQPVTLAEDPGRTNIGAAVLSPLGGLLFAAVIETRNKEIKKLMADRQKSRQASRRGERKARQRLAKRYGSMVKSGMVMRKLPMYAADKFVTCKFIRNTQARFCNRKRCPDWITPTVQHLVQTHLNIIRKISRYLPVTDIAFEVNRFAFMHMENPKAMGVDFQNGPLKGYDDVKEAICTQQHGKCLMCKKPISHFHHIVPRSRGGSDTIQNLAGLCPECHTKVHTDTTFRKDFDRKKSGQLKKYGALSALNQAVPFICKKLLEEYGEEHVHFCGGLDTSLIRTALGFEKTKKNQMHEVDAYCIGLAALEINEVETPAFDHTFQIRQFRRQDRSIIHHQTGRSYYQGKEKVAQNRKPGFEQKTTALSQWYEEQVRIHGEKEAEKLRSQLRVEKSCRHYNDMDRFLPGAVFLYEGKRYVLSGRITNGKYLRACGQGMKNFPAAECTFIRHNAGLVFI

SEQ ID NO: 4457 - protein, 450 aa, unidentified; identical to SEQ ID NO: 2935

SEQ ID NO: 4458 - protein, 532 aa, Acidithiobacillus sp.
MLAKGKAPKVPAASARLSAGTDGASYKPSRGDIDRKVRVTSVRKDIGEKMAVFVLDRWKKPLMPCSEKRARMLLERGRARVHHMVPFTIRLVDRLVENSALQPVRLKLDPGSKATGLALVREKETVDVSTGEIIRTLTVLMLLELKHRGHAIRDALTSRGAFRRRRRGNLRYRPARFDNRTKPEGWLAPSLQHRVGTTLAWVERLMRWAPVTALSQELVRFDTQQMQNPEISGTEYQQGTLLGYEVREYLLEKWGRECVYCGVENVPLEIDHIHPRSKGGSDRVSNLTVSCHDCNQAKSNMPVEQFLAKRPERVRKILAQAKAPLRDAAAVNSTRWALFQRLKATGLDVESASGGRTKWNRHQLDIPKEHCLDGACVGHVDAIERWQQPVLSIKATGRGSYQRTRLTKYGFPRGYLTRSKSAFGFHTGDMVKAVVTKGKKSGTWLGRVAIRASGSFNIQTAVCKTGNGLVQGGIHHRFCTLIQRADGYGYSWTKIASTSARTNTQGDAEMGRSVTAALSLPGLNPGVSRATG

SEQ ID NO: 4459 - protein, 471 aa, Caldicellulosiruptor sp.; identical to SEQ ID NO: 3268

SEQ ID NO: 4460 - protein, 431 aa, Moorena sp.; identical to SEQ ID NO: 2831

SEQ ID NO: 4461 - protein, 419 aa, Bacillus sp.
LFVYVINKHGNPLMPCSPRKARILLKNKKAKVVKRTPFTIQLLYGSSGYKQPISLGVDTGTKHVGLSATTKNQVLLEAEVQLRTDIQELLATRRQFRRSRRNRNTRYRKARFLNRKKPNGWLAPSIQHKVDSHIKLVKWVHSLLPITHITVEVAQFDTQKIKNPDIQGAAYQQGEQLGFWNVREYVLYRDGHTCQWCKGKSKDPVLNVHHIESRKTGGDSPSNLMTLCKTCHDMIHREGLEHEIQRRFSSLKDASHMTVMRWFIWNGLKKVYPHANITYGYITKCIRIANGLPKSHMVDARCISGNPLAKPSGTVYLLKFVRKNNRQLHKATILKGGKRKSNKAPRFVKGFQLFDKVVYEGKECFIFGRRSSGYFDLRLLDGTKVHASASWKKLKRVEYASTLLIERRKGDSSPTFALA

SEQ ID NO: 4462 - protein, 529 aa, unidentified; identical to SEQ ID NO: 4276

SEQ ID NO: 4463 - protein, 431 aa, unidentified
MPDKVYVISRLGHPLMPCSPAKARHLLDDKKAKVVKRMPFTIRLLYGSTKYIQPIILGVDAGSKTIGLSASTAKEEVFAAEVMPRNDVVENLSTRREFRRARRNRTTRYRKPRSDNRVRSNHERWLAPSVKVKIQEHITSIKRVCTILPISKVVIETAEFDLQLLKAIQEGKPIPEGEDYQKGEMYGSYNVCQYVLWRDNYTCICCGVRGTPKNPVRLHVHHFESRKYGGNAPDNHGTLCDDCHKKFHLGIITDVKLKTRRRQSTRDAAFMGIMRKTLMWRLRTELFIPVAETKGYITKATREKLLVLPKSHTRDALAIAQGRHGFGIKEYAYVEPANHIYTVRPVRHHNRQLHKASILKGGIRKRNQASKYVFGFRLYDKVLYQGKACFVWGRRTSGTFLLRTIDGIKVKDGVSYRNLTLLERSSNYLIA

SEQ ID NO: 4464 - protein, 442 aa, unidentified; identical to SEQ ID NO: 3161

SEQ ID NO: 4465 - protein, 439 aa, unidentified
VAVFVLDRSGKPLMPCTEKRARLLLARGRARVHRIIPFVIRLTGRRASGCSLQPLRVKLDPGSRVTGIALVREADDGIAVLNLFELVHRGRQISEALTARRAFRRRRRGADLRYRAPRFLNRGKAKGWLAPSLMHRVHTMIAWVNRVRRWAPVAALSSELVRFDMQALANPEIAGIGYQQGTLAGYEVRNYLLEKWNRTCIYCDATDHRLQIDHLTARARNGSNRIGNLGLACGDCNQDKGALDVREYVRDPKRLARILATASRPLQDAAAVNATRCALASALRATGLPLELDSGGRTKFNRVTHNIPKTHALDAVCVGQVDALRDWQRPSLTIRATGRGSYQRTRLTRHGFPRGYLMRQKQVHGFQTGDHVCANVPHGKKAGVHTGRVAVRATGSFNIHTGTAVVQGIGHRFCALIQRGDGYAYCFEPKNRLRQGDAI

SEQ ID NO: 4466 - protein, 451 aa, unidentified
MTTFVFVLDRKGRSLMPCHPARARKLLKKGRARVHKVFPFTIRLTDRELENSSVQPMLIKIDPGSKETGIALLREEKNKGHHALYFINLQHRGQQIRNALHKRLCLRRSRRSRNLRYRSPRFLNRRRAEGWLAPSLQHRADSILSWVSRLRKITPVERISQELVKFDTQLIQNSKIEGIEYQQGELAGYELREYLLEKFGRKCIYCGADNVPLNIDHVIPKSKGGSNRVTNLVLACVQCNQKKGSRSIEEFLKDKPEVLRQIKNQLKQPLKDAASVNATRWKLFNKLKSTDFPFEVGSGALTKFNRKKFGIPKAHWLDALCVGNVPSVTNWRNLNVLNIKCCGRGAYQRTRTDKYGFPRGICMRQKKVYGFSTGDMVKAIIPKGKKKGVYVGKVAVRKTGSFNLQTSGQTIQGISYRYCRLITHSDGYSYSWKSCPIPPRVETRGIPGEVR

SEQ ID NO: 4467 - protein, 442 aa, unidentified
MSTSVFVLDKKHRPLMPCRPARARRLLRAGRARVVKRFPFVIRLVDRTVEQSEVQPVLIKLDPGSRETGAAVVRDDEKKRHHALAFFVIKHRGGAIRDALKARSAFRRRRRSQNFRCRSPRFLNRVKPKGWLPPSLRHRVETTLSFVRRMCRYLPVSGIAAELVKFDSQKLQTPEVSGIEYQQGTLFEYEVREYLLEKFGRKCVYCGAEGVPLNIDHVVPRAKGGSNRVSNLVLACVSCNQKKGARSLEDFLKGKPEVLARVRRELKTPLRDAAAVNATRWVLFNELKATGLPVETGSGALTKFNRHAFGVEKEHWLDALCVGRLNGAVTRKGLNVLEIRCMGRGSRQRTRLTKYGFPRGYLMRQKCVHGFATGDMVEANVPKGKKAGLWRGRVAVRVSGSFNIQTPKGVIQGVGWKHCRLISHNDGYGYAWLGHAPHSSPA

SEQ ID NO: 4468 - protein, 455 aa, Halomonas sp.
MAVFVLDKHNRPLMPCSEKRARLLLERGRAVVHKRYPFTLRLKDRTGGDTQPLRLKLDPGSQTTGLAVVREANDGQHVLCLFELVHRGFQIKKALQQRAAFRRRRRSANVRYRASRFDNRTKPKGWLAPSLQHRVDTVMAWVQRLNKLAPMTALDQELVRFDMQKLETPDISGVEYQQGTLLGYEVREYLLEKWGRECAYCSATDTPLEVEHIQPRSRGGSNRISNLTLSCHNCNQEKDRQSLADFFATSKGLKKRLKKHGHNAETRVEHVQREQQRLLRDASAVNATRWALFNALNATGLPVAVSTGSRTKYNRQQLGIPKTHALDAACVGVFDTLRNWAVPTLTIKAMGRGSYQRTRLSRHGFPRGVLMREKQVYGFQTGDMVKAIVPTGKKAGIHTGRVAMRKTGSFNIQTKQGAVQGISYKHCTLTQRGDGYGYYLTPFTNLKGGAGQALA

SEQ ID NO: 4469 - protein, 443 aa, Oligella sp.
MAVFVLGKNKRPLMPCSEKRARLLLERGRARVHRLVPFTIRLVDRTVADCVLQPLELKIDPGSKTSGLALVRTRQSVNAQSGEITATAHVLNLFELIHRGFQISQALTARSQMRRRRRSANLRYRAPRSLNRTRPTGWLAPSLQHRVDTIQSWVQRIRRYAPVTHLAQELVRFDMQQLENPEITGVEYQQGELAGYEVREYLLEKWQRQCAYCDATDVPLQIEHIHPKARGGSNRISNLTLACAPCNVKKAAQHITEFLAKDPKRLAKIQAQAKRPLRDAAAVNATRWALLNTLNATGLPVNTGSGGLTKFNRTRLQIPKTHALDAVCVGSVDHVKQWQKPTLVIKATGRGSYQRTRLNRFGFPRGYLTRQKQIHGFQTGDRVKAVVTQGKKIGTYVGRVAVRASGSFNIQTAQSLIQGISHRYCTLIQRGDGYGYSLRTDSN

SEQ ID NO: 4470 - protein, 425 aa, unidentified; identical to SEQ ID NO: 4417

SEQ ID NO: 4471 - protein, 447 aa, Bacillus sp.
MNEQKSNWKIPQKRILKILYEEGYFMLVFVQNKHGEALMPCKPRKARLLLKAKKAVIVSYKPFTIKLLYGSSGYKQAVNVGVDLGTKHTGIAITSQNNVLTKGEIELRQDVKSLLNTRRIYRRSRRNRKTRYRKPRFQNRKRPEGWLPPSIRSRVDNTFFWIDKFCSLVPNPNLTIEVGKFDPHKMINLDIQGVDYQKGQTYGYYDVRYFVFARDQYTCQVCKKKNKILKTHHIVYRSYGGTDRADNFITVCTDCHTHENHQKGAIFWKWMNEGKKLLRYKEGTFMNIFRKRVFTKYPQAEITYGSITTPRRKELGLEKSHANDAIAISGIELIHHNEESIFKIKQFRKKKRSLHEATARKGRTTKNVTCKRNLKNVKQLKGFYLNDKVRVYGQVGFITGFTGTSMAYVKDIHNQYIKKSNKIYKQVNLKDLTLISHNNNWQYEQSL

SEQ ID NO: 4472 - protein, 489 aa, unidentified
MTMVYVQNKDGKPLMPTTRYCYVRLLLKEKKARVVCTTPFTIQLNYDTPDITQDLILGIDPGRTNIGVAVVKEDGSCVFSAHLETRNKEVPLLMKKRTAFRRQHRTQDRRRKRQRRAIAAGTTVESNTIERLLPGYEKPIVCHHIRNKEARFNNRSRPAGWLTPTANHLLQAHINLIAKAAKFLPITKVVVELNRFAFMAMDNPNIRRWEYQQGPLYGLGSVKDAVYAQQDGHCLFCKKPIDHYHHVVPRHKGGSETLANRCGLCEKHHDLVHKDKAWAEKLVTRKGGMNKKYHALSVLNQIIPFLMEYLGEETPYDVYATDGKSTKGFRIAKNVPKEHYTDAYCVACSILDTDIDVSAPAEPFELKQFRRHDRQACIRQMVDRKYLLDGKVVATNRHKAIEQKSDSLEEFREAYGDAAVSQLTVKPHPPQYKDMTRIMPGAVMDFNGTIGVMQSSIVGRFYKSTKGYKATPRRCVLLAQNAGMVFLPA

SEQ ID NO: 4473 - protein, 458 aa, Desulfobacter sp.
MKVYVRSQSGKWLMPTNPANTRILLKKGKARVIQRTPFAIQLLYETTEYVQPVTVGIDDGGIHVGIAAVSQGKSVFQQEITLRSDIKSKLDTRRQYRRSRRHRKTRYRKSRFLNRKSSIPTCKVCGGNAPASQVICRSCLNRADGVHQKYAGIKKRSFRIPPSIKAKKEAIVRVVKQVPLPISRIVLEDLYFDFQAMENPDISGEQYQHGDLLYHKNFKQACLVRDKFRCRVCGAQIKLQCHHIRPRAKGGTDKLSNLMTLCDVCHDRHHKERLQLPKQKSSFYMSAAHVQQGKHYLQRELSKAAPLSTTFGYITGHHRNRAGIEKSHVNDAVVIADKNAIPFDGYIKTNHVQSRKRSLHEATARKGRKSPNRTQKRNNKNVFTLKGFTRWDTVQYKGRVGFISGFTGSSSCRIIDIHGEYIKNPEKKYTQVNLSEVRKIHGNRSTVRYYANSSPTES

SEQ ID NO: 4474 - protein, 458 aa, Lactobacillus sp.
LKGVGMMSEIKKVDYIYVVDSNGTPLMPTSRLGMVRRWLKTGQAKWFGNSRNTIQFVRPVTTNTQELTLGVDAGFHLGLSVVGNNREYYVSESLRKSEKDRITSRRELRRTRRNRLRYRKARFNNRRRKDGWLAPSIQHRLDFTIKEIKRLYKFLPITNLVVEVTPFDNQKLLNPDIQGWQYQKGKMYGFKTIKDYLLARDNYRDALDGKQYPASQLRVHHLVQRKDGGSNQPDNLVLLSDINHNQANHNNGILAKLRENRQKTLDYRGAYFMSILATRLSNYFEHYTTTQGYLTANLRQKYEIEKSHLNDAFVIAGGTDTTLRTNNVYSRQKLRNNNRVLQKFYDAKYIDSRDGKQKAGKELSSGRTRRSQELNYDNLRQLRKEKVKKGRVSIRRGHYQLRPHDVVLNTRTNRIETVKGVQNSGTVIKFQTGKTCSIKSVVSLYHVNGILEKKMKNI

SEQ ID NO: 4475 - protein, 318 aa, unidentified
PRFDNRISTKRKGWLAPSVENRINAHLSRIEAVFRLLPVTKITVETASFDLQLLKNPDIAGKEYQEGEQLGFGNIREYVLCRDGHVCQHCYGGSKDPVLNVHHLESRRTGGDSPDNLLTLCETCHKALHRGEITLKTKRGQSFRAETFMGIMRWEVLNRLKASHSELKVHNTYGYLTKHARIENGIAKSHGADAFCIAGNLGAERLGEFFFQKQTRRNNRQIHKLSILKGALRKRNQAPFEVKGFRLFDKVACQGEEGFIFGRRSSGFFDVRKLDGTRISAGISYKKLHLLEKRQTYLIEIRKEEAFPPLPEGRGLRA

SEQ ID NO: 4476 - protein, 409 aa, unidentified
  REGION 1..409: note = Ga0307928_10020956
MFVYVINKNGNPLMPCTPAKAKHLLKAGKAKVISNEPFTIKLLWDCEEHTQEITAGMDTGTKTIGCAAITSDKVIYQSEIGIRQDVSRKMTQRKAYRRSRRGRKLRYRKPRFLNRASMRREGRLAPSIRSKVDSHLRERNFVESILPVTRWKVELASFDINKITNSDVKGKDYQQGPQKDYYNTKAYILHRDNYQCQNKKCKNKKKNIKLHVHHIIPRAAGGTNIPSNLIVICEDCHYDLHQGKFKIEGNRSKTKHATEMGIVKSQLEKQFGDFTKTYGYETKFKREKVLQLPKSHINDAIAICCEDGELVTPDNIIYFKKHVPSGDYKQTNGRRSERTIPTGKLFGLRKFDLVQTSKGIGFVRGKRSTGFFKITDLDWNVIGAAINIKKNCKRLSASSTTLIKRRHYV

SEQ ID NO: 4477 - protein, 418 aa, unidentified; identical to SEQ ID NO: 2425

SEQ ID NO: 4478 - protein, 431 aa, Acidithiobacillus sp.
MTVFVLDSRKKPLMPCSEKRARLLLERGRARVHRMVPFAIRLLDRLQAESVLQPVRLKADPGSKTTGLALVREKETVHPETGEVVLTAVVLMLLELQHRVDTTDSLVNRLMRLAPITALSQELVRFDMQQMQNPEISGAEYQQGTLAGYEIREYLLEKWGRECVYCDAENTPLEIDHIHPRSRGGSDRVSNLAIACHDCNQRKGNMPLEQFLAKAPERAEKILKQAKARLNDAAAVNSTRWALFQRLKATGLDVEVASGGRTKWNRIRLGLPKAHCIDAACVGYVDAINQWQQPVLGIKATGRGSYQRTRLTKHGFPRGYLTRSKSAFGFQTGDMVHAVVPTRAGRKPGKKAGAYLGRVAIRASGNFNIQTGNGLVQGIHHRFCTLIQRADGYGYSWTKIATTQGDAGMGQASPAALSLPGLNPGVSRATG

SEQ ID NO: 4479 - protein, 372 aa, Ferroplasma sp.
MEKNMKEKQKLDRRNTYTPTDAPQVRGNCDHALNREETLSVHGLKTPSNNPHVDLLSPVGGHKADMPVFILNDDGKPLIPCKPAKARHLLSDKKAKVISSNPFTIQLLWHCEGNVETITLGIDSGYKHIGFSAVTDNKELISGEVVIRTDIPKLNEEKAMYRRKKRNKLWYRKPRFMNRGNNKEGRFAPSIEHKLETHIRLIEKLKRILPVSNTVIEVASFDTQKMKNPEISGIEYQQGELQGYEIREYLLEKFHRTCVYCGKTGVPLEIEHLTPRSRDGPDTVNNLAISCHDCNQKKNNLTAEEFGYPEVRKRALITMRDAAFMNTVRWKLTQLTGSEHTLGFITKKNRISLGLDKTHANDAFVIAGGTCR

SEQ ID NO: 4480 - protein, 414 aa, unidentified; identical to SEQ ID NO: 4264

SEQ ID NO: 4481 - protein, 254 aa, unidentified
MLAGKPLPVGTDYQLGEMYDEYNVRQYVLKRDHYTCQCCGAHTTTKKTVKLHVHHLESRKVGGNAPSNLITLCTTCHDALHKGKVSLDGKERGKPLRDAAFMGIMRKALMARLREELPIPVQGTYGYITKMRREQNDIKKSHVNDARCISKHPLAEPCSVCYRTKAIRHHNRQTHKANFSKGGIRKRSQMPYVVEGYRLWDKVLYKGQECFVSGRRASGSFTLKKLDGTRISKGVTFKKLRLLEPATNYLIERM

SEQ ID NO: 4482 - protein, 419 aa, Geobacillus sp.; identical to SEQ ID NO: 2623

SEQ ID NO: 4483 - protein, 431 aa, unidentified
MPNKVYVINKHGRPLIPCSPAKARHLLDDGKAKVKKRTPFTIQLIYGSSGYTEDVILGVDAGSKTIGLSASTEQEELFAANVTPRNDVVDLLSTRREFRRTRRSRKTRHRKARFNNRVHSKHKGWLAPSVEVKIQEHITCIKRVCNILPISKVVVETAEFDLQLLKAVEEGKPVPQGEDYQKGEMYGHYNVRQYVLWRDGYTCQCCGAHSTKKKDVKLHVHHLETRKTGGDAPSNQITLCEDCHQKLHKGLIPAADFKKRKRKSTRDAAFMGIMRNTLMQRLRSELPIPVAETRGYITKATREKLLVLSKSHTNDALAIAQGRHGFNVGYLQSIPQNNRIYTIRPVRHHNRQLHKATVLKGGIRRVNQAVKYVYGFRLYDKVRYNGVECFVWARRVMGYFRLRHLGGENVKCGANYKNLELLERSQNYLIA

SEQ ID NO: 4484 - protein, 420 aa, unidentified; identical to SEQ ID NO: 3247

SEQ ID NO: 4485 - protein, 456 aa, unidentified
MSTCVCVLSNSGERLMPTFRLGKVRRLLKDGKAKIVKHHPFTIQLLYDSKTNTQPIEICEDVGYNYIGISVKSESHEYVSAQYDTLQDEKEHHDDCRKYRRTRRNRLRYRKPRFDNRKRSEGWLAPSLEHKKQLNIRLIERYVSVIPITRATVEVGSFDTMLLQAIQKGESKPEGVDYQKGPRYNLATLREAVFYRDNYTCQVCGRKIADGAILHMHHMFYWKGRHGYQLDELVTACEKCHTPANHQKGGKLFGFGEDKEFANLSGAAFMNAVRWQIVNALYATYGKEFVTITYGAMTKEKRIALQLEKTHSNDAYAMGDYYLAHRCVFRHYQKRRRNNRVLEKFYDATYIDARTGNKAKGKELFNGRINRNHKKDSENFHKYRSKKVSKGRRSIRRQRYAIQPYDTVRLEGKTYITSGCHNKGTRLLIPANGKSKSVAISKVQVVCHAGAWIQII

SEQ ID NO: 4486 - protein, 492 aa, unidentified
MTPVWEGRTFAYLPQSQKEEPAMSVFVVGLNGCRLMPVSERKARLILNDGKASVYRKVPFTIKLNYKTGSTTQPGYLGIDTGSQHIGVSVVREGGTVLHKEEIGLRDSMTKRKLLEAKASLRRGRRCRKTRYRHPKWRPKTKRVYCEVPDKKGRHWQKQKNTFISGRPEEWLPPSLQSKTDHHIRWIKKLQGLLPEWYRLSIELGRFDPARMKDPEIHGNLYQKGPQYDYENVRAYVLDRDRYTCQVCRRKGRKLHVHHILYRSQGASDTPQYMATVCSSCHTTENHLPGGILYQWMQEQKKFTRGLRDATFMNILRKRLMKTFPDAVFTYGNITKVDREKLKLPKSHGNDATAIALVRTGVTSVQDEEPVLYIQQVRRKKRSLHEETPRKGRKEPNRTAARNSKNTKAVTVTKRRDGKKVSVTACLFDRVELNGKKGWITGFTGKACRIVDTEGNYVAATDKYTQVNISSIRILHHTGNWVTGLKWNVGKR

SEQ ID NO: 4487 - protein, 443 aa, Bacillus sp.
MVEENITCFKQRKGENPVVFVLDTNKRPLAPCHESVARKLLKQEKAAIYKRFPFTIILKKSVDEPEIKTTYRLKIDYGSRHTGLAILRNNEVIWLGQVDHRTDIKERLDKRRAFRRARRNRKTRYRKPRFLNRRRKEGWLPPSLESRVKNIETWVNRLRKLCPITHISYENAKFDTQLMRNPEISNIEYQQGTLYGYEIREYLLEKFNRKCCYCGKTNVSLEVEHIIPKSRGGTNRIDNLCLACHECNQKKGSRTAEEFGYPHIQQMVKKTLKDASVVNTTRWKVYEVLKQSGCEVECGTGARTKMNRIRLGLPKTHYFDACCVGESTPIQLYFKTKEVLFIKAKGRGSRSRTNLNKYGFPKGYLARQKFFFGFQTGDMVKAVVSKGKYEGVWFGEVACRKSGSFDIKGKDGKRIAQGISYKYIQVIQRFDGYTYRKEGAELA

SEQ ID NO: 4488 - protein, 471 aa, Caldicellulosiruptor sp.; identical to SEQ ID NO: 3268

SEQ ID NO: 4489 - protein, 418 aa, unidentified; identical to SEQ ID NO: 4327

SEQ ID NO: 4490 - protein, 390 aa, unidentified
MVYVQDIDGKPMMPTTRYGKVRRLLKNKKAVVVNLCPFTIRLTYVTSDYKQEIVLGVDAGTKHVGLSATTKSKELYSSEVILRNDIVDLLSTRRELRRARRNRLRYRKPRFNNRIKSKRPGWIAPSVKYKIDAHIRVVENVCSILPISRIVIEVAQFDTQKIKNPNISGKEYQEGDQLGFWNTREYVLARDGHKCQYCKGKSKDKILNVHHIESRKTGGDSPSNLITLCETCHKEYHKGNIDLKIKRGKSLRDAAVMGIMKWRLYEEIKSKYDRVSMTFGYVTKYNRINHGFEKSHVSDAFVISKNFNAIRLGYYYKVRLVRRHNRQIHKQKIQKGGIKRLNQSPFEVFGFRLFDRVMFENSYYFIFGRRKTGSFDIRYIDGKKPEECHI

SEQ ID NO: 4491 - protein, 428 aa, unidentified
LKVFVLNMRGQPLMPCSPAKARHLLKAGKAVVKRRTPFTIQLRIATGETKQNVTLGVDAGAKHVGLSATTEKEEVFASEVELRQDITGLLAARLSLRRDRRHRKTRYRAPRFLNRVRSKHKGWLAPSVENRIQAHMSRIDAVCRLLPVTKIVIETASFDIQKIKDPSVEGTDYQQGDQLGFWNVREYVLFRDGHVCQHCHGRSKDKILNVHHLESRQTGGDAPNNLITLCETCHKAYHAGKIKLKVKRGQSFRAEAFMGIMRWTLLDRVRKAHPGLPVENTYGYLTKHTRITHGLPKTHCVDAYCIAGNLKAVRRGVHLYQRQVRKHNRQIHKCTVLSKTLKDGTKIGYRKLNQTPHLVKSFRLFDKVRCLGQTGFIFGRRSSGYFDVRRLDGVKLSSGISYRKLTLLEKRSTYLTELRKEDGASSPV

SEQ ID NO: 4492 - protein, 414 aa, unidentified
MPCSPAKARLLLKEKKAIVKRRTPFTIQLTIATGETKQPVGLGVDAGYKHVGLSASTDKAELYASQVELRQDITDLLSARRALRRARRNRKTRYRAPRFNNRIRTKRKGWLAPSVENRINAHLSRIEAVLRLLPVTKITVETASFDMLLLKNPDIAGKEYQEGEQLGFWNVREYVLFRDGHVCQHCYGRSKDPVLNVHHLESRRTGGDSPGNLITLCETCHEALHRGEIALKTKRGHSFRAEAFMGMMRWEVLNRLKASHSELEVNNTYGYRTKHARIVNGIDKSHCADAFCIAGNLGAERLCEFFFQKQTRRNNRQIHKLSILKGGIRKRNQAPFEIKGFRLFDKVASKGEESFIFGRRSSGYFDVRKLDGTRISAGISYKKLRLLEKRRTYLTEIRKEEALPPLPEGGGLRA

SEQ ID NO: 4493 - protein, 339 aa, unidentified
LLSARRALRQSRRSRNTRYRAPRFDNRIRTKRKGWLAPTVENRINVHLSRIETVLRLLPVTKITVETASFDTQLLKNPDIAGKEYQEGEQLGFWNVREYVLFRDGHVCQHCHGRSKDPVLNVHHLESRRTGGDSPDNLLTLCETCHKALHRGEITLKTKRGQSFRAETFMGIMRWEVLNRLKASHSELKVHNTYGYLTKHARIENGIAKSHGADAFCIAGNLGAERLGEFFFQKQTRRNNRQIHKLSILKGGIRKRNQAPFEVKGFRLFDKVACQGEEGFIFGRRSSGFFDVRKLDGTRISAGISYKKLHLLEKRQTYLIEIRKEEAFPPLPEGRGLRA

SEQ ID NO: 4494 - protein, 421 aa, unidentified; identical to SEQ ID NO: 2610

SEQ ID NO: 4495 - protein, 411 aa, unidentified; identical to SEQ ID NO: 2606

SEQ ID NO: 4496 - protein, 401 aa, unidentified
LDANNKQLTPTKEQKAWFLIRKKRATLVSKYPMVIQLKKKIPDKEICKDEVRCGIDDGGLHVGVALVQKCQTRNKVVFKGVIEQRNDVKHLIDVRCGYRRYHRYHKRYRSARFNNRNSSKREERIAPSILQKRQATIRVINQLNKWINITNYWLEDVAIDIRALTDGYKPYRWQYQKSNRLDENIRKAVILRDGYKCMECGKSNCRLEVHHIKPRRLKGSSTLDNLITLCIKCHQKTESVEELYMDRYFALLNSSDNKNLNYAQHVMIGKKWLREQLSNLGMLYLTNGGDTANKRIDWDIAKSHSNDAICITDLRPDTCEIKEWAIKPMRRQSKAKTDNVLGIKHRDLVEYTFRNGETHRGYVTALYPEQNAINFQSPTKHCKKVNAKNVKYFGNILKFTG

SEQ ID NO: 4497 - protein, 512 aa, Haloactinospora sp.; identical to SEQ ID NO: 4194

SEQ ID NO: 4498 - protein, 428 aa, unidentified
LKVFVLNMRGRPLMPCSPAKARHLLKAGKAVVRRRTPFTIQLRIATGETKQSVTLGVDAGAKHVGLSAATEKEEVFASEVELRQDITGLLAARLSLRRERRQRKTRYRAPRFLNRVRSKHNGWLPPSVENRIQAHLSRIDAICGLLPVTKIVIETASFDIQKIKHPDVEGTDYQQGDQLGFWNVREYVLFRDGHVCQHCHGHAKDKILNVHHLESRQTGGDAPNNLITLCETCHKACHAGKIKLKVKRGQSFRAEAFMGIMRWTLLDRVRKAHPGLPVENTYGYLTKNTRITLGLPKAHCVDAYCIAGNLKAVRRGVYLHQRQVRKHNRQIHKCTVLSKTLKDGTKIGYRKLNQTPHLVKNFRLFDKVRCLGQTGFIFGRRSSGYFDVRRLDGVKISSCISYRKLTLLEKRSTCLTELRKEDGASSPV

SEQ ID NO: 4499 - protein, 443 aa, Anoxybacillus sp.
MVEENMTCFMQRKGENPMVFVLDTNKRPLAPCHEAVARKLLKQGKAAIYRRFPFTIILKKSVDESEIKATYRLKIDYGSRHTGLAILRGQEVVWLGQLDHRTDIKERIDKRRAFRRARRNRKTRYRKPRFLNRKRKEGWLPSSLESRVQNIQTWVNRLKKLCPIGYISYENAKFDTQLMRNPEINGVEYQQGTLQGYEVREYLLEKFGRKCCYCGKENVPLEVEHIIPKSRGGTDRVDNLCLACHDCNQRKGSKTAEEFGYPHIQKQVKETLKDTSAINSTRWKVYEVLKQTGLDVECGTGARTKMNRIRLDLPKTHYFDACCVGESTTNHLYFKTKEVLFIKAKGRGSRSRTNLDRYGFPRGYLARQKFFFGFQTGDMVKAVIPRGKYQGVWFGEVACRKTGSFDIKGKDGKRIAQGINYRYVQVIQRFDGYAYGKGVAELA

SEQ ID NO: 4500 - protein, 453 aa, Erysipelotrichaceae sp.
MSVAVLSRTGQKLMPTSNYRARKLLKSGRATIECYRPIFTIRLTDRAEGETQPIEYACDTGYQHVGVSIKSEKHEFVHAQYDMLSNETERHNDCRKYRRTRRNRLRYRKKRFNNRSKKNKDMAPSLRHRKENQIRLFESFCKVMPITTATFEMGQFDTQLLQAIADGRPLPEGKDYQHGSKYLYQTEREAVFGRDHYTCQVCGKSVKDGVILHTHHIGFWKGYRSNRISNLLTVCEHCHTAKNHKPGGKLWGLEPFGSNLAGATYMSAVRWSMYRELVLRYPEIDIHIQYGAKTAITRKSLHLAKTHANDAYCIGSLHPKYRAAELIYQKKRRNNRILAKFYDAKYIDIRDGKKKSGSVLSCGRANRRESRRSDKNQRIYRGKKCSSGRVSIRKKHYALQNGDLVVYKDKKYFVSGTQNLGTYAKLIGGKPVPIKKIAVIKKGDGWQFIPAQA

SEQ ID NO: 4501 - protein, 480 aa, unidentified; identical to SEQ ID NO: 2726

SEQ ID NO: 4502 - protein, 471 aa, Caldicellulosiruptor sp.; identical to SEQ ID NO: 3375

SEQ ID NO: 4503 - protein, 447 aa, unidentified
VPAYRIKHITKKEVPYMVYVLDIDGQPLMPTSRHRKVRKLLNSHLAKVAKRCPFTIQLLYQSTKETQPVSLGVNAGSRHIGLAATTEQKVVYQEELVPRNDVVKLLSARRALRSSRRSRKTRYRKPRFNNRVHSKHKGWLAPSVEVKIQEHITAIKRICQILPISDIHVETAEFDLQRLKAMEEGRPLPVGTDYQLGEQYDFYNTRQYVLHRDEYTCQCCGTHDNNVKLHVHHIESRQTGGDAPNNLITLCEHCHKLLHAGKTIIPKGKKRGKSYRDATFMGIMRKTLLERLKKEIDVPVEGTYGYITKYWRERAGLEKSHIHDAVCISKYPYAKPLDIYYLTKTVRHHNRQIHKSNFSKGGIRKRNQAPYLVKGFRLFDKVLYQGKSYFIFGRRATGFFDIRTLNGAKVNKGSISYKKLRIQGTANAYLKEIKAIPHMNKFTCVLA

SEQ ID NO: 4504 - protein, 430 aa, unidentified
MPKVYVLNRHGRPLMPCTPAKARHLLDAGKAKVRHRTPFTIQLLYGSTGYTQEVILGVDAGSKTIGLSAATETEELFSAEVKPRNDVVELMSARRQFRRARRNRTTRYRKPRFDNRVRSKHKGWLAPSVEVKIQEHMTAIRRACAILPVSKVVVETAEFDLQLLKAVAEGKPVPQGEDYQKGEMYGHYNVRQYVLWRDSYTCCICGVHGSVRKGVPLHVHHLESRRVGGDAPDNLVTLCTACHDKLHKGIIMAADIKKRKRRSTRDATFMGIMRMTLLRRLREQLPVPVVETRGYITKATRENLLVLPKSHANDALAIAHGPQGFRAEHLPNIRQADRLYTIRPVRHHNRQLHKATILKGGVRKTNQAEKYICGFRLYDKVLYNGIECFVWGRRTSGSFLLRQLNGEKVKDGVSYKHLKLLERSQSYLVA

SEQ ID NO: 4505 - protein, 456 aa, unidentified
MAVFVLDKKKQPLMPCSEKRARLLLARGRAVVHKRYPFTIRLKNRVGGEAQPLRLGIDPGSKTTGLALMHEPDSQQRHVLCLFELIHRGFQIKKALQQRAAFRRRRRSANLRYRAPRFNNRIKPKGWLAPSLQHRVDTVMAWVNRLSKSAPITGISQELVRFDTQKLESPEISGVEYQQGTLLGYEVREYLLEKWGRECAYCGTADTPLEIEHVVPRSRGGSNRVSNLTLSCHPCNAEKDSQTLTDFFATNKGLKKRLKANGLSADAQLERVQRQLKQPMRDASAVNATRWALFSALKTTDLPVAVSSGGRTKYNRQRLNIPKTHALDAACVGAFGKLYDWTVPTLTIKAMGRGSYQRTRLTKHGFPRGFLMRQKQVHGFQTGDMVRAIVPTGKKAGTHTGRVAIRKTGSFNIQAEYGAVQGISHKYCTLIQRGDGYGYHFTLFSNLTGGAGQAVA

SEQ ID NO: 4506 - protein, 447 aa, unidentified
VAGIKTSLNSPDASLTARGHAGQNLRVSVVYVLNKRGKPLMPCSPGKAKVLLKESKAKVAKRTPFTIQLTTATGETRQLITLGVDSGYSSLGLSAVSQDKELYRAQVRLREDLVKLNSERKGYRRARRHRKTWYRSPRFLNRKKPEGWLAPSIQHKLDSHIKLINKVKKILPISKISIEVAAFDIQKIKNPDIDGKGYQSGKQAGFWNVREYVFHRDNHKCQHCKGKSKSSVLEIHHLKSRQTGGDRPENLITLCSTCHDKTSRGALELKAKPSKGFKAETFMSTVRWKLINKLRELGNVVTHTYGYITKQKRRELKLPKSHTSDAFVIADGTTQKRTTSEDFIKQVRKCNRKLFKGDRSHIRNTTERFVCGFQRFDKVLCNGVECFIFGRRKTGYFDLRKLDGTNIHSSAKHTKLTLLESAKTLLTERKPAFLPMPEGRGFRAGGF

SEQ ID NO: 4507 - protein, 420 aa, unidentified; identical to SEQ ID NO: 3685

SEQ ID NO: 4508 - protein, 396 aa, unidentified
VVRRTPFTIQLTIATGESKQPVSLGVDAGYKHVGLSASTEKAELYASEVELRKDITDLLSARRALRQSRRNRKTRYRAPRFDNRIRTKRKGWLAPSVENRINAHLSRIEAVLRLLPITKITVETASFDMQRLKNPDISGKEYQEGEQLGFWNVREYVLFRDGHVCRHCHGRSKDPVLNVHHLESRRTGSDSPDNLITLCETCHKALHRGEITLKAKRGQSFRAQAFMGIMRREVLNRLKASYPELKVHETYGYLTKHARIANGIVKSHGADAFCIAGNLGAERLGEFFFQKQTRRNNRQIHKLSILKGGIRKRNQAPFEAKGFRLFDKVACQGEEGFIFGRRSSGSFDVRKLDGTRISAGISCKKLRLLEKRRTYLTEIRKEEALPPLPEGRGLRA

SEQ ID NO: 4509 - protein, 457 aa, Dactylococcopsis sp.
MYVFVLDKNSQPLDPTHPAKARKLLKAGRAKVFRRYPFTIIMQDLEVRNVLTFAPAPHCPRLNPIQAGSGVQNCVTHKHQLKIDPGSKTTGLAILKNNQVLWGAELTHRGSQIRDALTSRRAIRRSRRNRKTRYRKPRFLNRKRPEGWLPPSLQSRVDNTMTWVNRLTKICPITGLSQELVRFDLQKLENPEISCIQYQQGELQGYEVREYLLEKWGRQCVYCSVKDVPLEIEHIKPKSKGGSNRISNLTLACNECNQDKGNQEIEDFLSGKPNLLKRIQSKTKKPLADATAVNTTRWKLYESLQQTGLPVETGSGGLTKFNRIQRGVSKTHWLDAACVGKSTPNPLYVKTQSILSIQANGHGCRQMIQMNKYGFPRKGYKPKNPPRDWRTGDIVHVREGKNKGIRSARIKTVRAKGSFDLRVNGKVVSVSRKHIQSVFKRDGYDYKVNKSQFLSSK

SEQ ID NO: 4510 - protein, 413 aa, unidentified; identical to SEQ ID NO: 2636

SEQ ID NO: 4511 - protein, 431 aa, unidentified; identical to SEQ ID NO: 3507

SEQ ID NO: 4512 - protein, 413 aa, unidentified
MTSYAFVLDANGKQLAPTKEPKAWFLIRKKRAALVSKYPMVIQLKKEIPENEICKDEIRCGIDDGGLHVGIALVQKCKTKNKVVFKGTIEQRNDVKHLMEVRRNYRRYHRYHKRYRQARFDNRKSSKRKGRIAPSILQKRQATIRVINRLNKWINITNYWLEDVSIDIRVLTDGYKSYSWQYQKSNRLDENIRKATILRDGGKCMECGKSNCRLEVHHIKPRRRNGSNTLDNLITLCESCHQKTEGQEELYMDRYFSLLKSSDNKNLNYAQHVMIGKMWLRKQLSGLGVLYLTSGGDTANKRIDWNIEKSHTNDAVCITDLQPDTCDIKEWAIKPMRRQSKAKTDHVLGIHHRDLVEYTFKNGETHRGYVTALYPDQKAINFQSQTKHCKKVNARKCKLLWNYSKIYWFENAS

SEQ ID NO: 4513 - protein, 451 aa, Verrucomicrobium sp.
MVLVLDKRKKPLMPCTEKRARLLLTRKRAVVHRRYPFTIRLKDRENGMHQPIRLKLDPGSRTTGLALVREAANGTQHVIWLAELEHRGSAIRDRMAGRRAFRRRRRSTLRHRPARFDNRRRPEGWLAPSLRHRMDTTMSWVGRLRRLAPVAAISQELVRFDLQKMQNPEITGVEYQQGTLAGYEVREYLLEKWNRQCAYCDAENVPLEIDHIHPRSRGGSDRVSNLTLACHECNQNKGNRDIREFLAKRPERLAAILARAKTPLHDAAAINSTRWALYNRIKATGLPVETGSGARTKWNRGKLNIPKAHCLDAACVGDLDGLLGWNSPAFAIQTTGRGSYQRTRLTKDGFPRGYLTRNKRHYGFQTGDLVRASVPRGIKAGLHLGRVAVRASGSFNIQTLHGVVQGIGHRHCSLIQRADGYGYRIKPKIAETKGGCGNRGGLQPPRYPSPA

SEQ ID NO: 4514 - protein, 494 aa, unidentified
MAMVYVQNKDGKPLMPTTRYCYVRLLLKENKARVVSTTPFTIQLNYDTPDITQDLILGIDPGRTNIGVAVVKEDGQCVFSAHLETRNKDVPLLIQKRAGFRKQHRTLNRRRKRQRRAKVAGTTVEGETIERLLPGYEKPVVCHYIRNKEARFNNRSRPAGWLTPTANHLLQTHINLIAKVAKFLPITKVVVELNRFAFMAMDNPNIRRWEYQQGPLYGLGSVEDAVYAQQDGRCLFCKKPIDHYHHVVPRHKGGSETLANRCGLCREHHALVHTDKVWADKLVTRKEGVNKKYHALSVLNQIIPHLMEYLGSETRYDVYATDGRSTKGFRVAKNVPKEHYTDAYCIACSILDTDIEVSTPVEPFELKQFRRHDRQACHQQRVDRKYYLNGKQVATNRHKAIEQKSDSLQEFRESYGDTAVSQLAVKPHSPQYKDMTRIMQGAVMDFGGTVGVFQGSDGFHNGKPDYYKSAKGARVLTKRCVLLAQNTGIVFIPA

SEQ ID NO: 4515 - protein, 415 aa, unidentified
MVYVLANDGQPLMPTERHGKVCRMLKSGIAKVVKKCPFTIQLQYESERNVQPVALGIDAGSKHVGVSATTKAKVLYESDVELRDDIVKLLATRRQLRRRRRSRKTRYRPARFDNRRRKEGWLTPSIRQKIESHLTVVANVCKILPVSQIIVETASFDIQKIKNPDIQGIEYQQGEQMDFWNIREYVLFRDGHTCQCCKGKSKDKVLNVHHIESRKTGGNAPNNLITLCETCHKGYHNGTVTLPKNIKRGMKFKDAAFMGIMRWTFYNTLKEQYEPDIPVHYTYGYITKNTRINHNLPKGHCIDARCISGNPDAVSDGTYYYQKKVRCHNRQIHKQTILKGGIRKSNQAEYLVRGFRLFDKVRYQGREYFIFGRRKSGFFDIRTLSGEKVSKGSISVKKLTFADTRKNYLIERRTV

SEQ ID NO: 4516 - protein, 426 aa, unidentified
MVYVQNRLGQPLMPTKDHRKVRLLLDRGAAVVVKRTPFTIRLTTRSKTYVQPIILGVDAGSKTIGLSASTEAEELFAAEVTPRNDVVDNLSTRREFRRARRNRKTRYREPRFNNRVRSKHKGWLAPPVEVKIQEHITAVKRVCAVLPVGKVVVETAEFDLQLLKAVEAGLPVPQGEDYQRGEMLGHYNVRQFVLWRDGYTCRCCGAHWKGVKFHVHHLESRKTGGDAPDNLVTLCDGCHKKFHKGIITPDILKKRKRRPTRDAAFMGIMRKTLMERLRAELPIQVVETKGYITKYTRVELLKLNKTHTNDALAIAQGRRGVGVEELTAIPQSDYIYHIRPVRHHNRQLHKAAILPGGIRKSNQAPRYVRGFRLFDKVSYLGKECFIWGRRSSGSFLLKLLDGTKVKDGVGYKRISLLERSASYLIS

SEQ ID NO: 4517 - protein, 446 aa, Halomonas sp.
MAVFVMGKNQQPLMPCSEKRARLLLQRGRAVAHKRYPFTIRLKDRVGGNTQPLRLGIDPGSRITGLALIRESVGEQRHVLRLFELAHRGFQIKKALEQRAAFRRRRRSKNLRYRAPRFNNRTKPKGWLAPSLQHRVDTVMAWVNRLSRLAPITAISQELVRFDTQKLENPEISGIEYQQGTLLGYEVREYLLEKWGRECAYCGDTDTPLEIEHVVPRSRGGTNRVSNLALSCHPCNQAKDNGTLDDFFATDKGLKKRLKTNGHTADARLERVQRQLKQPLRDASAVNATRWALFNALKATGLPVAVSSGGRTKYNRQRLGIPKTHALDAACVGAFDMLHDWAVPTLTIKAMGRGSYQRTRLTQYGFPRGYLMRQKQVHGFQTGDMVKAVVPTGKKAGTHMGRVAVRKTGSFNIQTEQGTVQGISHKHCTVIQRGDGYGYHLHPSPT

SEQ ID NO: 4518 - protein, 452 aa, Eubacterium sp.
MVFVLSSTNKKLMPTNEYRARKLLKSGKAAVYKHRPFTIILTKRKDGYTQPIEYCCDTGYQHIGISIKSQKHEYVNEERILLKDETERHNDCRKYRRTRRNKLRYRKARWSNRHNNLICKDGFAPSIRNKRDVHINLFKMYHEVCPITSATFEMGQFDTQLLKAVENGDNVPQGTDYQHGERYGYSTLREAVFARDNYKCVCCRKSAIKSGLILKMHHLGYRIGDRSNRMSNLATVCSNCHTSKNHQKGGKLYDLKPKLKTFKGATFMTMVRYDMFSKLKESAPDIKFNMTYGALTKLKRKDYSIKKSHSNDAYCMGVFHPKHRTDFKCYQKLRRNNRILSKFYDAKYIDLRDGTVKSGKQLSCNRTNRRELRNSNKNERIYRGPKISKGKTVVRKQHYQYRPYDFVWYKNVKYAVKGVQDKGKRIALQNHLPVSISKIKRSVHVNGWKLVI

SEQ ID NO: 4519 - protein, 422 aa, unidentified
  source 1..422: note = Nitrospiraceae bacterium UBA665
MQRVLVVSSNRKQLMPCHPARARMLLRQGKAAVLKRYPFTIILKDRVDGDCQAMELKVDPGSKATGIALVADFKKGKTVIWASELKHRGQQIKDALESRRAIRRSRRNRKTRYRQPRFLNRTRPKGWLPPSLMSRVHNVDTWASRLQRFTPITTMVVETNRFDTQKIVNPEISGIEYQQGTLFGYEVKEYLLEKWGRKCVYCGKTDVPLEVEHIVPRTRGGSDRITNLTLSCEKCNQKKDNLTAEEFGHPNVQKQALKPLKDAAAVNATRYAIGNMLRQYGLPISFWSGGRTKYNRTRQGYPKAHWIDAACVGETGENVRLNPEMQRLIMTAKGHGSRQVCRVDRFGFPRTSAKELRIVHGFRTGDLVCAVVPNGKKKGFYTGRIAVRSSGSFNIQTSNGTVQGINHQYCSVLQKADGYNYN

SEQ ID NO: 4520 - protein, 462 aa, unidentified
MSAFVLDRNGRPLMPCSEKRARLLLARGRARVHRVMPFVIRLVDRMADSCALQPLRIKLDPGSMVTGVALVREADRRIAVINLFELIHRGRQISEALTARRNFRRRRRGANLRYRAPRFLNREKSEGWLPPSLQHRVDTTMAWVQRIRRWAPVTALSSELVRFDLQQLENPEISGLEYQQGTLAGYEVREYLLEKWKRTCIYCDAKERPLQIEHLTARARQGSNRVGNLGLACGDCNQDKGALDVRAYVKDPKRLARILATASRPLRDAAAVNATRWALTDMLRATGLPLELASGGRTKFNRITHDLPKTHALDAVCVGRVDAIDDWERPPLSIKASGRGSYQRTRLTRHGFPRGYLMRQKQVQGFQTGDHVRADVPNGKKAGMHVGRVAVRATGYFNIQTASIVVQGINHRHCRLIQRGDGYAYSLQSTGGYRQGDAGVWRAAHAALSLPGLKPEVSRAFS

SEQ ID NO: 4521 - protein, 318 aa, unidentified
LVKKIQKFLPISDVVLEVNKFAFMQLDNPNIQKWQYQQGPLYQKANLEEAVSEMQEHHCLFCKKPIAHYHHVVPQSENGSDTIGNIVGLCTKHHDLVHKDTEWQKKLAKKKTGLNKKYGALSVLNQIIPALTKELSSLFPKHFFATNGKSTYDYRAAHGVSKDHWLDAYCIACSVLADDVCDNNINSHVPYELKQFRRHDRRALHKENMSRVYTLNGKSVATNRHKATEQTTDSLEEFRQRQPNDVCKLKVKEHHPEYRNPKRNFPGCVFLVGKHTHVMQGTSGSHNGKADGYYDTNGNSYSSGECKFVAKNGGIVFA

SEQ ID NO: 4522 - protein, 442 aa, unidentified
MSTSVFVLDKRHRPLMPCRPARARRLLRAGRARVVKRFPFVIRLVDRTVEQSEVQPVLIKLDPGSRETGAAVVRDDEKKRHHALAFFVIKHRGGAIRDALKARSAFRRRRRSQNFRCRSPRFLNRVKPKGWLPPSLRHRVETTLSFVRRMCRYLPVSGIATELVKFDSQKLQNPEVSGVKYQQGTLFEYEVREYLLEKFGRKCVYCGAEGVPLNIDHVVPRAKGGSNRVSNLVLACVSCNQKKGARSLEDFLKGKPEVLARVRRELKTPLRDAAAVNATRWVLFNELKATGLPVETGSGALTKLNRHAFGVEKEHWLDALCVGRLNGVVTRKGLNVLEIRCMGRGSRQRTRLTKYGFPRGYLMRQKCVHGFATGDMVEANVPKGKKAGLWRGRVAVRVSGSFNIQTPKGVIQGVGWKHCRLISHNDGYGYAWLGHAPHSSPA

SEQ ID NO: 4523 - protein, 426 aa, unidentified; identical to SEQ ID NO: 4516

SEQ ID NO: 4524 - protein, 414 aa, unidentified
MPCSPAKARLLLKEKKAIVVRRTPFTIQLTIATGETNQPVSLGVDAGYKHVGLSASTEKAELYASEVELRQDITDLLSARRALRQSRRNRKTRYRAPRFDNRIRTKRKGWLAPSVENRINAHLSRIEAVLRLLPITKITVETASFDTQLPKNPDIAGKEYQEGEQLAFWNVREYVLFRDGHVCQHCHGRSKDPVLNVHHLESRRTGGDSPGNLITLCETCHKALHRGEIKLSAKRGQSLRAEAFMGIMRWEVLNRLKLSHPELEVNNTYGYRTKHARIANGIAKSHCADAFCIAGNLGAKRLGEFFFQKQTRRNNRQIHKFSILKDGIRKRNQAPFEVNGFRLFDKVACKGEEGFIFGRRSSGYFDVRKLDGTCISAGISYKKLHLLEKRRTYLTEIRKEKALPPLPGGSGLRA

SEQ ID NO: 4525 - protein, 432 aa, Anoxybacillus sp.
MVFVLDTNKRPLAPCHEAVARKLLKQGKAAIYRRFPFTIILKKSVDESEIVDESEIKATYRLKIDYGSRHTGLAILRGQEVVWLGQLDHRTDIKERIDKRRAFRRARRNRKTRYRKPRFLNRKRKEGWLPSSLESRVQNIQTWVNRLKKLCPIGYISYENAKFDTQLMRNPEINGVEYQQGTLQGYEVREYLLEKFGRKCCYCGKENVPLEVEHIIPKSRGGTDRVDNLCLACHDCNQRKGSKTAEEFGYPHIQKQVKESLKDTSAINSTRWKVYEVLKQTGLDVECGTGARTKMNRIRLDLPKTHYFDACCVGESTTNHLYFKTKEVLFIKAKGRGSRSRTNLDRYGFPRGYLARQKFFFGFQTGDMVKAVVPRGKYQGVWFGEVACRKTGSFDIKGKDGKRIAQGINYRYVQVIQRFDGYAYGKGVAELA

SEQ ID NO: 4526 - protein, 536 aa, unidentified
VLRPRYQYPTRWYPSREQGSGNGCLSGEENTDLKQEVSGTLSKGDHSHPGEQDFCVPAITIQGGPAMSVFVVGLNGCRLMPTSERKARLLLKHGKASVYRKVPFTIKLNYKTGSTTQSGYLGIDTGSQHIGVSVVREDGAVLHKEEIGLRDSMSKRKLMQSRASSRRGRRHRKTRYRHPKWRPKAKRVYCEIPDRKRRHWKKKEITFTSKRPKGWLPPSLQSKTDHHIRWIKKLQDLLPEGYRLSIELGRFDPARLKDPEIHGELYQKGPQYDYENVRAYVLNRDRYTCQVCGKKGGKLHVHHILYRSYGATDDPQYMATVCSDCHNTENHHQGGILYQWMQKQKKFTRGLRDATFMNILRKRLIEAFPGATFTYGNITKADRERLRLPKSHGNDATAIAIVKTGIMTVKDKEPVIYIQQVRRKKRSLHEETPRKGRKEPNRKASRYDKNTKAVTVTKRKNKKKISITGCLFDRVELNGKKGWISGFTDKSCYVKDENDQYIRTSPKYKQVSLSKLKILHHCGNWAIGARRSLGKG

SEQ ID NO: 4527 - protein, 512 aa, unidentified; identical to SEQ ID NO: 4307

SEQ ID NO: 4528 - protein, 443 aa, Anoxybacillus sp.
MVEENMTCFMQRKGENPMVFVLDTNKRPLAPCHEAVARKLLKQGKAAIYRRFPFTIILKKSVDESEIKATYRLKIDYGSRHTGLAILRGQEVVWLGQLDHRTDIKERIDKRRAFRRARRNRKTRYRKPRFLNRKRKEGWLPSSLESRVQNIQTWVNRLKKLCPIGYISYENAKFDTQLMRNPEINGVEYQQGTLQGYEVREYLLEKFGRKCCYCGKENVPLEVEHIIPKSRGGTDRVDNLCLACHDCNQRKGSKTAEEFGYPHIQKQVKESLKDTSAINSTRWKVYEVLKQTGLDVECGTGARTKMNRIRLDLPKTHYFDACCVGESTTNHLYFKTKEVLFIKAKGRGSRSRTNLDRYGFPRGYLARQKFFFGFQTGDMVKAVVPRGKYQGVWFGEVACRKTGSFDIKGKDGKRIAQGINYRYVQVIQRFDGYAYGKGVAELA

SEQ ID NO: 4529 - protein, 424 aa, unidentified; identical to SEQ ID NO: 3434

SEQ ID NO: 4530 - protein, 418 aa, unidentified
MVYVINKDGQALMPTERFGKVRRLLKNGLAHVICRIPFTIRLDYETTHFVQPISLGVDAGSKHIGISATTSKKELYAADVELRNDIVDKLSTRREQRRTRRNRLRYRKARFNNRVSSKYKGWLAPSVENKIQTHLTVVEKIHKFLPITKIIVETASFDIQKIKNPSISSKEYQQGEQLGFFNVREYVLFRDNHTCQHCKGKSKDHILNVHHIESRKTGGNSPSNLITLCESCHKAYHNGKIDIKVKRGASFRDAAFMGIARWTTYERLKNIYPNVSMTFGYITKNTRITNGLPKEHHVDARCISGNPKSKPLGYYFYQKKVRCQNRQIHKANFLKGGRKKLNQSPFLVKGYRLFDLVEYQKKLYYIFGRRDSGFFDIRRLDGTKVNKGSISCKHIRLISKRRSILTERRNSCSIPPTN

SEQ ID NO: 4531 - protein, 457 aa, unidentified
DSLFTKGVPCMSTCVCVLSNSGERLMPTFRLGKVRHLLKDGKAKIVKHHPFTIQLLYDSKTNTQPIEICEDVGYNYIGISVKSQSHEYVSAQYDTLQDEKACHDSCRKLRRSRRNRLRYRKPRFDNRKRGEGWLAPSLKHKKELNVNVVKMYCAVMPITHATVEVGSFDTMLVKAIQEGKAIPEGADYQKGPRYNLATLREAVFYRDNYVCKVCGRKATEGAILHVHHMFYWKGRHGNSLSELITVCEKCHTPANHQKGGKLYGFGENVKFADLSGAAFMNTVRWQIVNELYAAFGKDFVTVTYGAMTKEKRIALRLEKSHNNDAYAMGEFHPNCRCTFEHYEKVRRNNRILEKFYDSRYIDIRTGEIATGKELFNGRINRNHKKDSENLHRYRGKRTYAGHRALLRKKVNLNPGDLVSLNGEVLVVHSTHTNKKGAVIHRQYHVAKLCESQTIKSE

SEQ ID NO: 4532 - protein, 431 aa, unidentified; identical to SEQ ID NO: 3235

SEQ ID NO: 4533 - protein, 442 aa, unidentified
MVTVQQSTHHLPFGRVFIRRNLFMVYVISQDGKPLMPCSDPIARLLLKQGKAKVKKREPFTIKLTYETTNYTQGLTLGVDTGSGTIGTAVSKDNGDIVYMSEVVVRNDITDKMTQRAKYRRNRRNRKTRYRKARWLNRASSIKKDRFSPTMQSKLHSHVREIEYIQSILPVTEMVFETGQFDMQLMKNPSLANPKVRPWGYQKGANYGFENTKAMVLNRDNYTCQCCKGKHKDSKLEVHHIVFRSQGGSDEESNLLTLCHTCHKDLHSGKINPKLSGKVKGNLKYATQMNSIRKQLFRFYPNAIETFGYVTKANRLHLGVDKEHYYDACTIATQGNAFNVKSNLYKKKCVSDGDFQKTKGIRSEQPIVTDKICGFRKFDKVRYFGNDYFIKGRMSTGYAILMDIDGNKIDFSTMPRGYKTPKLSNCKRITARSTVMTQVKVV

SEQ ID NO: 4534 - protein, 427 aa, Enterococcus sp.; identical to SEQ ID NO: 2410

SEQ ID NO: 4535 - protein, 431 aa, unidentified
MDAWDIIVVLNKRGKPLMPCSPAKARHLLKEKKAAVVRRTPFTIQLTIATGESKQPVSLGVDAGYKHVGLSASTEKAELYASEVELRQDITDLLSARRALRQSRRNRKTRYRAPRFDNRIRTKRKGWLAPSVENRINAHLSRIETVIRLLPVTKISVETTSFDMQLLKNSDIAGKEYQEGEQLGFWNVREYVLFRDGHVCQHCHGRSKDPVLNVHHLESRRTGGDSPGNLITLCETCHKALHRGEITLKAKRGQSFRAETFMGIMRWEVLDRLKASHPKLEVQNTYGYRTKHARISNGIAKSHCADAFCIAGNLGAERLGEFLFQKQTRRNNRQIHKLSIPKGGIRKRNQVPFEVKGFRLFDKVAYKGEEGFIFGRRSSGYFDVRKLDGTHISAGISYKKLRLLEKRQTYLTEIRKEEALPPLPEGRGLRA

SEQ ID NO: 4536 - protein, 451 aa, Geobacillus sp.
MVEENITCFMQRKGENPMVFVLDTNKFPLAPCHEAVARKLLKQGKAAIYKRFPFTIILKKSVDESEIKTTYRLKIDYGSRHTGLAILRGQEVVWLGQLDHRTDIKERIDKRRAFRRARRNRKTRYRKPRFLNRKQKEGWLPPSLESRVQNIQTWVNRLKKLCPIGYISYENAKFDTQLMRNPEISGIEYQQGTLQGYEVREYLLEKFGRKCCYCGKENIPLEVEHIIPKSRGGTDRIDNLCLACRDCNQRKGNQTAEEFGCPHIQKQVKKSLKDASVINATRWKVYEVLKQAGLDVECGTGARTKMNRIRLGLPKTHYFDACCVGESTPSHLYFKTKEVLFIKAKGRGSRSRTNLDRYGFPRGYLARQKFFFGFQTGDMVKAIVPRGKYKGVWFGEVACRKTGSFDIKGKDGKRIAQGISYKYIQVIQRFDGYAYRKEGVELAQGAIPPRA

SEQ ID NO: 4537 - protein, 424 aa, Planktothrix sp.
MSNFVLVIDTNRKPLNPCTPGVARSLLKSGKAKVFRRFPFTIVLNKAVDDKPIPMQLKLDPGSKVTGIALLQGEKVVFGAEIIHRGQQIKDALESRRALRRGRRNRKTRYRQPRFLNRNRPDGWLAPSLQHRVETILTWVNRLRRYTPIEGISQELVRFDLQHIENPEISGIEYQQGTLFGYEVREYLLAKWSRKCAYCGKENVLLQIEHIHPKAKGGTNRISNLCLACEPCNIKKGTQDIEAFLKKKPDVLKRVLAQAKRPLKDAAAVNSTRWALFNRLKQTGLPVKVASGGKTKFNRCRLELPKTHWLDAACVGNVEQLDVKTIQPLLIKAMGHGTRQMCGTDKYGFPIRHRSRTQIHQGFQTGDIVKAVVTSGKKIGTYIGRVLCRASGSFDIATKDGRVQGISHKYCQAIHRKDGYAYSW

SEQ ID NO: 4538 - protein, 420 aa, unidentified
MQYVYVLSKHGEPMMPCSPGKARLLLKQQKACVVRRTPFTIKLLYGSAGYKQPITLGVDAGSKHVGLSASTEKRELYREKFAPRNDVVELLSTRRQNRRSRRNRKTRYRAPRFDNRVHSKHKGWLAPSVEVKIQEHITIIKRICKILPISLVRVETAEFDTQRLKAMLAGKPLPVGTDYQLGEMYDEYNVRQYVLKRDNYTCQCCGAHTTAKKLVKLHVHHLESRKTGGNAPSNLITLCTTCHKNLHKGKVTLDGKERGKPLRDAAFMGIMRKTLMARLKKELPIPVQGTYGYITKMRREQNDIKKSHTNDARCISKHPLAEPCSVCYRTKAIRHHNRQTHKANFSKKGIRKRSQMPYLVEGYRLWDKVLYKEQECFVSGRRSSGSFTLKKLDGTSVSKGVTFKKLRLLEPATNYLIERM

SEQ ID NO: 4539 - protein, 406 aa, unidentified; identical to SEQ ID NO: 2752

SEQ ID NO: 4540 - protein, 388 aa, Ammonifex sp.
MAPTFVGYPKVFVVDAEGKPLLPCHPARARKLLKSGKAEVLRGSPFTIKLKYPVSTPVGSLRAKVDDGSRYVGIALVNEHTGEVVFRGVLVQRGDVVRLLTLRREYRRGRRYRIVRHRPCRNRARQQVVPFPSVRQKKEAIYRVLADLAKIAPISGVDVELVSSGVKNPALPGKSTREKVLNRDGACVLCGSTRRLQRHHLVPRSKGGTDTPENQVLLCAECHRKLHAGGATLDRRGKTFAWVAHAVLGKAYLLALLSRFGEVRVAEGWQTKEWRESLGLPKSHTNDALSLFLPGGPLKVFGPEYLIWPLRRRRWEGNPTKTCEEKNGFRHWDVVRAVRAGKVVFGCVRSLKARAMTLRTAKDDNFEVSYSKARLLHRPRGLAYMPVW

SEQ ID NO: 4541 - protein, 513 aa, unidentified
LKKEAAGHRQGKDCRPVRYGPPYRAGMPDGRRKPERKHMVAVVTSTGKPLMPTSAYRARKLLKKGRAVIFKYRPYFTIQLVDRADGEVQEVEYKSDTGSVHVGISVCTEKKELLSEQRDLLENEPEHHNDRKKNRRTRRNRKRYRKPRFDNRKKKPQEGHEKWLPPTLLHKMEVQVRLFREFCRVVPVTSACFEMGKFDTQALKAVSKGEPVPEGEGYQKGERYGTDTLRAAIFLRDGHTCRFCGRSVKDGAILHVHHVGYWKGDRTNRPANLASACEQCHTPANHGKNGLLYGKEPEFKTLKDASYMTSVRWIMLDEIKKAAPGVQVSVTYGVTTKRKRQELHLPKSHVNDAFSMASFHPKKRSDTEYWKKIPRHDRVLQKFYDAIYLDTRDGSEKKGSELSNGRISRNHKKDSENLHQYRGHKVSKGHNSIRRGASSLKPGSIVMYKGEKMTVHGTHTRYVKGKDGKTAKKVNVQFTCPASDGKKSASLEKCTPVSRVYNTGWKRYWPDKK

SEQ ID NO: 4542 - protein, 415 aa, unidentified
MVYVVANDGQPLMPTERHGKVCRMLKSGMAKVVKKCPFTIQLQYESERNVQPVALGIDAGSKHVGVSATTKAKVLYESDVELRDDIVKLLATRRQLRRRRRSRKTRYRPARFDNRRRKEGWLAPSIRQKIESHLTVVANVCKILPVSQIIVETASFDIQKIKNPDIQGIEYQQGEQMDFWNIREYVLFRDGHTCQCCKGKSKDKVLNVHHIESRKTGGNAPNNLITLCETCHKGYHNGTVTLPKNIKRGMKFKDAAFMGIMRWTFYNTLKEQYEPDIPVHYTYGYITKNTRINHNLPKGHCIDARCISGNPDAVSDGTYYYQKKVRCHNRQIHKQTILKGGIRKSNQAEYLVRGFRLFDKVRYQGREYFIFGRRKSGFFDIRTLSGEKVNKGSINVKRLTFVDTRKNYLTERRTV

SEQ ID NO: 4543 - protein, 494 aa, unidentified
MDMVYVLNKDGKPLMATTRGGRVRYLLKEKKARVVSSTPFTIQLNYDTPDATQDLILGIDPGRTNIGVAVVKEDGSCVFSAHLETRNKDVPLLMKKRAAFRRNHRTLDRRRKRQRRAKAAGTTIAEGSVERLLPGYEKPIMCHHIRNKEARFNNRSRPAGWLTPTANHLLQTHINLIAKVAKFLPITKVVVELNRFAFMAMDNPNIRRWEYQQGPLCGLGSVEDAVYAQQDGHCLFCKKPIDHYHHVIPRHKRGSETLANRCGLCAKHHDLVHTDKAWADKLVTRKEGMNKKYHALSVLNQIIPHLMEYIGSETLYDAYATDGRSTKGFRIAKNVPKEHYTDAYCIACSILDTDIEVSAPVEPFEMKQFRRHDRQACIRQMVDRKYILDGKVVATNRHKTIEQKSDSLEEFREAHGNAAVSQLTVKPHHPQCKDMARIMPGAVMVFDGAVGVFQGSSGRNNGTPNYYNSTKGERFLTRSCVLLAQNAGMVFIPA

SEQ ID NO: 4544 - protein, 362 aa, unidentified
MVYVQDIDGKPMMPTTRHGKVRRLLKANKATVVNLCPFTIQLTYKSTDHKQPVTLGIDAGAKHIGFSATTEKEELFACETILRTDIVDLLSTRSQNRRTRRSRLRYRKPKFNNRVFSKKKGWVAPSVKQRIDSHLNEVNEIHKILPITKIVIEAAQFDTHKMKNPNISGIDYQNGEQLGFWNVREYVLFRDGHKCSYCKGKSKDLILNIHHIESRKTGGDSPSNLITLCETCHKEYHKGNIDLKVRRGKSLCGAAIMGIMKWRLYDELKSRYSNVSMTFGYITKYNRIKYGIEKSHTSDAFVISKNFNAKRIEYQYLKRLVRRHNRQIHKMKILKGGKKKNNQAPFEVFGFRLFDKVLYNNE

SEQ ID NO: 4545 - protein, 512 aa, unidentified
MSTVYVLNKDGKPLMPTTRGGHVRHLLKEQKARVVRAKPFTIQLLYETNDAVQPLYLGIDPGRTNIGVAAVKANGTAVFTAHLESRNKEILKLMQDRKKARRARRTNGRRHRRQRRAKANGTISKKCVKQDTAQSKNPSKRAKEIGVIKRRLPGHKKDLLCIGIKNKEAKYTNRARPEGWLTPTAIQLLQTHINLVKKIQKFLPISDVVLEVNKFAFMRLDNPDIQKWQYQQGPLYQKGSLESAVSEIQEHHCLFCKKPIDHYHHVVPQHKNGSNTIGNIVGLCAKHHDLVHKDSAWEKKLAKKSTGLYKKYGALGVLNQIIPTLTNELSSLFPKHSFVTNGKSTYDYRAAHGVSKDHWLDAYCIACSVLPSNVCDSNINNHMPYELKQFRRHDRRVLNNENMNRVYTLNNKAVAINRHKAKDQKTVSLEEFRKEHPDDVCKLKVKEHHPTYRNMNRNFPGSVFLVGKQIHVMQGIASSKDGKATKYNDTSATAIAAGKCKFVAKNTGILFV

SEQ ID NO: 4546 - protein, 427 aa, unidentified; identical to SEQ ID NO: 4408

SEQ ID NO: 4547 - protein, 421 aa, unidentified
MQYVYVLNKHGEPLMPCSPGKARLLLKQQKAHVVKRTPFTIKLLYGGAGYKQPITLGVDAGSKHVGLSASTEKRELYCEEFTPRNDVVDLLSTRKQNRRSRRNRKTRYRAPRFDNRVHSKHKGWLAPSVEVKIQEHITVIKRICRILPITLVRVETAEFDTQRLKAMLEGKPLPVGTDYQLGEMYDEYNVRQYVLKRDNYTCQCCGAHPTEKKPIRLHVHHIESRHVGGNAPNNLITLCVACHKALHEGKITLDKGKKRGKPLRDAAFMGIMRNTLLARLKDELNIPVKQTYGYITKLLREKNKIPKSHVNDARCIAKAPNAKPCDTMLYTRALRHHNRQIHKAKILKGGIRKKNQAPYLVKGFRLWDKVRYNGEECFITGRRSSGYFALKKYDGTVISNSASYKKLMLLEAATNYITERS

SEQ ID NO: 4548 - protein, 481 aa, unidentified
MWTTVLRGEKPYGRSSALPVRECVSIAKKRRHHMVAVLSKTGIRLMPTSSYRARKLLAKKKAVICGYRPFTIRLTERETGDVQPVELAVDTGYFHVGNSLKTAKHELAAVEIRTLMDEKQRYDDRRQYRRMRRSRLRYRAMRFDNRRRPEGWLAPSIQGRMEQNLAFLRRVLSVVPVTRIVMEMGQFDTQVLKAVEEGRPLPEGTDYQQGERYGIATLREAVFTRDNYTCQCCKKTVRDGTILHVHHIVYRSQGGTNRMGNLITVCEKCHTPKNHKPGGKLYKWNPTVKSFKGATFMTAVRWIMYRSVKESFPDVDVRITYGAKTKLQRRALDITKSHVNDAYIMGNFHPKHRVRPVILQKKRRNNRILEKFYDAKYIDTRDGIKKTGQQLFNGRTNRNHNTDTENLRPYRGTKLSKGKRAIRTTRYRIQPHDILVYQGQEMEASGCHNKGTRVMTTAKKSLPIGKVRVRRYSGGYYAVAE

SEQ ID NO: 4549 - protein, 442 aa, Lactobacillus sp.
MKHENANRVFLLNKDGKPLMPCRPRKARLLLKSGKAFVVKKYPFTIQLKYGSYGYKQKVSLGVDTGQRHIGFAVVSQDKVLHQSEVELRQDVHTNLYTRKIYRRGRRTRKTRYRQARFLNRVHGKRDSLWLPPSVKSKVSHNIAWIKRYLAVLPNPDLHIEVGKFDMAKIVNPDISGKQYQEGSLKDWKNYEYYVLARDEYTCQLCYKHGEGVKLVVHHIVYRSQGGTDRVDNLITLCTNCHTTKNHQPGGKLYKWMKAKKKVTKQLKGATFMNILHKRIMTTFPEASFQYGSQTYVDRKNLLLPKGHFMDAIAISGIKPVGQMPETVTMISQFRKKKRSLHEATARKGRKQPNTSSKRNEKNTKYACGLWLNDYVRVIGNHVKGYVKGFKSNGYYVYLTDGLGNYVLNNGKNYINGQQCRLIMHNGNWQKAEQKLSLYEFK

SEQ ID NO: 4550 - protein, 478 aa, Acidiferrobacter sp.
MAVLVLDRRKKPLMPCAARRARLLLARGRARVHRMVPFTIRLVDRLQENSTLQPVRLKLDPGSKTTGLALVREQDITDTTREESVRTLTVLMLLELQHRGSVIRDRLTARRAFRRRRRGNLRYRPARFDNRAKPAGWLAPSLRHRVDTTIAWVARLSRLAPVTSLSQELVRFDMQQMQNPEISGAEYQQGTLFGCEIREYLLEKWGRKCAYCGAENAPLEIDHIHPKSLGGSDRVSNLTIACHDCNQAKGNSLPEQFLSKQPERAKKILAQAKAPLRDAAAVNSTRWALCQRLKETGPEVEVASGGRTKWNRHRLHIPKTHSLDAACVGHVDAIRRWQQPVLTIKATGRGSYQRTRLTRHGFPRGYLTRNKSAFGFQTGDLVKAVVTTGTKAGTYLGRVAIRASGSFNIQTGSRLIQGIHHRFCKLIQRADGYGYSWTKRALNKGDAGMGRSATATLSLPGMMGHAAHNDAGVSRATG

SEQ ID NO: 4551 - protein, 382 aa, unidentified
SHEYVSAQYDTLQDEKEHHDDCRKMRRARRNRLRYRKPRFDNRKRSEGWLAPSLEHKKQLNIRLVEQYVSVIPITHATVEVGSFDTMLLQAIQKGESKPEGVDYQKGPRYNLATLREAVFYRDNYTCQVCGRKIADGAILHMHHMFYWKGRHGYQLDELVTACEKCHTPANHQKGGKLFGFGEDKEFANLSGAAFMNAVRWQIVDALHATYGKEFVTITYGAMTKEKRIILGIEKTHNNDAYAMGNCHPAHRCEFGHYQKRCRNNRVLEKFYDATYIDTRTGNKAKGKELFNGRISRNHKKDSEDLHKYRCKKVSKGRRSIRRQRYAIQPYDTVRLESKTYITSGCHNKGTRLLIPANGKSKSVAISKVQVVCHAGAWIQII

SEQ ID NO: 4552 - protein, 419 aa, Bacillus sp.
LFVYMINKHGKPLMPCSPRKARLLLKQKKAKVVRRTPFTIQLLYGSSGYKQPVSLGVDMGTRHVGISATTEKDVLFEAEAQLRTDIVDLLAIRRQFRRSRRNRKTRYREARFLNRRKPEGWLPPSIQHKINSHIKLIDLVHNILPVTSVTIEVATFDTQKLKNPNIQGVEYQQGEQMGFWNVREYVLYRDNHTCQYCKGKKKDPVLQVHHIESRKTGGDSPDNLITLCKTCHHEIHEKGLEHILQRKRPPMRDASQMTAMRWAMFSRIREKYSHANITYGYITKCIRIANGLPKSHMVDARCISGNPLAKPSGTVYLLKFVRKNNRQLHKATILKGGKRKSNKAPRFVKGFQLFDKVVYEGKECFIFGRRSSGYFDLRLLDGTKVHASASWKKLKRVEYASTLLIERRKGDSSPTFALA

SEQ ID NO: 4553 - protein, 373 aa, Moorena sp.; identical to SEQ ID NO: 3006

SEQ ID NO: 4554 - protein, 477 aa, Caldanaerobius sp.
LAREDCRSAICGVTSPVRGSERRGGRMVFVLDKKKKPLMPCTEKRARKLLQSGRAVVHRLMPFVIRLKDRTAEESNFQPLRLKFDPGSKTTGFSLLREESAEKSAAIIMGEIHHKQGIKDRLDSRRVLRRGRRNHKTRYRKPRFDNRRREEGWLPPSLEARVEETVRAAEKLMKWLPITSISTEHVKFDTQLMQNPEISGIEYQQGELYGYEIREYLLEKYGRKCAYCGTENVPLQIEHVVPRNPKHGPKGTNRVSNLTISCERCNKDKGNKQPEEWLEELQKSKRKIDRVRAENLLKVLANLKKPLKDAAMMNATRWTLYERLKRTGLPVECGTGARTKKQRIEHGFPKAHYFDACCVGASTPKTIKIKTKYTEIWTAVGRGNRKMCNTDKYGFPISHRQRKKRHFGFQTGDIVEAEVLSGKYKGTWRGRVAVRASGYFDIKDSKGNRICQGISYRYVRLLQYVDGWQYEKEKVAY

SEQ ID NO: 4555 - protein, 529 aa, Burkholderia sp.; identical to SEQ ID NO: 3440

SEQ ID NO: 4556 - protein, 413 aa, unidentified; identical to SEQ ID NO: 2636

SEQ ID NO: 4557 - protein, 436 aa, unidentified
MTKTLTKQTTQACVLDQQGKPLMPTTRLGKVYRLLKTQKAHIVSYEPFTIQLDYEPDTHIIQPMTLGVDSGAIHSGYSIANEHREYYNAEVIARDDISKRLTNRRMSRYNRRSRKTRYRKPRFNNRKNKKKGWLPPSLEQKVAVQLNEIDHVHRYFPIETIIVEVAEFDIQKIKNPDISGIEYQQGTLQGYNIHNYLLEKHGRKCFYCGKSVSKFEVEHMIPKTRGGSNRIDNLTLSCHDCNQKKDTLTAKEFIQQTLPAKKAAAKLKQLSTEKRLFKYMAHMNATRWTLYNAIKKKYTNVKMTYGYITKYNRIRSGLPKAHHIDAKCITNFPTVPSMKQTVVKVKMRQHNRQLHRATFSKGHVRKAASLPTIIFGFQLYDLVLYNNHYYYIKGRRSSGSFALISIEGLKDENRMYKKLIRLAHTNAYLTNHYLVN

SEQ ID NO: 4558 - protein, 471 aa, Caldicellulosiruptor sp.; identical to SEQ ID NO: 3268

SEQ ID NO: 4559 - protein, 464 aa, unidentified
MYVFVIGLDGTRLMPCKPRKARKLIEAHKAEIYKKQPFTIRLLYKTGCATQPVTIGIDTGSQHIGIAVTSGNKVLYQAEIELRSTMDKRSLMETRRSYRRSRRYRKTRYRSPKFRFHTKRTYSETLVKRKTTGVMTHWVKHTNSMSTNRPDGWLAPSMQSKADHHIRWINRFLDVLPPDTKLRLEIARFDIARMKNPEVHSELYQYGPQYDYENLKAYVFDRDHYKCVVCKRKLGSKQPDGHSLKGMMHHITFRSKRATDNPDQLVTVCEYCHTPQAHKKGGVLWDLKEKHRPVQRGLRDATQMNIIRTRLVKAFPDAELTYGNITAADRKKMHLPKSHAGDAVAIAMKGKTVNICEPTVYIKQVRKKKRSLHEATPRKGRKNPNTQAVRNPKNTKSIGIYHIYDTVRFQNKTGFISGFTGRSAYVQDFDGNYITMPGKSYKQINLSNLELVRHNNNWIQKTGN

SEQ ID NO: 4560 - protein, 471 aa, Caldicellulosiruptor sp.
LVIFTVDKHGRPGHPTRRFDMVRKLVKQGRAKIIGGGASGKPPVVMFLDREFDYSKTIERRLFVVLDPGYHHIGFAVCELRWGVLIVYCIGVLETRIPEIKDLMTKRRGYRRNRRYHSRCRKKRMSKRHSRVLTKFKAPRNVRTKDRTNATLRHGIETHLNLYKKLLKFFPFPAEQVVFVMEDNIFDVRTMTWGKTYGTGYQKSPRVPAEKKCIICGTEDNLQKHHLIQRKCGGTDVQENLVYLCRDCHEDVHAGRVYIPVEGVRQWRALGTMNAIIGQLREIPWLKFVPASDAAQMRKKLGLKKGHANDALATAAVFCSCTEADRTHMIELTLVKFRRHNRARIHAVRDRLYKVDGKIVAKNRRKRTDQKEPSFADISPLPPEIQRKLKVYPGTKILNPLRKEMPTIAGDVWIHEPTGKRFVTTGVVSQKYLYSPQLKKIVGKMYVQPEECRQVLHNEGMVVMYNSLYHS

SEQ ID NO: 4561 - protein, 611 aa, unidentified
  source 1..611: note = Candidatus Poribacteria bacterium
MFKVAVIDSKKNVLEPCHPAVARRLLRERHAAVWCKHPFTIILKRSIDTEEIVTSEYQLNWDPGSKTSGFAVLDAENSIVLKAELHHRGGKIKTYLAKRAGFRRGRRTRNLRHRPARWANRSRKVPVLTPDGWVYKSADETDPSKDSSKTQNKFVRVSHAQLKDPRYQWSRIQKRKRKKFTPEMTNAKVARLTRDELIQQIKMRDKKATSETLTSKTLGDLRRLLKSKLRNTPPVKQRWERKRIAHKKRSENGWIAPSLMSRVFNIETWTRRILKLYPIKRLAIEHVKFATQLLENPDIHGIEYQQGTLWGREIREYLLELTNRKCAYCGKGGQRLEVEHIIPRSHKGSSRIDNLTMACHACNEKKGALVGDALEKQYPDIAKKVKSALQKSKRGLSDAAAVNTIRWKLTETLNATELPVFLGTGGRTAHNRIDNAVHLPKTHYYDAASVENPVVDPCSQAPVLVVQAIGYGRRDNLKYNFGVKAGGKFPEFRQPNSKVSHAGGFHKGDHVFMMKKGRQIEGVINCFNQTDPGKPRECRVSNFYSKKKDNRVSGNISQLRRFRHRDGYLSAYRQDRPQRTVTAQQQSPELKQTLKPTKEKKSEPSQLLLFA

SEQ ID NO: 4562 - protein, 512 aa, Acidithiobacillus sp.
MLPQSRTLEGWGRERQRQRPEGSRRVCESTRSRYPSAPRGDGFHHPRHRRKASSRSNFMHILVLDKRKKPLMPCHPARARELLREGRARVHRMVPFTIRLVDRLQADSVLQPLRLKLDPGSRTTGLALVREKETVDISTGEIIRTITVLMLLELKHRGHAIRDALTSRRAFRRRRRGNLRYRPARFNNRTRKDGWLAPSLQHRVDTTLAWVKRLMRWAPVMALSQELVRFDTQAMQNPEISGTEYQQGTLLGYEVREYLLEKWGRECVYCGAEHTPLEIDHIHPRSKGGSDRVSNLTVSCHDCNQAKGNRPLEQFLAKHPERIRKILAQAKAPLRDAAAVNSTRWALFQRLKATNLPVEVASGGRTKYNRHRLHISKEHCLDAVCVGHVDAIKNWQQPVLSIKATGRGSYQRTRLTKYGFPRGYLTRSKSAFGFQTGDMVKAVVTKGKKAGIYLGRVAIRASGSFNIQTGNGLAQHIHHRFCTLVQRGDGYGYNLTLLHPALNHGVAEAGEY

SEQ ID NO: 4563 - protein, 419 aa, Aneurinibacillus sp.
MVVYVINRHGEPLMPCTPRKARILLKQQKAKVVKRTPFTIQLFYGSRGYRQPVSLGVDAGTKHIGLSATTETRVLFEGDVQLRTDIPQLLAIRLQFRRSRRSRTTRYRKARFLNRKKPKGWLAPSVQHKVDSHLKVVQLVHQILPVTKITVEVAQFDTQLLKNPSIKGEEYQQGEQMGFWNVREYVLFRDKHTCQRCKGKKKDNILNVHHIESRKTGGDSPDNLITLCETCHNKIHQKGLEHIIKRKTQTLRDASQMTVMRWFIYNGLKERYPHIQLTYGYITKNTRITNGLGKSHEVDARCISGYPLAKPMDTVYHLKFVRKNNRQLHKATISKGGKRKSNKAERFVKGFQLFDKVLYEGQECFIFGRRSRGYFDIRKLDGTKIHASASYKKLTRIEYARTLLIERRKGDSSPTYATA

SEQ ID NO: 4564 - protein, 419 aa, Geobacillus sp.
LFVYIINKHGKPLMPCSPRKARLLLKQKKAKVVRRTPFTIQLLYGSSGYKQPVSLGVDMGTRHVGISATTKKDVLFEAEAQLRTDIVELLAIRRQFRRSRRNRKTRYREARFLNRRKPEGWLPPSIQHKINSHIKLIDLVHNILPVTSVTIEVAAFDTQKLKNLNIRGVEYQQGEQMGFWNVREYVLYRDNHTCQYCKGKKKDPVLQVHHIESRKTGGDSPDNLITLCKTCHHEIHEKGLEHIFQRKRPPMRDASQMTAMRWAMFSRIREKYSHANITYGYITKCIRIANGLSKSHMVDARCISGNPLAKPSGTVYLLKFVRKNNRQLHKATILKGGKRKSNKAPRFVKGFQLFDKVVYERKECFIFGRRSSGYFDLRLLDGTKVHASASWKKLKRVEYASTLLIERRKGDSSPTFALA

SEQ ID NO: 4565 - protein, 416 aa, unidentified
MVYVLDKNGQPLMPTDRHRKVRLMLQSGQAKVIKRCPFTIQLNYDSGHQTQEISLGIDAGSKHIGVSTTTKIKVLYEVDVELRNDIVDLLSSRRELRRGRRNRKTRYRQAKFNNRRRGNGRLAPSIRQKIGTHLTVVENICKMLPISRIMVETASFDIQKIKNPDIQGAEYQQGDQLEFWNVREYVLFRDGHTCQCCKGKSKDKILNVHHIESRKTGGNAPNNLITLCETCHTGYHKGTVQLPKAIKRGMRFKDAAFMGIMRWAFYEALKQQYEPVGTPVHNTYGYITKHTRIAYNLPKEHYVDARCISGNPEASSNGEYYYQKKVRCHNRQIHKLTVLKGGIRKQNQATYLVKGYRLFDKVSYQGKGYFVFGRRQSGFFDIRTLSGEKVNKGSLSCKKLKFIATRTYYLTERRAV

SEQ ID NO: 4566 - protein, 449 aa, Allochromatium sp.; identical to SEQ ID NO: 2388

SEQ ID NO: 4567 - protein, 434 aa, unidentified
LDRKHRPLMPCRPARARRLLKSGRARVVRLFPFTIRLVDRLLEDSSVQPVLVKIDPGSRQTGVALVRADEKAHHHALFFINLVHRGESIRDALTARRNCRRRRRGNLRHRAPRFLNRTKPQGWLPPSLRHRVDTATAWVAKLVKLAPVTGIVEELVKFDAQKLQNPEISGTEYQQGTLFEYEVREYLLEKFGRKCVYCGAENVPLNIDHVVPKARGGSNRISNLVLSCVNCNQKKDSQPVEVFLKNRPEVLDRIKRRLKTSLAHAATVNATRWSLFNALKVFGLPVETGSGALTKLNRHTFGVPKEHRLDALCAGRVNGVHYPEGMGILQVRCTGRGNYQRTRVDKYGFPRGYLTRQKRVHGFATGDMVEVVVPSGKKAGTYRGRVAVRKSGYFNIQTPEGVIQGIGWRHCRLLSFNDGYGYAWLRPASHSSPV

SEQ ID NO: 4568 - protein, 405 aa, Desulfotomaculum sp.
LDARRSQRRSRRNRKTRYREPRFNNRHPEKCAACGKNARHGSRYCRPCEKAKNFVGNGHREKRLVPSLEVRVNQTLSMVDKLTRWLPITAISTEHAKFDTQLMQNPDISGVEYQQGELFGYEVKEYLLEKWGRKCAYCGKEGVPLEVEHVVPRNPKRGPKGTDRISNLTLACEECNKAKGNLQPKEWLEKLKQSRRKLDQVRAENLPKILRKLKEPLRDAALMNTTRWVLYDRLKKTGLPVECGTGARTKYNRLRMGLPKTHYFDACCVGESTPENLAIEQEYVQVWTALGRGSRKMCNTDKYGFPVSHRARQKMYFGFMTGDLVVAEVPEGKYAGRWVGRVAVRTSGYFDIKGGTGHRVCQGISHRYMRLLQRADGWQYEKIRIEKGGSGASSPGVNAGASGAV

SEQ ID NO: 4569 - protein, 477 aa, Blautia sp.
MIIALDKYKRPLGFLTERRCRILMERKRAVLYRVFPTVVILMDVDARTIPDLPSFRIKIDPGAKYTGIAIIRNDTDEFVYAMQIEHRGDAVRATLNKRKNARRNRRSRETGYRRAKWGNRCLSEKDKKSYDSSREDGWLPPSIRSAADNVISWVRRLGRWINLTECSFEAVRFDTQLMEDPDIEGEVYQHGTLFGLEIKEYLMEKFGHTCQYCGGKSGDPVLEWEHMRPKSRGGSDRVKNALLSCSSCNKDKGNRTPEEWLEQIKARLPREKGKRKELDEERVKLIQKVIDGKPQGSALRYAAWVSSSRRYLENALFGIFGDVECSSGGRTKYNRTELGYPKEHHYDALCVGTVPEKGYHDRTNGYYLYAKAAGRGTRLRGHLNKCGVIVTKWTDRKKGFFGFQTGDIVVAEVPHKTPKPYKYEGRFVGRVMVRATGSFDIKTTDGKMVTVKEQYCRLLQANSGYHYIMKRAIPLGH

SEQ ID NO: 4570 - protein, 420 aa, unidentified
MQYAYVLNKRGEPLMPCSPGKARILLKQQKACVVKRTPFTIKLLHGSAGYKQPITLGVDAGSKHVGLSASTEKRELYSEEFTPRNDVVELLSTRRQNRRSRRNRKTRYRAPRFNNRVHGKHKGWLAPSVEVKIQEHITVIKRICRILPITLVRVETAEFDTQRLKAMLAGKPLPVGTDYQLGEMYDEYNVRQYVLKRDNYTCQCCGAHTTAKKTVKLHVHHLESRKVGGNAPSNLITLCTTCHNNLHKGKITLDGKKRGKMLRDAAFMGIMRNTLLTRLRNELNIPVQNTYGYITKLLREQNDIKKSHVNDARCISKHPLAKPCSVCYRTKAIRHHNRQIHKAKILKGGIRKANQAPYIVKGFRLWDKVLYNEQECFISGRRSSGYFALRKFDGTTITNSISFKKLRLLEPATNYLIERK

SEQ ID NO: 4571 - protein, 419 aa, Geobacillus sp.; identical to SEQ ID NO: 2623

SEQ ID NO: 4572 - protein, 512 aa, unidentified
MSTVYVLNKDGKPLMPTTRCGHVRHLLKEQKARVVTSKPFTIQLLYEADDVVQSLYLGIDPGRTNIGVAVVKADGTAVFTAHLETRNKEIPKLMKKRKESRRARRTNGRRCRRQRRAKANGTISKKCVKQDTAQNGSVSKRAKEIGVIKRHLPGCEKDVLCICIKNKEAKFSNRTRPEGWLTPTANQLLQTHINLVKKIQKFLPISDVVLEINKFAFMRLDNPNVQKWQYQQGPLYQKANLEETVSEMQEHHCLFCKKKIDHYHHVVPQHKNGSNTIDNIIGLCTQHHDLVHKDATWQKRLAKKKTGLNKKYGALSVLNQIIPALTKELSSLFPKHFFVTNGKSTYDYRAAHGVSKDHWLDAYCIACSVLPNDTCDKTINSRVPYELKQFRRHDRRALNNENMSRVYMFNGKMVATNRHKATEQTTDSLEEFRQRQPNDVCNLKVKEHHPTYRNMNRNYPGSVFLVGNQVHVMQGIAGSKDGEATTYKDTNANSIAAGKCKFVAKNSGILFV

SEQ ID NO: 4573 - protein, 427 aa, Nostoc sp.; identical to SEQ ID NO: 2670

SEQ ID NO: 4574 - protein, 377 aa, unidentified
LYGSTGYKQPITLGVDAGSKHIGISAATEKYEFYREEATPRNDVVDLLSARRAFRQGRRNRKTRYRAPRFNNRVHSKHKGWLAPSVEVKIQEHITVIKRICRILPVTLVRVETAEFDTQRLKAMLAGKPLPVGTDYQLGEMYDEYNVRQYVLKRDNYTCQCCGAHTTAKKTVKLHVHHLESRKVGGNAPNNLITLCTTCHNNLHKGKITLDGKKRGKPLKDAAFMGVMRKTLMERLRKKLKIPVQGTYGYITKYLREKHSIPKSHTNDARCISKNPLAIPCDTCYYTKAIRHHNRQLHKATILKGGIRKANQAPYTVKGYRLWDKVSYNGSECVITGRRTSGYFALKKLDGTVVSNSASYKKLRLLEVATNYITERR

SEQ ID NO: 4575 - protein, 375 aa, unidentified
VVRRTPFTIQLTIATGESKQPVSLGVDAGYKHVGLSASTEKAELYASEVELRKDITDLLSARRALRQSRRNRKTRYRAPRFDNRIRTKRKGWLAPSVENRINAHLSRIKAVLRLLPITKITVETASFDMQRLKNPDISGKEYQEGEQLGFWNVREYVLFRDGHVCRHCHGRSKDPVLNVHHLESRRTGSDSPDNLITLCVTCHKALHRGEITLKAKRGQSFRAQVFMGIMRREVLNRLKASYPELKVHETYGYLTKHARIANGIVKSHGADAFCIAGNLGAERLGEFFFQKQTRRNNRQIHKLSILKGGIRKRNQAPFEAKGFRLFDKVACQGEEGFIFGRRSSGSFDVRKLDGTRISAGISARSCVCWRRDGPI

SEQ ID NO: 4576 - protein, 560 aa, Streptomyces sp.
VTTFQVSEKTHQAVLPQRPALESMAADNPGSRDETGCGPSVRQHGGADLGHGRGETRESGLKVHARHPEAIASASAEGEHAAGNGGTTQPDVACGAAYVPVLDRHGVPLMPCHPARARELLTKGRAVVVRHTPFAIRLRDRDAERSAVPGVAVRIDPGSKGTGIAVTADSEAANDEYGAGRQVRRGLMAIELQHRGAQIHKAMQQRANYRRARRSRNLRYRSPRFDNRTRPAGWLAPTLQHRVDTVVSTVRRLTGYLPVTEIHIERVCFDTHAMSEGVDRLEGVRYQQGTLAGYEVRRYLLEKWGRACAYCGAQGVALQVEHIESKARGGSDRISNLTLACGPCNQTKGARPVAEFLSRRPHVLERILRQVKAPLRDAAAVNTTRWRIADQLQSIGLPVYTWSGGRTQYNRMTQCLAKSHTLDALAVGYIEDDRSIVRYPKTVLVAAAMGRGSYSRTRPDRNGFPRLRLPRSKQYFGYSTGDLVQAVIPTGMHAGVKVGRIAVRATGRFNIRCAQGVIQGIHYRHMRLLQRAEGYGYTTREEEGVRLEDECQRHADHPND

SEQ ID NO: 4577 - protein, 430 aa, unidentified
VEQNLRVFVLNKRGKPLMPCSPAKARHLLKEKKAIVVRRTPFTIKLTIATGESKQPVSLGVDAGYKHVGLSASTEKAELYASEVELRQDITDQLSARLALRRSRRNRKTRYRAPRFDNRIRTKRKGWLAPSVENRINAHLSRIEAVLRLLPVTKITVETASFDMQLLKNPDIAGKEYQEGEQLGFWNVREYVLFRDGHVCQHCHGRSKDPVLNVHHLESRRTGGDSPGNLITLCETCHKALHRGGITLKAKRGQSFRAEAFMGIMRWEVLNRLKASHPELEVNNTYGYWTKHARIANGIAKSHCADAFCIAGNLGAERLGEFLFQKQTRRNNRQIHKLSILKGGRRKRNQASFEVKGFRLFDKVACKGEEIFIFSRRSSGYFDVRKLDGTRISAGISYKKLRLLEKRRTYLTEIRKEAFSPLPEGRSLRA

SEQ ID NO: 4578 - protein, 411 aa, unidentified
MENKIEYCFVIDKNNKPLAPTKVNKGWYLIRKGRAKLKSKYPMVIQLEKEVKSNEYDESHMVCGIDDGSTHVGLAIVQKCLTKNKVVFKGTIEQRQDVKRLMDVRRGYRRYHRCHKRYRQARFNNRSSSKRTCRLAPSIKQKKDAILRVLYQLNSWIDIQEYYLEDVCIDIRAMTDDYKPYRWQYQKSNRLNENLRKATILRDGCRCQECGKSNCILEVHHIRARRYGGADTIGNLITLCKKCHDKTESREKDFEEGYFNMIKSKPKRFDYAMHVMQGKTYLREKISELGILHLTNGGETANKRIEWNIVKSHSNDAICITDGIPDTCDIKEWIIKPMRRKSKAKTDNVLGIKHRDLVSYTYKSGETHTGYVTALYPEQLALNFQSKTKHCKKVNARKCRLLWKFNKIYWL

SEQ ID NO: 4579 - protein, 419 aa, Geobacillus sp.
LFVYIINKHGKPLMPCSPRKARLLLKQKKAKVVRRTPFTIQLLYGSSGYKQPVSLGVDMGTRHVGISATTKKDVLFEAEAQLRTDIVELLAIRRQFRRSRRNRKTRYREARFLNRRKPEGWLPPSIQHKINSHIKLIDLVHNILPVTSVTIEVAAFDTQKLKNLNIRGVEYQQGEQMGFWNVREYVLYRDNHTCQYCKGKKKDPVLQVHHIESRKTGGDSPDNLVTLCKTCHHEIHEKGLEHIFQRKRPPMRDASQMTAMRWAMFSRIREKYSHANITYGYITKCIRIANGLSKSHMVDARCISGNPLAKPSGTVYLLKFVRKNNRQLHKATILKGGKRKSNKAPRFVKGFQLFDKVVYERKECFIFGRRSSGYFDLRLLDGTKVHASASWKKLKRVEHASTLLIERRKGDSSPTFALA

SEQ ID NO: 4580 - protein, 443 aa, Anoxybacillus sp.
MVEENMTCFMQRKGENPMVFVLDTNKRPLAPCHEAVARKLLKQGKAAIYRRFPFTIILKKSVDESEIKATYRLKIDYGSRHTGLAILRGQEVVWLGQLDHRTDIKERIDKRRAFRRARRNRKTRYRKPRFLNRKRKEGWLPSSLESRVQNIQTWVSRLKKLCPIGYISYENAKFDTQLMRNPEINGVEYQQGTLQGYEVREYLLEKFGRKCCYCGKENVPLEVEHIIPKSRGGTDRVDNLCLACHDCNQRKGSKTAEEFGYPHIQKQVKESLKDASAINSTRWKAYEVLKQTGLDVECGTGARTKMNRIRLDLPKTHYFDACCVGESTTNHLYFKTKEVLFIKAKGRGSHSRTNLDRYGFPRGYLARQKFFFGFQTGDMVKAVVPRGKYQGVWFGEVACRKTGSFDIKGKDGKRIAQGINYRYVQVIQRFDGYAYGKGVAELA

SEQ ID NO: 4581 - protein, 424 aa, Lentibacillus sp.; identical to SEQ ID NO: 4255

SEQ ID NO: 4582 - protein, 399 aa, Ktedonobacter sp.
  VARIANT 399: note = X can be any naturally occurring amino acid
MSYVFVIDQEKRPLDPVHPGRARKLLSSGKAAVYRRFPFVLILKHPVSEAHPQPLRLKIDPGSKTTGLAVLNDTSGQVLWAAELVHRGEEVHQALQKRAGVRRGRRSRHTRYRAARFSNRRRKRGWLAPSLCSRMQNVQTWTRRLMRWCPLGAISYEAVRFDTQAIQNPEIKGVAYQHGTLAGLEVKEYLLLKWRHKCVYCQKGDIPLEVEHIVPKRRGGSDRITNLTLACEACNQQKGSQTAQAFGFPHLQAQALQPLKDAAAVNSTRWALYERLKATGLPIEVSTGGQTKWNRKQRGIPKSHWLDAVCVGPSTPERVQWQHVIPLLITARGRQCRQLCNVDGWGFPRSRPKGPSKVFGFQTGDMVQAVVTRGKRMGTYVGRVAIKTDGYFKITGTHX

SEQ ID NO: 4583 - protein, 456 aa, Fervidobacterium sp.; identical to SEQ ID NO: 2394

SEQ ID NO: 4584 - protein, 458 aa, unidentified; identical to SEQ ID NO: 3968

SEQ ID NO: 4585 - protein, 431 aa, Escherichia sp.; identical to SEQ ID NO: 3801

SEQ ID NO: 4586 - protein, 426 aa, Bacillus sp.
MVFVLDTNKRPLAPCHEAVARKLLKQGKAAIYRRFPFTIILKKSVDESEIKATYRLKIDYGSRHTGLAILRGQEVVWLGQLDHRTDIKERIDKRRAFRRARRNRKTRYRKPRFLNRKRKEGWLPSSLESHVQNIQTWVNRLKKLCPIGYISYENAKFDTQLMRNPEINGVEYQQGTLQGYEVREYLLEKFGRKCCYCGKENVPLEVEHIIPKSRGGTDRVDNLCLACHDCNQRKGSKTAEEFGYPHIQKQVKETLKDASAINSTRWKAYEVLKQTGLDVECGTGARTKMNRICLDLPKTHYFDACCVGESTPNHLYFKTKEVLFIKAKGRGSRSRTNLDRYGFPRGYLARQKFFFGFQTGDMVKAVVPRGKYQGVWFGEVACRKTGSFDIKGKDGKRIAQGINYRYVQVIQRFDGYAYGKGVAELA

SEQ ID NO: 4587 - protein, 417 aa, unidentified
MPCSPAKARLLLKEKKAIVKRRTPFTIQLTIATGEAKQPVSLGVDSGYKHIGLSATTEKAELYASQVELRQDITDLLSARLALRRSRRSRKTRYRAPRFNNRVANKREGWLAPSVENRIAAHVSRVETVIRLLPVTAITVETAAFDTQLLKNLDIAGVAYQQGDQIGFWNVREYVLFRDGHVCQHCRGKSKDPILNVHHIESRRTGGDAPNNLITLCETCHRAFHRGEIELKVKRGKSFKAETFMGIMRRTLLERLKKAHPELNVRNTYGYLTKHKRISHGIAKSHCADAYCIADNLGAKRLEGFFFQKQTRKHNRQIHKLSILKGGLRKKNQAPYEVKGFRLFDKVICKGEEAFIFGRRTSGSFDVRRLDGTRISAGISCKKLRLLEPRTTYLTEFRKEAALPPLHECSGFRAEFL

SEQ ID NO: 4588 - protein, 420 aa, unidentified
MQYVYVLNKHGEPLIPCSPGKARLLLKQQKACVVKRTPFTIKLLFGSAGYKQPITLGVDAGSKHVGLSASTEKRELYSEEFTPRSDVVELLSTRRQNRRSRRNRKTRYRVPRFDNRVHSKHKGWLAPSVEVKIQEHITVIKHICKILPISLVRVETAEFDTQRLKAMLAGKPLPVGTDYQLGEMYDEYNVRQYVLKRDHYTCQCCGTHNTAKKVVKLHVHHLESRKTGGNAPSNLVTLCTTCHKNLHKGRVTLDGKERGKPLRDAAFMGIMRKTLMVRLKEELPIPVQGTYGYITKMRREQNDIKKSHTNDARCISKHPLAEPCSVCYRTKAIRHHNRQTHKANFSKKGIRKRSQMPYLVEGFRLWDKVLYKGQECFVSGRRSSGSFALKKLDGTSISKGVTFKKLRLLEPATNYLIERM

SEQ ID NO: 4589 - protein, 413 aa, unidentified; identical to SEQ ID NO: 3290

SEQ ID NO: 4590 - protein, 452 aa, Ktedonobacter sp.
VLYVKPFANIDEANITLQDRRLNLSNVFVIDSDYKPLNPVHPARARLLLTQGNAAVYRRYPFTIVLKRVVDQPEVQPLRLKLDPGSKTTGIALVNDTNGKVVFAAELEHRGHAIKDSLDSRRGVRRRRRNRKTRYRKPRFQNRRRKKGWLPPSLESRLANILTWVARLCRSAPITALSQELVKFDLQLMENPDITGVEYQQGTLQGYEVREYVLEKWKRTCAYCGKQDVPLQIEHIHPRANGGTHRISNLTLACEPCNIAKGTQDIAVFLAKKPDVLKRILAQVKKPLKDASAVNATRFALLERLKAFGLPVECGSGGLTKYNRTTRGLAKTHWLDATCVGKSTPSAISHKGVVPLLITANGHGRRQMCVPDKYGFPEKHKQRRKTFLGYRTGDMVKAITSKGTFEGRIAIRHRPSFRLGKVDIHPKYMHCIHRADGYEYTQKGVRNAPPHV

SEQ ID NO: 4591 - protein, 428 aa, unidentified
LKVFVLNMRGQPLMPCSPAKARHLLKAGKAAVRRRTPFTIQLRIATGETKQSVTLGVDAGAKHVGLSAATEKEEVFASEVELRQDITGLLAARLSLRRDRRHRKTRYRAPRFLNRVRSKHKGWLAPSVENRIQAHMSRIDAVCRLLPVTKIVIETASFDIQKIRNPEVEGTGYQQGDQLGFWNVREYALFRDGHVCQHCHGHSKDKILNVHHLESRQTGGDAPNNLITLCETCHKACHAGKIKLKVKRGQSFRAEAFMGIMRWTLLDRVRKAHPGLPVENTYGYLTKHTRITHGLPKTHCVDAYCIAGNLKAVRRGVYLHQRQMRKHNRQIHKFTVLSKRLEDGTKIGYRKLNQSPYLVHGFRLFDKVRCLGQIGFIFGRRSSGYFDVRRLDGVKLSPSISWRKLTLLEKRSTYLTELRKQDGASSPV

SEQ ID NO: 4592 - protein, 413 aa, unidentified; identical to SEQ ID NO: 2636

SEQ ID NO: 4593 - protein, 425 aa, Moorena sp.
MSTNYVLVLDTNRKPLNPCKPGMARSLLKAGKAAVFKRYPFTIILNKAVDDAPKPVQLKIDPGSKVTGLALVQDDKVIWGTELYHRGQQIKADLEDRRKLRRGRRNRKTRYRQPRFLNRTRPEGWLAPSILHRVLTTMTWVRRLTKFVPVTGISLERVRFDTQKMINPEVSGVDYHQGELQGYEVREYLLEKWNRQCAYCQATDTRLEVDHIHPKSKGGSDRVSNLTLACHDCNQAKGNQDIRDFLCGKSDLLNRILSQVKQPLLDAAAVNSTRNKIAEELIATGLPIEFGTGGQTKYNRCRLDLPKTHWLDAACVGVVVHLTLETKQCLTITASGHGNRQMAGVDKYGFPYRHRTRQQVHFGFRSGDIVRAVVPKGKKAGTHVGRVLCRKSGSFDIQTKSGRVTGINHKYCSTIHGRDGYAYVF

SEQ ID NO: 4594 - protein, 470 aa, unidentified; identical to SEQ ID NO: 2925

SEQ ID NO: 4595 - protein, 375 aa, unidentified
MPNKVYVINKHGRPLMPCSPAKARHLLDAGKAKVKKRTPFTIQLVYGSSGYTQEVILGVDAGSKTIGVSALTKKEELFAANVIPRNDVVDLLSTRREFRRVRRNRKTRYRKPRFDNRVRSKHKEWLAPSVEVKIQEHITSIKRVCRILPVSKVVIETAEFDLQLLKAIADGKSVPQGEDYQKGEMYGHYNVRQYVLWRDNYTCQCCGAHATKKKEVRLHVHHLESRKVGGDAPSNLITLCDSCHEKFHKGIITAANLKKRKRRSMRDATFMGIMRKTLIQRLRAELTIPVAETRGYITKTTREKLLVLPKSHTNDALAIALGKHGFNVGYLPEIAQIDKIYTIRPVRHHNRQLHKVTILKGGIRKSNQAEKYVFG

SEQ ID NO: 4596 - protein, 430 aa, unidentified
MPKVYVLNRHGRPLMPCTPAKARHLLDAGKAKVRHRTPFTIQLLYGSTGYAQEVILGVDAGSKTIGLSASTETEELFSAEVKPRNDVVELMSVRRQFRRARRNRTTRYRKPRFDNRVRSKHKGWLAPSVEVKIQEHITAIKTVCRILPVSKVVVETAEFDLQLLKAIADGKPVPQGEDYQKGEMYGHYNVRQYILWRDGYTCQCCGAHATQKKEVRLHVHHLESRRVGGDAPDNLVTLCTACHDKLHKCIIMAADIKKRKRRSTRDATFMGIMRMTLLRRLREQLPVPVVETRGYITKATRENLLVLPKSHTNDALAIAHGPQGFRAEYLPNIRQADRLYTIRPVRHHNRQLHKATILKGGVRKANQAEKYICGFRLYDKVLYNGIECFVWGRRTSGSFLLRQLNGEKVKDGVSYKHLKLLERSQSYLVA

SEQ ID NO: 4597 - protein, 376 aa, Bacillus sp.
IQLQYATGEAVQPVTIGVDSGAKHIGIAITTADKVLAKGTIQLRQDVKENLILRATLRRSRRQRKTRYREARFLNRKKKEGWLPPSIQSRVDNQIHWIETFRSLLPSPKVIVEVGKFDAQKLKKPDIQGIEYQQGNAFGFWNTRYYVFVRDNYTCQICKKKGGILHTHHIIERCNGGSDMADNLVTVHEECHEKFHQGKIKHRFQKPKQYKETAFMNILRLQIMNRLDCEITYGSYTTPKRKELGLSKTHVNDAIAITNPTQIQEYDQSGEFRIKQFRKKKRSLHESTARKGRKTKNTNAKRNQKKTPYVDGVYLGDKVKVFGQVGFVTGFTGKMVYVQDIHGQYIQNPAKSYKQVKMSDMEHIHHSNNWQFLQIS

SEQ ID NO: 4598 - protein, 428 aa, unidentified
MSNYVFLIDGNQTPLNPVHPAQARKLLDCGKAAVFRRYPFTLVLKRVIENPNVYPLTLKIDPGSKFTGIALVTNQGDVIWAMELQHRGQQIKDALLHRLAVRRGRRNRNTRYRQARFLNRKRPDGWLAPSLRHRVLTTETWVKRLKKFAPIGSIAQELVRFDTQAMQNPEISGTEYQQGTLHGYECREYLLEKWNRQCAYCGVKDVPLEIEHIHPKSKGGSERISNLCLACHKCNQRKGNKDVKDFLKGKPEVLNRVQKLAKAPLKDAASVNSTRWMLFNTLKSFGLPVTTGTGGQTKFNRTRFELPKAHWIDAACVGVVEIIKLVTNKILKVRATGFGGRQRCQTDKFGYPQKHRPLRPIHGFSTGDIVRADVPKGKYAGTFTARVCPMSHGYGEFVIDKKRRSIKLEYLTPVHMKDGYDYVYTCTK

SEQ ID NO: 4599 - protein, 412 aa, unidentified; identical to SEQ ID NO: 2668

SEQ ID NO: 4600 - protein, 411 aa, Blautia sp.; identical to SEQ ID NO: 4578

SEQ ID NO: 4601 - protein, 434 aa, unidentified
MVFVKSINNTSLMPCSARKARLLLSSNKAIIIDYKNFTIKLNYNTTNFCQTTTIAVDTGAKFLGIILRNGNNILLARQVKLRTDISSLLTTRRILRRARRNKLRYRQPRFLNRTKSKQSGWLPPSIQSRVNNTINMIDNLISKLPVYKLIIEVGNFDVQKMKNPAINGKEYQQGEMAGFNEIKEFVLTRDNYTCKHKQCDHTDKKLQVHHIQFRSNGGSDKPDNLITLCKTCHSNLHSGLIDDKFKKVANYKEPPFMNSLKTRLQKHYINATFCFGYQTKTTRQEMQLPKSHINDAIAISCYQNKISNLKYLEVNEYVIQVRIKKRSLHEQTARKGYKTKNTTQKRNNKNVNQVNEYKIGSTVRFGCKFGYISGFTGKSAYIKDINDNYITEDNKSYKQISLKKLNLICYNNGWVKFNHNSSLHLAKPDVGDFL

SEQ ID NO: 4602 - protein, 423 aa, Microcoleus sp.; identical to SEQ ID NO: 3885

SEQ ID NO: 4603 - protein, 418 aa, unidentified; identical to SEQ ID NO: 2425

SEQ ID NO: 4604 - protein, 430 aa, unidentified; identical to SEQ ID NO: 3252

SEQ ID NO: 4605 - protein, 456 aa, Halomonas sp.
MAVFVLDKHKRPLMPCSEKRARLLLARGRAVVHKRYPFTIRLKDRVSGETQPLRLGIDPGSKTTGLALMREPDSQQRHMLCLFELVHRGLQIKKALQQRAAFRRRRRSANLRYRAPRFNNRTKPKGWLAPSLQHRVDTVTAWVKRLSRLAPVTAISQELVRFDTQKLENPEISGVEYQQGTLLGYEVREYLLEKWERECAYCGTGDTPLEIEHVVPRSRGGSNRVSNLTLSCHPCNAEKDSQTLTDFFATNKGLKKRLKANGHAADARLDRVQRQLKQPMRDASAVNATRWALFSALKTTDLPVAVSSGGHTKYNRQRLNIPKTHALDAACVGAFEKLHDWTVPTLTIKAMGRGSYQRTRLTKHGFPRGYLMRQKQVHGFQTGDMVRAIVPTGKKAGTYTGRVAVRKRGSFNIQRSAGTVSDISYKYCTLIQRSDGYGYYVTPFTNLTGGAGQAVA

SEQ ID NO: 4606 - protein, 428 aa, unidentified
LKVFVLNMRGRPLMPCSPAKARHLLKAGKAVVRRRTPFTIQLRIATGETKQSVTLGVDAGAKHVGLSAATEKEEVFASEVELRQDITGLLAARLSLRRERRQRKTRYRAPRFLNRVRSKHNGWLPPSVENRIQAHLSRIDAICGLLPVTKIVIETASFDIQKIKHPDVEGTDYQQGDQLGFWNVREYVLFRDGHVCQHCHGHAKDKILNVHHLESRQTGGDAPNNLITLCERCHKACHAGKIKLKVKRGQSFREEAFMGIMRWTLLDRVRKAHPGLPVENTYGYLTKNTRITQGLPKAHCVDAYCIAGNLKAVRRGVHLYQRQVRKHNRQIHKCTVLSKTLKDGTKIGYRKLNQTPHLVKNFRLFDKVRCLGQTGFIFGRRSSGYFDVRRLDGVKISSCINYRKLTLLEKRGTCLTELRKEDGASSPV

SEQ ID NO: 4607 - protein, 430 aa, Eubacterium sp.; identical to SEQ ID NO: 2393

SEQ ID NO: 4608 - protein, 456 aa, unidentified
MSTCVCVLTNNGERLMPTFRLGKVRHLLKDGKAKIVKHHPFTIQLLYDSKTNTQPIETCEDVGYNYIGISVKSESHEYVSAQYDTLQDEKEHHDDCRKYRRTRRNRLRYRKSRFDNRKRDKGWLAPSLEHKKHLNISLIERYVSVIPITHVTVEVGSFDTMLLQSIQKGEAKPEGADYQKGPRYNLATLREAVFYRDNYTCQVCKRKIADGAILHMHHMFYWKGRHGYQLDELVTVCEKCHTPANHQKGGKLYGFGKDKKFANLSGAAFMNAVRWQIVNALYATYGKEFVTITYGAMTKEKRIALQLEKTHNNDAYAMGDYHPARRCKFRHYQKRRRNNRVLEKFYDANYVDTRTGNKAKGKELFNGRISRNHKKDCKNLHKYRSKKVSKGRRSIRRQHYAIQPYDTVRLEGKTYITSGCHNKGTRLLIPVNGKSKSVAISKVQVVCHAGAWIQII

SEQ ID NO: 4609 - protein, 456 aa, unidentified
MSTCVCVLSNSGERLMPTFRLGKVRHLLKDGKAKIVKHHPFTIQLLYDSKTNTQPIEICEDVGYNYIGISVKSESHEYVSAQYDTLQDEKEHHDDCRKYRRTRRNRLRYRKPRFDNRKRSEGWLAPSLEHKKQLNIRLIERYVSVIPITRATVEVGSFDTMLLQAIQKGESKPEGVDYQKGPRYNLATLREAVFYRDNYTCQVCGRKVADGAILHMHHMFYWKGRHGYQLDELVTACEKCHTPANHQKGGKLFGFGEDKEFANLSGAAFMNAVRWQIVDALHATYGKEFVTITYGAMTKEKRIILGIEKTHNNDAYAMGDYHPAHRCVFRHYQKRRRNNRVLEKFYDATYIDARTGNKAKGKELFNGRISRNHKKDSENFHKYRNKKVSKGRRSIRRQRYAIQPYDTVRLEGKTYITSGCHNKGTRLLIPANGKSKSVAISKVQVVCHAGAWIQII

SEQ ID NO: 4610 - protein, 429 aa, Parasutterella sp.; identical to SEQ ID NO: 3656

SEQ ID NO: 4611 - protein, 413 aa, unidentified; identical to SEQ ID NO: 2636

SEQ ID NO: 4612 - protein, 460 aa, unidentified
MVAVVDLFGKPLMPTNEYRARKLLKRKKAKIFGYRPFTIQLTERKSTEIQPIELCMDTGYIHIGISAKSERHEYLGMQIDTLTDEKLKRDDKRQYRRQRRNRKRYRAPRFDNRRRKEGWIAPSLEHKKEIHIDAIQRICKVMPITDLTLEMGNFDTQVLKAVEEGKTLPQGSDYQHGERYGIATLREAVFLRDGYKCQCCEKTVKDGAILHVHHIKYRSQGGTNRMSNLITVCDKCHTPQNHKPGGKLWNWKTKLAEFKGASYMTSIRWMLYNEVTALLPNSSVHITYGAKTKESRRELDIEKSHVNDAYVMGLFHPKHRTQPVYFKKKRRNNRVLEKFYDAKYIDGRDGKKRSGQELFNGRISRNHRKDSENLHLYRKQKVTKGKRSIRNRHYPIQPHDILLYQKKKYETAGCHNNGSRAILLPEKKSVALKQLTMYQYAGGYYRVPYESNKKEERTGS

SEQ ID NO: 4613 - protein, 423 aa, unidentified; identical to SEQ ID NO: 4062

SEQ ID NO: 4614 - protein, 408 aa, unidentified
MVYVQDIDGKPMMPTTRHGKVRRLLKANKATVVNLCPFTIRLTYAISGYKQEIVLGVDAGTKHVGLSATTKSKELYSSEVILRSDIVELLSTRRELRRTRRNRLRYRKPRFGNRVKSKHHGWVAPSVRHKVDAHIRVIDNICSTLPISRIIVEIAQFDTQKIKNPDISGNEYQEGDQLGFWNVREYVLARDGHKCQHCKGKSKDPILNVHHIESRKTGGDSPSNLITLCETCHKEYHKGNIDLKVKRGKSLRDAAVMGIMKWKLYEELKSRYPNVSMTFGYITKYNRIKYGIEKYHISDAFVISKNFNALRLEYHYKVRLVRRHNRQIHKQKVLKGGAKKPNQSPFEVFGFRLFDRVMFEGNYYFIFGRRKSGSFNIRDINGGNQRNVTYKKLKLSIGKRFMIQKEMN

SEQ ID NO: 4615 - protein, 403 aa, unidentified
MDKKAVVKRRTPFTLQLTIATGETKQDVTLGVDAGAKHIGLSASTEKEEVFASEVELRQDITGLLAARLAFRRARRHRKTRYRAPRFLNRVHSKHMGWLAPSVENRIQAHMSRIDAICGLLPVTKIVIETASFDIQKIKNPDVEGTDYQQGDQLGFWNVREYVLFRDGHVCQHCRGRSKDKVLNVHHLESRQTGGDAPNNLITLCETCHKAYHAGKIKLKVKRGQSFRAEAFMGIMRWTMLDRVRKAHPDLPVENTYGYLTKNTRITLGLPKTHCIDAYCIAGNLNARRRGVYLYERQMRKHNRQIHKCKVLSKTLKDGTKVGYRKLNQTPYLVKNFRLFDKVRCFGQTGFIFGRRTSGHFDVRTLNRTRLSDCVNSKKLTLLEKRRTFLTELRKEDGASSPV

SEQ ID NO: 4616 - protein, 451 aa, Burkholderia sp.; identical to SEQ ID NO: 3380
  source 1..451: note = str. CF145

SEQ ID NO: 4617 - protein, 456 aa, Halomonas sp.; identical to SEQ ID NO: 4333

SEQ ID NO: 4618 - protein, 425 aa, Nodularia sp.; identical to SEQ ID NO: 3113

SEQ ID NO: 4619 - protein, 449 aa, Desulfobacter sp.
MKVSVKSQSGKWLMPTNPANARILLKQGKATVIQRTPFAIHLLYETTEHIQPITVGLDDGGINIGIAAVSNGKVLFQQEVVLRSDVKSKLDTRRQYRKSRRNRKTRYRKSRFLNRKSSIPTCKVCGGNAPASQVICRSCLNRADGVHQKYAKIKKSVFRIPPSIKAKKDAIIRVVKQIPLPISRIVLEDLYFDFQAMENPDISGEQYQHGDLLYHKNFKQACLVRDKFRCRVCGAQTKLQCHHIRQRAKGGTDKLSNLMTLCDLCHDRHHKEGLKLPKQKSSFYMSAAHVQQGKHYLQAKLSRIAPLRTTFGYITSHFRNNAGIEKSHVNDAVIIADKQATPLDRQIQTKHVQSRKRSLHEAIARKGRKTPNRTQKRNNKNVFTLRGFNRWDTVQYKGRVGFISGFTGSSSCYIVDIKGNYIKNPMKTYKQVDLREISLICKNQTIISQ

SEQ ID NO: 4620 - protein, 435 aa, Sutterella sp.
MSTTVFVLDKKHRPLMPCRPARARRLLRAGRARVVKRFPFVIRLVDRTVEQSEVQPVLIKLDPGSRETGAAVVRDDGKKRHHALAFFVIEHRGGAIRDALKARSAFRRRRRSQNLRCRSPRFLNRVKPKGWLPPSLRHRVETTLSFVRRMCRYLPVSGIATELVKFDSQKLQNPEVSGVEYQQGTLFEYEVREYLLEKFGRKCVYCGAEGVPLNIDHVVPRAKGGSNRVSNLVLACMSCNQKKGARSLEDFLKGKPKVLARVRRELKTLLRDAAAVNATRWVLFNELKATGLPVETGSGALTKLNRHAFGVEKEHWLDALCVGRLNGVVTRKGLNVLEIRCMGRGSRQRTRLTKYGFPRGYLMRQKCVHGFATGDMVEANVPKGKKAGLWRGRVAVRVSGSFNIQTPKGVIQGVGWKHCRLISHNDGYGYAWLGH

SEQ ID NO: 4621 - protein, 425 aa, Synechococcus sp.
MSNFIFVLDTQKRPLDPVHPGKARHLLNQGKAAVYRRFPFTLILKEAHPDVPVQDLELKLDPGSKVTGIAIKQGNKIIFGAELQHRGQQIKDALLSRRQLRRGRRNRKTRYRQPRFLNRNRPDGWLAPSLKHRVDTVLTWVNRLRNLAPLGSIAQELVRFDLQKLQNPEISGIEYQQGELQGYEVREYLLEKWGRKCTYCGTKDVPLEVEHIHPRSRGGTDRVSNLTMACHACNQSKGNQDIRDFLFGKPELLQRILRKAKAPLKDAAAVNSTRWALFNALKATGLPLTTGTGGQTKFNRTRLDLPKAHWLDAACVGQVDALKVLTSKPLLITAKGHGTRQMCGTDKFGFSTRHKSRVQIHKGFQTGDIVRATVTAGKKIGFYVGRVLCRASGSFDIATATGRVAGISHKYCKAMHKKDGYAYVF

SEQ ID NO: 4622 - protein, 429 aa, unidentified
QNKQRKARKDHTEIQNGNADICRTTISCKSVQISYPAAEKSVTHKIIRGKEGKFANRHRDEGWITPSARQLVQMHMNDLKSMCKILPISHVTLERVAFDFQKLENENIKVWEYGKGKLYGYDSPEEYIHDVQNGKCLVCGKPHIDYLHHIIPRSKGGSDKVSNIAGLCYDCHYGPMGVHNCQNTQDRLPELKSEANKQYKVSLLNSVMPVLIEEMDKFCKANSIMFSICEGHDTAKVRDMYDLQKDHCIDGFAISLVDRNVKSVDVMPDRIYQKQRYKKKSKNIIQKRNCREYYDDKKLVAVNRHKGTDQKADSLEEYMNTYAETHTTDECKKHFDSLVVKPARRTYTFHKEWRICPFHIGDKVRYEKKNKIKGNTKVDTFICEGIRFVKDENKAEVKHNKTKSKKMKFCRVLESGCTPYVDYRKLALM

SEQ ID NO: 4623 - protein, 425 aa, Moorena sp.; identical to SEQ ID NO: 3008

SEQ ID NO: 4624 - protein, 426 aa, Sulfobacillus sp.
MVFVLDRQKNPLMPCTEKRARQLLERGRAMVHKIAPFTIRLKDRTAAESVLQPLRVKFDPGSKTTGMAIVLKGAKGSKVVFFGEIVHKAGIKAKLDARRALRRGRRYRKTRYRQARFQNRKRKEGWLPPSLEARVDQTLHAMAKIRQGAPVTDLSVEHVRFDTQKLDNPEISGVAYQQGTLLGYEVREYLLEKWGRACVYCGATDVPLEVEHIVPKSRGGTDRVSNLALACHACNQTKGSRTADEFGFPDIQMQARKPLRDAAMMNATRWRLYEQLQATGLPVEGGSGGRTKKQRLHQGLPKAHYYDALCVGASTPDRFTSLPAYVQIWTAKGRGTRQLCGANAYGFPIRHRSRQKVHFGFQTGDWVRAERKTGKFAGTWVGRVTVRARGSFVVTTVDGNRAEIFHTVCRILQRGNGWQITQKLAS

SEQ ID NO: 4625 - protein, 234 aa, Microcoleus sp.
MCKVFVLDTEKRPLDPIHSALARQLLRNQKAAIYRRFPFIIILKESHPDSSVTTLRLKLDPGAKTTGIALVNDATGEVVFAAELKHRGFAIREALTSRRQLRRSRRTRKTRYRQPRFLNRKRPEGWLAPSLQSRVHNIKTWVEKLCKFAPIGAISQELVRFDMQLMRNPDIQGKEYQQGLLAGYETREYLLEKWGRQCAYCGVKDVPFQVEHIHPRAKGGTNSVTNLTLSCEKC

SEQ ID NO: 4626 - protein, 509 aa, unidentified
VYVLNKDGKPLMPTTRCGHVRYLLKEKKARVVKTKPFTIQLLYETNDVVQPLYLGIDPGRTNIGVAVVKADGTAVFTAHLETRNKEIPKLMKKRKDSRCARRTNGRRCRRQRRAKANGTISKKCVKQATAQNGSASKRAKEIGVIKRHLPGCEKEVLCIGIKNKEAKFNNRTRPAGWLTPTANQLLQTHINLIKKIQKLLPISDVVLEINKFAFMQLDNPNIQKWQYQQGPLYQKANLEEAVSEMQEHHCLFCKKKIDHYHHVVPQHKNGSNTIDNIVGLCTKHHDLVHKDTAWHEKLTKKKTGLNKKYGALSVLNQIIPALTKELSSIFPKHFFVTTGKSTYDYRAAHSVSKDHWLDAYCIACSVLPNDVCDSSINNRVPYELKQFRRHDRRALHKENMSRVYTLNGKKVATNRHKTTEQTADSLEEFRQNHPDDVCKLKVKENHSEYRNPKRNFPGCVFLVGKRTHVMQGTSGSHNGKADGYYDTNGNSYSSGKCKFVAKNEGIIFA

SEQ ID NO: 4627 - protein, 470 aa, unidentified
  REGION 1..470: note = Ga0315273_10031089
MKNIQQQFGMRSTPIDASQVCGSVVLSLNREETLSEQGVKTIPNNLDVNQHQRGGLNAVFVLNIDGKPLMPCKSAKARHLLRDSKANVVSRKPFTIRLLFDCENQTQPVTLGIDSAYKWVGFSARTEKKELISGELKLRTDIKKKLEERAMYRRGRRNKLWYREPRFDNRIKSKKDGWFAPSIIHKLDTHIRLVEKIKRLLPISKIVVEIASFDTQKMMNPEISGIEYQQGTLQGYEIREYLLEKFKRTCVYCGKTNIPLEVEHMNPKARGGSNRVCHLTISCHKCNQKKGTRTASEFGHPEVEKTGMVSLKETPFMNLVRSRIVDILGCDYTYGYITKHDRIKLGLEKSHINDAFVISKGTSEERCKSFNLKQTGRNNRCLQINRKGYKPSIRRVRYPLQPNDRIIYEGKVGIVKGVHSYGKRILLNIKNNNPKNIDIKKVHLLQYGKGLYFDIPPTVEVCGFPCEAIK

SEQ ID NO: 4628 - protein, 443 aa, Anoxybacillus sp.
MVEENMTCFMQRKGENPMVFVLDTNKRPLAPCHEAVARKLLKQGKAAIYRRFPFTIILKKSVDESEIKATYRLKIDYGSRHTGLAILRGQEVVWLGQLDHRTDIKERMDKRRVFRRARRNRKTRYRKPRFLNRRRKDGWLPPSLESRVQNIQTWVERLRKICPIEHISYENAKFDTQLMRNPEINGVEYQQGTLQGYEVREYLLEKFGRKCCYCGKENVPLEVEHIIPKSRGGTDRVDNLCLACHDCNQRKGSKTAEEFGYPHIQKQVKESLKDTSAINSTRWKVYEVLKQTGLDVECGTGARTKMNRIRLDLPKTHYFDACCVGESTTNHLYFKTKEVLFIKAKGRGSRSRTNLDRYGFPRGYLARQKFFFGFQTGDMVKAVVPRGKYQGVWFGEVACRKTGSFDIKGKDGKRIAQGINYRYVQVIQRFDGYAYGKGVAELA

SEQ ID NO: 4629 - protein, 430 aa, unidentified
MPNKVYVINKHGRPLMPCSPAKARHLLDAGKAKVKKRTPFTIQLVYGSSGYTQEVILGVDAGSKTIGLSASAETEELLSAEVKPRNDVVDLLSTRREFRRARRNRKTRYRKPRFDNRVRSKHKGWLAPSVEVKIQEYITSIKRVCRILPVSKVVIETAEFDLQLLKAIADGKPVPQGEDYQKGEMYGHYNVRQYVLWRDGYTCQCCGAHTTKKKEVRLHVHHLESRKVGGDAPDNQVTLCESCHEKLHKGLIAEKDFKKRKRKSTRDATFMGIMRKTLMQMLCSELPIPVVKTRGYITKATREKLLVLPKSHTNDALAIAQGKQGFNVGYLPGIVQINKIYTIRPVRHHNRQLHKAAILTGGIRKSNQTEKYVFGYRLFDKVQFNGQDCFIWGRTTGIFTIKTINGKMIKDGISFKKLKPVEKSTSYLIA

SEQ ID NO: 4630 - protein, 456 aa, Halomonas sp.; identical to SEQ ID NO: 4333

SEQ ID NO: 4631 - protein, 400 aa, unidentified
AKVKKRTPFTIQLVYGSSGYTQEVILGVDAGSKSIEISASTKKEEVFAADVTPRNDVVDLLSTRREFRRARRNRKTRYRKPRFNNRVRSKHKGWLAPSVEVKIQEHITSIKMVCRILPVSKVVVETAEFDLQLLKAIEEGKPVPQGEDYQQGEMYGHYNVRQYVLWRDNYTCQCCGAHPTKKKEVRLHVHHLESRKVGGNAPGNLVTLCDRCHEKLHKGLITEKDLKKRKHRSTRDATFMGIMRKTLMQRLCSELPIPVVETRGYITKATREKLLVLPKSHTNDALAIAQGKHGFNASYLPGIVQSDKIYTIRPVRHHNRQLHKAAILKGGIRKSNQAEKYVFGYRLFDKVQFNEQDCFIWGRRTTGIFTIKTINGKMIKDGISFKKLKLLEKSTSYLIA

SEQ ID NO: 4632 - protein, 456 aa, Halomonas sp.; identical to SEQ ID NO: 3676

SEQ ID NO: 4633 - protein, 413 aa, unidentified; identical to SEQ ID NO: 3220

SEQ ID NO: 4634 - protein, 443 aa, Bacillus sp.
MVEENMTCFMQRKGENPMVFVLDTNKRPLAPCHEAVARKLLKQGKAAIYRRFPFTIILKKSVDESEIKATYRLKIDYGSRHTGLAILRGQEVVWLGQLDHRTDIKERIDKRRAFRRARRNRKTRYRKPRFLNRKRKEGWLPSSLESHVQNIQTWVNRLKKLCPIGYISYENAKFDTQLMRNPEINGVEYQQGTLQGYEVREYLLEKFGRKCCYCGKENVPLEVEHIIPKSRGGTDRVDNLCLACHDCNQRKGSKTAEEFGYLHIQKQVKESLKDASAINSTRWKAYEVLKQTGLDVECGTGARTKMNRIRLDLPKTHYFDACCVGESTPNHLYFKTKEVLFIKAKGRGSRSRTNLDRYGFPRGYLARQKFFFGFQTGDMVKAVVPRGKYQGVWFGEVACRKTGSFDIKGKDGKRIAQGINYRYVQVIQRFDGYAYGKGVAELA

SEQ ID NO: 4635 - protein, 443 aa, Ectothiorhodospira sp.
MAVLVLDRRKKPLMPCSEKRARLLLERGRAVVHKMRPFTIRLKDRTAEASTLQPVRIKIDPGSKTTGVTVIREDDSDPEQQQVLMLMEVEHRGHQIKDALTQRRAFRRRRRGQLRHRAPRFDNRTRPRGWLAPSLQHRVDTTLAWVARLRRLAPVTAIDQELVRFDTQAMEAPEISGVEYQQGTLHGYEVREYLLEKWQRRCAYCGARDLPLEVDHIHPRSRGGSDRVSNLTLACHDCNQAKGNQPVEAFLAADPKRLQRIKDQARAPLKDAAAVNATRWALFQGLKAMGLPVITGSGGRTKYNRQRLGLPKTHALDAACVGQVAAVTGWNVPTLTTRATGRGSYQRTRLNRFGFPRGYLMRKKQVKGFQTGDLVQAQVPTGKKAGTYQGRVAIRATGSFNIQTAQGVVQGISHRHCRLLQRADGYGYTFQPKPLQEDASRAA

SEQ ID NO: 4636 - protein, 535 aa, Streptomyces sp.
MRHVRSLNSNVTHTTPLSPKSLRAPASGATCPRRPHVRVISPDPCSLGNPRCVASGASREGRSLAPSYRVTSPGHHDLRISRGASMTTFFTGEQTHQAVLPQQPALESAGAYTPGSRDETAHGLPDPKPGTGVGHGRGETGAVRTRTRRRHARRLDPGSKATGIAVTDERDEVGAKGRTALVRRGLVSIELRHRGRQIHSGMVRRAGHRRRRRSANLRYRAPRHDNRTRPDGWLPPSLRHRIDSTMSLVARLCRYAPVLEIHVEQVAFDTALIAAAVSSREQDFSERTHAGSEIREFLLAKWERSCAYCGATGVLLNIEHVRPRSRGGSDRVANLVIACVPCNQAKGTARIDEFLADRPARLERVIARLRRPLHDVAAMNTTRLLLVKTLATHGVAVHTWSGGRTSWNRLAMGLPKSHTLDALATGVIDLERGDAVVRIPAQILVVRSTGRGSYARTTPDRYGFPRLQRPGGQHRITTLTSHFDVSHRNLRLLQRADGYTYGFADEIRLSEEHGPAYSGRTLKGGDPGNVRTPDA

SEQ ID NO: 4637 - protein, 426 aa, unidentified
MLVYVLKQNGQPFMPTARFGKIRRLLKTKKAKVVRREPFTIKLFYEPETDVVQECYCGVDTGSRHIGVAVVGNDKVLYQSQTELRNDIKRKMDARRMYRCNRRQRKTRYRKPRFLNRSNSTKSDRLPPSVNHKVQAHIDEIEFCKKILPISDSNLIIEVSQFDTALMKDPSLISEKVKHWGYQQGFNYGYSSRREAVLHRDNYTCQCCGKKNCRLEVHHIKFKRDGGTDDEENLITLCEDCHRGVHAGTVVLNKKPKKSRNLKYATHMSIIRSYLLKKYPNAIETFGFVTSENRNHLNLEKDHYIDACVVASGGLEFKELDVIFYKQRVSKGDYQLTKGIRGEQKLPTGKICGFRKFDKVEYLGEKYFIKGRMSSGFAILMNIFGEKVDFSSMPKGLKTPKLSKCKRISTRRSRLCIREKITLNIV

SEQ ID NO: 4638 - protein, 424 aa, unidentified
MRVFVFNMRGRPLMPCSQRKARLLLRENKAMIYKYHPFTIQLTYTTGETKQDCHIGIDTGSKYIGAAVRSEDKVFWKGEIELRQDIRSNLDTKRIYRRSRRNRKTRYRKPRFLNRKRRDEWLPPSLQSRINHTFHWIDTLSSLVPNPILHIEVGKFDVAKMINPEIHGVDYQHGQTYGFFDERYFVFARDNYTCQCCGKSKNKILNTHHIIYRSNGGTNRVDNLITVCTDCHTSQNHRKGGIFYQWQGQHKKGKQYKEPPFMNTLRKRIFVAYPDAEITYGSETTPKRKAMKLDKTHYNDAIVISGINEIKENPEEWLLIKQFRKKKRSLHEATARKGRKKPNRNQTRNSKNTPYYKGFYLNDKVSVFGKSGYITGFTSNAAYIKDENNDYITLPNKTYKQVSINKMKLECHNNNWQYIIKNAV

SEQ ID NO: 4639 - protein, 419 aa, Paenibacillus sp.; identical to SEQ ID NO: 3664

SEQ ID NO: 4640 - protein, 447 aa, unidentified
VPAYRFKHITKKEVPYMVYVLDIDGQPLMPTSRHGKVRRLLNSHLAKVVKRCPFTIQLLYQSTKETQPVSLGVDAGSRHIGLSATTEQEVVYQEELVPRNDIVKLLSARRALRRSRRNRKTRYRKVRFNNCVHSKHKGWLAPSVEVKIQEHITAIKRICQILPISDIHVETAEFDLQRLKAMEEGRPLPVGTDYQLGEQYDFYNTRQYVLHRDEYTCQCCGTHDNNVKLHVHHVESRQTGGEAPNNLITLCEHCHKSIHAGKMMLPKGKKRGKSYRDAAFMGIMRNTLLERLKKEVNVPVTMTYGYITKYWREKAGLEKSHINDAICISKHPYARPLETYYLTKAVRHHNRQIHKTKFSKGGIRKRNQAPYLVKGFRLFDKVLYQGESYFIFGRRITGYFDIRTLDGTKVNKGSTSYKKLRIQDTAEAYLTEVRAIPHMNEFTCVLA

SEQ ID NO: 4641 - protein, 465 aa, unidentified
MSTCVCVLSKNGERLMPTIRLGKVRHLLKDGKAKIVKHHPFTIQLLYDSKTNTQPIEICEDVGYNYIGISVKSESHEYVSAQYDTLQDEKDCHDDCRRMRRTRRNRLRYRKPRFDNRKRGEGWLAPSLRHKKELNVNVVKMYCEVMPVTHAIVEVGSFDTMLVKAIEEGKTTPEGAGYQKGPRYKLATLREAVFYRDNYTCQVCGRKANEGAILHVHHMFYWKGRHGNSLSELVTVCEKCHTPANHQKGGKLYGFGEDIKFANLSGAAFMNTVRWQIVNELYAAFGKPFVTFTYGAMTKEKRIALHLEKSHNNDAYAMGSFHPVDRCAFEHYEKMKRNNRILEKFYDSRYINIRTGEVASGKELFNGRINRNHKKDSENLHKYRGKRIRKGYRALRRKKVALNPGDLVSLNGEILTVHGTHTKKNGSVNVKFKTPSKSGKKSVSLKKLKIIKTISPMRSAWDKVS

SEQ ID NO: 4642 - protein, 449 aa, Allochromatium sp.
MAVFVLDKQKHPLMPCTEKRARLLLERGRAVVVRLAPFTIRLKDRIGGAVQPLRLKLDPGSRVTGLAIVRESETGDADTGAVERLEHGLWLGELAHRGQAIREALTLRRHYRRARRSRKTRYRAPRFLNRPRREGWLPPSLQHRLDTTLNWVARLRRLAPITALSQELVRFDTQALQNPEISGVEYQQGELAGYEVREYLLETWHRTCAYCGATHVPLEIEHIVPRARGGSDRVSNLTLACRACNQRKANQSIEDFLKRQPALLHRIQAQAQAPLQDAAAVNATRWALLNALQTTGLAVETGSGGRTKFNRTRLDIPKTHALDAACVGAVDQVRDWNRPVLAIRATGRGAYRRTRTFNNGFPRGYLMRHKRVHGFQTGDWVRAEVPKGKKAGVHVGRVAVRQTGSFNIQAQGGTVQGVSYRHCRVLQRADGYGYAFQPKPDAEKARRAA

SEQ ID NO: 4643 - protein, 378 aa, Moorena sp.; identical to SEQ ID NO: 2642

SEQ ID NO: 4644 - protein, 466 aa, unidentified
MKILVIGRNGLGLAPTTPRKARILLKEKRAEVAYRQPFTIRLKYKTGCAHPKMCLGEDTGSQHIGFAILTEKGQVLDKTEYELRSTMEKRSLLETRKEYRRGRRYRKVRYRHSKFHPTTKRLYVEKPIKYNKHTTHWKKQTNSFDSSRPEGWLPPSIQSKLDHHIRLTSRYKEALPPDTMIRIEVGRFDVAHMKDPTINGKMYQQGPMYESENVKAYVFARDSYTCKCCKAKAGSIRKDGTQVKLKAHHIDFRSKGATDNPERMVSVCDRCHTTAAHQLGGILYQWMIEGKKFSRGYRDPAFMNILRRRMWKAFPEAAFTYGNITAADRKGLLIEKSHANDAVAIAAHGMELIRNSTETTFYKQLRKQKRSLHEATPRKGRREPNRTAKRNRKNTCVVKGWYLNDKVTVFGKTGWISGFSGKSSVYIRDCENEYITVPGKNYKLVPISQIKMITHCNNWAVYTKIA

SEQ ID NO: 4645 - protein, 456 aa, Halomonas sp.; identical to SEQ ID NO: 4333

SEQ ID NO: 4646 - protein, 438 aa, Lactobacillus sp.
MKGEKMQNRVFVINKHGEALMPCKPRTARKLLQSGKAKPIKKEPFTIQLLYGASGYKQPVKLGVDSGQRHIGLAVTSQDKVFFQSEVELRQDVKKLLDTRRIYRRSRRNRKTRYRQARFLNRTKTKKNNWLPPSVQSKVNNNINWIKHLLSVLPNPELHIEIGKFDMQKMKDPAIKGEGYRKGDLYGYQTVKQYVLARDQYKCQVCKKKGGKLKIHHIIYRSLGGTNVPSNLLTVCADCHTAKNHAEGGKLYELCKKKKKVTKPLKGATFMNILRRRLWTAFPQAHFQYGAFTTLQRADLSLSKSHYNDAIAISGIKKINSRPTSVVMFKQFRKKKRSLHEATARKGRKAKNITSKRNAKNTKFAKGFWLNDYVRIKNSKFKGYISGFTGSSCYVKDCLGNYLTLNTYKQTNLSNVEFINHRNNWCNTSISEQRYVME

SEQ ID NO: 4647 - protein, 426 aa, unidentified; identical to SEQ ID NO: 3614

SEQ ID NO: 4648 - protein, 458 aa, Lactobacillus sp.; identical to SEQ ID NO: 4474

SEQ ID NO: 4649 - protein, 413 aa, unidentified; identical to SEQ ID NO: 2636

SEQ ID NO: 4650 - protein, 432 aa, Ktedonobacter sp.; identical to SEQ ID NO: 2059

SEQ ID NO: 4651 - protein, 413 aa, unidentified
MTSYSFVLDVNGKPLAPTKEQKAWFLIRKKRAALVSKYPMVIQLKKEIPEKEICQDEIRCGIDDGGLHVGIALVQKCKTKNKVVFKGTMEQRNDVKHLMEVRRGYRRYHRYHKRYRQARFDNRKSSKREGRIAPSILQKRQATIRVIHWLNKWINITNYWLEDVSVDIRALTDGYQSYRWQYQRSNRLDENIRKAAILRDGGKCMECGKSNCRLEVHHIKPRRRNGSNTLDNLITLCESCHQKTEGQEELYMDRYFSLLKSSDNKNLNYAQHVMIGKMWLRKQLSGLGVLYLTSGGDTANKRIDWNIEKSHANDAVCITDLQPDTCDMKEWTMKPMRRQSKAKTDHVLGIHHRDLVEYTFKNGETHRGYVTALYPEQKAINFQSPTKHCKKVNARKCKLLWNYSKIYWFENAS

SEQ ID NO: 4652 - protein, 443 aa, Geobacillus sp.
MVEENMTCFMQRKGENPMVFVLDTNKRPLAPCHEAVARKLLKQGKAAIYRRFPFTIILKKSVDESEIKATYRLKIDYGSRHTGLAILRGQEVVWLGQLDHRTDIKERIDKRRAFRRARRNRKTRYRKPRFLNRKRKEGWLPSSLESRVQNIQTWVNRLKKLCPIGYISYENAKFDTQLMRNPEINGVEYQQGTLQGYEVREYLLEKFGRKCCYCGKENVPLEVEHIIPKSRGGTDRVDNLCLACHDCNQRKGSKTAEEFGYPHIQKQVKETLKDTSAINSTRWKAYEVLKQTGLDVECGTGARTKMNRIRLDLPKTHYFDACCVGESTTNHLYFKTKEVLFIKAKGRGSRSRTNLDRYGFPRGYLARQKFFFGFQTGDMVKAVVPRGKYQGVWFGEVACRKTGSFDIKGKDGKRIAQGINYRYVQVIQRFDGYAYGKGVAELA

SEQ ID NO: 4653 - protein, 442 aa, unidentified
MSTSVFVLDKKHRPLMPCRPARARRLLRAGRARVVKRFPFVIRLVDRTVEQSEVQPVLIKLDPGSRETGAAVVRDDGKKRHHALAFFVIEHRGGAIRDALKARSAFRRRRRSQNLRCRSPRFLNRVKPKGWLPPSLRHRVETTLSFVRRMCRYLPVSGIATELVKFDSQKLQNPEVSGVKYQQGTLFEYEVREYLLEKFGRKCVYCGAEGVPLNIDHVVPRAKGGSNRVSNLVLACVSCNQKKGARSLEDFLKGKPEVLARVRRELKTPLRDAAAVNATRWVLFNELKATGLPVETGSGALTKLNRHAFGVEKEHWLDALCVGRLNGAVTRKGLNVLEIRCMGRGSRQRTRLTKYGFPRGYLMRQKCVHGFATGDMVEANVPKGKKAGLWRGRVAVRVSGSFNIQTPKGVIQGVGWKHCRLISHNDGYGYAWLGHAPHSSPA

SEQ ID NO: 4654 - protein, 431 aa, unidentified
MDAWDIIVVLNKRGKPLMPCSPAKARLLLKEKKAIVKRRTPFTIQLTIATGESKQPVTLGVDAGYKHVGLSASTEKAELYASEVELRQDVSDLLSARRALRQSRRSRNTRYRAPRFDNRIRTKRKGWLAPTVENRINVHLSRIETVLRLLPVTKITVETASFDTQLLKNPDIAGKEYQEGEQLGFWNVREYVLFRDGHVCQHCHGRSKDPVLNVHHLESRRTGGDSPGNLITLCETCHKALHRGEIKLKAKRGRSFRAETFMGIMRWGVLNRLKASHPKLEVHNTYGYRTKHARIANGIAKSHCADAFCIAGNFGAKRLGEFFFQKQTRRNNRQIHKLSILKGGIRKRNQAPFEVNGFRLFDKVACQGEEGFIFGRRSTGYFDVRKLDGTCISAGISYKKLHLLEKRRTYLTEIRKEEALPPPPEGRGLRA

SEQ ID NO: 4655 - protein, 477 aa, Acidithiobacillus sp.
MFVFVMNQYGRPGHPTRRMDWVRKQLKRKRGKIVGGGISGKPAVLVLRERSFDRNRTVKRRFYVTLDTGFRNVGYAVTELLEDGTLRVLLKGTLTARTPDIRGLMDERAMYRNSRRYHRRANVKKKGQTAKHRPPRYESRGKQNSVTLKHSIETHRNLYARLARLAPLPVYQVTQGFESVSFDLRALAHGKPRTGSGYQVSPVGKAAGEKTHAFVVRRDGGCVVCGRKEHLHGHHLRKRSKAGSNRAGNRVTLCEDCHADVHAGLIDLPITDGAQWRDASTVNTVCGKLRKQATEFGIVPIPVEQSVAARRRLGLEKTHALDAVSVAAAMTEACYVNQRDTVDMDMTQYRRHRRAHIHAQRDRRYYLPGVMAPVAHNRRKRCDQGDVDSLAEFRKAHPKDVGCLKVKKAVRLYTPNRAKAPAVGGDVWKIGGQRVVVRGVHSKTNLYVPDLKPVTGKVYAAPKDGIRLLWNTGMVVV

SEQ ID NO: 4656 - protein, 456 aa, Halomonas sp.
MAIFVLDKKKQPLMPCSEKRARLLLARGRAVVHKRYPFTIRLKDRVGGETQPLRLGIDPGSKTTGLALMREPDSQQRHMLCLFELVHRGLQIKKALQQRAAFRRRRRSANLRYRAPRFNNRTKPKGWLAPSLQHRVDTVTAWVKRLSRLAPVTAISQELVRFDTQKLENPEISGVEYQQGTLLGYEVREYLLEKWERECAYCGTGDTPLEIEHVVPRSRGGSNRVSNLTLSCHPCNAEKDSQTLTDFFATNKGLKKRLKANGHAADARLDRVQRQLKQPMRDASAVNATRWALFSALKTTDLPVAVSSGGHTKYNRQRLNIPKTHALDAACVGAFEKLHDWTVPTLTIKAMGRGSYQRTRLTKHGFPRGYLMRQKQVHGFQTGDMVRAIVPTGKKAGTYTGRVAVRKRGSFNIQRSAGTVSDISYKYCTLIQRSDGYGYYVTPFTNLTGGAGQAVA

SEQ ID NO: 4657 - protein, 456 aa, Halomonas sp.; identical to SEQ ID NO: 3676

SEQ ID NO: 4658 - protein, 476 aa, unidentified
LYIKMTSCTCTVFPAYNYAKTSSSQGKHNLLLRQERFIVKEVANMSTVYVLNKDGKPLMPTTRGGHVRHLLKEQKARVVRAKPFTIQLLYETNDVVQPLYLGIDPGRTNIGVAVVKANGTAVFTAHLETRNKEVPKLMQDRKKARRARRTNGRRCRRQRRAKANGTISKKCVKQDTAQSKNPSKRAKEIGVIKRHLPGCEKDVLCIGIKNKEAKFSNRTRPEGWLTPTANQLLQTHINLVKKIQKFLPISDVVLEVNKFAFMRLDNPDIQKWQYQQGPLYQKGSLENAVSEMQEHHCLFCDKPIDHYHHVVPQSENGSNTIANIVGLCAEHHNLVHKDAAWQKKLAEEKVGLNKKYGALSVLNQIIPALTNKLSVLFPKHFFVTAGKSTHDYRAAHGVSKDHWLDAYCIACSVLPSNVCDSNINNHMPYELKQFRRHDRRVLNNENMNRVYTLDNKAVAINRHKATEQEAASLEEF

SEQ ID NO: 4659 - protein, 462 aa, unidentified
VAVFVLDRRGKPLMPCNEKRARLLLARGRARVHRVMPLVIRLVDRQTGACSFQPLRLKIDPGSRVTGMALVRETDDGIAVLNLFELVHRGRKISEALTARRGFRRRRRGANLRYRPPRFLNRTRPSGWLAPSLMHRVHITIACVNRVRRWAPVTALSSELVRFDMQALANPEISGIMYQQGTLAGYEVREYLLGKWSHTCIYCDATGRPLQIEHLTAKARNGSNRIGNLGLACGQCNQDKGALDVREYVKDPKRLARILATASRPLNDAAAVNATRRALASALQITGLPLELASGGQTKFNRVTRNIPKTHALDAVCVGQVNVVRGWQRPSLTIRATGRGSYQRTRLTRYGFPRGYLMRQKQVQCFQTGDHVRADVPCGRKAGIHIGRVAVRATGSFNIQTATTVVQGISYRYCTLVQRGDGYAYSLKPRNSFRQEDAGDGHPSHVALSLPSKNAGVAGRLS

SEQ ID NO: 4660 - protein, 443 aa, Geobacillus sp.; identical to SEQ ID NO: 4652

SEQ ID NO: 4661 - protein, 418 aa, unidentified
LNVYVVNQREEPLMPTRPQKARKLLKQEKAKVYKRTPFTIQLQYPTGENKQDISLGVDAGTKSIGLSATTDKEVLLESEVKLRTDIQDILSTRRSARRARRSRKTRYRQPRFRNRKKEKGWLAPSIQNKVDMHVKVINLLHEILPIKNVVIEAAQFDTQKIKNPSITGDLYQKGDQLGFWNVREYVLFRDNHTCQHCKGKSKDVILNVHHIESRNTGGNSPANLICLCETCHKLIHQEGKEHLFKRQTSSLKDASQMTVMRWCIYNHVKRTYPHVKLTYGFVTKHTRIHHGLEKTHLMDARCISGNPLAVRKERTFLFKQVRRNNRQLHKFTTPKGGKRKNNKAEKLVKDFQLFDKVQFNGKDCFIFGRRKTGYFDLRLLDGTRIHKSANYKKLRAVEKANTLLIQIQRKGSAGCLLS

SEQ ID NO: 4662 - protein, 336 aa, unidentified
ARRALRRARRNRKTRYRAPRFDNRIRTKRKGWLAPSVENRINAHLSRIEAVLRLLPITKITVETASFDMQRLKNPDISGKEYQEGEQLGFWNVREYVLFRDGHVCRHCHGRSKDPVLNVHHLESRRTGSDSPDNLITLCETCHKALHRGEITLKAKRGQSFRAQAFMGIMRREVLNRLKASYPELKVHETYGYLTKHARIANGIVKSHGADAFCIAGNLGAERLGEFFFQKQTRRNNRQIHKLSILKGGIRKRNQAPFEAKGFRLFDKVACQGEEGFIFGRRSSGSFDVRKLDGTRISAGISCKKLRLLEKRRTYLTEIRKEEALPPLPEGRGLRA

SEQ ID NO: 4663 - protein, 417 aa, unidentified
MPCSPAKARLLLKEKKAIVKRRTPFTIQLTIATGEAKQPVALGVDSGYKHIGLSATTEKAELYASEVELRQDITDLLSARLALRRSRRSRKTRYRAPRFDNRVASKRKGWLAPSVENRIAAHMSRVEAVMRVLPVTAITVETAAFDTQLLKNPDIAGEAYQQGEQLGFWNVREYVLFRDGHVCQHCRGKYNDPILNVHHIESRRTGGDVPNNLITLCETCHKAFHRGEIELKVRRGKSFKAETFMGIMRWTLFERLKKAHPELRVRNTYGYLTKHKRISHGIAKSHCADAYCIADNLGAKRLEGFFFQKQTRKHNRQIHKLSILKGGLRKKNQAPYEVKGFRLFDKVICKGEEAFIFGRRTSGSFDVRRLDGTRIPAGINYKKLRLLEPRTTYLTEFRMEAALPPLHECRGFRAEFL

SEQ ID NO: 4664 - protein, 453 aa, Anaerotruncus sp.
MSVAVLSSTGQKLMPTSNYRARKLLKSGRAAIECYRPIFTIRLTDREEGKTQPIEYACDTGYQHVGVSIKSEKHELVHAQYDMLSNETERHNDRRKYRRTRRNRKRYRKPRFDNRSRKNQEMAPSLRHRKENQINLFESFCKVMPITSATFEMGKFDTQLLQAIADGKPLPEGKDYQQGLKYLFQTEREAVFSRDHYTCQVCGKSVKDGVILHTHHIGFWKGYRPNRISNLLTVCEHCHTAKNHKPGGALWGLEPKSTNLAAATYMSTVRWAIYRELVLKHPEIDIHIQYGAKTSVTRKSLHLAKTHANDAYCVGSLHPRHRTAELVYQKKRRNNRILAKFYDAKYIDIRDGAKKSGAVLSCGRTNRRESRRSDKNQRIYRGNKCSSGRTSVRENRYAYQPGDTIVFHSQRFVVNGSHCKGARVILDTGKSVKATDLTCIKKEGGWRFLPAQA

SEQ ID NO: 4665 - protein, 442 aa, unidentified; identical to SEQ ID NO: 2939

SEQ ID NO: 4666 - protein, 443 aa, Anoxybacillus sp.
MVEENMTCFMQRKGENPMVFVLDTNKRPLAPCHEAVARKLLKQGKAAIYRRFPFTIILKKSVDESEIKATYRLKIDYGSRHTGLAILRGQEVVWLGQLDHRTDIKERIDKRRAFRRARRNRKTRYRKPRFLNRKRKEGWLPPSLESRMQNIKTWVERLRKICPIEHISYENAKFDTQLMRNPEINGVEYQQGTLQRYEVREYLLEKFGRKCCYCGKEGVPLEVEHIIPKSRGGTDRIDNLCLACRDCNQRKGSQTAEEFGYPHIQEMVKKTLKDASVVNATRWKVYEVLKQSGCEVECGTGARTKMNRIRLGLPKIHYFDACCVGKSTPLQLHFKTKEVLFIKAKGRGSRSRTNLDRYGFPRGYLARQKYFFGFQTGDMVKANVPKGKYQGVWFGEVACRKTGSFDIKGKDGKRIAQGINYRYVQVIQRFDGYAYGKGVAELA

SEQ ID NO: 4667 - protein, 442 aa, unidentified; identical to SEQ ID NO: 3218

SEQ ID NO: 4668 - protein, 428 aa, unidentified
LKVFVLNMRGRPLMPCSPAKARHLLKAGKAVVRRRTPFTIQLRIATGETKQSVTLGVDAGAKHVGLSAATEKEEVFASEVELRQDITGLLAARLSLRRERRQRKTRYRAPRFLNRVRSKHKGWLAPSVENRIQAHMSRIDAICELLPVTKIVIETASFDIQKIKHPDVEGTDYQQGDQLGFWNVREYVLFRDGHVCQHCHGHAKDKILNVHHLESRQTGGDAPNNLITLCETCHKAYHAGKIKLKVKRGQSFRAEAFMGIMRWTLLDRVRKAHPDLPVENTYGYLTKNTRITLGLPKTHCVDAYCIAGNLKAVRRGVCLHQRQVRKHNRQIHKCTVLSKTLKDGTKIGYRKLNQTPHLVKNFRLFDKVRCLGQTGFIFGRRSSGYFDVRRLDGVKISSCISYRKLTLLEKRGTCLTELRKEDGASSTV

SEQ ID NO: 4669 - protein, 424 aa, unidentified
MVYVISQDGKPLMPCSNPIARLLLKQGKAKVKKREPFTIKLTYEAPNYTQDLTLGVDTGSGTIGTAVSKDNGDIVYMSEVVVRNDITDKMTQRAKYRRNRRNRKTRYRKARWLNRASSIKKDRFSPTMQSKLHSHVREIEYIQSILPITEMVFETGQFDMHLMKNPSLANPKVRPWGYQKGTNYGFENTKAMVLNRDNYTCQCCKGKHKDSKLEVHHIVFRSQGGSDEESNLLTLCHTCHKDLHSGKINLKLSGKVKGNLKYATQMNSIRKQLFRLYPNAIETFGYVTKANRLHLGVDKEHYYDACTIATQGNAFNVKSNLYKKKCVSDGDFQKTKGIHSEQPIVTDKICGFRKFDKVRYFGNDYFIKGRMSTGYAILMDIDGDKVDFSAMPKGYKTPKMVNLKRLEARSTWMITTVEVTPNIA

SEQ ID NO: 4670 - protein, 469 aa, Streptomyces sp.
VEHVRGEITDESPGIGGVTPGHEVGEKAREGHPVVFVLDKHHEPLQPTSPARARRLLASGRAVVARHTPFVIRLKDRTVGFSEVDGVEVGIDPGSKHTGIAVFTERSGTRRGLYTIELAHRGALIRDRLTARAACRRGRRTRNLRYRAPRFHNRTKPEGWLAPSLRHRVDTTVSWAGRLARWAPVRAVHVERIAFDTHVLSAQRPLDGVEYQHGTLRGTEAREYLLAKWGRTCAYCGTTGVPLNIDHIHPKSRGGSDRIGNLTIACIPCNQAKNNTPVTEFLSKDPRRLASVLAQAAVPLQDTAAVNATRSALCEALTKGFPTVHLASGGRTKWNRTRAGLPKSHTLDALCVGDLQTIGRVPSVVLVITATGRGSYSRTRADRYGFPRLRLPRQKQFFGFQTGDLARAVVPTGKNVGTHSGRIAVRASGSFNVRTLHGVVQGIRHNHFRLIQRADGYAYNTRPEGRDEA

SEQ ID NO: 4671 - protein, 420 aa, unidentified
MQYVYVLSKHGEPMMPCSPGKARLLLKQQKACVVRRTPFTIKLLYGSAGYKQPITLGVDAGSKHVGLSASTEKRELYREEFTPRNDVVELLSTRRQNRRSRRNRKTRYRAPRFDNRVHSKHKGWLAPSVEVKIQEHITVIKHICKILPISLVRVETAEFDTQRLKAMLAGKPLPVGTDYQLGEMYDEYNVRQYVLKRDNYTCQCCGAHTTAKKLVKLHVHHLESRKTGGNAPSNLVTLCTTCHKNLHKGKVTLDGKERGKPLRDAAFMGIMRKTLMARLKKELPIPVQGTYGYITKMRREQNDIKKSHTNDARCISKHPLAEPCSVCYRTKAIRHHNRQTHKANFSKKGIRKRSQMPYLVEGYRLWDKVLYKEQECFVSGRRSSGSFTLKKLDGTSVSKGVTFKKLRLLEPATNYLIERM

SEQ ID NO: 4672 - protein, 444 aa, unidentified
VLLLLKRTAVFTAHLETRNKEIPKLMQGRKKARRARRTNGRRCRRQRRAKANGTISKKCVKQTTAQNGSVSKRAKKIGVIKRHLPGCEKKVLCIGIKNKEAKFSNRTRPEGWLTPTANQLLQTHINLIKKIRKFLPVNDVVLEINKFAFMQLDNPNIQKWQYQQGPLYQKASLEEAVSEMQEHHCLFCKQSIVHYHHVVPQSENGSDTIGNIVGLCTKHHDLVHKDTAWQKKLAKKKTGLNKKYGALSILNQIIPALTKELSSLFPKHFFATNGKSTHDYRAAHDVSKDHWLDAYCIACSILPNDTCDKNINGRVPYKLKQFRRHDRRALHKENMSRVYTLDGKKVATNRHKAIKQTTDSLEEFRQRQPNDVCKLKVKEHHPEYRNPERNFPGCVFLVGKHTHVMQGTSGSHNGKADGYYDTNGNSYPSGKCKFVAKNKGIVFA

SEQ ID NO: 4673 - protein, 428 aa, Vibrio sp.
MRLKHSDTHNSKEKHAMFVFVLNKNGVPLMPCKPQKARVLLKRGDAKVVKRTPFTIKLIGGSSGYKQKLVAGMDTGSKTVGCAVVGLGKVVYQSQVALRQDVSKKMEQRAMYRRNRRGRKCRYRPARWANRASMRATGRLAPSLKSKLESHLRERNFVESIMPISEWKVETASFDIHKITNPEVKGKGYQNGAQKDFYNVKAFVLHRDGYKCKSGRKGKHSNKLHVHHIQFRTDGGTDTPTNLITLCETCHADLHAGKFELKAKKSRTKHATEIGIIKSRLKKEWQFTETFGYETKFKREQILGLPKEHFYDAVAICLEDGELAKQNDFIFFKRHVSKGDYQLTKGSRSEKRMPVGKLFGFKKHDFISTPQGNGFVKGKRSSGYFALETITGERVHASANVKKNAVRVSARTTTLIQKMERASNSSSR

SEQ ID NO: 4674 - protein, 471 aa, Caldicellulosiruptor sp.; identical to SEQ ID NO: 3375

SEQ ID NO: 4675 - protein, 289 aa, unidentified
KIQEHITIIKRICKILPISLVRVETAEFDTQRLKAMLAGKPLPVGTDYQLGEMYDEYNVRQYVLKRDHYTCQCCGAHNTAKKVVKLHVHHLESRKTGGNAPSNLITLCTTCHKNLHKGKVTLDGKERGKPLRDAAFMGIMRKTLMARLKEELPIPVQGTYGYITKMRREQNDIKKSHTNDARCISKHPLAEPCSVCYRTKAIRHHNRQTHKANFSKKGIRKRSQMPYLVEGFRLWDKVLYKGQECFVSGRRSSGSFALKKLDGTSISKGVTFKKLRLLEPATNYLIERM

SEQ ID NO: 4676 - protein, 424 aa, unidentified
MRVFVFNMRGRPLMPCSQRKARLLLRENKAMIYKYHPFTIQLTYTTGETKQDCHIGIDTGSKYIGAAVRSEDKVFWKGEIELRQDIRSNLDTKRIYRRSRRNRKTRYRKPRFLNRKRRDEWLPPSLQSRINHTFHWIDTLSSLVPNPILHIEVGKFDVAKMINPEIHGVDYQHGQTYGFFDERYFVFARDNYTCQCCGKSKNKILNTHHIIYRSNGGTNRVDNLITVCTDCHTLQNHRKGGIFYQWQEQHKKVKQYKEPPFMNTLRKRIFVAYPDAEITYGSETTPKRKAMKLDKTHYNDAIVISGINEIKENPEEWLLIKQFRKKKRSLHEATARKGRKKPNRNQTRNSKNTPYYKGFYLNDKVSVFGKSGYITGFTSNAAYIKDENNDYITLPNKTYKQVSINKMKLECHNNNWQYIIKNAV

SEQ ID NO: 4677 - protein, 423 aa, Microcoleus sp.; identical to SEQ ID NO: 2653

SEQ ID NO: 4678 - protein, 468 aa, unidentified
LAVFVLDRSGKPLMPCSEKRARLLLARGRARVHRFMPFAIRLVDRELHSSVAQPLRIKLDPGSKATGLALVRDTEQDGASTGEIHRGAVVLNLFELVHRGRQISEALTARRAMRRRRRGTLRYRAPRFLNRTRPAGWLAPSLQHRVDTTLAWVKRLQHWAPITAASTELVRFDMQALDNPEVTGIEYQQGTLFGYELREYLLEKWTRKCCYCDVQNVPLNIEHLVPRARGGSNRVSNLAIACVPCNIRKAAQPFDVFVKDKARLARITAQVRRPLKDASAVNATRWALVNALRATGLPVETASGGRTKYNRSQLGIPKTHALDAVCVGEVSAVVAWRKPTLQVKCTGRGSYQRTRRDRYGFPRGYLMRSKRVHGFGTGDHVQAEVPSGRKAGTHRGRVAVRATGSFNIQTYGQVVQGVAHRYCRVLQRADGYGYSRMATHKGEAGVGAATQPGLSLPGPKAEVSRAEG

SEQ ID NO: 4679 - protein, 443 aa, Oligella sp.; identical to SEQ ID NO: 3678

SEQ ID NO: 4680 - protein, 325 aa, unidentified
RKTRYRAPRFDNRIRTKRKGWLAPSVENRINAHLSRIETVIRLLPVTKITVETTSFDMQLLKNSDIAGKKYQEGEQLGFWNVREYVLFRDGHVCQHCHGRSKDPVLNVHHLESRRTGGDSPGNLITLCETCHKALHRGEIKLSAKRGQSLRAEAFMGIMRWEVLNRLKLSHPELEVNNTYGYRTKHARIANGIAKSHCADAFCIAGNLGAKRLGEFFFQKQTRRNNRQIHKLSILKGGLRKRNQAPFEIKGFRLFDKVACKGEEGFIFGRRSSGYFDVRKLNGTHISAGISCKKLRLLEKRQTYLTEIRKEKALPPLPEGRGLRA

SEQ ID NO: 4681 - protein, 613 aa, Parasutterella sp.
  VARIANT 124: note = X can be any naturally occurring amino acid
  VARIANT 398..449: note = X can be any naturally occurring amino acid
  VARIANT 590: note = X can be any naturally occurring amino acid
MPCSPAKARLLLKEKKAIVKRRTPFTIQLTIATGETKQPVSLGVDTGYKHVGLSASTEKAELYASEVELRQDITDLLSARRALRQSRRNRKTRYRAPRFDNRIRTKRKGWLAPSVENRINAHLXTPFTIQLTIATGETKQPVSLGVDAGYKHVGLSASTEKAELYASEVELRQDITDLLSARRALRQSRRNCKTRYRAPRFDNRIRTKRKGWLAPSVENRIDAHLSRIEAVLRLLPVTKITVETASFDMQLLKNPDISGKEYQEGEQLGFWNIREYVLCRDGHVCQHCYGRSKDPVLNVQHLKSRRMGGDSPGNLITLCETCHKALHRGEITLKAKRGQSFRAEAFMGIMRWEVQNRLKASHPELEVNNTYGYRTKHARIANDIAKSHCADAFCIAGXXXXXXXXXXXXXXXXXXXXXXXXXXXXXXXXXXXXXXXXXXXXXXXXXXXXWEVQNRLKASHPELEVNNTYGYRTKHARIANDIAKSHCADAFCIAGNLGAERLGEFFFQKQTRRNNRQSHKLSILKGGIRKRNQAPFEVNGFRLFDKVACKGEEGFIFGRRSSGFFDVRKLDGTRISAGISYKKLHLLEKXKRFFDCCRSQRSPWKRRLSTCSC

SEQ ID NO: 4682 - protein, 443 aa, Caldicellulosiruptor sp.; identical to SEQ ID NO: 2385

SEQ ID NO: 4683 - protein, 415 aa, unidentified
LMPCSPAKARLLLKEKKAIVKRRTPFTIQLTIATGESKQPVTLGVDAGYKHVGLSASTEKAELYASEVELRQDVSDLLSARRALRQSRRSRNTRYRAPRFDNRIRTKRKGWLAPTVENRINVHLSRIETVLRLLPVTKITVETASFDTQLLKNPDIAGKEYQEGEQLSFWNVREYVLFRDGHVCQHCHGRSKDPVLNVHHLESRRTGGDSPGNLITLCETCHKALHRGEIKLKAKRGRSFRAETFMGIMRWGVLNRLKASHPKLEVHNTYGYRTKHARIANGIAKSHCADAFCIAGNFGAKRLGEFFFQKQTRRNNRQIHKLSILKGGIRKRNQAPFEVKGFRLFDKVACQGEEGFIFGRRSTGYFDVRKLDGTCISAGISYKKLHLLEKRRTYLTEIRKEEALPPPPEGRGLRA

SEQ ID NO: 4684 - protein, 275 aa, unidentified
LTHQFKKGVPVMVYVLDKNGQPLMPTDRHRKVRLMLQSGQAKVIKRCPFTIQLNYDSGHQTQEISLGIDAGSKHIGVSATTKIKVLYEADVELRNDIVDLLSSRRELRRGRRNRKTRYRQAKFNNRRRGNGWLAPSIRQKIGTHLTVVENICKILPISRIMVETASFDIQKIKNPDIQGAEYQQGDQLEFWNVREYVLFRDGHICQCCKGKSKDKILNVHHIESRKTGGNAPNNLITLCETCHTGYHKGTVQLPKAIKRGMRFKDAAFMGIMRWA

SEQ ID NO: 4685 - protein, 457 aa, unidentified; identical to SEQ ID NO: 3236

SEQ ID NO: 4686 - protein, 504 aa, unidentified
MAWEAIQTRRIKHHDIGEGTLRRHAAGTVSFPVLCKNRKETLMSVLVIGRNGRALMPTNPRKARLLLKKKTASVVCRHPFTIQLLYKTGCATQEGCIGIDTGSQHIGVGITCGDRVILKDEHALRSSMEKRSLLATRTVMRRGRRYRKVRYRKPKWRHHTKRMYFEKANRRGQHWRKVKTTTQSPRLKGWLPPSLQSKCDHHFRIIDRYLKYLPDPITRNLVIEAGRFDMARMNDPTIHGEMYQRGPMYDAENLRAYIFARDNYQCACCKAKAGTTRKADGTTVKLVAHHILFRSRGATDNPKYIISVCDHCHTTKAHQPGGILYSWMENNKKVARGLRDATFMNILRKRLFARYPQAAFTYGNITAADRKQLRLPKSHANDAVAISLFGKEASTVKNICQTMHYKQIRKSKRSLHEAIPRKGRKNPNTKAVRNKKNTTQANGFKLWDSVLADGKKLFICSFTGTSAYLIDKNGCYISQPGKTYKQWPLSKLKRLHPNGNWLMA

SEQ ID NO: 4687 - protein, 429 aa, Ktedonobacter sp.; identical to SEQ ID NO: 3689

SEQ ID NO: 4688 - protein, 419 aa, unidentified
MVYVISQDSKPLMPCSNVIARLLLKQGKAKVKRREPFTIKLTCETTNYTQDLTLGVDTGSGTIGTAVSKNNGDIVYMAKVVVRNDITDKMAQRAKYRRNRRNRKTRYRKARWLNRANSIRNDRFSPTMQSKLHSHIKEIEYIKSILPVTEMVFETGQFDTHLMKNPSLINPKVKHWGYQKGTNYGFENTKAFVLNRDNYTCQYCKGKHKDSKLEVHHIVFRSQGGSDEESNLITLCHTCHKDLHSGKINTKLSGKIKGNLKYATQMNSIRKQLFRLYPNAIETFGYVTKANRLHLGVDKEHCYDACTIATQGNAFNVKSNLYKKKCVSDGDFQQTKGIRSEQPIVTDKICGFRKYDKVKYFGREYFIKGRMSTGYAILMNINGEKADFSYLPRGFKTPKLSNCKRITARTSQMVQAVAI

SEQ ID NO: 4689 - protein, 546 aa, unidentified
MQKHIPTKAKAPTKAGGCARALKGSLSGCDQTQPAVPQGTDRATWGTTSKNTPADNLSSPPLCNPNATPAPGKGERIGKPVPKAGRRIPHLVEDNLTPKGASPMGATPRKGSFNRVLVLNQDRTPAMPCTPARARRLLSAGKAAVLRFQPFMVILKYNTQGKQPLQLKTDPGAKTAGLALTLQTKTGGKVIWAAELAHRTDIKHALLQRKAQRRGRRQRKTRYRAARFQNRTRPKGWLAPSVKNRVLRGTTWTQRLIRWTPITHLVIEPVKFDTQLMADAEISGIEYQPGTLQGYEVRQYLLEKWDRQCADCGRDNRPLTSDHIIPRSRNGSNRILNLTLACQPCNQDKGSRTAAEYGFPDLQPSTLGLQAAAITNTIRWQLVDALKTTKLPIEYGSGGRTKYNRTQQNYPKAHWIDAACAGPSGEAVQLNPHQQVLRISALPRNNRRMVRPDTFGFTKGQPKGPSNVKGFRTGDLVKAVVPTGTKRGSWYGRVAVRASGNFKVGQRDGIPVRYLAKLQHNDGYNYEPITSTFLPGLKARGASAIC

SEQ ID NO: 4690 - protein, 512 aa, unidentified
MSTVYVLNKDGKPLMPTTRCGHVRRLLKEQKAQVVTSKPFTIQLLYETDDVVQPLYLGIDPGRTNIGVAVVKIDGTAVFTAHLETRNKEIPKLMQGRKKARRARRTNGRRCRRQRRAKANGTISKKCVKQTTAQNGSVSKRAKKICVIKRHLPGCEKEVLCIGIKNKEAKFSNRTRPEGWLTPTANQLLQTHINLVKKIQKFLPISDVVLEINKFAFMRLDNPNVQKWQYQQGPLYQKASLEEAVSEMQEHHCLFCKNTIDHYHHVVPQHKNGSNTIGNIVGLCAKHHDLVHKDTSWQEKLAKKKTGLNKRYGALSVLNQIIPALTKELSSLFPKHFFATNGKSTYDYRAAHGVSKDHWLDAYCIAGSVLPNDACDNNINSHVPYELKQFRRHDRRALHKENMSRVYTLNGKSVATNRHKAIKQTTDSLEEFRQRQPNDVCKLKVKEHHPEYRNPKRSFPGCVFLVGKQTHVMQGTSGSHNGKADGYYDTNGNSYSSGKCKFVAKNEGIVFA

SEQ ID NO: 4691 - protein, 432 aa, unidentified
MSKVYVLDKNGQPLMPTTRSGWVYRALRDGKAKVVSKCPFTIKLLYESTGFTQPLTLGVDTGSKYVGSAVINDITSEIVYESQTELRDDIKSKMDRRRQFRRIRRNKLCYRPMRFNNRNASKRKERYSPTLISKFQGHKREIEFIKSILPISDVILEVGEFDLQLLQDPILAYHKWDYAKGELYQQENFKQATKARDGYQCQCCGKKNCRLEVHHLLPRSRGGSDKLANLITLCTDCHHLAHSSEEQLLAFQKKFGNRVKGTLNYATQMNVLRSMLQKEYPDAELTYGFITKEMRRVFGLEKSHTIDACCIASRGSEFYNENSNKYKKKCVPKGSYPRTGVKGGKFVVLPKGKISGLKRYDKVLYNGKEYFVVGRRTTGYIYLIDVDNNRVQTERTKRTTGEKYMSKAIIKVALVRKVASAKSCVCVRECED

SEQ ID NO: 4692 - protein, 515 aa, unidentified; identical to SEQ ID NO: 2918

SEQ ID NO: 4693 - protein, 397 aa, unidentified
MTPKVFVIDNSGKPLLPTHPARARKLLRAGKAKVIRVVPFCIKLERIIENPVGSFTIGIDDGAKEVGIAVVNEVKKEVVFRGTIKLRQDVSRKIKQRAQLRRTRRCRKVRHRKARFSNRKQKTPQPSIRQRKESIVRVVCDLKKVLNITKAVIEQGQFDVSSFAASRKLVSTEFQQSEYEGKNFRAKVLWRDEYTCQRCGRKEKLNAHHILGKGKGGTNTPKNGITLCKKCHDELHQGKWNLDKKPKTFKYPMHLMQGKWYISQLLKKEGLSVKRCVGWMTAYWRKKIKIEKSHPNDSIAMVTKNYMPTIASMEYTILPKRAKVWEDNPTKKSEEKMGFRHYDLVKAKHRTKGWIVGSVRALKAKVMTLRTNFHSNFPVSYSKSTLLTRFSRIIYFY

SEQ ID NO: 4694 - protein, 406 aa, unidentified; identical to SEQ ID NO: 2874

SEQ ID NO: 4695 - protein, 435 aa, unidentified
MRMVYVLNQNGQPLMPTKNHAKVRVLLKTDRAKIISRCPFTIQLLYETGSYTQEITLGVDTGSKHIGLSATTEKDVMYEAEVELRNDIVKLLSTRREQRRSRRNRKTRYRKPRFDNRRRKDNWLAPSVQNKVDTHLTTVSKVTKMLPISKIIVEVASFDLQKLKADMEGIKRPEGVDYQNGEQSGFWNVREYVLSRDNHTCQCCKGKSKDKILNVHHIESRKTGGDAPNNLITLCEYCHSQYHKGNIKLPEKIKRGMSFKDAAFMGIMRWTFYNKLKEMYIPSGIEVKLTYGYITKNIRIKNQLPKEHCIDARCISGNPKAQSDGTVYKLKKVRCHNRQIHKCTINKGGARKLNQAPHTVFGFRLFDKVLYKNQECFIFGRRIDGRFAIRMLDGTKINEQLNYKKLKLVECAKHYITERRQVLCSAASYGVPAPD

SEQ ID NO: 4696 - protein, 382 aa, unidentified
LYQSTKEIQPVSLGVDAGSKHIGLAATTEQKVVYQEELIPRNDVVKLLSARRASRRSRRNRKTRYRKPRFNNRVHSKHKGWLAPSVEVKIQEHITAIKNVCKILPVSEIHVETAEFDLQRLKAMEEGKPLPVGTDYQLGEQYDFYNTRQYVLHRDGYTCQCCGTHDNDVKLHVHHIESRQTGGNAPHNLITLCEHCHKALHEGKIELPKGRKRGKSYRDAAFMGIMRNTLLKRLKKEADVPVTMTYGYITKYWREKVGLEKSHINDAICISKHPYAKPLNAYYLTKAVRRHNRRIHNVNFSKGGIRKRKRASHLVKGFRLFDKVLYQGKSYFIFGRRATGFFDIRTLDGVKVNKGSISYKKLKIQDTAKAYLKEVRIIPHIG

SEQ ID NO: 4697 - protein, 414 aa, unidentified
MPCSPAKARLLLKEKKAIVKRRTPFTIQLTIATGETKQPVSLGVDAGYKHVGLSASTEKAELYASEVELRQDITDLLSARRALRQSRRNRKTRYRAPRFDNRIRTKRKGWLAPSVENRINAHLSRIEAVLRLLPVTKITVETASFDMQLLKNPDISGKEYQEGEQLGFWNIREYVLCRDGHVCQHCYGRSKDPVLNVHHLESRRTGGDSPGNLVTLCETCHKALHRGEITLKAKRGQSFRAEAFMGIMRWEVQNRLKASHPELEVNNTYGYRTKHARIANDIAKSHCADAFCIAGNLGAERLGEFFFQKQTRRNNRQSHKLSILKGGIRKRNQAPFEVNGFRLFDKVACKGEEGFIFGRRSSGFFDVRKLDGTRISAGISYKKLHLLEKRRTYLTEIRKEEVLPPLPEGRGLRA

SEQ ID NO: 4698 - protein, 483 aa, unidentified
MKVYVIGLNGIGLAPTTPRKARLLLKNGRAKIAFRQPFTIQLTYKTGCTHPKEMVIGIDTGSQHIGAGIISKETEQVVSKEEYELRSSMEKRSLLETRKAYRRGRRYRKVRYRHPKFKPATRRVYVEKPITQNKHQTHWKKQTNTFDSARPEGWLPPSIQSKLDHHIRIISRYQNALPKDTQLRIEVGRFDVQHMENPQIRGNMYQKGAMYEYENKKAFIFSRDGYTCKCCKCKAGSKRKDGTTVKLVVHHVDFRSQGASDNPNRLVTVCDRCHTTAAHKPGGILYDWMLKEKKFTRGYRDTSIMNILRRRLWQAFPDAAFTYGNITAADRKILHIDKTHGNDAVAIAAHGMDRITDIPNTTYYRQMRKQKRSLHEATPRKGRKEPNRTAKRNAKNTCVVKGIYLNDKVKAFGQTGWVTGFSGTSSVYIKNREGEYITVPGKNHKMVPLAELSVRTHCNNWAVSDIKTISNRRQENCDAEMCM

SEQ ID NO: 4699 - protein, 414 aa, unidentified
  REGION 1..414: note = Ga0307928_10015881
MLAFVLNSEGHPLMPCKPQKARKLLKLNKARVVIKFPFTIKLKFGSSGYKQNLIAGMDTGSKVIGTAVVTEQGKAIYQAETTLRGEQIKKKMDTRRMYRRTRRGRKTRYRKPRFLNRAASTRIGRLPPSVRHKIESHLNEKKFIESILPISKWRVELASFDIHALSNPNVSKSAWWTYQKGDMYGYQNLKHYVLNRDKYVCQICKKKTKNNTKLHVHHIKFKSNGGTNTKNNLITLCELCHDTLHKKKNAQDISFKLKPKATNTKHATEVSVVSARLRKSNWAFEETFGFITKVDRMEQDLPKRHFIDAAIIASSGHPVTISKEIILRRKVSKGDYQQTKGVRSERRIPTGKLFGLRKFDLVKTAKGHIGFVKGKRSTGYFSIGDIHGKPIKETSIKKNCKRITARTTTLSCYE

SEQ ID NO: 4700 - protein, 346 aa, Arthrospira sp.; identical to SEQ ID NO: 2872

SEQ ID NO: 4701 - protein, 420 aa, unidentified
MQYVYVLNKHGEPLMPCSPGKARLLLKQQKAHVVKRTPFTIKLLYGSTGYKQPITLGVDAGSKHVGLSASTEKRELYSEEFTPRNDVVELLSTRRQNRRSRRNRKTRYRAPRFNNRVHSKHKGWLAPSVEVKIQEHITVIKRICRILPITLVRVETAEFDMQRLKAMLAGKPLPVGTDYQLGEMYDEYNVRQYVLKRDNYTCQCCGAHTTAKKTVKLHVHHLESRKVGGNAPSNLITLCTTCHNNLHKGKITLDGKKRGKTLRDAAFMGIMRNTLLTRLRNELNIPVQNTYGYITKLLREQNDIKKSHVNDARCISKHPLAKPCSVCYRTKAIRHHNRQIHKAKILKGGIRKANQAPYIVKGFRLWDKVLYNGQECFISGRRTSGYFALRKLDGTTITNSISFKKLRLLEPATNYLIERK

SEQ ID NO: 4702 - protein, 442 aa, unidentified
MSTTVFVLDKKHRPLMPCRPARARRLLRAGRARVVKRFPFVIRLVDRTVEQSEVQPVHIKLDPGSRETGAAVVRDDGKKRHHALAFFVIEHRGGAIRDALKARSAFRRRRRSQNLRCRSPRFLNRVKPKGWLPPSLRHRVETTLSFVRRMCRYLPVSGIATELVKFDSQKLQNPEVSGVEYQQGTLFKYEVREYLLEKFGRKCVYCGAEGVLLNIDHVVPRAKGGSNRVSNLVLACMSCNQKKGARSLEDFLKGKPKVLARVRRELKTLLRDAAAVNATRWVLFNELKATGLPVETGSGALTKLNRHAFGVEKEHWLDALCVGRLNGVVTRKGLNVLEIRCMGRGSRQRTRLTKYGFPRGYLMRQKCVHGFATGDMVEANVPKGKKAGLWRGRVAVRVSGSFNIQTPKGVIQGVGWKHCRLISHNDGYGYAWLGHAPHSSPA

SEQ ID NO: 4703 - protein, 386 aa, unidentified
LTIATGESKQPVSLGVDAGYKHVGLSASTEKAELYASEVELRQDITDLLSARRALRQSRRNRKTRYRAPRFDNRIRTKRKGWLAPSVENRINAHLSRIETVIRLLPVTKISVETTSFDMQLLKNSDIAGKEYQEGEQLGFWNVREYVLFRDGHVCQHCHGRSKDPVLNVHHLESRRTGGDSPGNLITLCETCHKALHRGEITLKAKRGQSFRAETFMGIMRWEVLDRLKASHPKLEVQNTYGYRTKHARISNGIAKSHCADAFCIAGNLGAERLGEFLFQKQTRRNNRQIHKLSIPKGGIRKRNQVPFEVKGFRLFDKVAYKGEEGFIFGRRSSGYFDVRKLDGTRISAGISYKKLHLLEKRQTYLTEIRKEEALPPLPEGRGLRA

SEQ ID NO: 4704 - protein, 413 aa, unidentified
MTSYAFVLDANGKQLAPTKEQKAWFFIRKKRASLVSKYPIVIQLMKEIPEKEICQDEIRCGIDDGGLHVGIALVQKCKTKNKVVFKGTMEQRNDVKHLMEVRRGYRRYHRYHKRYRQARFDNRKSSKREGRIAPSILQKRQATIRVIHWLNKWINITNYWLEDVSVDIRALTDGYQSYRWQYQKSNRLDENIRKAAILRDGGKCMECGKSNCRLEVHHIKPKRRNGSNTLDNLITLCESCHQKTEGQEELYMDRYFSLLKSSDNKNLNYAQHVMIGKMWLRKQLSGLGVLYLTSGGDTANKRIDWNIEKSHTNDAVCITDLQPDTCDIKEWAIKPMRRQSKAKTDHVLGIHHRDLVEYTFKNGETHRGYVTALYPDQKAINFQSQTKHCKKVNARKCKLLWNYSKIYWFENAS

SEQ ID NO: 4705 - protein, 455 aa, unidentified
LSVFVLDRRGMPLMPCSEKRARLLLARGRARVHKVVPFVIRLTDRSTEDSEFQLLRLKLDPGSKTTGLALVLDKAGTSVGVLNLFELVHRGRQISEALMQRRRFRHRRRGANLRYRAPRFYNRARQRGWLAPSLRHRVETTMSWVRRVLRWAVVSAISMELVRFDMQALQSQNIAGVEYQQGALFGYEVREYLLEKWGRRCAYCDARDVPLQIEHVLAKARGGSNRVSNLTLGCGPCNLKKGERDVRGFVKDKARLARILAKAKTPLRDAAAVNATRWVLLNALRSTDLNVEIGSGGRTKWNRTRLGLPKTHALDAACVGTVHAIFGWQRPTLELKCSGRGSYQRTRLTGYGFPRGYLTRQKRIHGFQTGDRVRATVPTGKKAGTHVGRVAVRANGNFNIQTPQGVVQGIAHRHCTMMQRADGYAYAIVPLKRGKDQGPAQQQGAYRASCYPSPA

SEQ ID NO: 4706 - protein, 427 aa, Nostoc sp.
MSKVFLIDSEKRPLNPIHPAQARQLLRNKKAAIYRQFPFTLILRKSSAEVSVSSLRLKLDPGARVTGLALVNDATGEVVFAAELKHRGFAIRDALTSRRQLRRSRRARKTRYRKPRFLNRTRPQGWLAPSLQSRVENIKTWVDRLRRFAPITAISQELVRFDMQLMRDPNIQGKEYQQGTLQGFETREYLLEKWNRECAYCGVKDVPFQVEHIQPKSNGGSNSITNLTLSCGRCNIKKGTKDIKDFLKKDPARLEKILKQAKRPLADAAAVNTTRFALLEVLKGTGLSVETGSGGLTKFNRSQQNLEKSHWIDAAAVGVSTPILNIKGVKPLFITSNGHGSRQSCRTDKYGFPSRYVPRFKFVKGFQTGDIIKAIVTTGKKVGEYIGRVAVRSTGSFNISTKNGLIQGISHKYCLAIHKKDGYSYAF

SEQ ID NO: 4707 - protein, 442 aa, Sutterella sp.; identical to SEQ ID NO: 3234

SEQ ID NO: 4708 - protein, 427 aa, Scytonema sp.
LSKVLVIDSEKRQLNPIHPAQARQLLRNKKAAVYRRFPFTLILKESRSDSPVSPLRLKIEPGAKTTGLALVNDITGVVIFAAELKHRGFTIRDALTSRRQLRRSRRNRKTRYRKPRFLNRTRPQGWLAPSLQSRVDNIKIWVEKLRKFAPIEAISQELVRFDMQLMRNPDIQAKEYQQGTLAGYETREYLLEKWDRQCAYCGVKDVPLQIEHIHPRAKGGSNSITNLTLSCEKCNTKKGTKDIKEFLKKDPSRLEKIQSLAKRPLADAAAVNTTRFALLSVLKATGLPVETDSGGLTKFNRNQQNLKKSHWLDAACVGKSTPLLNIKGVKPLLITANGHGTRQSCRTDKFGFPNRHCSRTKFHFGFQTGDIVKAVVTSGKKVGEYVGRIATRATGSFNISTKNGLVQGISYKHCKHIHKKDGYSYAF

SEQ ID NO: 4709 - protein, 408 aa, unidentified
MVYVQDIDGKPMMPTTRHGKVRRLLKDSKAVVVNTCPFTIKLMYKTSDYKQEIVLGVDAGTKHVGLSATTKSKELYSSEVILRSDIVELLSTRRESRRTRRNRLRYRKPRFNNRIKSKRTGWVAPSVRHRIDAHIRVIDNICSILPISRIIVEVAQFDTQKIKNPNISGNEYQEGDQLGFWNVREYVLTRDGHKCQHCKGKSKDPILNVHHIESRKTGGDSPSNLITLCETCHKEYHKGKIDLRVKRGKSLRDAAVMGIMKWKLYEELRSRYDNVSMTFGYITKYNRIKYGIEKSHISDAFVISKNFNALRLGYHYKVRLVRRHNRQIHKQKVLKGGVKKPNQSSFEVFGFRLFDRVMFEGNCYFIFGRRKSGSFNIRDIDGGNQRDITYKKLKLLRCKRFMIQKETN

SEQ ID NO: 4710 - protein, 423 aa, unidentified; identical to SEQ ID NO: 3576

SEQ ID NO: 4711 - protein, 451 aa, unidentified
VLSAWNPFQHWRRITTGRKTEETNLRVLVWNKRGKPLMPCSPAKARLLLKEKKAIVVRRTPFTIQLTIATGETKQPVSLGVDAGYEHVGLSASTEKAELYASEVELRQDITDLLSARRALRQSRRNRKTRYRAPRFDNRIRTKRKGWLAPSVENRINAHLSRIEAVLRLLPVTKITVETASFDLQLLKNPDISGKEYQEGEQLGFWNIREYVLCRDGHVCQHCYGRSKDPVLNVHHLESRRTGGDSPGNLITLCETCHKALHRGEITLKAKRGQSFRAEAFMGIMRWEVLNRLKASHPELEVNNTYGYRTKHARISNGIAKSHCADAFCIAGNLGAKRLGEFFFQKQTRRNNRQIHKLSILKHGLRKRNQAPFEIKGFRLFDKVACKGEEGFIFGRRSSGYFDVRKLDGTRISAGISYKKLHLLEKRQTYITEIRKEKALPPLPEGRGLRA

SEQ ID NO: 4712 - protein, 448 aa, unidentified
MSTGLRAVQAEPAGIRKGDALKVFVLNMRGRPLMPCSPARARHLLKAGKAVVRRRTPFTIQLRIATGETKQSVTLGVDAGAKHVGLSAATEKEEAFASEVELRQDITGLLAARLLLRRERRQRKTRYRAPRFLNRVRSKHKGWLAPSVENRIQAHMSCIDAVCRLLPVTRIVIETASFDVQKIRNLEVEGTGYQQGDQLGFWNVREYVLFRDGHVCQHCHGHAKDKILNVHHLESRQTGGDAPNNLITLCETCHKACHAGKIKLKVKRGQSFRAEAFMGIMRWTLLDRMRKAHSGLPVENTYGYLTKNTRITLGLPKTHCVDAYCIAGNLKAVRRGVCLHQRQVRKHNRQIHKCTVLSKTLKDGTKIGYRKLNQTPHLVKSFRLFDKVRCLGQTGFIFGRRSSGYFDVRRLDGVKISSCISYRKLTLLEKRSTYLTELRKEDGASSPV

SEQ ID NO: 4713 - protein, 431 aa, unidentified
MPNKVYVINKHGRPLMPCSPAKARHLLDAGKAKVKKRTPFTIQLVYGSSGYTQEVILGVDAGSKTIGMSASTTKEELLSAEVKPRNDVVDLLSTRREFRRARRNRKTRYRKPRFDNRVRSKHKGWLAPSVEVKIQEHITSIKRACRILPVSKVVIETAEFDLQLLKAIEEGKPVPQGEDYQKGEMYGHYNVRQYVLWRDNYTCQCCGAHATKKKEVRLHVHHLESRKVGGDAPDNQVTLCESCHEKLHKGLIAEKDFKKRKRRSTRDATFMGIMRKTLMQRLCSELPIPVIETRGYITKATREKLLVLPKSHTNDALAIAQGKQGFNVGYLPGIVQIDKICTIRPVRHHNRQLHKATILKGGIRKSNQTKKYVFGYRLFDKVQFNGQDCFIWGRRTTGIFTIKMINGKMIKDGISFKKLKLVEKSTNYLIV

SEQ ID NO: 4714 - protein, 456 aa, Halomonas sp.; identical to SEQ ID NO: 4333

SEQ ID NO: 4715 - protein, 428 aa, unidentified; identical to SEQ ID NO: 4598

SEQ ID NO: 4716 - protein, 436 aa, unidentified
MQKVFVLDAKKTPLMPCHPARARELLNKGRAAVYKRYPFTIILKDRVGGDVQAVELKFDPGSKTTGIALVGQFERGLEIVFGANLNHRGAKIKQDLESRRANRRARRNRQTRDPSYRRDPARFNNRRRTEGWLPPSLMSRVFNVETWAKRLQRLVPIISIAVETVRFDTQKMQNSEVSGVEYQQGVLAGYEVREYLLEKWGRQCAYCGAENVPLEIEHIKPKSKGGTNRVSNLTIACMRCNQKKSDRSIEDFLKRKPTALKKIKAQTKKSLKDTAVVNATRYAIGNTLKSFGLHVTFWSGGRTKFNRTQQKYPKDHWIDAACVGETGAKVYIPNTLKPLTITAVGHGSRQMCRVDQYGFPRTTAKKQKVVKGFQTGDIVKAVVTKGKKIGTYIGRVAVRASGSFNISTTNGTTQGISWKYCQRIQAVDGYNYSVHT

SEQ ID NO: 4717 - protein, 432 aa, Ktedonobacter sp.; identical to SEQ ID NO: 4450

SEQ ID NO: 4718 - protein, 462 aa, unidentified
VVQPLYLGIDPGRTNIGVAVVKANGTAVFTAHLETRNKEIPKLMQDRKKARRARRTNGRRCRRQRRAKANGTISKKCVKQTTAQNGSVSKRAKDIGVIKRRLPGCEKDVLCIGIKNKETKFTNRTRPEGWLTPTANQLLQTHINLVKKIQKFLPISDVVLEVNKFAFMRLNNPNIQKWQYQQGPLYKKESLESAVSEIQEHHCLFCKKPIDHYHHVVPQHKNGSNTIGNIVGLCAKHHDLVHKDSAWEKKLAKKSTGLYKKYGALGVLNQIIPTLTNELSSLFPKHSFVTNGKSTYDYRAAHGVSKDHWLDAYCIACSVLPSNVCDSNINNHMPYVLKQFRRHDRRVLNNENMNRVYTLNNKAVAINRHKAKDQKTVSLEEFRKEHPDDVCKLKVKEHHPTYRNMNRNFPGSVFLVGKQIHVMQGIASSKDGKATKYNDTSATAIAAGKCKFVAKNTGILFV

SEQ ID NO: 4719 - protein, 471 aa, Caldicellulosiruptor sp.; identical to SEQ ID NO: 3268

SEQ ID NO: 4720 - protein, 431 aa, unidentified; identical to SEQ ID NO: 3801

SEQ ID NO: 4721 - protein, 512 aa, unidentified
MPTVYVLNKDGKPLMPTTRCMHVRHLLKNGKARVVKSKPFTIQLLYETDDVVQPLYLGIDPGRTNIGVAVVKADGAAVFTAHLETRNKEVPKLMKKRKESRCARRTNGRRCRRQRRAKTNGTISKKCVKQTTAQNGSVSKRAKEIGVIKRHLPGCEKDVLCIGIKNKEAKFTNRARPEGWLTPTANQLLQTHINLVKKIQKFLPISDVVLEVNKFAFMQLDNPNIQKWQYQQGPLYQKGSLENAVSEMQEHHCLFCEKPIEHYHHVVPKSENGSNTIANIVGLCTEHHNLVHKDATWQKKLAKEKVGLVKKYGALSVLNQIIPALTKEMNSLFPKHFFATNGKSTYDYRTAHGVSKDHWLDAYCIACSVLPNDVCDSNINSHVPYELKQFRRHDRRVLHKANMSRVYTLNGKTVATNRHKAIKQTTDSLEEFRQSHPGDVCKLKVKEHHPAYRNLNRNYPGSVFLVDGQVHVMQGVSGSHNDKADGYYNTNGNAYPYYKCKFVVKNEGIVFA

SEQ ID NO: 4722 - protein, 439 aa, unidentified
MKVCVVNHHGRPLMPTTPRKARLLLKAGKAQIIQRIPFTIQLLYGTRGHTQPITLGIDAGYATVGYSAVTEKEELAGGELKLLAGISERLSERAMYRSGRRHRTRHRQPRFDNRRRTEGWLAPSIQHKLDSHLRLIERLCAALPITHLLIEVASFDIQRLKDPDIAGVGYQQGEQAGFWNLREYILHRDGHTCQNPACTNRAKEKVLQVHHLGYWRGDGSDRPANLITLCTRCHTPENHLLGGFLWGWEPRLNAFRPETFMSTVRWRLVEAVGAKATYGYLTKSRRIELALPKSHATDAFVIAGGSTQIRAEPLLLEQVRRNRRALQTFYDAKYIDTRTDEVVKAQLLNNGRRTRNRNLNGENLRRYRGLKLSKGRVSIRRQRYPYQPGDLVRYEGQVYRVQGMGGYGRNLKLAGRPKEVKAALVTPVRWRKGICKQVS

SEQ ID NO: 4723 - protein, 338 aa, unidentified
MSNFVLILDPNKQPLTPIHPAKARLLLNQEKAAVFRCYPFTIILKEVVKETPKPITLKIDPGSKVTGLALVQGNQVIWGAELTHRGQQIKDALTSRRQLRRTRRGRKTRYRQPRFLNRTRQKGWLAPSLQHRVETTLTWVKRLIKFAPIDSIAVELVKFDLQKQENPEINGLEYQHGTLFGWEVREYLLTKFNRTCQYCRGTNQPLEVDHIYPRSKGGSDRVSNLTISCHSCNQKKGNQDIKDFLSGKSDLVNRILKQAKSPLKDAAAVNSTRWKLFNSLKELGLTVITGSGGLTKFNRKRLNVPKTHWQDASCVGQTPDNFIFKTNQPLLIKATGHG

SEQ ID NO: 4724 - protein, 472 aa, unidentified
VVDNRLLSIKPLINIGEGVIYSSICTGLSLQTYQKRKEVPCMVYVLDINGQPLMPTTRHGKVRRLLNSHLAKVVKRCPFTIQLLYQSTKEIQPVSLGVDAGSKHIGMAATTEKKVVYQEELSPRNDVVKLLSARRTLRRTRRNRKTRYRKPRFNNRVHSKHKGWLAPSVEVKIQEHITAIKRICQILPISEIHVEISEFDLQRLKAMEEGRTLPVGTDYQLGEQYDFYNTRQYVLHRDGYTFQCCGTHDNNIKLHVHHIESRQTGGDAPSNLITLCEHCHKALHKGKLELPKGKKRGKTYRDATFMGIMRKTLLERLRKEVDVPASGTYGYITKYWRERAGLEKSHINDAICISKYPYAKPLDTYYLTKAVRNHNRQIHKSNFSKGGIRKRNQAPYLVKGFRLFDKVLYQGKEYFIFGRRATGYFDIRTLDGTKVNKGSISYKKLRIQDTAKAYLKEARAIPHMNKFTCVLA

SEQ ID NO: 4725 - protein, 320 aa, Parasutterella sp.
RAPRFDNRIRTKRKGWLAPSVENRINAHLSRIESVLRLLPVTKITVETASFDTQLLKNPDISGKEYQEGEQLGFWNIREYVLCRDGHVCQHCYGRSKDPVLNVHHLESRRTGGDSPGNLITLCETCHKALHRGEITLKAKRGQSFRAEAFVGIMRWEVHNRLRALHPGIEVSNTYGYRTKHARIANGIAKSHCADAFCIAGNLGAERLCEFFFQKQTRRNNRQIHKLSILKGGIRKRNQAPFEVKGFRLFDKVACQGEEGFIFGRRSSGFFDVRKLDGTRISAGISCKKLHLLEKRRTYLTEIRKEEALPPLPEGRGLRA

SEQ ID NO: 4726 - protein, 388 aa, Desulfotomaculum sp.
MAPAFAGHSKVFVVDAEGKPLLPCHPARARKLLKVGKVEVLRGSPFTIRLKYPVENPVGSLRAKVDDGSKWVGIALVNEHTGEVVFRGTLIQRGDVVRLLTLRREYRRNRRYRLVRHRECRNHNRKQLAPFPSIRQKKEAVCRVLTDLAKIAPISGVDVELVAAGVKNPALPGEGAREKVLNRDGACVLCGSEEKLQRHHLVPRSKGGSDTPMNQVVLCEKCHRKIHAGEVSLDREGWTFAWVAHAVLGKAYLLALLSRFGKVRMCEGWRTKEWREGLGLAKSHANDAACLFPPGGPLKIFGPEYLIYPLRRRKWEGNPTKTCEERSGFQHWDIVRAERAGRRVFGCVRSLKARAMTLRTAGDGNFEVSYSKAKLLHRPRGLAYVPVW

SEQ ID NO: 4727 - protein, 440 aa, Ktedonobacter sp.; identical to SEQ ID NO: 3667

SEQ ID NO: 4728 - protein, 544 aa, Blautia sp.; identical to SEQ ID NO: 4004

SEQ ID NO: 4729 - protein, 449 aa, unidentified
VVDIPEGREASASVTRPVRAFIERKTMSVFVLDRRKQPLMPCSEKRSRLLLGRGRALVVRAYPFTIRLKDRAGGITQPVRIKIDPGSKTSGIAVVRESGQKQHVLVLMELAHRGRQISKSLEQRRAFRRRRRNQLRYRAPRFLNRLRSLVPVVSISQELVRFDTQKMENPEVSGVEYQQGTLLGYEVREYLLEKWGRECAYCTDKDTPLQIEHIDPKANGGSSRISNLTLACRPCNQEKGRQPLADFFASSKRLKNHQARLDRILKQCKKPLRDASAVNSARWTLYQTLKQTGLPVEVGTGGRTKFNRCRLRIPKTHALDAACVGEVEIVEGWDVPTLAIKATGRGSYKRTRLTKHGFPRGYLMRQKKVQGFQTGDRVRAIVPTGTKAGTWLGRVAVRKTGSFNIQTSGGAIQGVSYRHCTLTQRADGYGYHIQPNQPKEEGDRENESR

SEQ ID NO: 4730 - protein, 471 aa, Caldicellulosiruptor sp.; identical to SEQ ID NO: 3268

SEQ ID NO: 4731 - protein, 473 aa, Calothrix sp.; identical to SEQ ID NO: 3997

SEQ ID NO: 4732 - protein, 452 aa, unidentified
MSKQTLQREFKNVPTGTPLACSSTSTSLNRLETVSVVSKVLSCNNPEVGLRKQTSGPKAIVFVLSVTGSPLMPCTPAKARHLLEGGKSKVVNLNPFTIKLTFECENRVQEVSLGIDSGYKHIGFSAITKTKEVVSGEVSLDNKTSEKLTKRKMYRKHRRYRLRYKEPRFSNRKTPKGWLSPSIQRRFDTHINVIKRLKELIPVKSMIVEIGEFDIQKLMNPEISGKEYQQGDLYGYNNLKAFLFHREHGRCQLCGKKIVKGEKAHLHHIKHRSETGTNRPSNMALLHEDCHDKLHKKGLYKKLRASKQYKAETFMSIVADKFKEILNCDVTYGYKTATKRSVLGVEKSHVNDAFVISGGTSQKRCLPYKIWQKRINNRVLQTNRKGFAPSIRKKRHKLQNRDFIWIGARKCLCGGVTSRGAQIYYSDGIENKIVYYKKVIKLYSTGSMTWIN

SEQ ID NO: 4733 - protein, 427 aa, Parasutterella sp.
LRVFVRNKRGKPLMPCSPAKARLLLKEKKAIVVRRTPFTIQLTIATGETKQPVSLGVDAGYKHVGLSASTENAELYASEVELRQDVSDLLSARRTLRQSRRNRNTRYRAPRFDNRIRTKRKGWLAPSVENRINAHLSRIETVIRLLPVTKITVETTSFDMQLLKNSDIAGKKYQEGEQLGFWNVREYVLFRDGHVCQHCHGRSKDPVLNVHHLESRRTGGDSPGNLITLCETCHKALHRGEITLKAKRGQSFRAETFMGIMRWEVLDRLKASHSKLEVQNTYGYRTKHARISNGIAKSHCADAFCIAGNLGAERLGEFFFQKQTRRNNRQIHKLSILKGGIRKRNQAPYEIKGFRLFDKVACQGEEGFIFGRRSSGYFDVRKLNGTHISAGISCKKLRLLEKRQTYLTEIRKEKALPPLPEGRGLRA

SEQ ID NO: 4734 - protein, 432 aa, Ktedonobacter sp.
MNVVYVLSSERTPLMPCQPAIARLLLKQGKAKVRHRTPFTIQLLAQPEHVYTQLLTHGVDTGSSIIGSAVANEHGHVVYLSEVEIRNDIANTMKERARARRNRRQRKTRYRPARWLNRKKSIKTGRFSPTMRSKIDTHLREIRFIRSLLPITSTILETGSFDPHALRNPEVLQKKWLYQRGINYGFANTKAYVLTRDGYLCQQCKGKSKDRRLEVHHIIFRSRNGSDEEANLLTLCKTCHDGLHAGTITLKLTGKKKGTLQHATQMNSIRTQLLKRVEAEETWGFVTKEHRLLVGLPKEHIFDAAVIATRGVKPTFYTTSVLSKRCVSDGDYKQTKGKHGQQRVNTGKIMGFRKFDKVYYLGKEYFIKGRMSTGYAILMDIDGNKIEFKPLPKFDKMKRVSARSSWMMKQRTTPNSSFSITSSLSASAGKNV

SEQ ID NO: 4735 - protein, 480 aa, unidentified
MKGENMVIALDRNKRLLGFMGERRCRILLERKRAVLYRYFPTIVILKDVDARKLSGLSSYRIKIDPGAKYTGIAIVRDDTNEFMYAMQIEHRGEQIKKNLDTRRNARGDRRSRETGYRRPKWGNQCTAKEQRQSYDSRRDENWLPPSVKSTADNIISWVRRLSRWINITNCSFESVRFDTQLMENPEIEGVEYQQGTLYGYEVKEYLLEKYGHTCQYCGGKSSDPILEWEHMIPRSRGGSDRLKNATLACHNCNQDKGNHTLEEWQTILQDRLPKERGKQKELDQMRQKYVQQVMEGKAPLKGLRYAAWVNSSRRYSQRHLYLRFPELECSSGGRTKYNRNALGYPKEHHYDALCVGKIPEDGFVDWTHGYYLYAKATGRGTRLRGQLNGCGVIISKWKNRSKTAFGFQTGDLVVANVPKDTKYKYKGRFVGRVMIRKSGSFDIRTLSGELVTVNAKFCRLLQNNSGYQMMIKRAIPLGD

SEQ ID NO: 4736 - protein, 451 aa, unidentified; identical to SEQ ID NO: 3061

SEQ ID NO: 4737 - protein, 415 aa, unidentified
MVYVVANDGQPLMPTERHGKVCRMLKSGIAKVVKKCPFTIQLQYESERNVQPVSLGVDAGSKHIGISATTKTKVLYESDVELRDDIVKLLATRRQLRRRRRSRKTRYRPARFDNRRRKEGWLAPSIRQKIESHLTVVANVCKILPVSQIIVETASFDIQKIKNPDIQGIEYQQGEQMDFWNVREYVFFRDGHTCQCCKGRSKDKILNVHHIESRKTGGNAPNNLITLCETCHKGYHNGTVTLPKNIKRGMKFKDAAFMGIMRWTFYNTLKEQYEPDIPVHYTYGYITKNTRINHNLPKGHCIDARCISGNPDAVSDGTYYYQKKVRCHNRQIHIQTILKGGIRKSNQAEYLVRGFRLFDKVRYQGREYFIFGRRKSGFFDIRTLSGEKVNKGSISVKKLTFADTRKNYLIERRTV

SEQ ID NO: 4738 - protein, 432 aa, unidentified
MLTGLLAEQVDPAGIRKGDTLKVFVLNMRGKPLMPCSPAKARHMLKAGKAVVARRTPFTIKLTIATGETKQDVTLGVDAGAKHVGISATTEKEEVFASEVELRQDITGLLADRLAFRRSRRNRKTRYRAPRFNNRVRSKHKGWLAPSVENRIQAHISRIEAICRVLPITKIVIETASFDIQKIKNPEVEGTDYQQGDQLGFWNVREYVLFRDGHVCQHCRGRSKDPILNVHHLESRKTGGDAPNNLITLCETCHKAYHAGKIKLKTRRGTSFRAEAFMGIMRRTLLDRVRKAHPELSVENTYGYLTKHKRIALGLPKTHCADAFCIAGNLNALRRGDFLYQRQTRKHNRQIHKCSILKGGVRKLHQAPFLVKGFRLFDKVKCTGRIGIIFGRRSTGSFDVRTLDGTRLSAGISSKKLTLLEKRTTFLTQLRK

SEQ ID NO: 4739 - protein, 423 aa, unidentified; identical to SEQ ID NO: 3951

SEQ ID NO: 4740 - protein, 462 aa, unidentified; identical to SEQ ID NO: 4659

SEQ ID NO: 4741 - protein, 445 aa, Burkholderia sp.; identical to SEQ ID NO: 4102

SEQ ID NO: 4742 - protein, 443 aa, Caldicellulosiruptor sp.; identical to SEQ ID NO: 2385

SEQ ID NO: 4743 - protein, 414 aa, unidentified
MPCSPAKARLLLKEKKAIVVRRTPFTIQLTIATGETKQPVSLGVDAGYKHVGLSASTEKAELYASEVELRQDITDLLSARRALRQSRRNRKTRYRAPRFDNRIRTKRKGWLAPSVENRINAHLSRIETVIRLLPVTKISVETTSFDMQLLKNSDIAGKEYQESEQLGFWNVREYVLFRDGHVCQHCHGRSKDPVLNVHHLESRRTGGDSPGNLITLCETCHKELHRGEITLKAKRGQSFRAETFMGIMRWEVLDRLKASHPKLEVQNTYGYRTKHARIVNGIAKSHCADAFCIAGNLGAERLGEFFFQKQTRRNNRQIHKLSILKGGIRKRNQAPFEVKGFRLFDKVACQGEEGFIFGRRSSGYFDVRKLNGTHISAGISCKKLRLLEKRQTYLTEIRKEKALPPLPEGRGLRA

SEQ ID NO: 4744 - protein, 476 aa, unidentified
LAAAGTEGVSHPGLPGKYKNKGGQLMSVAVISKTGERLMPTSEYRARKLLKSGKAIKHSYRPFTIQLTERKTGDVQPIELCMDTGYIHIGISVKSEKHEYLAEQIDTLTDERARHDACRMYRTQRRGRKRYRQPRFNNRKRDKGWIAPSLEHKKDIHIQAISRICKVMPVTDITLEMGNFDTQVLKAREEGKPLPQGADYQHGERYGIATLREAVFARDGYTCQCCGRTIKNDAILHVHHIVYRSQGGTNRMSNLITVCDKCHTPANHKKGGKLYNWKPKIASFKGAAYMTAIRWKLYNEVKTLFPDIDIHITYGAETKERRRAFDINKSHVNDAFVMGQFHPKHRSKPICYKKKRRNNRCLEKFYDAKYIDSRNGKKRSGQELFNGRISRNHKKDSENLHQYRLQKVTPGRRAIRKQHYPIQPHDIIVYNGNKIEVSGCQHKGTRVVFSKTKKSVQISKIKLFKYAGGYSKSVFN

SEQ ID NO: 4745 - protein, 410 aa, Geobacillus sp.; identical to SEQ ID NO: 4122

SEQ ID NO: 4746 - protein, 430 aa, Ktedonobacter sp.
MMSNVFVIDTDYTPLDPVHPGYARRLLKQGKAAVYRRYPFTIVLKRAVEEPQVQPLRLKLDPGSRTTGIAVVDDANGKIVFAAELAHRGHAIKDSLDDRRVVRRNRRNRKTRYRKPRWQNRRRKKGWLPPSLESRIANILTWVARLCRLAPMTALSMELVKFDLQQMENPNITSVEYQQGTLQGYEVREYLLEKWERTCAYCGKQKVPLQVEHIHPRAKSGTNRISNLTLACEPCNTAKGTQHIRVFLAKKPDVLKRILAQVKRPLKDASAVNTTRRTLLERLKVLGLPVECGSGGLTKYNRSTRGLPKTHWLDAACVGKSTPVGLTHTGIVPLQIKAMGHGSRQICVVDKYGFPKQHKQRKKTFLGYQTGDMVKALTPKGTFEGRIAIRHRPQFRLGEREIHPKYLRCVHRDDGYEYIQKGVRHAPPHD

SEQ ID NO: 4747 - protein, 444 aa, unidentified
MAVLVLNKQGKPLMPCSEKRARLLLERGRAVVHRQMPFTIRLKHRIDGAVQPLRLKLDPGSRITGLALVREVETVDVETGEVRREAHPLLLAELQQRGASIRDALTQRAAFRRRRRSQLRYRAARFLNRTRPKGWLAPSLRHRVATAQAWVTRLRRLAPVTALSMESVRFDMQQLLNPEISGVEYQQGALLGYEVREYLLEKWGRQCAYCGTGNVPLQVEHIQPKAKGGSNRVSNLTLACRQCNEKKGKRDVRDFLAHAPQRLARILVQATAPLRDAAAVNSTRRALYRVLAATGLPVEASSGGRTKYNRHLHHIPKTHCLDALCVGQVDAVGRWQRPVLAIKACGRGSYQRTLLDKYGFPRGYLTRQKRHFGFQTGDRVRAIVPSGKNVGTHVGRVAVRSRGSFNIQTPAGVVQDISHRHCSLIQRADGYGYCHQPAVRERNA

SEQ ID NO: 4748 - protein, 423 aa, unidentified; identical to SEQ ID NO: 3576

SEQ ID NO: 4749 - protein, 416 aa, unidentified
MVYVLDKNGQPLMPTDRHRKVRLMLQSGQAKVIKRCPFTIQLNYDSGHQTQEISLGIDAGSKHIGVSATTKIKVLYEADVELRNDIVDLLSSRRELRRGRRNRKTRYRQAKFNNRRRGNGWLAPSIRQKIGTHLTVVENICKILPISRIMVETASFDIQKIKNPDIQGAEYQQGDQLEFWNVREYVLFRDGHTCQCCKGKSKDKILNVHHIESRKTGGNAPNNLITLCETCHTGYHKGTVQLPKAIKRGMRFKDAAFMGIMRWAFYEALKQQYEPVGTPVHNTYGYITKHTRIEHNLPKEHYVDARCISGNPDAFPNGEYYYQKKVRCHNRQMHKLTILKGGIRKQNQATYLVKGYRLFDKVSYQGKGYFVFGRRQSGFFDIRTLSGEKVNKGSLSCKKLKFIATRTYYLTERRAV

SEQ ID NO: 4750 - protein, 518 aa, unidentified; identical to SEQ ID NO: 3878

SEQ ID NO: 4751 - protein, 493 aa, unidentified; identical to SEQ ID NO: 2644

SEQ ID NO: 4752 - protein, 413 aa, unidentified
MTSYSFVLDANGKQLAPTKEPKAWFLIRKKRAALVSKYPMVIQLKKKNQENEICKDEIRCGIDDGGLHVGIALVQKCKSKNKVVFKGTIEQRNDVKHLMEVRRNYRRYHRYHKRYRQARFDNRKSSKRKGRIAPSILQKRQATIRVINRLNKWINITNYWLEDVSIDIRVLTDGYKSYSWQYQKSNRLDENIRKATILRDGGKCMECGKSNCRLEVHHIKPRRRNGSNTLDNLITLCESCHQKTEGQEELYMDRYFSLLKSSDNKNLNYAQHVMIGKMWLRKQLSGLGVLYLTSGGDTANKRIDWNIEKSHTNDAVCITDLQPDTCDIKEWAIKPMRRQSKAKTDHVLGIHHRDLVEYTFKNGETHRGYVTALYPDQKAINFQSQTKHCKKVNARKCKLLWNYSKIYWFENAS

SEQ ID NO: 4753 - protein, 417 aa, unidentified
MPCSPAKARLLLKEKKAIVKRRTPFTIQLTIATGEAKQPVALGVDSGYKHIGLSATTEKAELYASEVELRQDITDLLSARLALRCSRRSRKTRYRAPRFDNRVASKREGWLAPSVENRIAAHMSRVEAVMRVLPVTAITVETAAFDTQLLKNPDIAEAAYQQGEQLGFWNVREYVLFRDGHVCQHCRGKYKDPILNVHHIESRRTGGDAPNNLITLCETCHKAFHRGEIKLKVRRGKSFKAETFMGIMRWTLFERLKKAHPELRVRNTYGYLTKHKRISHGIAKSHCADAYCIADNLGAKRLEGFFFQKQTRKHNRQIHKLSILKGGLRKKNQAPYEVKGFRLFDKVICKGEEAFIFGRRTSGSFDVRRLDGTRISAGISCKKLRLLEPRTTYLTEFRKEAALPPLHECSGSRAEFR

SEQ ID NO: 4754 - protein, 412 aa, unidentified
MADRQKSRQASRRGERKARQRLAKRYGSMVKSGMVMRKLPMYAADKFVICKFIRNTQARFCNRKRCPDWITPTVQHLVQTHLNIIRKISRYLPVTDIAFEVNRFAFMHMENPEAMGVDFQNGPLKGYGDVKEAIRTQQHGKCLMCKKPITHFHHIVPRSRGGSDTIQNLAGLCTECHTKVHTDTAFRKDFDEKKSGQLKKYGALSALNQAVPFICKKLLEEYGEEHVHFCRGLDTSLIRTAFGFEKTKKNQMHEVDAYCIGLAALEVNEVETPAFDHTFQIRQFRRQDRSIIHHQTGRSYYQGKEKVAQNRKPGFEQKTTALSQWYKEQIRIHGEKEAEKLRSQLRVEKSCRHYNDMDRFLPGAVFLYEGKRYVLSGRITNGKYLRACGQGMKNFPAAECTFIRHNAGLVFI

SEQ ID NO: 4755 - protein, 412 aa, Eubacterium sp.
MVYVLNKNGHPLMPTENHAKVRVLLSKGMARVINRCPFTIQLAYGSTNHTQKITLGIDSGSRHIGISATTKDKALFEADVELRNDIVDLLSARREQRRSRRNRKTRYRKARFDNRRRGDGWLAPSVRQKADSHLTMTAKVHKILPISDIVIETASFDIQKIKNPDISGTDYQNGEQTDFWNVREYVMFRDGHVCQCCKGKSKDRILNVHHIESRRTGGDAPNNLITLCETCHKGYHKGTVTLPQKIHRGMSFRDAAFMGIMRWAVYEKLKDLYPNVRLTYGYITKTTRIEHGLPKAHHVDARCISGNTDAVGDGTVYFYKKVRCHNRQIHKCTVMKGGIRKRNQAPYEVKGFRLYDKVSWRNQECFIFGRRSTGRMDLRLLDGTHINASVGYKNLRLLKMRTNYLVESRHTG

SEQ ID NO: 4756 - protein, 363 aa, Pseudoalteromonas sp.
MLAYVLNKHGKPLMPCKAAKARKLLKAGEAKVVKRTPFTIKLLHGSSGHTQHVVAGMDTGSKHVGCAAIANGKVIYQSEVALRTDVSKLPISHWKVETASFDIHKITNPIVTSAGYQQGALLGYYNVKAYVLQRDNYKCQSGRKTKHSAKLHVHHKVFRSQGGTDAPSNLITLCETCHNDLHAGKFELKMKRSKTKHATEIGILKAQLKQCWDFEETFGYVTKFKREQVLGLPKTHYYDAVSICCGDSELVQQGKHVLRKRHVASGDYQQTKGIRSEKRIPVGKLFGLKKHDFVQTPQGTGFVKGKRSSGYFALETILGDKVHASANIKKNTVRISARTTTLTQLMEAAIPLGTKVPSILAVN

SEQ ID NO: 4757 - protein, 421 aa, unidentified
MQYVYVLNMHGEPLMPCSPQKARLLLKEGKARVVKRTPFVIKLLHGSTGYKQPVVLGVDAGSRHIGLSACTESRELYKEELAPRNDVVELLSARRQYRLSRRNRKTRYRAPRFDNRVHSKHKGWLAPSVEVKIQEHITAIKRLCRILPIVLARVETAEFDTQRLKAMIEGRPLPVGIDYQRGEIYNEYNVRQYVLKRDRYVCQHCGAHPTPGKPVRLHVHHLESRHTGGNAPNNLIVMCEHCHKALHEGKITLDKGKKRGKSLRDAAFMGIMRNTLLARLETELSVPVQQTYGYITKLLREENHIEKSHTDDARCIAGFPKAVPCDTLYRTRAIRHHNRQIHKAKILKGGIHKKSQAPYMVKGFRLWDKVRYNGEECFITGRRSSGYFVLKKYDGTVISNSASYKKLTLLEAATNYITERS

SEQ ID NO: 4758 - protein, 428 aa, unidentified
  REGION 1..428: note = Ga0315277_10001137
MVVFVINKHGEALMPCSTRKARLLLKEEKAKIVDYKPFTIQLLYGSSGYKQETRLGIDVGSKHVGVAITSGNNVLAKGQIDLRQDISKLLETRKILRRSRRNRTTRYRQARFLNRTASKKEGWLPPSIQSRIDNTVMWINKFYNLLPKCKLSIEAAKFDIQKIENPSIEGKDYQQGTMYEYRNRIAYLIAREKGKCQYCDKEYQKNNGWRLHHIFGKEKDRPSDWALLHEKCHDEIHVKHEEDILRKQKSKSYKDSTFMNIIRRRLLTIFPNADFTYGNITFQNRCDLNLDKSHVNDAIAITGIKQIKENPDSIFFINQFRKKKRSLHEATARKRKKGNTLSVRNSKNTKSLNGFTLNDQVNVYKKIGFISGFTTNACYIKDIFGKYITLPEKSYKQVSFSNIKKVSYNNNWQFIPHLKEGDFLPEIG

SEQ ID NO: 4759 - protein, 462 aa, unidentified
MSAFVLDRSGRPLMPCSEKRARLLLARGRARVHRVMPFVIRLADRMADSSALQQLRIRFDPGSKVTGVALVREAGSGIAVINLFELIHRGRQISEALSARKSFRRRRRGANLRYRSPRFLNRRRPEGWLPPSLRHRVDTTMAWVQRIRRWAPITALSSELVRFDLQQLENPEISGVGYQRGTLAGYAIREYLLEKWKRTCIYCDAKGRPLQIEHLTSRARCGSNRVGNLGLACSDCNQEKGALDVRAYVKDPKRLARILATASQPLRDAAAVNATRWALIDALRATGLPLELASGGRTKFNRISHGLPKTHALDAVCVGQVEAIAGWERPSLSVEASGRGSYQRTRLTRHGFPRGYLMRHKRVQGFQTGDRVRADVPNGKKAGIHVGRVAVRATGSFNIQTASAVVQGISHRHCRLIQRGDGYAYSLQSVDSYRQGDAGVWRAAHAALSLPGLEPGVSRAFG

SEQ ID NO: 4760 - protein, 396 aa, unidentified
VVRRTPFTIQLTIATGESKQPVSLGVDAGYKHVGLSASTEKAELYASEVELRQDITDLLSARRALRQSRRNRKTRYRAPRFDNRIRTKRKGWLAPSVENRINAHLSRIEAVLRLLPITKITVETASFDMQRLKNPDISGKEYQEGEQLGFWNVREYVLFRDGHVCRHCHGKSKDPVLNVHHLESRRTGSDSPDNLITLCETCHKALHRGEITLKTKRGHSFRAEAFMGIMRREVLNRLKASYPELKVHETYGYLTKHARIANGIVKSHGADAFCIAGNLGAERLGEFFFQKQTRRNNRQIHKLSILKGGIRKRNQAPFEAKGFRLFDKVACQGEEGFIFGRRSSGYFDVRKLDGTRISAGISYKKLHLLEKRRTYLTEIRKEEALPPLPEGRGLRA

SEQ ID NO: 4761 - protein, 392 aa, unidentified
MAVFVLDKKKQPLMPCSEKRARLLLARGRAVVHKRYPFTIRLKNRVGGEAQPLRLGIDPGSKTTGLALMHEPDSQQRHVLCLFELIHRGFQIKKALQQRAAFRRRRRSANLRYRAPRFNNRIKPKGWLAPSLQHRVDTVMAWVNRLSKSAPITGISQELVRFDTQKLESPEISGVEYQQGTLLGYEVREYLLEKWGRECAYCGTADTPLEIEHVVPRSRGGSNRVSNLTLSCHPCNQSKDALSLVDFFATDKGLKKRLKANGHTANARLERVQRQLKQPLRDASAVNATRWALFSALNATGLPVTVASGGRTKYNRQRLNIPKSHALDAACVGAFEKLHDWTVPTLTIKAMGRGSYQRTRLTKYGFPRGFLMRQKQVHGFQTGHGACDSTHR

SEQ ID NO: 4762 - protein, 447 aa, unidentified
MYWLTVLNISKKEVSCMVYVLDIDGQPLMPTTRHGKVRRLLNSHLAKVVKRCSFTIQLLYQSTKETQPVSLGVDAGSKHIGLAATTDKKVVYQEELVSRNDVVKLISARRILRRSRRNRKTRYRKARFNNRVHSKHKGWLAPSVEVKIQEHITTIKRICQILPISEIQVETAEFDLQRLKAMKEGKPLPVGTDYQLGEQYDFYNTRQYVLHRDGYTCQCCGTHDNNIKLHVHHIESRQTGGDAPNNLIILCEHCHKALHEGKLELPKGKKRGKSYRDATFMGVMRKTLLERLKKEIDVPVEGTYGYITKCWREKTGLEKSHINDAICISKHPYAKPLDTYYLTKAVRHHNRQIHKSNFSKGGIRKRNQAPYLVKGFRLFDKVLYQGKEYFIFGRRATGYFDIRTLDGTKVNKGSIKYKKLRIQDTAKAYLKEARAIPHVNKFTCVLA

SEQ ID NO: 4763 - protein, 424 aa, unidentified
MSNFSLVVDTNRQPLDPIHPAKARILLSSGKAAILRRFPFTIILKEAVNLPTQAIELKLDPGSKTTGIALVSNQKVFWAGELTHRGQAIKDALLSRHHLRRSRRNRKTRYRAPRFLNRARPDGWLTPSLQHRVDTTLTWVKRLIKFAPITTITQELVKFDFQKLENPEISGVEYQQGELQGYEVREFLLEKWERQCTYCGIKNVPLQIEHIIAKSRGGSNKISNLCLACEPCNLKKGTQPVEQFLSDKPELLKQILVQAKRSLKDAAAVNSTRWKLFNSLKELGLSVTTGSGGLTKFNRRRLNLPKTHWIDAACVGKIKGLKLLTNQPLVIKANGHGTRQMCRTDKFGFPIRYVPRWKFVNGFQTGDIVKAVVTKGKKVGTYFGRIAVRSSGSFNLSTKTGLVQGISHKYCTTIHRKDGFNYSF

SEQ ID NO: 4764 - protein, 415 aa, Homo sapiens
MIYVKSKDGKAIMPSERGGRIGYLLRHGKAHVVSRVLFVVQLDYDSTTYTQNVSLGIDAGSKHIGVSASSEKKELFAAQVELRSDIVKLLSTRRELRRNRRNRKTRYRKARFDNRKKKDGWLAPSVEQKVDSHLKVIRLVHKLLPITKTTIEVAQFDAQKIKNPDINGEDYQQGEQMGFWNVREYVLARDGHKCVHCKGKSKDPILNVHHLESRKTGGNSPSNLVTLCETCHKAYHRGEFDLKIKRGNSLRDAAVMNIMRWAIYERANAEFKNVHLTYGYITKHTRIENGVTKTHAADAFCIAKNVNAMRLSSFFMCRCVPRHTRALHVANPKKGGIRRSSIASHKIGKSRFQRYDMVRWMGNECFIFGSTHGRPVLRDIEGVKMHDKQAVNIKTIKFLRRLRNNILMEEKTSEI

SEQ ID NO: 4765 - protein, 469 aa, unidentified
MRRKTRVTGPVRGFLEMSVVFVLDKRKRPLMPCTEKRARLILERGRAVVHKVYPFTIRLRDRIGGGMQPVLAKINPGSKTTGVALVREAQTQTERGVEQTHHVLVKAELSHRGRQISEKLTARAGYRRRRRNANLRHRQARFDNRTKPKGWLAPSLQHRVNTTMAWVARFQKLAPVSGVVTMLHRFDTQALQNPEIDGVEYQQGTLYGYEVREYLLEKWQRRCAYCSAQNVPLQIDHIHPKSKSGSNRISNLTLACSACNQAKGAMPVAEFLAKKPERLKRIQAQAKAPLKDAGAVNATRWALFNALKATGLPVSVTTGGRTKYNRTRTGAPKTHALDAACSGAVSHIKRWQAPTLAIKCTGRGSYQRTRVNASGFPRGYLMRQKSVKGFQTGDIVRADVPTGKKVGVYKGRVAVRKSGSFNIQIPSGGAVQGVSHRHCTLIQRSDGYGYSIQPTLIAQPQKEEARLAA

SEQ ID NO: 4766 - protein, 279 aa, unidentified
VVVETAEFDLQLLKAIADGKPVPQGEDYQKGEMYGHYNVRQYVLWRDNYTCQCCGTHPSKKKEVRLHVHHLESRKVGGDAPDNQVTLCESCHEKLHKGLIAEKDFKKRKRKSTRDATFMGIMRKTLMQRLCSELPIPVVKTRGYITKATREKLLVLPKSHTNDALAIAQGKQGFNVGYLPGIVQIDKICTIRPVRHHNRQLHKATILKGGIRKSNQTEKYVFGYCLFDKVQFNGQDCFIWGRRTTGIFTIKTINGKMIKDGISFKKLKLVEKSTSYLIA

SEQ ID NO: 4767 - protein, 470 aa, unidentified; identical to SEQ ID NO: 2825

SEQ ID NO: 4768 - protein, 471 aa, Caldicellulosiruptor sp.; identical to SEQ ID NO: 3268

SEQ ID NO: 4769 - protein, 443 aa, Anoxybacillus sp.
MVEENMTCFMQRKGENPMVFVLDTNKRPLAPCHEAVARKLLKQGKAAIYRRFPFTIILKKSVDESEIKATYRLKIDYGSRHTGLAILRGQEVVWLGQLDHRTDIKERIDKRRAFRRARRNRKTRYRKPRFLNRKRKEGWLPPSLESRMQNIKTWVERLRKICPIEHISYENAKFDTQLMRNPEINGVEYQQGTLQGYEVREYLLEKFGRKCCYCGKEGVPLEVEHIIPKSRGGTDRIDNLCLACRDCNQRKGSQTAEEFGYPHIQEMVKKTLKDASVVNATRWKVYEVLKQSGCEVECGTGARTKMNRIRLGLPKIHYFDACCVGKSTPLQLHFKTKEVLFIKAKGRGSRSRTNLDRYGFPRGYLARQKYFFGFQTGDMVKANVPKGKYQGVWFGEVACRKTGSFDIKGKDGKRIAQGINYRYVQVIQRFDGYAYGKGVAELA

SEQ ID NO: 4770 - protein, 421 aa, unidentified; identical to SEQ ID NO: 2846

SEQ ID NO: 4771 - protein, 428 aa, Moorena sp.
MQNYVFVIDTNKQPLNPIPPKKARRLLDKGKAAVFRMYPFTIILKTAILQSRRCANENPVVTNCQLKIDPGSQVTGFALVQNNQVIWGMELEHRGGLIKKKLESRRAVRHRRRNRNTRYRKPRFLNRKRSEGWLPPSLEHRILTIETWVKRLIKFCPVNEIWIERVKFDAQKMQNPEISGVEYQQGERRGYEVREYLLEKWGRECTYCGKQSVPLQIEHIHPKSKGGSNRVSNLCLACEKCNQRKGNKPIEEFLNKKPSLLQKIKTKAKQPLKDAAAVNATRQKLVKVLRAIKSVVTGTGAQTKYNRTKLGFPKEHWIDAACVGDIEPLWLRTNQPLLVTCKGQGGRQKAALNKYGYPIRHNPLKPIKGWCSGDIAKNVLTGEFGRVNPRSKSNSFNYTVPGKKAVSLHVKNLTKVHKKDGYVYNFCK

SEQ ID NO: 4772 - protein, 544 aa, unidentified
MKQKKQKVMVYILNKKGKPLMPTTRCGHVRKLLDSKKAVVVSSNPFTIRLKYDTPNGVQDVFAGIDSGRENIGSGASNEDGDCLYLGELKTSNKSIKMKITERAGFRKERRRRDRQNKQRKARKDHTEIQNGNADICRTTISCKSVQISYPAAEKSVTHKIIRGKEGKFANRHRDEGWITPSARQLVQMHMNDLKSMCKILPISHVTLERVAFDFQKLENENIKAWEYGKGKLYGYDSPEEYIHDVQGGKCLICGKPHIDYLHHIIPRSKGGSNKVSNLAGLCYDCHYGPMGVHNCQDTQDRLPELKNEANKQYKVSLLNSVMPVLIEEMDKFCKANSIIFSICEGHDTAKVRDIYDLQKDHCVDGFAISLVGRNIKSVDVMPDRIHQKQRYKKKSKNIIKKRNCREYYDGKKLVAVNRHKGTDQKADSLEEYMNTYAETHTADECKKHFESLTVKPARRTYTFHKEGRICPFHIGDKVRYEKKNKIKGNTKVETFICEGIRFPKDENKAKVEHNKTKSKKMKFCRVLEPGCTPYIDYRKLVLI

SEQ ID NO: 4773 - protein, 415 aa, Bacillus sp.; identical to SEQ ID NO: 2431

SEQ ID NO: 4774 - protein, 448 aa, unidentified
MYWLIALNILKKKGSALMVYVLDINGQPLMPTTRHGKVRRLLNGHLAKVVKRCPFTIQLLYQSTKETQSTSLGVDAGSKHIGLAATTEKKVVYQEEFTPRNDVVKLLSARRILRHSRRNRKTRYRKPRFNNRVHSKHKGWLAPSVEIKIQEHITAIKRICQILPISEIHVETAEFDLQRLKALEDGNPLPVGTDYQLGEQYDFYNTRQYVLHRDGYTCQCCGTHDNNVKLHVHHIESRQTGGNAPNNLITLCEHCHSALHEGKLKLPKGKKRGKSYRDTAFMGIMRKTLLERLRKEIDIPVTETYGYITKYWREKVGLEKGHINDAVCISKHSYAEPLDIYYLTKAVRHHNRQIHKTKFSKGGIRKRNQAPYLVKGFRLFDKVLYQNREYFIFGRRATGYFDIRTLDGTKVNKGSISYKKLRIQDTANAYLKEVKAIPHMNKFTCVLA

SEQ ID NO: 4775 - protein, 441 aa, Ktedonobacter sp.; identical to SEQ ID NO: 4223

SEQ ID NO: 4776 - protein, 442 aa, Selenomonas sp.
MSWTDNTETHILPLTLARRKILPQGKVTEMSKEYSFVLDANGKRLDPTIVQNAWRLVRQKKAALVSKYPMTIRFKKVVEDENCDEVRMGIDDGATHVGIALVQKCQKRNKVLLKATMEHRSDVGKLMTTRRAYRRYWKRHRPTRFDNRGNSRKTGRLAPSIHQKRQAVLRVADQLSKRIRIDSFWLEDVVIDIRTLVDGYKLYHWQYQKPNRLDENLRKAAILRDGCKCQECGRTNCRLEVHHITPRRANGRDTISNLITLCPSCHDKTKGNEEQFAERYYAMIRSRGNNAELKYASHVMVGKAWLRAKLSSRLPLILTTGGDTANKRIDWGIAKSHSNDAICITGLKPEGIDVQEWMLHPIRHQSKAGIKDVIGFRHHDIVAYTFKNGERHEGYVTAMYPANGKRCASLNFRSPTKHCKRVNARKCKLICRPNKIYWLRYA

SEQ ID NO: 4777 - protein, 496 aa, Streptomyces sp.
VLPQQLALEFESADIPRIGDETGLGDHHVVVPGVEHVRGETTGSAPAAGGVTPDREVRESGREADPVVFVLDRHGVPLQPTNPARARKLLASGRAVVDRHTPFVIRLKDRTTAGSQVDGVELGIDPGSKHTGIAVFTDVAGERRGRYSIQLDHRGAQIRKKLKQRSAYRRGRRSRNLRYRAPRFSNRTRPAGWLPPSLRHRVDTTTAWVDRLTRWAPVRAAHVERVAFDIHAISAGRPLEGAEYQHGTLHGTEVREYLLAKFGRACSYCGAMDTPLNIDHIHPRSRGGSDRVSNLTLACVPCNQAKGSQPVEDFAPKRAADILKRAKVPLRDTAAVNATRSALWRALDQRMPTYTASGGRTKWNRTRTGLPKTHTLDALSVGELDTVTAWPRTVLIVGATGRGTYARTRTDKHGFARLRLPRVKQFFGFATGDLVRAFVPAGKNAGTHTGRVAVRSSGSFAVRTASGLYTARHKYFRLLQRADGYAYTTRPEGAMP

SEQ ID NO: 4778 - protein, 303 aa, Halomonas sp.
MAIFVLDKKKQPLMPCSEKRARLLLQRGRAVVHKRYPFTIRLKDRVGGETQPLRLGIDPGSKTTGLALMRETEGEQRHVLCLFELIHRGFQIKKALQQRAAFRRRRRSANLRYRAPRFNNRTKPKGWLAPSLQHRVDTVMAWANRLSRLAPVTAISQELVRFDTQKLENPEISGVEYQQGTLLGYEVREYLLEKWGRECAYCGTGDTPLEIEHVVPRSRGGSNRVSNLTLSCHPCNQSKDALPLAGFFAHDEGLRKRLKANGLSADAQLERVQRQLKQPMRDASAVNATRCSPRSKPRIYRSP

SEQ ID NO: 4779 - protein, 414 aa, unidentified
MPCSPAKARLLLKEKKAIVVRRTPFTIQLTIATGESKQPVSLGVDAGYKHVGLSASTEKAELYASEVELRQDITDLLSARRALRQSRRNRKTRYRAPRFDNRIRTKRKGWLAPSVENRINAHLSRIETVIRLLPVTKISVETTSFDMQLLKNSDIAGKEYQESEQLGFWNVREYVLFRDGHVCQHCHGRSKDPVLNVHHLESRRTGGDSPGNLITLCETCHKELHRGEITLKAKRGQSFRAETFMGIMRWEVLDRLKASHPKLEVQNTYGYRTKHARIVNGIAKSHCADAFCIAGNLGAERLGEFLFQKQTRRNNRQIHKLSILKGGIRKRNQVPFEVKGFRLFDKVACKGEEGFVFGRRSSGYFDVRKLDGTRISTGISYKKLRLLEKRQTYLTEIRKEEALPPLPEGRGLRA

SEQ ID NO: 4780 - protein, 456 aa, Halomonas sp.; identical to SEQ ID NO: 2773

SEQ ID NO: 4781 - protein, 426 aa, Sulfurospirillum sp.
  source 1..426: note = isolate UBA6810
MVFVLSRNKKPLALAPTSNARARVLLKNGKAIVVSLYPFVIRLKELKETIQCFEIKLDPGASTTGVAIVDKEKALFFFGLVHRGKAIKKALDSRRAIRRGRRARNTRYRAPRFNNRVRSLNWLAPSVKSRADNVINFVKKYQRFIPLNKATIERVSFDNSSMANGEKLYGTQYQQGSLYQNKLRDFIFAKNNGQCAYCGNKGEEIEHIVPRSKGGTDSIHNLALSCRECNIKKGTLSLKEFGKIINKDLSHIEPRKLPKEAAIIQSARNYTIKEIAKIMEVETGEGWETSFNRKERNLPKEHYYDALCVGGKSDYVITTKEVLEIKAQGRGSRQMTRVDKFGFPRTSPKPTAKSVNGFTTGDIVKANVTSGLKQGNYLGRVAVRSSGYFNISTSDGVIQGISNKYCKTIQKGDGYEYQLKNTKQTA

SEQ ID NO: 4782 - protein, 435 aa, Streptosporangium sp.; identical to SEQ ID NO: 3796

SEQ ID NO: 4783 - protein, 465 aa, unidentified
MSTCACVLSKNGERLMPTIRLGKVRHLLKDGKAKIIKHHPFTIQLLYDNETNIQPIEICEDVGYNYIGISVKSQSHEYVSVQYDTLQDEKDCHDSCRKMRRIRRNRLRYRKPRFDNRKRNKGWLAPSLEHKKELNVNVIKMYCKVVPITHVTVEVGSFDTMLVKAIQEGKAIPEGADYQKGPRYNLATLREAVFYRDKYTCQVCGRKANEGAILHVHHMFYWKGRHGNSLSELLTVCEKCHTPANHQQGGKLYKFGENIKFANLSGAAFMNTVRWQIVNELYTAFGKLFVTFTYGAMTKEKRIAFHLEKCHNNDAYAMGNFHPVDRCAFEHYKKVKRNNRILEKFHDSQYIDIRTGKVANGRSLFNGRINRSHKKNSENLHKYRGKRTRKGYRALRRKKVALNPGDLVSLNGEILVVHSTHAGKNGYVGVEFKAPSKSGKKSASLKKLKIVKTSNSMRSAWTKVS

SEQ ID NO: 4784 - protein, 419 aa, Moorella sp.
MLACKQKVYVYVLNKHGKPLMPCSPKKARVLLKEGKAKVVRVVPFTIQLLYGSSGYKQKIYAGRDRGLTQGIAAVRKDGETLFLGEVTGRRDISELMYERSSLRRSRRSRKTPYRPCRIDNRKRKEGWLPPSVNHLWYEHQKTRSLVESILPVTEWAEEINKFDTHKMVNPEVKGKGYQEGPLKGKKNYREYVLERDSYRCVLCGEPEGLEVHHIVWRFRGGSDRPKNLVTLCKDCHDKVTKGEIEIKKVIESYRWPARLNALNPQFNALEGVKVPAYKVKEARLELGLDKAHYCDALALIHAAFGIIPRVTLPKVIKGRFVRSKNRQLHRANPIKGGVRPKANANRYLVNKNGVRFQKYDLVSYRTKKGEAITGYVNTLFSRGTVRIADFFGKELYNGASVNRLRKWQNNDTLIWEVA

SEQ ID NO: 4785 - protein, 431 aa, unidentified
MPNKVYVINKHGRPLMPCSPAKARHLLDAGKAKVKKRTPFTIQLVYGSSGYTQEVILGVDAGSKTIGMSASTTKEELLSAEVKPRNDVVDLLSTRREFRRAQRNRKTRYRKPRFDNRVRSKHKGWLAPSVEVKIQEHITAIRRVCGILPVSKVVIETAEFDLQLLKAIADGKPVPQGEDYQQGEMYGHYNVRQYVLWRDGYTCQCCGAHTTKKKEVRLHVHHLESRKVGGDAPDNQVTLCESCHEKLHKGLIAEKDFKKRKRRSTRDATFMGIMRKTLMQRLCSELPIPVIETRGYITKATREKLLVLPKSHTNDALAIAQGKQGFNVGYLPEIAQIDKIYTIRPVRHHNRQLHKATILKGGIRKSNQTEKYVFGYRLFDKVQFNGQDCFIWGRRTTGIFTIKTINGKMIKDGISFKKLKPVEKSTSYLIA

SEQ ID NO: 4786 - protein, 442 aa, Anaerostipes sp.; identical to SEQ ID NO: 2903

SEQ ID NO: 4787 - protein, 502 aa, unidentified
MSIIYVQDRHGKPLAPTTRGGHVRRLLDSKQARVVCGNPFTIRLMYGVDPCTQGFILGIDPGRTNIGVTVAAADGTCVFSAKAETNNKGVPKRRKERKAPRQASRQGERKRRQRRARKNGTCFGERKRILPGCKEPITNHYITNTEARFMNRARTKGWLTPTANQLLQSTISLVRKVCKFLPVTDVVLELNEFAFMAMDDPGIQRWEYQKGPLYGYGSVEAAVYTQQDGHCIFCEQAIAHCHHVIPASKGGSDTLENRAGLCGGHHDLVHKEQSWTDKLAELKAGMNKRYAALSVVNQIIPRLADELGKMFPGHAFATNGWSTKQFRDAHGIPKDHNTDADCIACSILENPTIKLPEKVYELRKFRRHDRAQISRMEDRNYYLPGADPKTGKPKKVLAAKNRHKRTEQKTDSLEEFRAAHPNDVGRLMVARGGPKHKDPNRVLPGAIFQVETRSGNVEQLVLQGSHGRDKNGQPLYLEFVGQGNFRPNRCKYVARGRGWQFV

SEQ ID NO: 4788 - protein, 414 aa, unidentified
MPCSPAKARLLLKEKKAIVVRRTPFTIQLTIATGETKQPVSLGVDAGYKHVGLSASTEKAELYASEIELRQDITDLLSARRELRRARRNRKTRYRAPRFDNRIRTKRKGWLAPSVENRINAHLSRIEAVFRLLPVTKITVETASFDMQLLKNPEISGKEYQEGEQLGFWNVREYVLFRDGHVCQHCHGRSKDPVLNVHHLESRRTGGDSPGNLITLCETCHKALHRGEITLKAKRGQSFRAEAFMGIMRWEVLNRLKASHPELEVNNTYGYRTKHARISNGIAKSHCADAFCIAGNLGAKRLGEFFFQKQTRRNNRQIHKLSILKHGLRKRNQAPFEIKGFRLFDKVACKGEEGFIFGRRSSGYFDVRKLDGTRISAGISYKKLHLLEKRQTYITEIRKEKALPPLPEGRGLRA

SEQ ID NO: 4789 - protein, 419 aa, Geobacillus sp.; identical to SEQ ID NO: 2623

SEQ ID NO: 4790 - protein, 413 aa, unidentified
MTSYSFVLDANGKQLAPTKEQKAWFLIRKKRAALVSKYPMVIQLMKEIPEKEICQDEIRCGIDDGGLHVGIALVQKCKTKNKVVFKGTMEQRNDVKHLMEVRRGYRRYHRYHKRYRQARFDNRKSSKREGRIAPSILQKRQATIRVIHWLNKWINITNYWLEDVSVDIRVLTDGYQSYRWQYQKSNRLDENIRKAAILRDGGKCMECGKSNCRLEVHHIKPRRRNGSNTLDNLITLCESCHQKTEGQEELYMDRYFSLLKSSDNKNLNYAQHVMIGKMWLRKQLSGLGVLYLTSGGDTANKRIDWNIEKSHANDAVCITDLQPDTCDVKEWTMKPMRRQSKAKTDHVLGIHHRDLVEYTFKNGETHRGYVTALYPEQKAINFQSPTKHCKKVNARKCKLLWKYSKIYWFENAS

SEQ ID NO: 4791 - protein, 420 aa, unidentified
  source 1..420: note = Clostridia bacterium
MQYVYVLNKHGEPLMPCSPGKARILLKQQKACVVKRTPFTIKLLYGSAGYKQPITLGVDAGSKHVGLSASTEKRELYSEEFTPRNDVVELLSTRRQNRRSRRNRKTRYRAPRFNNRIHSKHKGWLAPSVEVKIQEHITVIKRICRILPITLVRVETAEFDTQRLKAMLSGKPLPVGTDYQLGEMYDEYNARQYVLRRDNYTCQRCGAHTTKKKTVKLHVHHLESRKTGGNAPSNLITLCVDCHKAFHAGKVKLDGKKRGKSLKDAAFMGAMRNTLLTRLRNELNIPVQNTYGYITKLLREQNDIKKSHVNDARCISKHPLAEPCSVCYRTKAIRHHNRQTHKANFSKGGIRKRSQMPYVVEGYRLWDKVLYKGQECFVSGRRSSGSFALKKLDGTSISKGVTFKKLRLLEPATNYLIERM

SEQ ID NO: 4792 - protein, 439 aa, unidentified; identical to SEQ ID NO: 4465

SEQ ID NO: 4793 - protein, 427 aa, Enterococcus sp.
MVYVLSIHNEPLMPCSNVIARLLLKQGKAKVKYREPFTIKLTYETTTYTQPLTLGVDTGSQTFATAVANDKGNILYTSEVTLREDKNNSIKKKMDQRRMYRRTRRNRKTRYRKARFNNRKNSKRKNRFSPTMTSKLHSHQKEIEFIKSILPIAKLIFETGTFDPHLMKNPSLANPKVKPWGYQQGPNYGFENTKARVLVRDNHTCQICNKKPKNERLEVHHIVFRSQGGSDEENNLVTLCHSCHVELHKGLIHPNFEGSLKSALKYATQMNSIRIQLLKLYPDAIETFGYVTKANRLNLGLPKEHYVDAAVIATAGNQVKFACNLMIKRCIPKGDFQRTKGVRSEKTIPKGKIDGFKKYDKVRYFGNEYFIKGRRTSGYFTLMDIYGQTISFNHMSKGQKTPKAKNCHRISARKSWIVTTKKLENIA

SEQ ID NO: 4794 - protein, 416 aa, unidentified
MVYVLDQSGQPLMPTERHGKVRHLLKSGKAKVIKRCPFTIQLLYNSTHYTQDITLGVDAGSKQIGLSATTKQKELYAAEIELRNDIVKLLAARRELRRSRRSRKTRYRKPRFQNRTHSRKPGWLAPSIRQRIQCHLTVIANVHKLLPTKTILIETASFDIQKIKHPDIHGVQYQKGEQLDFWNVREYVLFRDNHTCQCCKGRSKDNILNVHHIESRQTGGNAPNNLITLCETCHTGYHNGKVILPKTIKRGMSFKDAAFMGIMRWSCYDMLKNIYPDVHMTYGYITKNTRIGNNLPKEHYVDARCISKNPKAEPLPYYYYQKKVRCHNRQIHKTKPTKHGIRKRNQAEYVVHRYRLFDKVQYQNNEYFIFGRRKTGYFDIRTLTGVKVNNGSISYKKLKLLEKSKKYLTETRLQTT

SEQ ID NO: 4795 - protein, 442 aa, Ectothiorhodospira sp.
MAVLVLDRRKKPLMPCSEKRARLLLERGRAVVHKMRPFTIRLKDRTAEASTLQPVRIKIDPGSKTTGVTVIREDDSDPEQQQVLMLMEVEHRGQYIKDALTQRRAFRRRRGQLRHRAPRFDNRTRPRGWLAPSLQHRVDTTLAWVARLRRLAPVTAIDQELVRFDTQAMEAPEISGVEYQQGTLHGYEVREYLLEKWQRRCAYCGARDLPLEVDHINPRSRGGSDRVSNLTLACHDCNQAKGNQPVEAFLADDPKRLQRIKDQARAPLKDAAAVNATRWALFQGLKAMGLPVITGSGGRTKYNHQRLGLPKTHALDAACVGQVAAVTGWNVPTLTTRATGRGSYQRTRLNRFGFPRGYLMRQKQVKGFQTGDLVQAQVPSGKKAGTYQGRVAIRATGSFNIQTAQGVVQGISHRHCRLLQRADGYGYTFQPKPLQEDASRAA

SEQ ID NO: 4796 - protein, 422 aa, Ktedonobacter sp.
MRSDSLHGHSAGIRITRRLPEYFSERNRLNMVYVVSADRTPLMPCSAAIARLLLKEGKAKVVRRTPFTIKLSAQPERTYTQPLTLGVDTGSAVIGSAVASEQGSILYLSEVEVRNDIATTMKERATHRRDRRNRKTRYRPARWLHRRNSIKTGRFSPTMRSKIDAHLREIHFAHSLLPISSIVLETGTFDPHALKNPEVLRKKWLYQKGINYGFANTKAYVLTRDGYTCQHCQGKSKDQRLEVHHIIFRSQHGSDEESNLLTLCKTCHDALHAGMITLKHTGKKKGDLLHATQMNSIRVQLLKQVEAEETWGFVTKEHRLLAGLPKEHCFDAAMIATRGNRPVFQIQTVFVKKCIPDGEYQQTKGKRSEQRIPTGKIQGCAQMRQSALSRSGILYQRAYVYWLCYFDDDRREKGRFETHSQV

SEQ ID NO: 4797 - protein, 415 aa, Bacillus sp.
MRVFVKNLRGEPLMPCSPRKARLLLKQGKAKIVQYTPFIIQLQYATGETVQPVTIGVDSGAKYVGIAITTEEKVLVKGTVELRQDIKENLALRATLRRGRRQRKTRYRKARFLNRKKKEGWLPPSIQSRVDNQIQWIETFRSLLPSPKVIVEVGKFDAQKLKNPDIQGIEYQQGDAFGFWNIRYYVFARDQYTCQICKKKGGILHTHHIIERCNGGSDMADNLVTVHEECHQRFHQGIIKHVFKKPKQYKETAFMNILRLQIMKRLECEITYGSYTTPKRKELGLAKTHANDALAITNPTKLQEYDQSGEFRIKQFRKKKRSLHEATARKGRKTKNASAKRNKKNTPHVDGIYLGDKVKVFGQVGFVTGFTGKMVYVQDIHGQYIQSPSKSYKQVKMSDMERIHHTNNWQFLQIS

SEQ ID NO: 4798 - protein, 427 aa, Enterococcus sp.; identical to SEQ ID NO: 2410

SEQ ID NO: 4799 - protein, 315 aa, unidentified
LRVFVLNKRGKPLMPCSPAKARLLLKEKKAIVVRRTPFTIQLTIATGETKQPVSLGVDAGYKHVGLSASTEKAELYASEVELRQDITDLLSARRALRQSRRNRKTRYRAPRFDNRIRTKRKGWLAPSVENRINAHLSRIEAVLRLLPVTKITVETASFDLQLLKNPDISGKEYQEGEQLGFWNIREYVLCRDGHVCQHCYGRSKDPVLNVHHLESRRTGGDSPGNLITLCETCHKALHRGEITLKAKRGQSFRAEAFMGIMRWEVLNRLKASHPELEVNNTYGYRTKHARISNGIAKSHCADAFCIAGNLGAKRL

SEQ ID NO: 4800 - protein, 449 aa, Allochromatium sp.
MAVFVLDKQKTPLMPCTEKRARLLLERGRAVVVRLAPFTIRLKDRIGGAVQPLRLKLDPGSRTTGLALVRESETCDPETGAVERLEHGLWFGELAHRGQAIREALEQRRHYRRARRARKTRHRAARFLNRTRRAGCLPPSLQHRLDTTVNWVERLRRLAPISALSQELVRFDTQALQNPEISGVEYQQGELAGYEVRVYLLEKWNRTCAYCGATHVPLEIEHIQPKSRGGSDRVSNLTLACRPCNQRKGSRSIEDFLKRQPARLHKIQAQAKAPLQDAAAVNATRWALFAALKATGFAVETGSGGRTKFNRTRLDIPKTHALDAACVGAVDQVRGWNRPVLAIKATGRGAYSRTRTFNNGFPRGYLMRPKRVHGFQTGDWVRAEVPKGKKAGVHVGRVAIRRTGSFNVQTPGGTVAGISHRYCRLLQRADGYGYTVQPKPVTEDARRAA

SEQ ID NO: 4801 - protein, 421 aa, unidentified
MQYVYVLNKHGEPLMPCSPGKARLLLKQQKACVVKRTPFTIKLLYGSAGYKQPITLGVDAGSKHVGLSASTEKRELYREEFTPRNDVVDLLSTRRQNRRSRRNRKTRYRAPRFDNRVHSKHKGWLAPSVEVKIQEHITVIKRICRILPISLVRVETAEFDTQRLKAMLEGKSLPVGTDYQLGEMYDEYNVRQYVLKRDNYTCQCCGAHPTEKKPVRLHVHHLESRHVGGNAPNNLITLCVACHKALHEGKITLDKGKKRGKPLRDAAFMGIMRNTLLARLKDELNIPVKQTYGYITKLLREKNKIPKSHVNDARCIAKAPNAKPCDTMLYTRALRHHNRQIHKAKILNGGIRKKNQAPYLVKGFRLWDKVRYNGEECFITGRRSSGYFALKKYDGTVISNSASYKKLMLLEAATNYITERS

SEQ ID NO: 4802 - protein, 425 aa, unidentified
MVYVINKEGQALMPTERFGKVRRLLKNGLAHVICRIPFTIQLDYETTHFVQPISLGVDAGSKHIGISATTSEKELYAADVELRNDIVEKLSTRREQRRTRRNRLRYRKARFNNRVSSKHKGWLAPSVENKIQTHLTVVEKIHKFLPITKIIVETASFDIQKINNPSISSEEYQQGEQLGFFNVREYVLFRDNHTCQHCKGKSKDHILNVHHIESRKIGGNSPSNLITLCESCHKAYHNGKIDIKVKRGASFRDAAFMGIARWTTYERLKNIYSNVSMTFGYITKNTRITNGLPKEHHVDARCISGNPKSKPLGYYFYQKKVRCQNRQIHKANFLKGGRKKLNQSPFLVKGYRLFDLVEYQKKLYYIFGRRDSGFFDIRRLDGIKVNKGSISCKHIRLVDIRKGIIIERRNSCSIPPHKLKFCGFP

SEQ ID NO: 4803 - protein, 429 aa, unidentified
MSNTNYVFVIDTNKKPLQPCKPTVARRLLNSGKAAVWRRFPFTLILKKAVEIVVKTTLTLKIDPGSKFTGMALLEGNKVIWMLLIQHRGSLISEKLQKRSQRRRARRTKNLRYRKPGLPNKKKPEGWLAPSLVHRVETIMTWVKRLIKFCPVESISMELVSFDTQLIQNPEINGTEYQQGELAGYELREYLLEKWGRQCAYCRKTNTPLEIEHIHPKSKGGSDRVSNLTVACTKCNQIKSNQDVKDFLSGKPELLKRILTQARSPLKDAAAVNSTRWKLFNSLKTTGLEVTIGSGGQTKFNRRKQQLPKAHCIDAACVGEVNQLNFQTTQALVAICKGQGGRQKAAVNKYGYPIRYNPLKPIKGWNSGDLALNIETGEVGRVNPRSKSNSFNFTVPGQKAKSVHVSKLKVVHKKDGYTYTFCPQLSINV

SEQ ID NO: 4804 - protein, 431 aa, unidentified
MPDKVYVISRLGHPLMPCSPAKARHLLDDGKAKVVKRTPFTIKLLYGSTEYTQPVILGVDAGSKTIGLSASTTKEELFAAEVMPRNDVVKNLSTRREFRRARRNRTTRYRKPRFNNRVHSKNNGWLAPSVEVKIQEHITSIKRVCAILPISKIVVETAEFDLQLLKAVQDGKPVPEGEDYQKGEMYGSYDVRQYVLWRDNYTCTCCGVKGTDKKPVKLHVHHFESRKHGGNAPDNYGTLCEDCHKKLHLGIITDISLKTRKRPSTRDAAFMGIMRKTLMQRLITGLSIPVAETKGYITKAAREEILKLPKTHTNDALAIAQGRHGFGIREQAYVKPTNRIYTVRPVRHHNRQLHKATMLKGGIRKLNQASKYIFGFRLYDKVLYQGGECFVWGRRRSGSFLLRTIDGTKVKDGVGYRNLTLLERSTNYLIA

SEQ ID NO: 4805 - protein, 496 aa, unidentified
LSKGDHSHPGEQDFCVPAITIQGGPAMSVFVVGLNGCRLMPTSERKARLLLKHGKASVYRKVPFTIKLNYKTGSTTQSGYLGIDTGSQHIGVSVVREDGAVLHKEEIGLRDSMSKRKLMQSRASSRRGRRHRKTRYRHPKWRPKAKRVYCEIPDRKRRHWKKKEITFTSKRPKGWLPPSLQSKTDHHIRWIKKLQDLLPEGYRLSIELGRFDPARLKDPEIHGELYQKGPQYDYENVRAYVLNRDRYTCQVCGKKGGKLHVHHILYRSYGATDDPQYMATVCSDCHNTENHHQGGILYQWMQKQKKFTRGLRDATFMNILRKRLIEAFPGATFTYGNITKADRERLRLPKSHGNDATAIAIVKTGIMTVKDKEPVIYIQQVRRKKRSLHEETPRKGRKEPNRKASRYDKNTKAVTVTKRKNKKKISITGCLFDRVELNGKKGWISGFTDKSCYVKDENDQYIRTSPKYKQVSLSKLKILHHCGNWAIGARRSLGKG

SEQ ID NO: 4806 - protein, 443 aa, Caldicellulosiruptor sp.; identical to SEQ ID NO: 2385

SEQ ID NO: 4807 - protein, 411 aa, unidentified; identical to SEQ ID NO: 3917

SEQ ID NO: 4808 - protein, 442 aa, unidentified; identical to SEQ ID NO: 2903

SEQ ID NO: 4809 - protein, 442 aa, unidentified; identical to SEQ ID NO: 3161

SEQ ID NO: 4810 - protein, 408 aa, unidentified
MVYVQDINGKPMMPTTRHGKVRRLLKDKKAVVVNLCPFTIRLTYVTSDYKQEIVLGVDAGTKHVGLSATTKSKELYSSEVILRSDIVDLLSTRRELRKTRRNRLRYRKPRFDNRVKSKRSGWIAPSVKYKIDAHIRIVDNVCSILPISRIVIEVAQFDTQKIKNPNISGKEYQEGDQLGFWNVREYVLARDGHKCQYCKGKSKDKILNVHHIESRKTGGDSPYNLITLCETCHKEYHKGNIDLKIRRGKSLRDAAVMGIMKWRLYEELKSKYDNISMTFGYVTKYNRIKHGIEKSHVSDAFVISKNFNAIRLGYYYKVRLVRRHNRQIHKQKIPKGGVKRLNQSPFEVFGFRLFDRVMFENSYYFIFGRRKTGRFNIRDIDGKNQRDITYKKLKLSRCKCFMVQNEMN

SEQ ID NO: 4811 - protein, 413 aa, unidentified; identical to SEQ ID NO: 3295

SEQ ID NO: 4812 - protein, 443 aa, Anoxybacillus sp.
MVEENMTCFMQRKGENPMVFVLDTNKRPLAPCHEAVARKLLKQGKAAIYKRYPFTIILKEIVDNFRPKTPYRLKIDHGSKHTGLAILRGQEVVWLGQLDHRTDIKERMDKRRAFRRARRNRKTRYRKPRFLNRKRKEGWLPPSLEGRVQNIQTWVNRLKKLCPIGYISYENAKFDTQLMRNPEINGVEYQQGTLQGYEVREYLLEKFGRKCCYCGKEGVPLEIEHIIPKSRGGTDRVDNLCLACHDCNQRKGSKTAEEFGYPHIQEMVKKTLKDASVVNATRWKVYEVLKQSGCEVECGTGARTKMNRIRLGLPKIHYFDACCVGESTPLQLHFKTKEALFIKAKGRGSRSRTNLDKYGFPRGFLARQKFFFGFQTGDMVKAVIPRGKYQGVWFGEVACRKTGSFDIKGKDGKRIAQGINYRYVQVIQRFDGYTYRREGMNIA

SEQ ID NO: 4813 - protein, 461 aa, Ktedonobacter sp.
MRSDSLHGHSAGIRITRRLPEFFPKGFSSMNIAYVLSPDKAPLMPCQPVIARLLLKEGKAKVRHRTPFTIQLLAQPEQIYTQPFTHGVDTGSVVIGSAVADERGFVVYLSEVQIRNDIAETMKERARARRNRRNRKTRYRPMRWLNRKNSIKQGRFSPTMKSKIDTHLREIRFVQSLLPITSIVLETGTFDPHALKNPEVLHNKWLYQKGINYGYANTKAYVLTRDGYLCQHCKGKSKETRLEVHHIIFRSQNGSDEEANLLTLCKTCHDGLHAGTITLKRTGKKKGTLRHATQMNSIRIQLLKRVEAEETWGFVTKEHRILAGLPKEHVFDATMIATRGVKPTFCTTSVLSKRCVSDGDYQQTKGVRSEQRITTGKISGFRKFDKVRYLGQEYFIKGRISTGYAILMDISGNKVALKPIPKFDKMKRVNARSSWIMLQRTMLNSSCSITSSLSVSTAKAF

SEQ ID NO: 4814 - protein, 435 aa, unidentified
MLVFVLNKHGKPLMPCKPSKARKLLKQGKAKIVQYEPFTIQLLYSSSGYKQKCVMGIDAGNKNIGIAVTTEDGRVLYKAQVALRQDIRENIETRRRLRRARRYRKTRYRKPKTFTSKWRNGWLPPSIRARIDAHYNIVKKICSIMPIKEIVVEVGQFDVQAIINPDIQGEEYQNGELKGFDSVKEYVKIRDNFQCHYANLRPDIPCSGKLTVDHIIPRSRGGTDNPTNLVCCCEMHNMAKGNMSYKEFTGHEPPSIRDFRPTVFMNALMEHLVPRLQELAPTKYTFGYVTRRRRKEWGLEKSHINDAIAIAGIKPRWQDNVWYCIRQMRKKKRSLHEEIPRKGRNKPNREAKRNNKNVKEIVTKSGKWCLWDKVKITTTGEIGFISGFTGKWVYVQDIDGNYLQLSDKYKQINPSELVLICRNNNYITQQFISTL

SEQ ID NO: 4815 - protein, 427 aa, Eubacterium sp.; identical to SEQ ID NO: 3021

SEQ ID NO: 4816 - protein, 438 aa, Fervidobacterium sp.
VADMTSPSNIGDELLTPQGGLHHMVYAISQQGKPLVPTKRHGKVRRLLKQGLAKVVKREPFTIQLLYDTTTYVQPVTVGIDIGSKTVGVSAITDKKEVFSSEIELRTDIKDLLCERREYRQLRRYRKTRYRKARFLNRRKPEGWLAPSLRWKVDAHIRIVNMLSKILPISKVIVEVAPFDTQKILNPDIQGEEYQNGVQKGFWDVREYCLWRAGYKSEVSGKKGVLEVHHIVPRSGGGTDNPSNLIVLTAQEHKAIHEGRLKIPKSKIEKVRILKDASHVSTIGWHIVNELKELYEDVRVTYGSITKAKRSEFGLEKTHRNDAYVIGGGTVQKRAKEWYFGKFFRRQNRSLHKVNPIKGGIRPVNTIKQSYGFRRFDKIEYEGKIGIIAGTRSSGYFVIRSLSGERIHDSVKYSKLKHFEKSKTIMLERREAAISSHD

SEQ ID NO: 4817 - protein, 430 aa, unidentified
MPKVYVLNRHGRPLMPCTPAKARHLLDAGKAKVRHRTPFTIQLLYGSTGYTQEVILGVDAGSKTIGLSAATETEELFSAEVKPRNDVVELMSARRQFRRARRNRTTRYRKPRFDNRVRSKHKGWLAPSVEVKIQEHMTAIRRACAILPVSKVVVETAEFDLQLLKAVAEGKPVPQGEDYQKGEMYGHYNVRQYVLWRDSYTCCICGVHGSVRKGVPLHVHHLESRRVGGDAPDNLVTLCTACHDKLHKGIIMAADIKKRKRRSTRDATFMGIMRMTLLRRLREQLPVPVVETRGYITKATRENLLVLPKSHTNDALAIAHGPQGFRAEYLPNIRQADRLYTIRPVRHHNRQLHKATILKGGVRKANQAEKYICGFRLYDKVLYNGIECFVWGRRTSGSFLLRQLNGEKVKDGVSYKHLKLLERSQSYLVA

SEQ ID NO: 4818 - protein, 415 aa, Bacillus pseudomycoides; identical to SEQ ID NO: 2431

SEQ ID NO: 4819 - protein, 441 aa, unidentified
MSTSVFVLDKRHRPLMPCRPARARRLLRAGRARVVKRFPFVIRLVDRTVEQSEVQPVLIKLDPGSRETGAAVVRDDEKKRHHALAFFVIKHRGGAIRDALKARSAFRRRRRSQNFRCRSPRFLNRVKPKGWLPPSLRHRVETTLSFVRRMCRYLPVSGIATELVKFDSQKLQNPEVSGVKYQQGTLFEYEVREYLLEKFGRKCVYCAEGVPLNIDHVVPRAKGGSNRVSNLVLACVSCNQKKGARSLEDFLKGKPEVLARVRRELKTPLRDAAAVNATRWVLFNELKATGLPVETGSGALTKLNRHAFGVEKEHWLDALCVGRLNGVVTRKGLNVLEIRCMGRGSRQRTRLTKYGFPRGYLMRQKCVHGFATGDMVEANVPKGKKAGLWRGRVAVRVSGSFNIQTPKGVIQGVGWKHCRLISHNDGYGYAWLGHAPHSSPA

SEQ ID NO: 4820 - protein, 471 aa, Caldicellulosiruptor sp.; identical to SEQ ID NO: 3375

SEQ ID NO: 4821 - protein, 416 aa, unidentified
VLEITNYVFVLDANGKQLAPTKEQKAWFLIRKKRATLVSKYPMVIQLKKEIPDEQIYKDEICCGIDDGGLHVGISLVQKCKTKNKVVFKGTIEQRKDVKHLMEVRKGYRRYHRFHKRYRQARFNNRKSSKRKERIAPSILQKRQATIRVINQLNKWINITNYWLEDVAIDIRALTDDYKAYRWQYQQSNRLDENIRKAVILRDGCKCMECGKSNCKLEVHHIKPRRSNGSNTLGNLISLCKKCHQKTEGQEELYMNRYFSMLNSSDNKTLNYAQHVMIGKKWLREQLSKLGTLTLTTGGDTANKRIDWNIEKSHSNDAICITGLQPDTCNIKEWTIKPMRRQSKAKADNVLGINHRDLVEYTFRNGETHRGYVTALYPGQNAINFQSSTKHCKKVNAKKCKLIWKYSKIYWLANVQ

SEQ ID NO: 4822 - protein, 414 aa, Sutterella sp.
MPCSPAKARKLLKAGHAKIKRVNPFQIQLTRATGESVQPVTLGVDAGSKTIGLSASSAKTELYVSEVALRTDVSDLLSTRREFRRARRNRKTRYRAARFDNRVRSKNKGWLAPSVENKIQAHISRVQNVCRLIPVNKIRVETAAFDIQKIKNPDIAGIDYQKGDQLGFWNVREYVLNRDGHVCQHCKGKSKDRILNVHHLESRKTGGDSPGNLITLCETCHKAYHRGEIQLKVKRSPSFRDAAFMGIMRWTFFNRLKALFSHLTVENTYGYFTKYARIRFGIAKTHCADAYCIAGFLHAKRMGEFLFQKQVRKHNRQLHKATILKGGVRKAQQAPYIVKGFILFDRVRINGEVGFVFGRRSSGYFDVRRLDGTKISAGVSFKKLKRIESRQSFLTELRKETALLPRMNAGVSAP

SEQ ID NO: 4823 - protein, 380 aa, Arthrospira sp.; identical to SEQ ID NO: 3156

SEQ ID NO: 4824 - protein, 378 aa, unidentified
MAASANAQKDIGVIKRRLPGCEKDVLCIGIKNKETKFTNRTRPEGWLTPTANQLLQTHINLVKKIQKFLPISDVVLEVNKFAFMRLDNPNIQKWQYQQGPLYKKESLESAVSEIQEHHCLFCKKPIDHYHHVVPQHKNGSNTIGNIVGLCAKHHDLVHKDSAWEKKLAKKSTGLYKKYGALGVLNQIIPTLTNELSSLFPKHSFVTNGKSTYDYRAAHGVSKDHWLDAYCIACSVLPSNVCDSNINNHMPYVLKQFRRHDRRVLNNENMNRVYTLNNKAVAINRHKAKDQKTVSLEEFRKEHPDDVCKLKVKEHHPTYRNMNRNFPGSVFLVGKQIHVMQGIASSKDGKATKYNDTSATAIAAGKCKFVAKNTGILFV

SEQ ID NO: 4825 - protein, 408 aa, Lysinibacillus sp.
MFVYVLNQYGKPLMPCKPIKARKLLTQGKAKVVQRTPFTIQLKYGSSGYVQPVSLGIDAGTKEIGISATTKDDVVFEGEVKLRTDIQELLATRKSLRGARRSRKTRYRKPRFLNRKKEKGWLAPSVQNKVDMHVKIIRKVHKILPIQNLTIEVAQFDIQKIKNPSISGDLYQKGDQLDFWNVREYVFFRDKHVCQYCKGKSKDYILNVHHIESRKTGGDSPDNLITLCENCHKKIHREGKEYLFKRKNCSFRDATQMTVMRWFIYDKVKELYPHARLTYGFQTKNNRIRHGLDKGHAVDARCISGNPLTIPSENSYSFKQVRKNNRQLHKMTISKGGYRRANKAERFVKGFQLFDKVIFEGVECFIFGRRKTGYFDLRTLDGTHIHKSASFKKLRVIEKANTLLASQI

SEQ ID NO: 4826 - protein, 408 aa, unidentified
MVYVQDIDGKPMMPTTRHGKVRRLLKANKATVVNLCPFTIRLTYATSGYKQEIVLGVDAGTKHVGLSATTKSKELYSSEVILRSDIVELLSTRRELRRTRRNRLRYRKPRFGNRVKSKHHGWVAPSVRHKVDAHIRVIDNICSTLPISRIIVEIAQFDTQKIKNPDISGNEYQEGDQLGFWNVREYVLARDGHKCQHCKGKSKDPILDVHHIESRKTGGDSPSNLITLCETCHKEYHKGNIDLKVKRGKSLRDAAVMGIMKWKLYEELKSRYPNVSMTFGYITKYNRIKYGIEKYHISDAFVISKNFNALRLEYHYKVRLVRRHNRQIHKQKVLKGGAKKPNQSPFEVFGFRLFDRVMFEGNYYFIFGRRKSGSFNIRDINGGNQRNVTYKKLKLSIGKRFMIQKEMN

SEQ ID NO: 4827 - protein, 450 aa, unidentified; identical to SEQ ID NO: 2935

SEQ ID NO: 4828 - protein, 412 aa, Clostridium sp.
MSKQKEYAFVLDFTNNKLAPTNTNKAWILIRKKKAKLLQKYPMVIQLNYEVKIDKETEIICGIDDGSSHVGISLIQKCKTYNKPIFKGTIELRQDIKGLMDVRRGYRRYKRSHKRYRQARFSNRSMSTRKGRVAPSILQKKQSIIRVINQLLRFINIKKFHLEDVTIDIRALTDGKKLYRWQYQKSNRLDENIRKAIILRDGCKCMECGKSNCVLEVHHIVPKRLKGKNNQDNLITLCSNCHDKTKGQEEKFIKYYQLMINGKNIRLDYAQHVMQGKNWLRNELSKLGKLVLTTGGDTANKRIDWNIDKTHSNDALVASDLIINNELCNIKDYIIKPMRRKSKAKTYECLGFKHRDLIKYTKKNGESYIGYITALYSEKKQCNITTLENKILKRYGIKPCKLLWRFNKIYWF

SEQ ID NO: 4829 - protein, 443 aa, Caldicellulosiruptor sp.; identical to SEQ ID NO: 2385

SEQ ID NO: 4830 - protein, 431 aa, unidentified
MPDKVYVISRLGHPLMPCSPAKARHLLDDKKAKVVKRMPFTIRLLYGSTKYIQPIILGVDAGSKTIGLSASTAKEEVFAAEVMPRNDVVENLSTRREFRRARRNRTTRYRKPRSDNRVRSNHERWLVPSVKVKIQEHITSIKRVCTILPISKVVIETAEFDLQLLKAIQEGKPIPEGEDYQKGEMYGSYNVCQYVLWRDNYTCICCGVRGMPKNPVRLHVHHFESRKYGGNAPDNHGTLCDDCHKKFHLGIITDVKLKTRRRQSTRDAAFMGIMRKTLMWRLRTELFIPVAETKGYITKATREKLLVLPKSHTRDALAIAQGRHGFGIKEYAYVEPANHIYTVRPVRHYNRQLHKASILKGGIRKRNQASKYVFGFRLYDKVLYQGKACFVWGRRTSGTFLLRTIDGIKVKDGVSYRNLTLLERSSNYLIA

SEQ ID NO: 4831 - protein, 369 aa, Moorena sp.
QLKIDPGSKVTGLALVQDDKVLWGAELYHRGQQIKADLEDRRKLRRGRRNRKTRYRQPRFLNRTRPEGWLAPSMLHRVLTTMTWVRRLTKFVPVTGISLERVRFDMQKMINPEVSGVDYQQGELQGYEVREYLLEKWNRQCAYCKATDTRLEVDHIHPKSKGGSDRVSNLTVACHDCNQAKGNRNITDFLSGKSDLLNRILSQVKQPLLDAAAVNSTRNKIAEELIATGLPIEFGTGGQTKYNRCRLDLPKTHWLDAACVGVVVHLTLETKQCLTITASGHGNRQMAGVDKYGFPYRHRTRQQVHFGFRSGDIVRAVVPKGKKAGTHLGRVLCRKSGSFDIQTKSGRVTGINHKYCSTIHGRDGYAYVF

SEQ ID NO: 4832 - protein, 431 aa, unidentified
MDAWDIIVILNKRGKPLMPCSPAKARLLLKEKKAIVARRTPFTIQLTIATGEAKQPVSLGVDAGYKHVGLSASTEKAELYASEVELRPDVSDLLSARRTLRQSRRNRKTRYRAPRFDNRIRTKRKGWLAPSVENRINAHLSRIGAILRLLPVTKITVETASFDTQLLKNPDISGKEYQEGEQLGFWNVREYVLFRDGHACQHCHGRSKDPVLNVHHLESRRTGGDSPGNLLTLCETCHKALHRREIKLKTKRGQSFRAEAFMGIMRWEVLNRLKASHPELEVHNTYGYRTKHTRIVNGIDKSHCADAFCIAGNLGAKRLGEFFFQKQTRRNNRQIHKLSILKGGIRKRNQAPFEVKGFRLFDKVACQGEEGFIFGRRSTGYFDVRKLDGTCISAGISYKKLHLLEKRRTYLTEIRKEEALPPPPEGRGLRA

SEQ ID NO: 4833 - protein, 568 aa, Branchiibius sp.
MSTLHTGARTHRRVLPQPAALESVPADNPGVGTKRGTDIPRTAQAGRRDTGVQHGRGETTGGAPVPGGVAAVPAGRKPSSTKQHSATQQNRTTRITSSPKQSRFTADNAVVFVLDRHKRPLMPTDCKRAKKLLARGRAVVHRKVPFTIRLKDRTVDQSMLEPLGLGIDPGSQHTGLSLDKTVEAVDESTGEVTTTRTGLWLGQLDHRGQHIHLRLVARAQRRRGRRGRNLRHRAARNRNRSVRVGWLPPSVQHRVDSTMTCVTRLQSLAPIASLRLERVSFDTHAMTAPGISGLEYQQGTLAGTEIREYLLAKFCHRCVYCDATGVGTGSVPLNIDHLLPRARGGTNRVSNLVLACVRCNQAKGARSVDAFVTDGVRRARIKAEAKTPLRDAAAMNACRNRLAAELDATGLPVEWASGGRTKWNRVRNGVPKDHSLDALCVGAVDVIVRWVPTVLHIQCVGRGRYQRVTTDRFGFPRSHRPRRKQHYGFITGDLVKAVIPTGPKAGVYRGRVIVRSTRTFRLVTPTHRYDGINCRYMTTMQRGDGYSYKARPSLQRRLAPHGDQTKAA

SEQ ID NO: 4834 - protein, 509 aa, unidentified
VYVLNKDGKPLMPTTRCGHVRYLLKEKKARVVKTKPFTIQLLYKTNDVVQPLYLGIDPGRTNIGVAVVKADGTAVFTAHLETRNKKIPKLMKKRKDSRRARRTNGRRCRRQRRAKANGTISKKCVKQATAQNGSASKRAKKIGVIKRHLPGCEKEVLCIGIKNKEAKFNNRTRPAGWLTPTANQLLQTHINLIKKIQKLLPISDVVLEINKFAFMQLDNPDIQKWQYQQGPLYQKANLEEAVSEMQEHHCLFCKKKIDHYHHVVPQHKNGSNTIDNIVGLCTKHHDLVHKDTAWHEKLTKKKTGLNKKYGALSVLNQIIPALTKELSSIFPKHFFVTTGKSTYDYRAAHGVSKDHWLDAYCIACSVLPNDVCDSSINNRVPYELKQFRRHDRRALHKENMSRVYTLNGKKVATNRHKATEQTADSLEEFRQNHPDDVCKLKVKEHHSEYRNPKRNFPGYVFLVGKRTHVMQGTSGSHNGKADGYYDTNGNSYSSGKCKFVAKNEGIIFA

SEQ ID NO: 4835 - protein, 442 aa, unidentified; identical to SEQ ID NO: 3037

SEQ ID NO: 4836 - protein, 422 aa, unidentified
MLVYVISKDGQPLMPISRCGKVRRLLKSKRAKVIKRCPFTIKLLFEPENDFVGECYCGVDTGSKHIGIAVVSNNRVLYQSQIELRDDIKRKMEQRRMFRRNRRSRKTRYRKTRFLNRANSTKKDRLQPSVKHKIQAHIDEIEFCKRILPISNLILEVSQFDTTLMKNSALISEKVKHWGYQKGFNYNYSSRREAILHRDKYTCQCCGKKNCRLEVHHIKFRRDGGTDDEENLITLCEDCHKGVHAGTVVLNKKPKKSKNLKHATHMSIIRSRLLKEYPDAIETFGFVTSENRNHLNLPKDHYIDACVIASGGLPFELSDVLYQKRRVSKQDRQLCQGMRGERKIPTWKILGFKKFDLVEYMGELCFVKGRRSSGSFVLMDINSRLIDFRDKGGKQNPSYKSLKRVSARRSILCISKKNREIR

SEQ ID NO: 4837 - protein, 504 aa, unidentified; identical to SEQ ID NO: 3854

SEQ ID NO: 4838 - protein, 243 aa, unidentified
LTHQFKKGVPVMVYVLDKNGQPLMPTDRHRKVRLMLQSGQAKVIKRCPFTIQLNYDSGHQTQEISLGIDAGSKHIGVSTTTKIKVLYEADVELRNDIVDLLSSRRELRRGRRNRKTRYRQAKFNNRRRGNGWLAPSIRQKIGTHLTVVENICKMLPISRIMVETASFDIQKIKNTDIQGAEYQQGDQLGFWNVREYVLFRDGHTCQCCKGKSKDKILNVHHIESRKTGGNAPNNLITLCETCH

SEQ ID NO: 4839 - protein, 493 aa, unidentified
MAAVYVISASGKPLMPTTRCGHVRGLLNEGKARVVEREPFTIQLKYETPDVTQPLYLGIDPGRTNVGAAVVREDGECVFTAQLTTRNKDVPKLMKARKQFRMAHRRLKRRCKRQRRAKAAGTLSQKGEFQRLLPGYEKPILCKGIRNKEARFNNRQRPVGWLTPTANHLLLTHLNMVKKLQKLLPITDVVLEVNRFAFMAMENPSIRRWQYQQGPLYGKGSVEDAVYAQQDGHCLFCGKPIAHYHHVVPQHKNGSETLENRVGLCNEHHDLVHKDRAWDAKMKETKAGLNKKYHALSVLNQIIPALTEQLTAMFPQHAFVTTGKDTADFREDYGIAKEHHLDAYCIACSVLAEPTKVAAPTGKPHRLMQFRRHDRQVCHKENIKRVYLSEGKAVATNRHKAIEQKDDSLEEFRKTHTQQEVSALTVKDHQPVYKDMRRFMPGGVFLFNGKVHTLQRSHGRYKGMPFYYIDTDGSKNHAKGCIFLQQNCGLRWV

SEQ ID NO: 4840 - protein, 443 aa, Anoxybacillus sp.
  VARIANT 196..229: note = X can be any naturally occurring amino acid
MVEENMTCFMQRKGENPMVFVLDTNKRPLAPCHEAVARKLLKQGKAAIYKRYPFTIILKEIVDNFRPKTPYRLKIDHGSKHTGLAILRGQEVVWLGQLDHRTDIKERMDKRRAFRRARRNRKTRYRKPRFLNRRRKDGWLPPSLESRVQNIQTWVNHLKKLCPIGYISYENTKFDTQLMRNPEINGVEYQQGTLQXXXXXXXXXXXXXXXXXXXXXXXXXXXXXXXXXXSRGGTDRVDNLCLACHDCNQRKGSKTAEEFGYPHIQKQVKESLKDASAVNSTRWKVYEVLKQSGCEVECGTGARTKMNRIRLDLPKTHYFDACCVGESTPNHLYFKTKEVLFIRAKGRGSRSRTNLDRYGFPRGYLARQKFFFGFQTGDMVKAVIPRGKYQGVWFGEVSCRKTGSFDIKGKDGKRIAQGINYRYVQVIQRFDGYTYRREGMNIA

SEQ ID NO: 4841 - protein, 420 aa, unidentified
MQYVYVLNKHDEPLMPCSPRKARLLLKQKKAHVVKRTPFTIKLLYGSAGYKQPITLGVDAGSKHVGLSASTEKRELYCEEFTPRNDVVDLLSTRKQNRRSRRNRKTRYRAPRFDNRVHSKRKGWLAPSVEVKIQEHITVIKRIRRILPITLVRVETAEFDTQRLKAMLEGKPLPVGTDYQLGEMYDGYNVRQYVLKRDHYTCQCCGAHTTTKKTVKLHVHHLESRKVGGNAPSNLITLCTTCHDALHKGKVSLDGKERGKPLRDAAFMGIMRKTLMARLRDELSIPVQGTYGYITKMRREQNDIKKSHVNDARCISKHPLAEPCSVCYRTKAIRHHNRQTHKANFSKGGTRQRSQMPYVVEGYRLWDKVLYKGQECFVSGRRASGSFTLKKLDGTRISKGVTFKKLRLLEPATNYLIERM

SEQ ID NO: 4842 - protein, 424 aa, unidentified
MRVFVFNMRGRPLMPCSQRKARLLLRENKAKIYKYHPFTIQLTYTTGETKQDCHIGIDTGSKYIGAAVRSEDKVFWKGEIELRQDIRSNLDTKRIYRRSRRNRKTRYRKPRFLNRKRRDEWLPPSLQSRINHTFHWIDTLSSLVPNPILHIEVGKFDVAKMINPEIHGVDYQHGQTYGFFDERYFVFARDNYTCQCCGKSKNKILNTHHIIYRSNGGTNRVDNLITVCTDCHTSQNHRKGGIFYQWQEQHKKVKQYKEPPFMNTLRKRIFVAYPDAEITYGSETTPKRKAMKLDKTHYNDAIVISGINEIKENPEEWLLIKQFRKKKRSLHEATARKGRKKPNRNQTRNSKNTPYYKGFYLNDKVSVFGKSGYITGFTSNAAYIKDENNDYITLPNKTYKQVSINKMKLECHNNNWQYIITNAV

SEQ ID NO: 4843 - protein, 442 aa, unidentified
MVTVQQSTHHLPFGRVFIRRNLFMVYVISQDSKPLMPCSNPIARLLLKQGKAKVKRREPFTIKLIYETTDYTQDLTLGVDTGSGTIGAAVSKDNGDIVYMSEVVVRNDITDKMTQRAKYRRNRRNRKTRYRKARWLNRSNSIKKDRFSPTMQSKLHSHVKEIEYIQSILPITEMVFETGQFDMHLMKNPSLANPKVRPWGYQKGTNYGFENTKAMVLNRDNYTCQCCKGKHKDSKLEVHHIVFRSQGGSDEESNLITLCHTCHKDLHSGKINLKLSGKVKGNLKYATQMNSIRKQLFRLYPNAIETFGYVTKANRLHLGVDKEHYYDACTIATQGNAFNVKSDLYKKKCVSDGDFQKTKGIRSEQPIVTDKICGFRKFDKVRYFGKDYFIKGRMSTGYAILMDIDGNKIDFSTMPRGYKTPKLSNCKRITARSTVMTQVKVV

SEQ ID NO: 4844 - protein, 424 aa, Enterococcus sp.
MRVFVRNMRGKPLMPCSNRKARLLLKEGKAKIYQYNPFTIQLCYATGEYMQECHIGIDTGSEHIGIAVTSEEKVLFKGEVELRQDVKSNLDTRRSYRRDRRNRKTRYRKARFLNRKKKESWLPPSIENRVNHTFKWINKLIALLPNPKLHIEVGKFDVAKMINPDIQGVDYQHGQTYGFYDMRYFVFARDNYTCQCCGKSKGKILQTHHIIYRSNGGSNRADNLITVCTDCHTYENHQKGGILYQWQEKHKKTKQYKEPSFMNVLRKRIFKKYPNAVITYGSETTPKRKELGLEKMHYNDAIIISGISTIKENPNEWLLIKQFRKKKRSLHEATARKGRKEPNRLQKRNAKNKPYYKGFYLNDKVEVFGRIGYITGFTSGGAYIKNAENEYIILPNKSYKQVGISNIKLLHHNNNWQYVNKRIS

SEQ ID NO: 4845 - protein, 452 aa, Ktedonobacter sp.
VLYVKPFANIDEAHITLQDRRLNLSNVFVIDSDYKPLNPVHPARARLLLTQGNAAVYRRYPFTIVLKRVVDQPEVQPLRLKLDPGSKTTGIALVNDTNGKVVFAAELEHRGHAIKDSLDSRRGVRRRRRNRKTRYRKPRFQNRRRKKGWLPPSLESRLANILTWVARLCRSAPITALSQELVKFDLQLMENPDITGVEYQQGTLQGYEVREYVLEKWKRTCAYCGKQDVPLQIEHIHPRANGGTHRISNLTLACEPCNIAKGTQDIAVFLAKKPDVLKRILAQVKKPLKDASAVNATRFALLERLKAFGLPVECGSGGLTKYNRTTRGLAKTHWLDATCVGKSTPSAISHKGVVPLLLTANGHGRRQMCVPDKYGFPEKHKQRRKTFLGYRTGDMVKAITSKGTFEGRIAIRHRPSFRLGKVDIHPKYMHCIHRADGYEYTQKGVRNAPPHV

SEQ ID NO: 4846 - protein, 533 aa, unidentified
MSTVYVLNKDGKPLMPTTRGGHVRHLLKEQKARVVQSNPFTIQLLYETNDAVQPLYLGIDPGRTNIGVAVVKADGTAVFTAHLKSRNKEIPKLMQDRKRARRARRTNGRRHRRQRRAKANGTISKKCVKQTTTQNGSVSKRAKEIGIIKRHLPGCEKDVLCIGIKNKETKYTNRERPEGWLTPTANQLLQTHVNLVKKVQKLLPISDVVLEVNKFAFMRLDNPDIQKWQYQQGPLYKKESLESAVSEMQEHHCLFCKKPIDHYHHVVPKSENGSNTIANIVGLCAEHHNLVHKDVAWQEKLAEEKTGLNKKYGALSVLNQISPALTNKLSVLFPKHFFVTAGKSTHDYRAAHGVSKDHWLDAYCIACSVLPSNVCDSNINNHVPYELKQFRRHDRRVLHKANMSRVYTLNGKAVATNRHKAIKQTTDSLEEFRQNYPDDVYKLKVKEHHPAYRNLNRNYPGSVFLVGKQAHVMQGIASSKDGKTTKYNDTNATTITAGKCKFVAKNSGILFVQCKFRKALSDGTTKKLQYPVR

SEQ ID NO: 4847 - protein, 442 aa, unidentified; identical to SEQ ID NO: 2903

SEQ ID NO: 4848 - protein, 438 aa, unidentified
LTTGKYITSAQPWQEEKFSERKVSEMTSYAFVLDADGKQLAPTKEQKAWFLIRKKRAALVSKYPMVIQLNKEIPDEEICKDEIRCGIDDGGLHVGIALVQKCQTQNKVVFKGTIEQRNDVKHLMDIRRGYRRYHRYHKRYRQARFNNRSSSKQKGRIAPSILQKRQATVRVINQLNKWINITDYWLEDVAIDIRAMTDGYKSYKWEYQKSNRLDENIRKAVILRDGCKCMECGKSNCKLEVHHIKPRRLKGSNTLGNLITLCTKCHQKTKGVEELYMDRYFALLNSSDDKNLNYAQHVMIGKKWLREQLSSLGILHLTNGGDTANKRIDWDITKSHSNDAICITNLRPNKCEIKEWTIKPMRRQSKAKTDNVLGIKHRDFVEYTFRNSETHRGYVTALYPEQNALNFQSPTKHCKKVNARKCKVIWKYSKIYWLDNVS

SEQ ID NO: 4849 - protein, 431 aa, unidentified
MPNKVYVINKHGRPLMPCSPAKARHLLDAGKAKVKKRTPFTIQLVYGSSGYTQEVILGVDAGSKTIGMSASTTKEELLSAEVKPRNDVVDLLSTRREFRRARRNRKIRYRKPRFDNRVRSKHKGWLAPSVEVKIQEHITSIKRVCRILPVSKVVIETAEFDLQLLKAIEEGKPVPQGEDYQQGEMYGHYNVRQYVLWRDDYTCQCCGAHATKKKEVRLHVHHLESRKVGGDAPDNQVTLCESCHKKLHKGLIEAKNFKKRKRRPTRDATFMGIMRATLLQRLRSELPIPVIETRGYITKATREKLLVLPKSHTNDALAITQGKHGFNVGYLPGIVQSDKTYTIRPVRHHNRQLHKATILTGGIRKANQAEKYVCGFRLYDKVLYNGIECFVWGRRTSGSFLLRALDGTKVKDGAGHRILTLLERSSNYLIA

SEQ ID NO: 4850 - protein, 471 aa, Caldicellulosiruptor sp.; identical to SEQ ID NO: 3268

SEQ ID NO: 4851 - protein, 419 aa, unidentified; identical to SEQ ID NO: 2286

SEQ ID NO: 4852 - protein, 443 aa, Oligella sp.
MAVFVLGKNKRPLMPCSEKRARLLLERGRARVHRLVPFTIRLVDRTVADCVLQPLELKIDPGSKTSGLALVRTRQSVNAQSGEITATAHVLNLFELIHRGFQISQALTARSQMRRRRRSANLRYRAPRSLNRTRPTGWLAPSLQHRVDTIQSWVQRIRRYAPVTHLAQELVRFDMQQLENPEITGVEYQQGELAGYEVREYLLEKWQRQCAYCDATDVSLQIEHIHPKARGGSNRISNLTLACAPCNVKKAAQHITEFLAKDPKRLAKIQAQAKRPLRHAAAVNATRWALLNTLNATGLPVNTGSGGLTKFNRTRLQIPKTHALDAVCVGSVDHVKQWQKPTLVIKATGRGSYQRTRLNRFGFPRGYLTRQKQIHGFQTGDRVKAVVTQGKKIGTYVGRVAVRASGSFNIQTAQRLIQGISHRYCTLIQRGDGYGYSLRTDSN

SEQ ID NO: 4853 - protein, 477 aa, unidentified
MIIALDKYKRPLGFLTERRCRILMERKRAVLYRVFPTVVILMDVDARTIPGLPSFRIKIDPGSKYTGIAIIRNDTDEFVYAMQIEHRGDAVRAALNKRKNARRNRRSRETGYRRAKWGNRCLSEKDKRSYDSSREDGWLPPSIRSAADNVISWVRRLGRWINLTECSFEAVRFDTQLMEDPDIEGEEYQHGTLFGLEIKEYLMEKFGHTCQYCGGKSGDPVLEWEHMRPKSRGGSDRVKNALLSCSSCNKDKGNRTPEEWLELIKARLPREKGKRKELDEERVELIQKVIDGKPQGGALRYAAWVSSSRRYLEKALFGIFGDVECSSGGRTKYNRTELGYPKEHHYDALCVGTVPEKGYHDRTNGYYLYAKAAGRGTRLRGHLNKCGVIATKWTDRKKGFFGFQTGDIVVAEVPHKTPKPYKYEGRFVGRVMVRATGSFDIKTTDGKLVTVKEQYCRLLQANSGYHYTMKRAIPLGH

SEQ ID NO: 4854 - protein, 461 aa, unidentified; identical to SEQ ID NO: 2860

SEQ ID NO: 4855 - protein, 420 aa, unidentified
MQYVYVLNKHGEPLMPCSPRKARLLLKQKKACVVKRTPFTIKLLYGSTGYKQPITLGVDAGSKHIGISAATEKNELYCEEATPRNDVVDLLSARRAFRRSRRNRKTRYRAPRFNNRVHSKHKGWLAPSVEVKIQEHITLIKRVCRILPVTFVRVETAEFDTQRLKAMLEGKPLPVGTDYQLGEMYDEYNVRQYVLKRDNYTCQCCGAHPTKTKAVKLHVHHIETRRTGGNAPNNLITLCTACHKALHAGKVTLDGKKRGRSLKDAAFMGVMRKTLMERLLKELKIPVQRTYGYITKYLREKHSIPKSHTNDARCISKNPLAIPCDTCYYTKAIRHHNRQLHKATILKGGIRKANQAPYTVKGYRLWDKVSYNGSECLITGRRTSGYFALKKLDGTVVSNSASYKKMRLLEVATNYITERR

SEQ ID NO: 4856 - protein, 511 aa, Acrocarpospora sp.
MATFRAGRKTDRAVLPQQLALEFESVDNPGIGDETGLGRRVTASGAGHGRGETIGGSPATGGVTPEPARAGERPRERHPFVFVLDKRGIPLQPTTPARARRLLKVGRAVVARHTPFVIRLKDRMIADSQVDGVELGVDPGSKHTGIAVFTVQAGERRGRYAVQLDHRGAQIRKKLEQRAAYRRGRRTRNLRYRAPRFLNRTRPKGWLAPSLRHRVDTTVSWVDRLTRWAPVTAVHVERVAFDTHAITAGRPMEGAEYQHGTLHGVEVREYLLAKFGRACLYCGITGVPLNIDHVHPRSKGGSDRVSNLVLACIPCNQAKGNRPVEEFAPKRAVEILRRAKTPLRDAAAVNATRWVLWRALDASWPTHSASGGRTKWNRIRCGLSKTHTLDALAVGKLGTVTELVAVVLVAGCAGRGAYTRTRTDRHGFPRLRMPRAKRLFGYATGDLVRAVVPGGKKAGTYTGRVAVRRTGSFNITTARGVVQGIHHRHLRLLQRADGYAYTTRGESDASR

SEQ ID NO: 4857 - protein, 414 aa, unidentified
MPCSPAKARLLLKEKKAIVKRRTPFTIQLTIATGEAKQPVSLGIDAGYKHVGLSASTEKAELYASEVELRQDITDLLSARRALRQSRRNRKTRYRAPRFDNRIRTKRKGWLAPSVENRINAHLSRIEAVLRLLPVTKITVETASFDMQLLKNPDISGKEYQEGEQLGFWNIREYVLCRDGHVCQHCYGRSKDPVLNVHHLESRRTGGDSPGNLITLCETCHKALHRGEITLKAKRGQSFRAEAFMGIMRWEVLDRLKASHPKLEVQNTYGYRTKHARIANGIAKSHCADAFCIAGNLGAERLGEFFFQKQTRRNNRQIHKLSILKGGIRKRNQAPFEVKGFRLFDKVACQGEEGFIFGRRSSGFFDVRKVDGSRISAGISYKKLHLLEKRRTYLTEIRKEEALPPLPEGRGLRA

SEQ ID NO: 4858 - protein, 413 aa, unidentified
MTSYAFVLDANGKQLAPTKEQKAWFFIRKKRASLVSKYPIVIQLMKEIPEKEICQDEIRCGIDDGGLHVGIALVQKCKTKNKVVFKGTMEQRNDVKHLMEVRRGYRRYHRYHKRYRQARFDNRKSSKREGRIAPSILQKRQATIRVIHWLNKWINITNYWLEDVSVDIRALTDGYQSYRWQYQKSNRLDENIRKAAILRDGGKCMECGKSNCRLEVHHIKPKRRNGSDTLDNLITLCESCHQKTEGQEELYMDRYFSLLKSSDNKNLNYAQHVMIGKMWLRKQLSGLGVLYLTSGGDTANKRIDWNIEKSHANDAVCITDLRPDTCDVKEWTMKPMRRQSKAKTDHVLGIHHRDLVEYTFKNGETHRGYVTALYPEQKAINFQSPTKHCKKVNARKCKLLWNYSKIYWFENAS

SEQ ID NO: 4859 - protein, 337 aa, unidentified
RNDVVKLLSKRKQYRRSRRNRKTRYRAPRFNNRVHSKHKGWLAPSVEVKIQEHITVIKRICRILPISLVRVETAEFDTQRLKAMLEGKSLPVGTDYQLGEMYDEYNVRQYVLKRDNYTCQCCGAHTTKKKTVKLHVHHLEGRQVGGNAPNNLITLCVDCHKALHAGKVKLDGKKRGKSFKDAAFMGIMRKTLMARLRDELPIPVQGTYGYITKMRREQNDIKKSHVNDARCISKHPLAEPCSVCYRTKAIRHHNRQTHKANFSKGGTRQRSQMPYVVEGYRLWDKVLYKGQECFVSGRRASGSFTLKKLDGTRISKGVTFKKLRLLEPATNYLIERM

SEQ ID NO: 4860 - protein, 451 aa, unidentified
MSVAVISKTGERLMPTSEYRARKLLKSGKAVKHSYHPFTIQLTERKTGDVQPIELCMDTGYIHIGISVKSEKHEYLAEQIDTLTDERIRHDACRMYRRQRRGRKRYRKPRFNNRKRDKGWIAPSLKHKKDIHVQAISRINKVMPLTDITMEMGNFDTQVLKAKEAGKPLPQGACYQHGERYGTATLREAVFSRDGYKCQCCGRTIRDGAMLHVHHVKYRSQGGTNSMANLATVCDKCHTPKNHKPGGKLYNWKPKLPDFKGATFMTTIRWQLYNEVKSLFPDINVHITYGAATKEQRRELNIDKSHVNDAFAMGKFHPKHRANAVLYKKKRRNNRCLEKFYDAKYIDSRDGSKKTGQELFNGRINRNHKKDSENLHQYRLQKIKAGKRTIRKQHYSIQPHDIIMYKNRKRETSGCHCNGTRVVLLPDKKTAAIQKVKIYKYAGGYFKSAFN

SEQ ID NO: 4861 - protein, 424 aa, unidentified
MRVFVFNMRGRPLMPCSQRKARLLLRENKAMIYKYHPFTIQLTYTTGETKQDCHIGIDTGSKYIGAAVRSEDKVFWKGEIELRQDIRSNLDTKRIYRRSRRNRKTRYRKPRFLNRKRRDEWLPPSLQSRINHTFHWIDTLSSLVPNPILHIEVGKFDVAKMINPEIHGVDYQHGQTYGFFDERYFVFARDNYTCQCCGKSKNKILNTHHIIYRSNDGTNRVDNLITVCTACHTSQNHRKGGIFYQWQEQHKKVKQYKEPPFMNTLRKRIFVAYPDAEITYGSETTPKRKAMKLDKTHYNDAIVISGINEIKENPEEWLLIKQFRKKKRSLHEATARKGRKKPNRNQTRNSKNTPYYKGFYLNDKVSVFGKSGYITGFTSNAAYIKDENNDYITLPNKTYKQVSINKMKLECHNNNWQYIIKNAV

SEQ ID NO: 4862 - protein, 456 aa, Halomonas sp.; identical to SEQ ID NO: 4333

SEQ ID NO: 4863 - protein, 413 aa, unidentified
MVYVLNVNGQPLMPTENHAKVRVLLKQGKAKVVNNCPFTIQLLYSSTSYIQPVTLGVDAGSKHIGLSATTEDKELYAADVELRNDIVKLLAARRASRCSRRNRKTRYRKPRFNNRKRDKGWLAPSIREKIGTHLKVVDDTCKLLPVSKIIVETASFDIQKIKNPDVKGTDYQQGEQLGFWNVREYVLFRDGHKCQCCKGKSKDKILNVHHIESRQTGGNAPNNLITLCETCHTGYHKGTVKLPAKIKRGMKFKDAAFMGIMRWAFYGELKKRYPDVSLTYGYITKNTRIKNGLPKEHYVDARCISGHPSARPLGTVFYIKKVRCHNRQIHKFKILKKGVRKRNQAEHEVYGFRLYDKVSWKGQICFIFGRRSTGRMDLRLLDGTHINASVGYKNIKLLRMRNNYLIEVRNAIG

SEQ ID NO: 4864 - protein, 456 aa, Halomonas sp.; identical to SEQ ID NO: 3676

SEQ ID NO: 4865 - protein, 411 aa, unidentified
MVYVQDIDGKPMMPTTRHGKVRRLLKENKAVVVNTCPFTIKLTYKTSDYKQEIVLGVDSGTKHVGLSATTKSKELYASEVILRSDVVDLLSTRRGLRRTRRSRLRYRKQRFNNRVKSKKDGWIAPSVRHKIDSHVRIISFVYSILPVSKLIVEVAQFDTQKIKNPEISGKEYQEGEQLGFWNVREYVLARDGHKCQHCKGKSKDPILNIHHIESRKIGGDSPSNLITLCETCHKEFHKGNIKLKVSRGKSLRDAAVMGIMKWKLYEELKSRYDNVSMTFGYITKYNRINHGIEKSHVSDAFVISRNFNSCRLGYYYKRKLVRRHNRQIHKMKILKGGIRKRNQAPFKVFGFRLFDKVMFQGEEHFIYARRLSGQFNIRDINGENKKDVSCKKLKYVSHGLVSVKTNLFLSQ

SEQ ID NO: 4866 - protein, 406 aa, unidentified
MVYIKDIDGRPLMPTKRHGKVRWLLKENKAVVINLCPFTIQLTYKSTDHKQPVTLGIDAGAKHIGFSATAEKEELFACETTLRTDIVDLLSTRLQNRRTRRSRLRYRKPRFNNRGSSKKKGWVAPSVKQRIDSNLNEVNEIHKILPITKIVIEVAQFDTQKMKNHDISGSDYQNGEQLGFWNVREYVLFRDGHKCSHCKGKSKDPVLNVHHLESRKTGGDSPSNLVTLCESCHKAFHKGEIELKKKRGKSLRDAAVMGIMKWKLYEELKSRYDNVSMTFGYITKYNRIKYGIEKSHTSDAFVISRNFNAKRIERQYLKRLVRRHNRQIHKMKILKGGKKKNNQAPFGVFRFRLFDKVLYNNEICFIYGRRKSGNFNIRDFNGENPKDVSYKKLKLIRGKMHPIILK

SEQ ID NO: 4867 - protein, 429 aa, Ktedonobacter sp.; identical to SEQ ID NO: 4063

SEQ ID NO: 4868 - protein, 414 aa, unidentified
MPCSPAKARLLLKEKKAIVKRRTPFTIQLTIATGETKQPVSLGVDAGYKHVGLSASTEKAELYASEVELRQDITDLLSARRALRQSRRNRKTRYRAPRFDNRIRTKRKGWLAPSVENRINAHLSRIEAVLRLLPVTKITVETASFDLQLLKNPDISGKEYQEGEQLGFWNIREYVLCRDGHVCQHCYGRSKDPVLNVHHLESRRTGGDSPGNLITLCETCHKALHRGEITLKAKRGQSFRAEAFMGIMRWEVHNRLRALHPGIEVSNTYGYRTKHARIANGIAKSHCADAFCIAGNLGAERLCEFFFQKQTRRNNRQIHKLSILKGGIRKRNQAPFEVKGFRLFDKVACQGEEGFIFGRRSSGFFDVRKLDGTRISAGISCKKLHLLEKRRTYLTEIRKEEALPPLPEGRGLRA

SEQ ID NO: 4869 - protein, 413 aa, unidentified; identical to SEQ ID NO: 2605

SEQ ID NO: 4870 - protein, 406 aa, Geobacillus sp.; identical to SEQ ID NO: 3747

SEQ ID NO: 4871 - protein, 424 aa, unidentified
MRVFVFNMRGRPLMPCSQRKARLLLRENKAMIYKYHPFTIQLTYTTGETKQDCHIGIDTGSKYIGAAVRSEDKVFWKGEIELRQDIRSNLDTKRIYRRSRRNRKTRYRKPRFLNRKRRDEWLPPSLQSRINHTFHWIDTLSSLVPNPILHIEVGKFDVAKMINPEIHGVDYQHGQTYGFFDERYFVFARDNYTCQCCGKSKNKILNTHHIIYRSNGGTNRVDNLITVCTDCHTSQNHRKGGIFYQWQEQHKKVKQYKEPPFMNTLRKRIFVAYPDAEITYESETTPKRKAMKLDKTHYNDAIVISGINEIKENPEEWLLIKQFRKKKRSLHEATARKGRKKPNRNQTRNSKNTPYYKGFYLNDKVSVFGKSGYITGFTSNAAYIKDENNDYITLPNKTYKQVSINKMKLECHNNNWQYIIKNAV

SEQ ID NO: 4872 - protein, 471 aa, Acidithiobacillus sp.
MAVFVLDKRKKPLMPCSEKRARILLERGRARVHRMVPFTIRLVDRLQDDSVLQPVRVAAAPGSKTTGLALVRDAETVDAITGKVTRTVVVLMLLELQHRGHAIRDALTQRRAFRRRRRGKLRYRPARFDNRTKPAGWLAPSLRHRVDAAIAWIARLRRLAPVSALSTMLHRFDTQLLQNPEISGIEYQQGELQGYEVREYLLEKWGRKCVYCDAEHTPLTIDHIHPKSAGGSDRVSNLTLACFPCNQRKSNQDVRAFLAHDQKRLARIESQRKAPLRDAAAVNSSRWALLQRLEETGLDVEVGSGGGTKWNRKRFSVPKAHCLDAACTGHVDAIQDRQQPVLSIKATGRGRYKRTQLTKYGFPRGYVTRQKRHFGFQTGDMVRAVVTRGKKAGTYVGRVVIRASGSFSINAASGLVSGIHHRFFSLIQRADGYGYSLTKIASTQGDAGRGRSVAAALSLPGMNARVSRANG

SEQ ID NO: 4873 - protein, 492 aa, unidentified
GHVRILLKQKKARVVSLKPFTIQLLYDCEEGTQPIVLGIDPGRTNIGLSAVRKDTGEAVFTAQMETRNKEIPKLMKDRRAFRRKHRSYGRRKVRQRRASAHDTNSPKCAKQKTAQNGGVSKQAQKVGVIKRHLPGCEEPVICIGIKNKEARFNNRLRPKGWLTPTANHLLQTHITVVNKVRRFLPITDVVLEVNKFAFMALDNPHVQKWMYQHGPLKGYGSVEEAVSVQQDGHCIFCKNEIANFHHIVPQSKRGSNTIGNVVGLCSEHHELVHKDSTWEQKLKTKKQGMNKKYGALSVLNQIIPRLCDTLTNMYVEHFYVTDGQSTKAFRNEHDIRKDHYLDAYCIACSVLSSSCRSNVPDEKDVFHIMQFRRHDRRACHQERVDRKYYLEGKLVATNRHKAIEQKNDSLEEYVAAGGCVDKLFAPKHPPLYRRKGRIMPGTVFLVGNKTKMMIASQGTHNGVPNYYRFTDGSRATPKNCKPIYQNTGIVFV

SEQ ID NO: 4874 - protein, 414 aa, unidentified; identical to SEQ ID NO: 2856

SEQ ID NO: 4875 - protein, 429 aa, Ktedonobacter sp.
VSNVFVIDSDYKPLNPVHPGHARRLLRQGKAAVFRRYPFTIVLKRVVEQPEIQPLHLKLDPGSKTTGIALVNDTNGKIVFAAELSHRGHAIKDSLDSRRASRQGRRQRKTRYRKPRFDNRRRKKGWLPPSLESRLANILTWVARLCRYAPIATLSQELVKFDMQLMENPDIAGVEYQQGTLQGYEVREYLLEKWERTCAYCGKQDVPLQVEHIHPRARSGTNRMSNLTLACEACNTAKGTQEIEVFLKKKPDVLKRLLAQVKKPLKDASAVNSTRCALLERLKAIGLPVECGSGGLTKFNRATRGLPKTHWLDAACVGKSTPDVLLQKGVIPLRIKATGHGRRQMCVPDKYGFPKQHKERKKTFLGYQTGDLVKAITPKGTFEGRIAIRHRPSFRLEKVDIHPKYMRCVQRSDGYEYTQKGVRHAPPHG

SEQ ID NO: 4876 - protein, 442 aa, unidentified; identical to SEQ ID NO: 2834

SEQ ID NO: 4877 - protein, 419 aa, unidentified
MVYVISQDGKPLMPCSDPIARLLLKQGKAKVKKREPFTIKLTYETTNHTQGLTLGVDTGSGTIGTAVSKDNGDIVYMSEVVVRNDITDKMTQRAKYRRNRRNRKTRYRKARWLNRASSIKKDRFSPTMQSKLHSHVREIEYIQSILPVTEMVFETGQFDMQLMKNPSLANPKVRPWGYQKGANYGFENTKAMVLNRDNYTCQCCKGKHKDSKLEVHHIVFRSQGGSDEESNLLTLCHTCHKDLHSGKINPKLSGKVKGNLKYATQMNSIRKQLFRFYPNAIETFGYVTKANRLHLGVDKEHYYDACTIATQGNAFNVKSNLYKKKCVSDGDFQKTKGIRSEQPIVTDKICGFRKFDKVRYFGNDYFIKGRMSTGYAILMDIDGNKIDFSTMPRGYKTPKLSNCKRITARSTVMTQVKVV

SEQ ID NO: 4878 - protein, 478 aa, Burkholderia sp.
VAVFVLDRYRRPLMPCSEKRARLLLARGRARVHRVMPFVIRLTDRERAACEFQPLRLKLDPGSKATGLALVLDRETLDSTTGELRRGAAVLNLFELVHRGRQISDALTARSAMRRSRRGKLRYRAPRFLNRTRTPGWLPPSLQHRVDTTMAWVRRVRRWAPIAALSCELVRFDMQLLDNPEVNGVGYQHGTLASYELREYLLEKWGRRCAYCDAKSTPLQLDHIVARSRGGSNRASNLTLACEPCNRAKSALPVDEFLAKRPKRLAGIVAQSKRPLKDAAAVNATRWALTSALKATGMSLELGSGGRTKFNRTALGVPKTHALDAACVGALSFLTGWKRRTLSISCTGRGSYQRTRLDRYGFRRGYMTRTKRVHGFQTGDLVRADVPAGRKAGTHIGRVAVRVTGSFNIQKFDTVVQGIAHRYCRLIQRSDGYGYATKQLSKEKMPAGPLAHSPGYLRNLDNESFSALGRGSNNGVAD

SEQ ID NO: 4879 - protein, 442 aa, unidentified; identical to SEQ ID NO: 3218

SEQ ID NO: 4880 - protein, 446 aa, Thermanaeromonas sp.
MIRKLKKRKRVRIIGGGKSGKPPVVIFLDREFDYSRTVGRKLVIVLDPGYRYIGFAVCEPRGGKLVVYCRGVLRTRIPEIKGLMSDRRSFRRFRRYLSRYKKKRLSARQCRVLTKFKVPRNVRSKDRSNATLRHGVETHLNLYRKLLRFFPFPAHQVEFVMEDNVFDVRAMTWGKVYGADYQRSPRAPEGERKCILCGSQEDLHRHHLVPRKSGGTEVRENKVYLCVGCHEEVHAGRVFLPVRGIKQWRELGTMNAVMGVLREVPSISFVPAPEVVLKRRELGLEKDHADDGLAAAAAFCGCTGFDASVERRLMLVKFRRHARARVHAQRDRLYKVDGVIIARNRRKRGDQKDPSFADVFPLSPEQQRGLKVYPGTKILNPFRNDVLTIGGDVWVHIPTGRRFVATGVISEKYLYSPMLEEITGKSYIHPDQCRRVIRNEGIVVWS

SEQ ID NO: 4881 - protein, 511 aa, unidentified
MSTVYVLNKDGKPLMPTTRGGHVRHLLKEQKARVVRAKPFTIQLLYETNDVVQPLYLGIDPGRTNIGVAVVKANGTAVFTAHLETRNKEIPKLMQDRKKARRARRTNGRRCRQRRAKANGTISKKCVKQTTAQNGSVSKRAKDIGVIKRRLPGCEKDVLCIGIKNKETKFTNRTRPEGWLTPTANQLLQTHINLVKKIQKFLPISDVVLEVNKFAFMRLDNPNIQKWQYQQGPLYKKESLESAVSEIQEHHCLFCKKPIDHYHHVVPQHKNGSNTIGNIVGLCAKHHDLVHKDSAWEKKLAKKSTGLYKKYGALGVLNQIIPTLTNELSSLFPKHSFVTNGKSTYDYRAAHGVSKDHWLDAYCIACSVLPSNVCDSNINNHMPYVLKQFRRHDRRVLNNENMNRVYTLNNKAVAINRHKAKDQKTVSLEEFRKEHPDDVCKLKVKEHHPTYRNMNRNFPGSVFLVGKQIHVMQGIASSKDGKATKYNDTSATAIAAGKCKFVAKNTGILFV

SEQ ID NO: 4882 - protein, 428 aa, Microcoleus sp.
  VARIANT 428: note = X can be any naturally occurring amino acid
MCKVLLIDTEKRPLSPIYPAQARQLLRNKKAAVFRRFPFTLILKESRPDSPISPLRLKIDPGAKFTGIALVNDSTGEVVFAAELKHRGLAIRDSLTSRRQLRRSRRNRKTRYRPPRFLNRTRPLGWLAPSLQSRIGNIKAWVEKLRKFAPIAAISQELVRFDLQLMRNPDLQGKEYQQGTLAGYETREYLLEKWNRQCAYCGVKDVPLQIEHIYPRAKGGSNSITNLTLSCEKCNKKKGTKALKEFLKKDQSRLEKILKQAKRPLADAAAVNATRFALLYVLKETGLPVEIGSGGLTKFNRSQQNLEKSHWLDAACVGISTPILNIKGVKPLLICANGHGTRQSCRTDKFGFPIRHCSRTKFHFGFQTGDLVKAVVTRGKKVGEYVGRIVTRASGSFNISAKDGLVQGISHRYCSIIHKGWLFLCVIX

SEQ ID NO: 4883 - protein, 471 aa, Caldicellulosiruptor sp.; identical to SEQ ID NO: 3268

SEQ ID NO: 4884 - protein, 449 aa, unidentified
PTFRLGKVRRLLKDGKAKIVKHHPFTIQLLYDSKTNTQPIEICEDVGYNYIGISVKSQSHEYVSAQYDTLQDEKACHDSCRKLRRTRRNRLRYRKPRFDNRKRGEGWLVPSLKHKKELNVNVVKMYCAVMPITHATVEVGSFDTMLVKAIQEGKAIPEGADYQKGPRYNLATLREAVFYRDNYVCKVCGRKATEGAILHMHHMFYWKGRHGNSLDELLTVCEKCHTPANHQKSGKLYGFGENVKFADLSGAAFMNTVRWQIVNELYAAFGKDFVTVTYGAMTKEKRIALHLEKSHNNDAYAMGEFHPNCRCTFEHYEKVRRNNRILEKFYDSRYIDIRTGEIATGKELFNGRINRNHKKDSENLHKYRGKRLYKGHRALVRKKVNFNPGDLVSLNGEVLVVHGTHTNKKGAVNVEFKTPAKNGRKSANLKKLKIVKAAGSIHPAWEKVS

SEQ ID NO: 4885 - protein, 545 aa, Actinomadura sp.
VLLQRAALESGLADTPRIGNETGLRPPARLGGGTGAGHVRGETTGTSPGPGGVTPDLRGGERRREAHHVFVLDKDGAPLQPCHPARARRLLASGRAVVARHTPFVIRLKDRTAAASEVEGVEVGIDPGSRHTGIAVFTARKGERRGRYAIQLDHRGARIRKKLGQRAAYRRRRRSANLRYRAPRFLNRVRPDGWLAPSLKHRVDTTTSWVERLARWAPVEAVHVELAAFDTHALSAGRSLEGVEYQHGTLYGYQVREYLLEKWGRACAYCGAVNVPLTVDHIHPRSKGGADRVCNLALACVPCNQSKSDRPIELFLAHRPATVVRVLAQAKAPLRDAAAINSTRLGLRHALDRRFPGRVVVGSGGRTRWNRTRSGLPKSHTLDALCVGETGAVTAYPATVLVVACTGRGGHSRTRTDRYGFPRLRLPRSKTVRGFQTGDLVKAVVPGGKRAGTHLGRVAVRATGSFNITTRHGTVNGVGHRYARLLQRADGYGYTTRPEIAARVHGPDAGRQVPALKAGTSSLQCLAGDPIPPTPHGGGFLEGSP

SEQ ID NO: 4886 - protein, 442 aa, unidentified
MSTSVFVLDKRHRPLMPCRPARARRLLRAGRARVVKRFPFVIRLVDRTVEQSEVQPVLIKLDPGSRETGAAVVRDDEKKRHHALAFFVIKHRGGAIRDALKARSAFRRRRRSQNFRCRSPRFLNRVKPKGWFPPSLRHRVETTLSFVRRMCRYLPVSGIATELVKFDSQKLQNPEVSGVKYQQGTLFEYEVREYLLEKFGRKCVYCGAEGVPLNIDHVVPRAKGGSNRVSNLVLACVSCNQKKGARSLEDFLKGKPEVLARVRRELKTPLRDAAAVNATRWVLFNELKATGLPVETGSGALTKLNRHAFGVEKEHWLDALCVGRLNGVVTRKGLNVLEIRCMGRGSRQRTRLTKYGFPRGYLMRQKCVHGFATGDMVEANVPKGKKAGLWRGRVAVRVSGSFNIQTPKGVIQGVGWKHCRLISHNDGYGYAWLGHAPHSSPA

SEQ ID NO: 4887 - protein, 414 aa, unidentified
MVYVINKQGQALMPTERFGKVRRLLKNSLAHVVCRIPFTIQLDYDTTDYTQPVSLGIDAGSKHIGISATTSEKELYAADVELRNDIVDKLSTRRELRRTRRSRLRYRKARFNNRVSSKRKGWLAPSVENKIQTHLTVVEKIHKFLPITNIVVETASFDIQKINNPSISGSEYQQGEQLDFFNVREYVLFRDNHTCQHCKGKSKDKVLNVHHIESRKTGGDSPKNLITLCETCHKAYHRGEFKLNVKRGKSFRDAAFMGIMRWSFYDRLKNIYPNVSMTFGYITKNTRTTNNLPKEHYVDARCISGNPVAKPLGYYFYQKKVRCQNRQIHKANFLKGGRKKLNQAPFLVKGFRLFDLVEYQKELYYIFGRRSNGSFDIRKLDGTKVNKGSINCKHLRLISTRKSILIEKRTQVNL

SEQ ID NO: 4888 - protein, 471 aa, Caldicellulosiruptor sp.; identical to SEQ ID NO: 3375

SEQ ID NO: 4889 - protein, 465 aa, unidentified; identical to SEQ ID NO: 3909

SEQ ID NO: 4890 - protein, 415 aa, Bacillus pseudomycoides; identical to SEQ ID NO: 2431

SEQ ID NO: 4891 - protein, 471 aa, Caldicellulosiruptor sp.; identical to SEQ ID NO: 3375

SEQ ID NO: 4892 - protein, 424 aa, Clostridium sp.
MTYVYVLNNKGKPLMPCSPTKARKLLNQNKAKVKKRTPFTIQLLYNSKNYTQPIMLGIDAGSKTVGISASTNKQELFAAEMKPRNDIVDKLSTRRELRSSRRNRKTRYRPARFNNRKKSKPTGWIAPSIQVKIQEHVTAIKHVCSILPITKVIVETAEFDTQRLKALDNNTPLPIGTDYQLDEMYDWYNVRQYVLHRDGYKCRKCGKHKDIKFHVHHLESRKTGSNRPANLITLCEDCHEKLHKGLITLDKLKKPKSYRDAAFMCIMRKSLLARLQTELDAPVIETKGYITKFTRENILRLPKTHTNDALSISQGLLGFDRSVNPYTTRTDRTYTIKPVRHHNRQLHKANFKKGGKRPTNQAPKYVFGFQLFDKVKYNGQECFITGRRSRGYFMLKDIDNKTIATDSKYTKLKLLEKSTNYIIQ

SEQ ID NO: 4893 - protein, 419 aa, Geobacillus sp.; identical to SEQ ID NO: 2623

SEQ ID NO: 4894 - protein, 442 aa, unidentified; identical to SEQ ID NO: 3218

SEQ ID NO: 4895 - protein, 478 aa, Ferroplasma sp.; identical to SEQ ID NO: 2316
  source 1..478: note = Type II

SEQ ID NO: 4896 - protein, 452 aa, unidentified; identical to SEQ ID NO: 3322

SEQ ID NO: 4897 - protein, 309 aa, unidentified
MVYVVANDGQPLMPTNRYGKVYRMLRSGMAVVVKKCPFTIQLQYESERNVQPVALGIDAGSKHVGVSATTKAKVLYESDVELRGDIVKLLATRRQLRRSRRSRKTRYRPARFDNRKRKNGWLAPSIRQKIESHLTVVANVCKILPVSRIIVETASFDIQKIKNPDIQGTEYQQGEQMDFWNVREYVFFRDGHTCQCCKGRSKDKILNVHHIESRKTGGNAPNNLITLCETCHKGYHNGIVTLPKNIKRGMKFKDAAFMGIMRWTFYNTLKEQYEPDIPVSMTYGYLTKNTRICHDLPKGHCIDARCISG

SEQ ID NO: 4898 - protein, 459 aa, Ammonifex sp.
MVFVLDRKGRPLMPCTEKRARKLLEQGRAVVVRLEPFVIRLKDRMAEEAFLQPLRLKIDPGYEVTGISAVRVAEEKEVVVFFAEVHHRTDIPEKLLSRRQVRRDRRSRNTRYRVPRFSNRRRPEGWLPPSAEARVNQVLSVVGKLLRWLPVTEIVVESARFDTQKLQNPEISGIEYQQGELQGYEVRKYLLEKFGRRCAYCGKEGVPLEVDHVVPKSRGGTDRVSNLALACRECNQAKGNKLLQEWLEELKKSGRAIDRKRAENIPRVLAQLKKSLKAAACMNVTRYVLVEKLKVLGLPVFTATAARTKYNRARFGLPKTHYFDACCVGEVPGRLEVTAEYVQVFRAVGRGTRQMANPDRHGFPRGHRSGRKLYFGFMTGDLVMAEVPAGKYAGRYIGYVAVRQSGYFDLKDLSGRRVCQGVSWRCFRLVQRFDGWRYEKFKIAALSSPGLKAGASSAA

SEQ ID NO: 4899 - protein, 471 aa, Caldicellulosiruptor sp.; identical to SEQ ID NO: 3268

SEQ ID NO: 4900 - protein, 315 aa, Methanosarcina sp.
MLVFVINKEGKPLMPCKPSRARKLLKEGKVKVIRREPFTIKLLYGSSNYVQTIIAGMDTGSKVIGVCAMSQGKVLYQSEVYLREDVSGKMQQRAMYRRTRRSRKTRYRPARWNNRANSRREGRLAPSLRSKLESHFREKKFVESILPVTKWRVELASFDIHKITNPNVFSFWYQKGEQEGFYNVKAYVLSRDNYTCQHCKGKSKDKHLHCHHIVFRSNRGTDTPENLITLCNTCHDALHEGKIKLSGRKSITKHATEIGIIKSQIKKSGWDFIETFGYETKFKREQILKLPKTHYFDAVSICYTNLKVKFDIYFI

SEQ ID NO: 4901 - protein, 531 aa, unidentified
MPMLWKLNRSRQDRISAGPELAVPGLQQKKRTMRYVYVLDMNGKPLMPTCRHGKVRRMLKSGQAKAVDTLPFTIQLLKPTKTRILQPVIAGQDPGRTNIGMAAVRSDGTELYRAHIETRNKEIVSLMNDRRSFRQASRRGERLARKRLAKKLHTTAKHLNGRILPGCKEPLAVKDIINTEARFNNRLRPEGWLTPTATQLLRTHLETFRKLSGILPVTEVVLEVNRFAFMQLDDPDMKKRDIDFCRGPLYGTGGVKAAVSLQQDGLCLLCREREIEHYHHIVPRSRRGSNTISNIAGLCGKCHERIHKDQAAAEKLQSKKDGLSKKYGGTSVLNQIIPSLTEELGIRYPGHAHVTNGWSTKEFREKHELEKDHDVDAYCIAASILEDAQPVMQTEPYEIKQFRRHSRALINHQTERTYRYDGKIIAKNRKKRMDQKTDSLEDWVADMTKQYGQGTASRMLSKVTVQKSTRHYNTKGRMMPGAVFIYRGKRFVMTGQLTGGAYYRAYRQDKKNFPAKAVQVVQKNKGLVYVA

SEQ ID NO: 4902 - protein, 406 aa, unidentified
MVYVQDIDGRPLMPTTRHGKVRRLLKSKKATVVNLCPFTIRLLYDTTGYKQEITLGVDTGTKHVGLSATTKSKELYASEVILRSDVVDLLSTRRELRKIRRYRLRYRKPRFMNRIKSKKRGWIAPSIRQKIDSHIRIIGFVYSILPVSKLIIEVAQFDTQKIKNPEISGKEYQEGEQLGFWNVREYVLARDEHKCQHCKGKSKDPILNIHHIESRKIGGDSPSNLITLCETCHKEFHKGNIKLKVNRGESLRDAAVMSIMKWELYDELKSLYPNVKMTFGYITKYNRINHGIEKSHVSDAFVISRNFDSERLGYYYKRKLVRRHNRQIHKMKAPKGGNKRMNQSPFKVFGFRLFDKVMFQGKERFIYARRLRGIFNIRDINGENKKDISYKKLEYVSHGLISIVAG

SEQ ID NO: 4903 - protein, 407 aa, unidentified
QPLMPTDRHRKVRLMLQSGQAKVIKRCPFTIQLTYNTGHQAQEISLGIDAGSKHIGVSATTKTRVLYEADVELRNDIVDLLSSRRELRRGRRNRKTRYRPARFDNRRREDGWLAPSIRQKIGTHLTVVENICKILPISRITVETASFDIQKIKNPDIQGAEYQQGDQLGFWNNREYVLFRDNHTCQCCKGKSKDKILNVHHIESRKTGGNAPNNLITLCEICHTGYHKGAVQLPKTVKRGMRFKDAAFMGIMRWAFYEALKQQYEPVGTPVHNTYGYITKHTRIEHNLPKEHYVDARCISGNPDAFPSGEYYYQKKVRCHNRQMHKLTILKGGIRKQNQATYLVKGYRLFDKVSYQRKEYFVFGRRKSGFFDIRTLSGKQVNKGSLSCKKLKFIATRMYYLIERRAV

SEQ ID NO: 4904 - protein, 406 aa, unidentified
MVYVQDINGKPMMSTTRHGKVRRLLKDKKAVVVNLCPFTIKLMYVTSDYKQEIVLGVDAGTKHVGLSATTKSKELYSSEVILRNDIVDLLSTRRELRRTRRNRLRYRKPRFDNRIKSRRPGWVAPSVKYKVDAHIRVVENVCSILPISRIVIEVAQFDTQKIKNPNISGKEYQEGDQLGFWNVREYVLARDGHKCQYCKGKSKDHVLNVHHIESRKTGGNSPSNLITLCETCHKEYHKGNIDLKIKRGSSLRDAAVMGIMKWRLYEELRSKYDRVSMTFGYVTKYNRINHDIEKSHVSDAFVISKNFNAIRLGYYYKVRLVRRHNRQIHKQKIPKGGIKRLNQSPFEVFGFRLFDRVMFENNCYFIFARRKTGSFNIRDINGKNKRDITYKKLKLSRCKRFMIEKS

SEQ ID NO: 4905 - protein, 434 aa, unidentified
VVLMDAWDIIVILNKRGKPLMPCSPAKARLLLKEKKAIVARRTPFTIQLTIATGEAKQPVSLGVDAGYKHVGLSASTEKAELYASEVELRPDVSDLLSARRTLRQSRRNRKTRYRAPRFDNRIRTKRKGWLAPSVENRINAHLSRIGAILRLLPVTKITVETASFDTQLLKNPDISGKEYQEGEQLGFWNVREYVLFRDGHACQHCHGRSKDPVLNVHHLESRRTGGDSPGNLLTLCETCHKALHRREIKLKTKRGQSFRAEAFMGIMRWEVLNRLKASHPELEVHNTYGYRTKHTRIVNGIDKSHCADAFCIAGNLGAKRLGEFFFQKQTRRNNRQIHKLSILKHGLRKRNQAPFEVKGFRLFDKVVCQGEEGFIFGRRSSGSFDVRKLDGTRISAGISYKKLRLLEKRRTYLKEIRKEETLPPLPEGRSLRA

SEQ ID NO: 4906 - protein, 396 aa, unidentified; identical to SEQ ID NO: 4508

SEQ ID NO: 4907 - protein, 441 aa, unidentified
MSVSVFVLDRKHRPLMPCRPARARRLLKSGRARVVKRFPFTIRLVDRLIENSDVQPVLVKFDPGSRETGIAVVRADTKRRHHALFFIDLVHRGSVIRECLSARRAFGRRRRSNLRYRAPRFLNRTKPQGWPAPSLRHRVDAVAAWAAKLIRLVPATGLMEELVKFDAQKLQNPEISGAEYQQGTLFEYEVREYLLEKFGRKCVYCSAENVPLNIEHVVPKARGGSNRLSNLALARAACNQKKGAQPVEVFLKDRPEVLERLKQQCRRSLSDAAAVNATRWSLLNALKTFGLPVQTGSGALTKFNRSSLGIAKEHWLDALCAGRINAAHYPKSMGVLEVRCTGRGSYQRTRLTKHGFPRGFLMRQKRVHGFATGDMVKAIVPSGKKAGVYRGRVAVRASGSFNIQTPGGVIQGISWRHCQLLSYNDGYGYAWLRRAPHSSPV

SEQ ID NO: 4908 - protein, 292 aa, unidentified
LSRIEAVLRLLPVTKITVETASFDLQLLKNPDISGKEYQEGEQLDFWNIREYVLCRDGHVCQHCYGRSKDPVLNVHHLESRRTGGDSPGNLITLCETCHKALHRGEITLKAKRGQSFRAEAFMGIMRWEVLNRLKASHPELEVNNTYGYRTKHARIANDIAKSHCADAFCIAGNLGAERLGEFFFQKQTRRNNRQIHKLSILKSGIRKRNQAPFEVNGFRLFDKVACKGEEGFIFGRRSSGFFDVRKLDGTRISAGISYKKLHLLEKRRTYLTEIRKEEALPSLREGRGLRA

SEQ ID NO: 4909 - protein, 466 aa, Thermanaeromonas sp.
MVIFTVDRNGNPGHPTRRFDMIRKLRKRKRVRIIGGGKSGKPPVAVFLDREFDYSRTVGRKLVIVLDPGYRYIGFAVCEPRGGKLIVYCRGVLRTRIPEIKGLMSDRRSFRRFRRYLSRYKKKRLSARQCRVLTKFKAPRDVRSKDRSNATLRHGVETHLNLYRKLRRFFPFPAHQVEFVMEDNVFDVRAMTWGKVYGADYQVSPRAPEGERKCILCGSQEDLHRHHLVPRKSGGTEVRENKVYLCAGCHEEVHAGRVFLPVRGIKQWRELGTMNAVMGVLREVPYISFVPAPEVVLKRRELGLGKDHADDALAAAAAFCGCTGFDASVERRLMLVKFRRHARARVHAQKDRLYKVDGVIIARNRRKRGDQNDPSFADVFPLSPEQQRGLKVYPGTKILNPFRNDVLTIGGDVWVHIPTGRRFVATGVISEKYLYSPMLEEITGKPYIHPDQCRRVIRSEGIVVWS

SEQ ID NO: 4910 - protein, 461 aa, unidentified
MVYVINKQGQALMPTERFGKVRRLLKNGLAHVVCRIPFTIQLDYDTTNFVQPISLGVDAGSKHIGISATTSEKELYAADVELRNDIVEKLSTRKEQRRTRRNRLRYRKVRFNNRVSSKRKGRLAPSIENKIQTHLTVVEKIHKFLPITNIIVETASFDIQKIKNPSISNEEYQQGEQLHFFNVREYVLHRDGYQCQHCKGKSKDPILNVHHIESRKVGGNSSQNLITLCKSCHKAYHKCKIELKVKRGASFRDSAFMSTMRWSFYDKLKNIYPNVSMTFGYITKNTRITNGLPKDHYVDAKCISGNPTTKPLGYYFYQKKVRCQNRQIHKVNFLKGGRKKLNQAPFLVKGYRLFDLVEYQKDLYYIFGRRDSGFFDIRKLDGTKVNKGSISCKQMRLIDIRKTIIIEKRIASKFMKKGDKVREIGDTLTGTIVYIANGYADVKYPNMKGVCSLPVQFLEKV

SEQ ID NO: 4911 - protein, 407 aa, unidentified
MVYVQDINGNPLMPTTRHGKVRRLLKNNKAVVVNLCPFTIRLTYETTNYKQEITLGVDTGTKHVGLSATTKSKELYSSEVILRSDIVDLLSTRREQRRTRRNRLRYRKPRFYNRVGANKSNWIAPSIQQRIDSHIKIVSDVYKILPVSKLIIEVAQFDTQKIKNPDITNIEYQQGDQLGFWNVREYVLTRDNHKCQHCKGKSKDKILNVHHIESRKTGGDSPSNLITLCETCHNEFNKGNIDLKVKREKSLRDAAVMGIMKWRLYEILKSTLPNVSMTFGYITKYNRIHNDIEKSHVSDAFVISKNFNAKRLNFSYKIKLVRRHNRQIHKMKIPKGGTKRPNQSPFEIFGFRLFDRVRFDSKFYFIYGRRKTGSFNIRDINGENKKDVIYKKLKLSRCKRFMIQIEM

SEQ ID NO: 4912 - protein, 465 aa, unidentified; identical to SEQ ID NO: 3603

SEQ ID NO: 4913 - protein, 459 aa, unidentified
MAKWTNSIKEDKTMKVFVKSNTNEPLMPTNPRKARILLKERKAEVVQRNPFTIRLLYPTGKNKQDITLGIDSGYLNIGFSAITQKEELITGEVQLLNRIIERNKERAAYRRTRRNRLWHRKPGFDVNTNKEGWFAPSIRHKIDSHSRFIKKLHEILPITKIIVEIANFDIQKIKNPDIEGVEYQQGEQKGYKNVIAYVLHRDGYTCQNPTCNNKDKQPLLQVHHIQFRKNGGSDRPDNLITLCNKCHTPENHKGFLLGWKPTLKGFKPETFMSIVRWKLVDILKESYSNVEHTYGYITKNKRFLLGIEKTHAYDAFCIADGTIQVRQEPFVIKQIRRNNRNLSKFYDAKFIDVRDGTKKSGSELNCGRTCRNKEKNGENLRKYRLKKISKGRLSIRNTRHQIQPMDLIEFDGQRYYVAGSQNKGQYIKLKNSKKVINATKVKVIKFGKGFCWIDNKIPC

SEQ ID NO: 4914 - protein, 418 aa, Exiguobacterium sp.; identical to SEQ ID NO: 4153

SEQ ID NO: 4915 - protein, 518 aa, Anaerostipes sp.
MTPKKRKEASRMSEYIYVLGIDGNPQMPTKRKRHVEQLLQTGRARIFRQVPFTIQLTYKNEPVLQPVTIAEDPGRSNIGMAVVSLSGELLSAAVVQTRNKEIVKLMEKRKQHRRASRNGERKARQRLAKKCHTMIKTGFLMRKLPMYGKDKRVRCNVIKNTEAKFCNRKREDGWLTPSAEHLVRTHINLIHKMQKFLPITDVAIEINRFAFLSLEDPSISGVDFQNGPLKGYDDLNAAIEDLQDGHCLMCNSPIEHRHHIVPRNMQGSNTIGNIAGLCCKCHERVHKDARFEDRLKKKKAGLNKRYAAVSVLNQAIPFICKRLEQEFGKEHVHYCSGRDTSMVRRSLGYHKTKEKQLHEVDAWCIAVLALQHVPEKAPEFDHVHEILQFRRQDRSRIKAQTSRAYYHEGKKIAKNRKKAEGQREDSLQEWRKRQVERYGKEQTRKMISQLEVKESIRRYNRLDRLMPGAVFYYQGVRYVMRGQHSNGQYLQAVGMRDKDFPAKKCKIVVHNQGLVFVS

SEQ ID NO: 4916 - protein, 415 aa, unidentified
MENRIEYCFVVDKNNRPLTPTKVNKGWYLVRKSRAKLKSKYPMVIQLEKEVKSDEDDESHIVCGIDDGSAHVGLAIVQKCPTKNKVVFKGTIEQRQDVKHLMDVRRGHRHYHRYHKRYRQARFNNRSSSKRTCRLAPSIKQKKDAILRVLYQLNKWVNIQEYHLEDVCIDIRALTDDYKPYRWQYQKSNRLDENLRKATILRDECRCQECGKSNCVLEVHHIRARKYGGADTIGNLITLCSGCHQKTEGRERDFEDRYFNMIKSKPKRFDYAMHVMQGKTYLREKISELGSLHLTNGGETANKRIEWNVEKSHGNDAICVTDCIPDNCDVKEWIIKPMRRKSKAKTNNLLGIRHRDLVSYTYKNGETHTGYVTALYPEQLVLNFQSKTKHCKKVNARKCRLLWKFNKIYWLEQCV

SEQ ID NO: 4917 - protein, 436 aa, unidentified
VTTILKTCFAASNLAKIVVLMDAWDIIVVLNKRGKPLMPCSPAKARLLLKEKKAIVKRRTPFTIQLTIATGETKQPVSLGVDAGYKHVGLSASTEKAELYASEVELRQDITDLLSARRALRQSRRNRKTRYRAPRFDNRIRTKRKGWLAPSVENRINAHLSRIEAVLRLLPVTKITVETASFDMQLLKNPDISGKEYQEGEQLGFWNVREYVLFRDGHVCQHCHGRSKDPVLNVHHLESRRTGGDSPGNLITLCETCHKALHRGDITLKAKRGKSFRAEAFMGIMRWEVHNRLRALHPGIEVSNTYGYRTKHARIANGIAKSHCADAFCIAGNLGAERLCEFFFQKQTRRNNRQIHKLSILKGGIRKRNQAPFEVKGFRLFDKVACQGEEGFIFGRRSSGFFDVRKLDGTRISAGISCKKLHLLEKRRTYLTEIRK

SEQ ID NO: 4918 - protein, 471 aa, Caldicellulosiruptor sp.; identical to SEQ ID NO: 3268

SEQ ID NO: 4919 - protein, 470 aa, unidentified; identical to SEQ ID NO: 2825

SEQ ID NO: 4920 - protein, 430 aa, Ktedonobacter sp.; identical to SEQ ID NO: 4746

SEQ ID NO: 4921 - protein, 442 aa, unidentified; identical to SEQ ID NO: 2637

SEQ ID NO: 4922 - protein, 456 aa, unidentified
MSTCVCVLSNSGERLMPTFRLGKVRRLLKDGKAKIVKHHPFTIQLLYDSKTNTQPIEICEDVGYNYIGISVKSESHEYVSAQYDTLQDEKACHDSCRKLRRTRRNRLRYRKPRFDNRKRSEGWLAPSLRHKKELNVNVVKMYCAVMPITHATVEVGSFDTMLVKAIQEGKAIPEGADYQKGPRYNLATLREAVFYRDNYTCQVCGRKVADGAILHMHHMFYWKGRHGYQLDELVTACEKCHTPANHQKGGKLFGFGENKEFANLSGAAFMNAVRWQIVNALYATYGKEFVTITYGAMTKEKRIILGIEKTHNNDAYAMGDYHPAHRCAFRHYQKRRRNNRVLEKFYDATYIDARTGNKAKGKELFNGRINRNHKKDSENFHKYRSKKVSKGRRSIRRQRYAIQPYDTVRLEGKTYITSGCHNKGTRLLISANGKSKSVAISKVQVVCHAGAWIQII

SEQ ID NO: 4923 - protein, 463 aa, Mahella sp.
MVFVLDKHKKPLMPCSEKRARLLLERSRAVVHKKEPFTIRLKDRTEEESQLQSLRLKLDPGSKATGVAVLADDTKAIWLGEIHHKSNIKKKLKDRRALRSSRRNRKTRYRQARFNNRHPAKCVACGKNAKHGSRYCRPCQKARNYVDNGYREKRLPPSLQARVNQTINCVTKLCKLLPITAISTEHVKFDTQLMQNPDINDVEYQHGELFGYEVKEYLLEKWGRKCTYCGKENVPLEVEHIIPKSRGGTDRISNLTIACHKCNQKKGNMTAEEFGYPEIQKQAKQPLKDAAMMNATRWALYNNLKKFGLPVECGTGAMTKKQRLAHKLPKTHYYDACFVGASTSDEITISTEYVSIWSAIGRGNRQMCRTDKYGFPKGYRKNRKQYFGFQTGDIVKANIPNGKYQGNFTGRVAVRSSGYFDIKDSTGNCLCQGVSWKYMQVLQRNSGWQYDKERRNPLLSQLK

SEQ ID NO: 4924 - protein, 414 aa, unidentified
MVYVINKQGQALMPTERFGKVRRLLKNSLAHVVCRIPFAIQLDYDTTDYTQPVSLGVDAGSKHIGISATTSEKELYAADVELRNDIVDKLSTRREQRRTRRGRLRYRKARFNNRVSSKRKGWIAPSIENKIQTHLTIVEKIHKFLPITNIVVETASFDIQKINNPSISGSEYQQGEQLDFFNVREYVLFRDNHICQHCKGKSKDKVLNVHHIESRKTGGDSPKNLITLCETCHKAYHRGEFELNVKRGKSFRDAAFMGIMRWSFYDRLKNIYPNVSMTFGYITKNTRITNNLPKDHYVDARCISGNPVAKPLGYYFYQKKVRCQNRQIHKANFLKGGRKKLNQAPFLVKGFRLFDLVEYQKDLYYIFGRRDRGFFDIRKLDGIKVNKGSINYKHLRLIDKRKSILTEKRTQVNL

SEQ ID NO: 4925 - protein, 443 aa, Anoxybacillus sp.; identical to SEQ ID NO: 4769

SEQ ID NO: 4926 - protein, 431 aa, unidentified
MPNKVYVINKHGRPLMPCSPAKARHLLDAGKAKVKKRTPFTIQLVYGSSGYTQEVILGVDAGSKTIGMSASTTKEELLSAEVKPRNDVVDLLSTRREFRRVRRNRKTRYRKPHFDNRVHSKHKGWLAPSVEVKIQEHITAIRRVCGILPVSKVVVETAEFDLQLLKAIEEGKPVPQGEDYQQGEMYGHYNVRQYVLWRDDYTCQCCGTHATKKKEVRLHVHHLESRKVGGDAPDNQVTLCESCHEKLHKGLITEKDFKKRKRRSTRDATFMGIMRKTLMQRLCSELPIPVVETRGYITKATREKLLVLPKSHTNDALAIAQGKQGFNVGYLPEILQIDKIYTIRPVRHHNRQLHKAAILKGGIRKSNQAGKYVFGYRLFDKVQFNGQDCFVWRRRTTGIFTIKTINGKMIKDGISFKKLKLVEKSTGYLIA

SEQ ID NO: 4927 - protein, 471 aa, Caldicellulosiruptor sp.; identical to SEQ ID NO: 3375

SEQ ID NO: 4928 - protein, 442 aa, unidentified
MVTVQQSTHHLPFGRVFIRRNLFMVYVISQDGKPLMPCSDPIARLLLKQGKAKVKKREPFTIKLTYETTNYTQGLTLGVDTGSGTIGTAVSKDNGDIVYMSEVVVRNDITDKMTQRAKYRRNRRNRKTRYRKARWLNRASSIKKDRFSPTMQSKLHSHVREIEYIQSILPITEMVFETGQFDMQLMKNPSLANPKVRPWGYQKGANYGFENTKAMVLNRDNYTCQCCKGKHKDSKLEVHHIVFRSQGGSDEESNLLTLCHTCHKDLHSGKINPKLSGKVKGNLKYATQMNSIRKQLFRFYPNAIETFGYVTKANRLHLGVDKEHYYDACTIATQGNAFNVKSNLYKKKCVSDGDFQKTKGIRSEQPIVTDKICGFRKFDKVRYFGNDYFIKGRMSTGYAILMDIDGNKIDFSTMPRGYKTPKLSNCKRITARSTVMTQVKVV

SEQ ID NO: 4929 - protein, 357 aa, Calothrix sp.
LFGQWKSEHRGLSISESLTARSNTRHARRSRNTRYRKERPNHKKPSGWLPPSLQHRVDTTMTWVKRIIKLAPIKSIAFERVKFDIQKLENPSIEGIEYQQGTLQGYTLREALLEHWGRKCAYCDAVNVPLEIEHIRPKSQGGSDRFNNLTLSCQRCNQNKSNQSIDEFLKNDPVRLDNIKRHQKQSLRDAAAVNSTRNKLFDSLKSFNIPAYCGSGAYTKMMRIKSNLPKTHFIDAGCVNALQEVTLKTIQPLRVKCNGHGNRQFVTMDKHGFPRSCYAPKHVRKDWKAGDIIKVKKKDGTSVLGRVKKAAKTLIFIPFRGKETSFSPKNTKPIHRSDGYRYSFTTIDSELLQKIAT

SEQ ID NO: 4930 - protein, 462 aa, unidentified
  REGION 1..462: note = Ga0307928_10013597
MVKQQQQLRTRNTYTPLDASQVHCSVVMSLNKEETLSEHSLKTVLNNLYVNQQSGKTGQDLRVPVLNMQGNPLMPTKPRKARILLKQGKAKIVKRAPFIIQLTTATGESKQNITLGIDAGYSKVGFSAVTDCQELMSGELKLRKDVSKKIEKRRMYRGGKRNKLWHRQPRFLNRSKKSSWLAPSIQHKLDTHARLIKNIQNWLPVTKTIVEVATFDTQRMQNPEISGIEYQQGELQGYEIREYLLDKWERQCVYCKKKNLPLEIEHIIPKSRGGSSRVSNLTISCRKCNLKKGSQTAEEFGFPEIQKQAKKSLKSTAFMNIVRKRLAKQINAEETFGYITKYNRIKQNIDKSHINDAFVIAKGTNQERCKPFVVTQIRRSNRCLQTNRKGYKPSIRRQRYKLQPNDLVKYNKREQRVKGMFNYGKWVKLSDGTNTNIKNVELMCYGKGLCFNYGGLSNSSIA

SEQ ID NO: 4931 - protein, 460 aa, unidentified
MVAVVDLSGRPLMPTNEYRARKLLKQKKAKIFGYRPFTIQLTERKSTEIQPIELCMDTGYIHIGISAKSERHEYLGMQIDTLTDEKLKHDDKRQYRRQRRNRKRYRAPRFDNRRRKEGWIAPSLEHKKEIHIDAIQRICKVMPITDLTLEMGNFDTQVLKAVEEGKTLPQGSDYQHGERYGIATLREAVFLRDGYKCQCCEKTVKDGAILHVHHIKYRSQGGTNRMSNLITVCDKCHTPQNHKPGGKLWNWKTKLAEFKGASYMTSIRWMLYNEVTALLPNSSVHITYGAKTKESRRELDIEKSHVNDAYVMGLFHPKHRTQPVYFKKKRRNNRVLEKFYDAKYIDGRDGKKRSGQELFNGRISRNHKKDSENLHLYRKQKVTKGRRSIRSRHYPIQPHDILLYQKKKYETAGCHNNGSRAILLPEKKSVALKQLTMYQYAGGYYRVPYESNKKEERTGS

SEQ ID NO: 4932 - protein, 412 aa, unidentified
MVYVISQNGQPLMPTENHAKVRILLKNKKAKVIKKCPFTIQLAYDSTNYTQDITLGVDSGSKHIGLSATTEDKVLFESDVELRNDIVNLISTRRQNRRTRRNRKTRYRKPRFNNRKRNDGWLAPSIQNKVNSHLTVVRKVHEILPITKIIVEVASFDIQKIKNTAISGEEYQKGEQLDFWNVREYVLFRDGHTCQCCKGKSKDKVLNVHHIESRKTGGNAPNNLITLCETCHTGYHKGIVKLPKTIHRGMSFKDATFMGIMRWAFYNKLKEIYPNVNLTYGYITKNTRIKNNLPKEHYIDARCISKHPNAVSDGTVYYQKKVRCHNRQIHKSTILKGGYRKRNQAPYTVMEFRLYDKVMWKGQKCFIFGRRSTGRMDIRLLNGTKINTSVGHKNLRLIEMRKNYLIEQRKVG

SEQ ID NO: 4933 - protein, 438 aa, Clostridium sp.
MSVFVKNLRNEALMPCSERKARLLLKNNKAKIVDYKPFTIQLLYVTGETKQSISLGIDSGAKYIGIAITSENKVISKGTIELRTDVKELLASRKILRRSRRSRKTRYRKCKFKYKTTRKFSIKEGNFVKKKISFCSSRKSRWLPPSIQSRVDNQIFWINKFSSLLPSPKITVEVGKFDTHKLIKPDIKGTEYQEGDAYGFYAVRYAVFARDNYTCQICKKKGGILHTHHITQRKDGGSDRIENLVTVHEECHEKFHRGDIKHKFTKPKQYKETAFMNILRNQVFHMLNCNITYGNITTVDRKALDLEKAHYNDAVAISGIKTIKKDTNSIFYIKQFRKKKRSLHEATPRKGRKEPNKTQKRNSKNTKTSNGFYLNDKVRAFNKIGFISGFTTGGAYIKDIQGSYITIPGKSYKQVGFKNLELISHNNNWQFISTLRYA

SEQ ID NO: 4934 - protein, 418 aa, unidentified
MVYVLGQDGHPLMPTCRHGKVKRMLKSRMAKVVKKCPFTIQLQYESTTHTQKINLGIDAGSKTIGVSATTESKVLYESEVVLRNDIVELLSGRRALRRSRRNRKTRYRKPRLDNRRRPDGWLAPSIRQKIKTHVTVVENVMKILPVTKIIVETASFDIQKIKNPEIEGAEYQYGEQLDFWNVREYVLFRDGHTCQCCKGKSKDNILNVHHIESRKTGGNAPNNLITLCETCHKAYHKGVITLPKEIHRGMRFRDAAFMGIMRWAFYDRLKELYTPFGVEVINTYGYITKNTRIEHGLPKEHYVDARCISGNPAAKPLGHYYFQKKVRCHNRQIHKNTILKGGIRKRNQAAYLVNGYRLFDKVKYQNQEYFIFGRRSSGFFDIRTLDGTKVNKGSISCKKLQLVEKSKHYLTEQRKVAA

SEQ ID NO: 4935 - protein, 429 aa, Arthrospira sp.
MPNYQNYVFVVDTLGQPLSPTHPARARKLLKQGLAAVFRTYPFTIILKKTVENPGNEPLRLKLDPGASVTGIALVSQKTGTVIWGAELTHRGDRIRAKLTARRMVRRHRRCRKTRYRQARFNNRKRADGWLAPSLKHRVETTLTWVNRLISSCPITDISMELVRFDTQKLPNPEISGVEYQQGVLFGYELREYLLTKWQHQCAYCGAKNIPLEIEHIQPKSQGGSDRVSNLAIACHKCNQKKGSQPVEQFLDTKPEILKRLLVQAKAPLKNAAAVNSTRWALFNDLKLTGLPIEIGTGGLTKYNRTVQGLPKTHWLDAACVGKSTPTRLKIKTHQPLLITCFGRGGRQKAALNKYGYPIRHNPLKPIKGWLTGDIAKHKTHGIGRITPRSRGSFVLTKPDQTQFSVKPIDLKPVFRRDGYLYKFSSVVR

SEQ ID NO: 4936 - protein, 461 aa, Ktedonobacter sp.; identical to SEQ ID NO: 4813

SEQ ID NO: 4937 - protein, 413 aa, unidentified; identical to SEQ ID NO: 2605

SEQ ID NO: 4938 - protein, 451 aa, unidentified
MTTFVFVLDRKGRRLMPCHPARARKLLKKGRARVHKVFPFTIRLTDRELENSSVQPMLIKIDPGSKETGIALVREEKNKEHHALYFINLQHRGQQIRNALHKRRCLRRSRRSRNLRYRSPRFLNRRRAEGWLAPSLQHRPDSILSWVSRLRKITPVERISQELVKFDTQLTQNSKIEGIEYQQGELTGYELREYLLEKFGRKCIYCGADNVPLNIDHVIPKSKGGSNRVSNLVLACVQCNQKKGSRSIEEFLKDKPEVLRQIKNQLKQPLKDAASVNATRWKLFNKLKSTGFPFEVGSGALTKFNRKKFGIPKAHWLDALCVGNVPSVTNWRNLNVLNIKCCGRGAYQRTRTDKYGFPRGICMRQKKVYGFSTGDMVKAIIPKGKKKGVCVGKVAVRKTGSFNLQTSGQTIQGISYRYCRLITHSDGYSYSWKSCPIPPRVETRGILGEVR

SEQ ID NO: 4939 - protein, 425 aa, unidentified
MQYVYVLNKHDEPLMPCSPCKARLLLKQKKACVVKRTPFTIKLLYGSTGYKQPITLGVDAGSKHIGISATTEKYELYREEATPRNDVVDLLSARRAFRRSRRNRKTRYRAPRFNNRVHSKHKGWLAPSVEVKIQEHITLIKRVCRILPVTLVRVETAEFDTQRLKAMLEGKPLPVGTDYQLGEMYDEYNVRQYVLKRDKYTCQCCGAHPTKTKAVKLHVHHIETRRTGGNAPNNLITLCTACHKALHAGKVTLDGKKRGKPLKDAAFMGIMRKTLMERLLKELKIPVQEIYGYITKYLREKHSIPKSHTNDARCISKNPLAIPCDTCYYTKAIRHHNRQLHKATILKGGIRKANQAPYTVKGYRLWDKVSYNGSECFITGRRTSGYFALKKLDGTVVSNSASYKKLRLLEVATNYITKSSYVKSL

SEQ ID NO: 4940 - protein, 428 aa, Enterococcus sp.; identical to SEQ ID NO: 4335

SEQ ID NO: 4941 - protein, 458 aa, Lactobacillus sp.; identical to SEQ ID NO: 4474

SEQ ID NO: 4942 - protein, 471 aa, Caldicellulosiruptor sp.; identical to SEQ ID NO: 3268

SEQ ID NO: 4943 - protein, 419 aa, unidentified
MIYIRSKDGKALMPSERGGRIGYLLRHAKAHVVSRVPFTVQLDYESTTYTQEVSLGVDAGSKHIGVSASSEKKELLVAQVELRNDVVNLLSTRRELRRTRRNRKTRYRKARFDNRKKKDDWLAPSVEQKVDSHLKVIRLVHGLLPITNTTIEVAQFDAQKIKRPDIKGEEYQQGEQMCFWNVREYVFARDGHRCVHCKGKSKDPILNVHHLESRKTGGNSPSNLVTLCETCHKAYHRGEFELKIKRGNSLRDAAVMNIMRWAVYKRANEEFGNVHLTYGYVTKHTRIENGIAKTHAADAFCIAKNINAMRLRTFYLCRCVPRHSRALHVANPKKGGIRRSTIASHKIGKSRFQRFDMVRWKGKESFIFGSTNGRPVLRDIEGYKMHENASVNIKTIKFLKRLRNNILVEEKDFRKLNML

SEQ ID NO: 4944 - protein, 427 aa, Parasutterella sp.; identical to SEQ ID NO: 4733

SEQ ID NO: 4945 - protein, 440 aa, unidentified
MQRVLVLDCNKNPLMPCHPARARQMLKDGKAAIYRRYPFIIILKERSGGETQPVALKLDPGSKITGIALVADFQKGKRVIWAAELQHRSERIRELLLVRRAVRRSRRNRKTRYRKPRFLNRRRPEGWLPPSLKSRVDNILTWVMRLREFSPVSSLSQELVRFDAQKLENPEISGIEYQRGTLFGYEVKEYLLEKFGRQCAYCRGKSGDPILEVEHVVPKNPKHGPKGTDRVSNLVIACETCNKAKDNNQPEEWLARLEASADPLDKERAENFPTVIEQLKQPLKDTAAVNATRWAIFQSLKSFGLPVEIGTGGRTKYNRVIQHYRKAHWIDAACVGKSGESVFLSSVHVPLYIKAVGRGSRQFCRMDRHGFPRTSPKRIKRVHGFQTGDIVRATIPLGKYAGIHIGRIAVRASGSFRVGSTDGVSWRCCKILHCSDGYEY

SEQ ID NO: 4946 - protein, 427 aa, unidentified
LRVFVLNKRGKPLMPCSPAKARLLLKEKKAIVKRRTPFTIQLTIATGETKQPVGLGVDAGYKHVGLSASTDKAELYASQVELRQDITDLLSARRALRRARRNRKTRYRAPRFNNRIRTKRKGWLAPSVENRINAHLSRIEAVLRLLPVTKITVETASFDMLLLKNPDIAGKEYQEGEQLGFWNVREYVLFRDGHVCQHCYGRSKDPVLNVHHLESRRTGGDSPGNLITLCETCHEALHRGEIALKTKRGHSFRAEAFMGMMRWEVLNRLKASHSELEVNNTYGYRTKHARIVNGIDKSHCADAFCIAGNLGAERLCEFFFQKQTRRNNRQIHKLSILKGGIRKRNQAPFEIKGFRLFDKVACKGEESFIFGRRSSGYFDVRKLDGTRISAGISYKKLRLLEKRRTYLTEIRKEEALPPLPEGRGLRA

SEQ ID NO: 4947 - protein, 452 aa, unidentified; identical to SEQ ID NO: 4518

SEQ ID NO: 4948 - protein, 406 aa, unidentified
MPTKRFGKVRRMLRDGQAKVVSREPFIIRLLYEPKTHEVQECVLGIDTGSKYIGAAVVSNGKVLYASEVKIKDDIKSKMDRRRSYRRDRRNRKTRYRKARFLNRGNSIKKDRYNPTLKSKFDSHVREIEFIKRILPISKLILEVGQFDTHKLKNPNVRGWGYQKGTNYGFANSREHALCRDKYTCQICKAKNTRLEVHHIKYRSQGGTYDLDNLITLCADCHKKVHAGELSINKKPKRLPNFNDATVMSILRNMLLKQYPEAIETFGFITKENRLSLNLPKEHFIDACVIASGGEEFILPKDVFIKRHVTRGDYQSTKGVRSEKHIPHSKILGFRKWDKVLYMGQKYFIKGRRTSGTCDLEDIYGSKIDFSYMPRGFKTPKLSNCKRISARNTTLCQRIDYIPNAG

SEQ ID NO: 4949 - protein, 424 aa, Enterococcus sp.
MRVFVRNMQGKPLMPCSNRKARLLLKEGKAKIYQYNPFTIQLCYASREYVQECHIGIDTGAKHIGMAVTSEDKVLFKGEIELRQDVKSNLDTRRSYRRDRRNRKTRYRKARFLNRKKKESWLPPSIENRINHTFKWINKLVALLPNPKLHIEVGKFDVAKMINPNVQGVDYQHGQTYGFYNVRYFVFARDNYTCQCCKKSKNKILQTHHIIYRSNGGSNRADNLITVCTDCHTYENHQKGGILYQWQENHKKTKQYKEPPFMNVLRKRIFTQYPNSIITYGSETTPKRKELGLEKTHYNDAIVISGITKIKENPNEWLLIKQFRKKKRSLHEATARKGRKEPNRLQKRNAKNTPYYKGFYLNDKVRVFNQVGHITGFTSSGAYIKNSENEYITLPNKSYKQIGISNIRLLHHNNNWQYIHKHIA

SEQ ID NO: 4950 - protein, 418 aa, unidentified
MVYVINKQGQALMPTERFGKVRRLLKNGLAHVMYRIPFTIQLDYDTTNFIQPISLGIDAGSKHIGISATTSEKELYAADVELRNDIVEKLSTRREQRRTRRNRLRYRRARFNNRVSSKRKGWLAPSIENKIQTHLTVVEKIHKFLPITNIIVETAAFDIQKIKNPSISGKEYQQGEQLNFFNVREYVLHRDGHQCQHCKGKSKDPILNVHHIESRKVGGNSSQNLITLCESCHKAYHKGEIELEVKRGTSFRDSAFMSTMRWSFYKKLKNIYPNVSMTFGYITKHTRITNGLPKNHYVDARCISGNPTAKHLEYYFYQKKVRCQNRQIHKVNFLKGGRKKLNQAPYLVKGYRLFDLVEYQKDLYYIFGRRESGFFDIRKLDGTKVNKGSISCKQMRLIDIRKTIIIEKRMQGAIHPIN

SEQ ID NO: 4951 - protein, 429 aa, Ktedonobacter sp.
LSNVFVIDSDYKPLNPVHPGHARRLLRQGKAAVFRRYPFTIVLKRVVEQPEVQPLHLKLDPGSKTTGIALVNGTNGKIVFAAELSHRGHAIKDSLDSRRASRQGRRQRKTRYRKPRFDNRRRKKGWLPPSLESRLANILTWVARLCRYAPIATLSQELVKFDMQLMENPDIAGVEYQQGTLQGYEVREYLLEKWERTCAYCGKQDVPLQVEHIHPRARSGTNRMSNLTLACEACNTAKGTQEIEVFLQKKPDVLKRLLAQVKKPLKDASAVNSTRCALLERLKALGLPVECGSGGLTKFNRTTRGLPKTHWLDAACVGKSTPDVLLQKGVIPLRIKATGHGRRQMCVPDKYGFPKQHKERKKTFLGYQTGDLVKAITPKGTFEGRIAIRHRPSFRLEKVDIHPKYMRCVQRSDGYEYTQKGVRHAPPHG

SEQ ID NO: 4952 - protein, 384 aa, unidentified
  VARIANT 384: note = X can be any naturally occurring amino acid
MVYVLDQSGQPLMPTERHGKVRHLLKSGKAKVIKRCPFTIQLLYNSTHYTQDITLGVDAGSKQIGLSATTKQKELYAAEIELRNDIVKLLAARRELRRSRRSRKTRYRKPRFQNRTHSRKPGWLAPSIRQRIQCHLTVIANVHKLLPTKTILIETASFDIQKIKHPDIHGVQYQKGEQLDFWNVREYVLFRDNHTCQCCKGRSKDNILNVHHIESRQTGGNAPNNLITLCETCHTGYHNGKVILPKTIKRGMSFKDAAFMGIMRWSCYDMLKNIYPDVHMTYGYITKNTRIGNNLAKEHYVDARCISKNPKAKPLPYYYYQKKVRCHNRQIHKTKPTKHGIRKRNQAEYVVHRYRLFDKVQYQNNEYFIFGRRKTGYFDIRTLX

SEQ ID NO: 4953 - protein, 413 aa, Sharpea sp.
MTNYAFVLDADNKQLAPTKEQKAWFLIRKKRATLVSKYPMVIQLKKKIQDKEICKDEIRCGIDDGGLHVGVALVQKCQTRNKVIFKGTIEQRNDVKHLMDVRRGFRRYYRYHKRYRPARFNNRKFSKRKERVAPSILQKRQATVRVISQLNKWINITSYWLEDVAIDIRALTDGYKPYQWQYQKSNRLDENIRKAVILRDGCRCMECGKSNCRLEVHHIKPRRLKGSNTLGNLITLCTECHQKTEDAEELYMNRYFALLNSSDNKNFDYAQHVMIGKKWLREQLSNLGMLHLTNGGDTANKRIDWGIAKSHSNDAICITDLQPDTCEIKEWVIKPMRRQSKAKTDNVLGIKHRDLVEYTFRNGETHRGYVTALYPEQNALNFQSPTKHCKKVNARKCKLLWKYSKIYWLDDVD

SEQ ID NO: 4954 - protein, 413 aa, unidentified; identical to SEQ ID NO: 2636

SEQ ID NO: 4955 - protein, 424 aa, unidentified
MRVFVFNMRGRPLMPCSQRKARLLLMENKAMIYKYHPFTIQLTYTTGETKQDCHIGIDTGSKYIGAAVRSEDKVFWKGEIELRQDIRSNLDTKRIYRRSRRNRKTRYRKPKFLNRKRRDEWLPPSLQSRINHTFHWIDTLSSLVPNPILHIEVGKFDVAKMINPEIHGVDYQHGQTYGFFDERYFVFARDNYTCQCCGKSKNKILNTHHIIYRSNGGTNRVDNLITVCTDCHTSQNHRKGGIFYQWQEQHKKVKQYKEPPFMNTLRKRIFVAYPDAEITYGSETTPKRKAMKLDKTHYNDAIVISGINEIKENPEEWLLIKQFRKKKRSLHEATARKGRKKPNRNQTRNSKNTPYYKGFYLNDKVSVFGKSGYITGFTSNAAYIKDENNDYITLPNKTYKQVSINKMKLECHNNNWQYIIKNAV

SEQ ID NO: 4956 - protein, 279 aa, unidentified
VVIETAEFDLQMLKAIADGKPVPQGEDYQQGEMYGHYNVRQYVLWRDNYTCQCCGAHPTKKKEVRLHVHHLESRKVGGNAPGNLVTLCDRCHEKLHKGLITEKDLKKRKHRSTRDATFMGIMRKTLMQRLCSELPIPVVETRGYITKATREKLLVLPKSHTNDALAIAQGKHGFNASYLPGIVQSDKIYTIRPVRHHNRQLHKAAILKGGIRKSNQAEKYVFGYRLFDKVQFNEQDCFIWGRRTTGIFTIKTINGKMIKDGISFKKLKLVEKSTSYLIA

SEQ ID NO: 4957 - protein, 396 aa, unidentified; identical to SEQ ID NO: 4508

SEQ ID NO: 4958 - protein, 481 aa, unidentified
  REGION 1..481: note = Ga0373625_0024244
MQKLQGKLKNTPKDASQVLCSVNSQLNRVEKLSVENKVLTCNTPDGNLRQHKDGSDLRVLNIVYVLNQRGQALMPTTQSKSRHLIKGGKAKIIKRIPFTIKLLIASGENKQPVILGIDPGYENVGISARTEKKELIRMDIVLRKDISQKLTEKRMYRRGRRNKLWYREPRWLNRKATKKLGWIAPSVQYRLDSHIRLIGKICKLLPVSKIIVEVANFDIQKINNPEISGKEYQQGNLYGYENIKSYLIAREQGKCQLCGKESTKGISFRTHHIIQRKDGGTDRLDNLVLLHEKCHEEVHKKGLKFNKSKQFKAETFMSTIRWKLVEELKKILTTEVTYGYVTKIKRNELNLEKTHSNDAFVISEGTNQERCRIFNIQQKRKNNRCLQLNRKGFIPSIRRKRYFIQPCDLVKISCNWQSTKGSHCKGTRIIVGKKSININQVKNVFHIGSLIWRTAIPPTAKAVGFLAVNFHDRDNQPMLHL

SEQ ID NO: 4959 - protein, 470 aa, unidentified
MSVFVVGLNGCRLMPTSEREARLLLKHGKASVYRKVPFTIKLNYKTGSTTQPGYLGIDTGSQHIGVSVVREDGTVLHKEEIGLRDSMSKRKLMESRSSLRRGRRHRKTRYRHPKWRLKAKRVYYETPDRKGRHWKKQKITFASKRPQGWLPPSLQSKTDHHIQWIKKLQDLLPDGYRLSIELGRFDPARMKDTEIHGDLYQKGPQYDYENVRAYVLDRDRYTCQVCGKKGGKLHIHHILYRSHGATDNPQYMATICSDCHSTENHQPGGILYQWMQEQKKFTRGLRDATFMNILRKRLMKAFPKATFTYGNITKADREKLKIPKSHGNDATAIAIVKTGIMTVKDNEPVIYIQQVRRKKRSLHEKTPRKGRKEPNRKASRYNKNTKAVTVTKRKNKKRISITGCLFDRVELNGKKGWISGFTDKSCYIKDENDQYIRISPKYKQVSLSKLKILHHCGNWVIGARRSLGKG

SEQ ID NO: 4960 - protein, 505 aa, unidentified
MTALEEKLSKTEYIYVLGFDGKPQMPTRRKRHVLKLLKTGRARIAEDIPFTIRLTYRNAPVLQPVTLAEDPGRTNIGAAVLSPLGDLLFAAVIETRNKEIKKLMADRQKSRQASRRGERKARQRLAKRYGSMVKSGMVMRKLPMYAADKFVICKFIRNTQARFCNRKRCPDWITPTVQHLVQTHLNIIRKISRYLPVTDIAFEVNRFAFMHMENPEAMGVDFQNGPLKGYGDVKEAIRTQQHGKCLMCKKPITHFHHIVPRSRGGSDTIQNLAGLCTECHTKVHTDTAFRKDFDEKKSGQLKKYGALSALNQAVPFICKKLLEEYGEEHVHFCRGLDTSLIRTAFGFEKTKKNQMHEVDAYCIGLAALEVNEVETPAFDHTFQIRQFRRQDRSIIHHQTGRSYYQGKEKVAQNRKPGFEQKTTALSQWYKEQIRIHGEKEAEKLRSQLRVEKSCRHYNDMDRFLPGAVFLYEGKRYVLSGRITNGKYLRACGQGMKNFPAAECTF

SEQ ID NO: 4961 - protein, 426 aa, Sulfobacillus sp.; identical to SEQ ID NO: 4624

SEQ ID NO: 4962 - protein, 394 aa, unidentified
RQRLAKRYGSMVKSGMVMRKLPMYAADRFVTCKFIRNTQARFCNRKRCPDWITPTVQHLVQTHLNIIRKISRYLPVTDIAFEVNRFAFMHMENPKAMGVDFQNGPLKGYDDVKEAIRTQQHGKCLMCKKPIAHFHHIVPRSRGGSDTIQNLAGLCPECHTKVHTDTAFRKDFDRKKSGQLKKYGALSALNQAVPFICKKLLEEYGEEHVHFCGGLDTSLIRTALGFEKTKKNQMHEVDAYCIGLAALEVNEVETPAFDNTFQIRQFRRQDRSIIHHQTGRSYYQGKEKVAQNRKPGFEQKTTALSQWYEEQVRIHGEKEAEKLRSQLRVEKSCRHYNDMDRFLPGAVFLYEGKRYVLSGRITNGKYLRACGQGMKNFPAAECTFIRHNAGLVFI

SEQ ID NO: 4963 - protein, 443 aa, unidentified
MTKTLTKQTTQACVLDQNGKPLMPTKRLGKVYRLLKTKKAHIVSYEPFTIQLDYEPDTHVIQPMILGVDSGAIHSGYSVANEQREFYSSEVIARDNISYRISDRRMYRQNRRYRKTRYRKPRFDNRKNKKKGWLPPSLEQKVAVQLNEIDHLHRHFPIETIIVEVAEFDIQKIKNPDISGKDYQQGTLQGYNIRNYLLEKHGHKCFYCDKEVSTFEVEHMIPKAKGGSNRIDNLTLSCHSCNQKKGTLTAEEFIKQALPAEKVAKKLKQLSKEKRLFKYMAHMNATRWTLYNAINDKYPRVKMTYGYITKYNRIRAGLPKAHHIDAKCITGFAQVPSFDTTVVKIKMRRHNRQLHRATFSKGHVRKAASLPTVMFGFRLYDRVLFNNHHYYIKGRRSSGIFALVSLEGLKDENRIYKKLTLLAHTNAYLTNRYVNKETVSVNN

SEQ ID NO: 4964 - protein, 471 aa, Acidithiobacillus sp.
VAVFVLDRRKRPLMPCSEKRARLLLERGRARVHRMVPFTIRLVDRLQADSVLQPLRLKLDPGSKTTGLALVREKETVDVSTGEVLRAITILMLLELKHRGQAIRDALASRGAFRRRRRGQLRYRPARFDNRTKSEDWLAPSLQHRVDTVLAWVNRLMRLAPVTALSQELVRFDNQTMQNPEISGTEYQQGTLFGYEVREYLLEKWGRECAYCGAEHTPLEIDHIHPRSKGGSDRVSNLTIACHDCNQAKGNMPIEQFLAKFPERIRKILAQAKAPLRDAAAVNSTRWALFQRLKATNLPVEVASGGRTKWNRHRLQVPKEHCLDAACVGHVDTIEHWNQSVLSIKATGRGSYQRTRLTRHGFPRGYLTRSKSAFGFQTGDMVKAVVTKGKKVGTYLGRVAIRASGSFNIQTATGLVQGIHHRFCTRIQCADGYGYSWTKIASTQGEAGMRAAHAAALSLPGLNPGVSRANG

SEQ ID NO: 4965 - protein, 397 aa, unidentified
RYPFTIIIKEREGGDTQPTALKFDPGAKTTGIAVVVDCKRGKRCVFAAELEHRGSQIKEGLEKRRAIRRSRRHRKTRYRKPRFKNRTKPKGWLPPSLQSRVDNIASWTKKLRSRIPVSSLSMERVRFDAQKLVNPEISGVEYQQGTLFGYEIREYLLEKWGRKCAYCSKKDVPLHIEHMTPKSRGGSNRIGNLTLSCEKCNQKKNTKTAEEFGFSGLREKSCKPLRAAAAMNATRNAIYSVLKATGLSLETGTGGRTKYNRSKQGYAKEHWLDAMCVGESGENVFVEKRHEVLEIKSMGRGSRQMCRVDGYGFPRTKAKSEKRVGGFQTGDIIRAVVPKGKKKGVYEGRVAVRKSGSFNIKQGKQKAVQGIGWKHCKLIQRTDGYNYKNRMGVSSPL

SEQ ID NO: 4966 - protein, 544 aa, unidentified
MKQKKQKVMVYILNKKGKPLMPTTRCGHVRKLLNSKKAVVVNSNPFTIRLKYDTPNGVQDVFAGIDSGRENIGSGASNEDGDCLYLGELKTSNKSIKLKMTERAGFRKERRRHDRQNKQRKARKDHTEIQNGNADICRTTISCKSVQISYPAAEKSVTHKIIRGKEGKFANRHRDEGWITPAARQLVQMHMNDLKSMCKILPISHVTLERVAFDFQKLENENIKVWEYGKGKLYGYDSPEEYIHDVQNGKCLVCGKPHIDYLHHIIPRSKGGSDKVSNIAGLCYDCHYGPMGVHNCQNTQDRLPELKSEANKQYKVSLLNSVMPVLIEEMDKFCKANSIMFSICEGHDTAKVRDMYDLQKDHCIDGFAISLVDRNVKSVDVMPDRIYQKQRYKKKSKNIIQKRNCREYYDDKKLVAVNRHKGTDQKADSLEEYMNTYAETHTTDECKKHFDSLVVKPARRTYTFHKEWRICPFHIGDKVRYEKKNKIKGNTKVDTFICEGIRFVKDENKAEVKHNKTKSKKMKFCRVLESGCTPYVDYRKLALM

SEQ ID NO: 4967 - protein, 557 aa, unidentified; identical to SEQ ID NO: 2654

SEQ ID NO: 4968 - protein, 420 aa, unidentified; identical to SEQ ID NO: 3685

SEQ ID NO: 4969 - protein, 427 aa, unidentified
VYVINKHGRPLMPCSPAKARHLLDEGKAKIKKRTPFTIQLLFGSTGYTQEVILGVDAGSKTIGLSASAETEELLSAEVKPRNDVVDLLSTRREFRRARRNRKTRYRKPRFDNRVRSKHKGWLAPSVEVKIQEHITSIRRVCRILPVSKVVIETAEFDLQLLKAIEEGKPVPQGEDYQQGEMYGHYNVRQYVLWRDGYTCQCCGAHATKKKEVRLHVHHLESRKVGGDAPDNQVTLCESCHEKLHKGLIAEKDFKKRKRRSTRDATFMGIMRKTLMQRLCSELPIPVVKTRGYITKATREKLLVLPKSHTNDALAIAQGKRGFNVGYLPEIAQIDKIYTIRPVRHHNRQLHKATILKGGIRKSNQTEKYVFGYRLFDKVQFNGQDCFIWGRRTTGIFTIKTINGKMIKDGISFKKLKLAEKSTSYLIA

SEQ ID NO: 4970 - protein, 456 aa, Halomonas sp.; identical to SEQ ID NO: 3676

SEQ ID NO: 4971 - protein, 414 aa, unidentified
MVYVINKQGQALMPTERFGKVRRLLKNSLAHVVCRIPFTIQLDYDTTDYTQPVSLGVDAGSKHIGISATTSEKELYAADVELRNDIVDKLSTRREQRRTRRSRLRYRKARFNNRVSSKRKGWLAPSVENKIQTHLTVVEKIHKFLPITNIVVETASFDIQKINNPSISGSEYQQGEQLDFFNVREYVLFRDNHICQHCKGKSKDKVLNVHHIESRKAGGDSPNNLITLCETCHKAYHRGEFKLNVKRGKSFRDAAFVGIMRWSFYDRLKNIYPNVSMTFGYITKNTRITNNLPKEHYVDARCISGNPVAKPLGYYFYQKKVRCQNRQIHKANFLKGGRKKLNQAPFLVKGFRLFDLVEYQKELYYIFGRRSSGSFDIRKLDGTKVNKGSINCKYLRLINKRKSILTEKRMQVNL

SEQ ID NO: 4972 - protein, 466 aa, unidentified
LSIKPLINIGEGVIYSSICTGLLLQTYQKRKEVPCMVYVLDINGQPLMPTTRHGKVRRLLNSHLAKVVKRCPFTIQLLYQSTKEIQPVSLGVDAGSKHIGMAATTEKKVVYQEELSPRNDVVKLLSLRRASRSSRRSRKTRYRKPKFNNRVHSKHKGWLAPSVEVKIQEHITAIKRICQILPISEIQVETAEFDFQRLKAMKEWKPLPVGTDYQLGEQYDFYNTRQYVLHRDGYTCQCCGTHDNNIKLHVHHIESRQTGGDAPSNLITLCEHCHKALHKGKLELPKGKKRGKTYRDATFMGIMRKTLLERLRKEVDVPVSGTYGYITKYLREKTDLEKSHINDAICISKYPYAKPLDTYYLTKVVRNHNRQIHKSNFSKGGIRKRNQAPYLIKGFRLFDKVLYQGKEYFIFGRRATGYFDIRTLDGTKVNKGSISYKKLRIQDTAKAYLKEARAIPHMNKFTCVLA

SEQ ID NO: 4973 - protein, 421 aa, unidentified
MRGQPLMPCSPAKARHLLKAGKAVVRRRTPFTIQLRIATGETKQSVTLGVDAGAKHVGLSATMEKEEVFASEVELRQDITGLLAARLSLRRERRHRKTRYRAPRFLNRVRSKHKGWLAPSVENRIQAHMSRIDAVCKLLPVTKIVIETASFDIQKIRNPTVEGTDYQQGDLLGFWNVREYVLFRDGHVCQHCHGHSRDKILNVHHLESRQTGGDAPNNLITLCETCHKAYHAGKIKLKVKRAQSFRAEAFMGIMRWTLLDRVRKAHPGLPVENTYGYLTKNTRITLGLPKTHCVDAYCIAGNLKAVRRGVYLYQRQVRKHNRQIHKCTVLSKTLKDGTKIGYRKLNQTPHLVKNFRLFDKVRCLGQTGFIFGRRSSGYFDVRRLDGVKLSSGISYRKLTLLEKRSTYLTELRNEDGASSPV

SEQ ID NO: 4974 - protein, 449 aa, unidentified
VAKAAVLRARNHPITLAMGALPPFEVRFINLINFEFMIYVKSKDGKILMPSERNGRIGYLLRHGKAHVISRVPFVVQLDYDNTTYTQEVSLGIDAGSKHVGVSASSEKKELFAAQVELRNDVTKLLSTRRELRRTRRNRKTRYRKARFDNRKKKDCWLAPSVEQKVESHLKVIRLVHGLLPITKTTIEVAQFDAQKINNPNIIGEEYQQGEQMGFWNVREYVLARDGHRCVHCKGKSKDAILNVHHMESRKTGGNSPSNLITLCETCHKAYHRGEFDLKIKRGTSLRDAVVMNIMRWAIYERAKAEFQNTYLTYGYITKHTRIGYGIAKTHAADAFCIAKNVHARRLKSYFLCRCIPRHTRALHVANPKKGGVRRSCIASHKIGKSRFQRYDMVQWEGKECFIFGSTNGRPVLRDIEGFKMHENANVNIKTIKFLKRLRNNILVEEKDF

SEQ ID NO: 4975 - protein, 429 aa, Ktedonobacter sp.; identical to SEQ ID NO: 4875

SEQ ID NO: 4976 - protein, 431 aa, unidentified
MPNKVYVINKHGRPLMPCSPAKARHLLDEGKAKVKKRTPFTIQLVYGSSGYTQEVILGVDAGSKTIGMSASTTKEELLSAEVKPRNDVVDLLSTRREFRRAQRNRKTRYRKPRFDNRVRSKHKGWLAPSVEVKIQEHITAIRRVCGILPVSKVVIETAEFDLQMLKAIADGKPVPQGEDYQQGEMYGHYNVRQYVLWRDGYTCQCCGAHTTKKKEVRLHVHHLESRKVGGDAPDNQVTLCESCHEKLHKGLIAEKDFKKRKRKSTRDATFMGIMRKTLMQRLCSELPIPVIETRGYITKATREKLLVLPKSHTNDALAIAQGKQGFNVGYLPEIAQIDKIYTIRPVRHHNRQLHKAAILKGGIRKSNQAEKYVFGYRLFDKVQFNEQDCFIWGRRTTGIFTIKTINGKMIKDGISFKKLKLLEKSTSYLIA

SEQ ID NO: 4977 - protein, 427 aa, unidentified
LRVFILNKRGKPLMPCSPAKARLLLKEKKAVVVRRTPFTIQLTIATGETKQPVSLGVDAGYEHVGLSASTEKAELYASEVELRQDVSDLLSARRALRQSRRNRKTRYRAPRFDNRIRTKRKGWLAPSVENRINAHLSRIETVLRLLPVTKITVETASFDMQLLKNPDIAEKEYQEGEQLGFWNVREYVLFRDGHVCQYCHGRSKDPVLNVHHLESRRTGGDSPGNLITLCETCHKALHRGEIKLRAKRGQSFRAETFMGIMRWEVLNRLKASHSKLEVNNTYGYLTKHARIKSGITKSHCSDAFCIAGNLGAKRLGEFLFQKQTRRNNRQIHKLSILKGGIRKRNQAPFEIKGFRLFDKVACKGEEGFIFGRRSSGSFDVRRLDGTRISAGISYKKLRLLQKRQTYLTEIRKEEALPPLPEGRDLRA

SEQ ID NO: 4978 - protein, 458 aa, unidentified
MLTYVLAKDDTRLMPTYSIRKVRRLLKSGRAVIVGHRPGLTIQLVYDLPDQQAAHVQPVEICEDTGYAHIGVSVKSEKHEFAHEQYDLLANEKQRRDDRRKYRHERRSRKRHRAPRFDNRTASKKPGWLAPSVMNKMFRHADLIDMYAKVLPLTSVALEMGSFDTQELEAIQTGAKLPEGTDYQRGKRYQISTLREAVFYRDGYTCQVCGKSIKDHTVLRVHHAGYWHGDHTDRMENLVTVCTKCHTAANHKPGGRLYEWRPKVKPMTGAAFMNSVRWKLYEEVEHRFPGVGIHVTYGSHTKVERRALCLPKTHANDAYVMGKFHPTHRAHEVKYQKRRRGTRVLQKFYDAKYIDSRDGTKKSGSQLSCGRTNRSESRHSGRDLRQYRQGKVFKGRVSVRRKRYPWQPGDTAYLDGQRYTVVGTISCGKSVLLDPHRTSVPKRLGLIRKAESWCISSG

SEQ ID NO: 4979 - protein, 456 aa, unidentified
MSTCVCVLSNSGERLMPTFRLGKVRRLLKDGKAKIVKHHPFTIQLLYDSKTNTQPIEICEDVGYNYIGISVKSESHEYVSAQYDTLQDEKEHHDDCRKYRRTRRNRLRYRKPRFDNRKRSEGWLAPSLRHKKELNVNVVKMYCAVMPITHATVEVGSFDTMLLQAIQKGESKPEGVDYQKGPRYNLATLREAVFYRDNYICQVCGRKIADGAILHMHHMFYWKGRHGYQLDELVTACEKCHTPANHQKGGKLFGFGEDKEFANLSGAAFMNAVRWQIVDALHATYGKEFVTITYGAMTKEKRIILGIEKTHNNDAYAMGDYHPVHRCVFRHYQKRRRNNRVLEKFYDATYIDTRTGNKAKGKELFNGRISRNHKKSSEDLHKYRSKKVSKGRRSIRRQRYAIQPYDTVRLESKTYITSGCHNKGTRLLIPANGKSKSVAISKVQVVCHAGAWIQII

SEQ ID NO: 4980 - protein, 471 aa, Caldicellulosiruptor sp.; identical to SEQ ID NO: 3375

SEQ ID NO: 4981 - protein, 441 aa, unidentified
MELRITYCKVEYFQGVDTLVYVISIDGKPLMPCKPVIARLLLKQHKAKVIKKYPFTIKLLYKTKTEYTQPLTLGIDTGSSKIGSAVVDENNNVLYLSQVEVRNDITDKMKQRAKYRRNRRNRKTRYRKARWLNRKNSIKEDRFSPTIVSKINSHLKEINFVKSILPIQNVILETATFDPYALKNPAVLHNKWLYQKGVNYGFANTRAYVLGRDNYTCQYCNGKSKDSKLEIHHIIFRSQGGSDESKNLITLCKTCHGKLHNGKINLKKNGKVKGQLKHATQMNSIRQQLLRLLPEATETFGFITKEHRQLMKLPKEHYYDAVAIACLNNIENTDLIGVNFKTKNILFKRCIADGDFQQTKGVRSEQRIITGKIQGFRKLDKVEYQGKEYFIKGRMSTGYAILMDIEGNKINLKPIPKFEKMKRMQARKSWIISQETIRNIC

SEQ ID NO: 4982 - protein, 471 aa, Caldicellulosiruptor sp.; identical to SEQ ID NO: 3375

SEQ ID NO: 4983 - protein, 346 aa, unidentified
LYSQSKIAQSAQEYGVCRGGIENRRSRRNRKTRYRPPRFDNRVHSKHKGWLAPSVEVKIQEHITVIKRICRILPITLVRVETAEFDTQRLKAMLEGKPLPVGTDYQLGEMYDEYNVRQYVLKRDNYTCQCCGAHTTAKKAVKLHVHHLESRKMGGNAPGNLITLCITCHDALHKGKVSLDNKKRGKPMRDAAFMGIMRRTLMSRLREELPITVQGTYGYITKMQREQNDIKKSHVNDARCISKHPLAEPCSVCYRTKAIRHHNRQTHKANFSKGGIRKRSQMPYVVEGYRLWDKVLYKGQECFVSGRRTSGSFTLKKLDGTRISKGVTFKKLRLLEPATNYLIERM

SEQ ID NO: 4984 - protein, 420 aa, Geobacillus sp.
LFVYIINKHGKPLMPCSPRKARLLLKQKKAKVVRRRTPFTIQLLYGSSGYKQPVSLGVDMGTRHVGISATTKKDVLFEAEAQLRTDIVELLAIRRQFRRSRRNRKTRYREARFLNRRKPEGWLPPSIQHKINSHIKLIDLVHNILPVTSVTIEVAAFDTQKLKNLNIRGVEYQQGEQMGFWNVREYVLYRDNHTCQYCKGKKKDPVLQVHHIESRKTGGDSPDNLITLCKTCHHEIHEKGLEHIFQRKRPPMRDASQMTAMRWAMFSRIREKYSHANITYGYITKCIRIANGLSKSHMVDARCISGNPLAKPSGTVYLLKFVRKNNRQLHKATILKGGKRKSNKAPRFVKGFQLFDKVVYERKECFIFGRRSSGYFDLRLLDGTKVHASASWKKLKRVEHASTLLIERRKGDSSPTFALA

SEQ ID NO: 4985 - protein, 475 aa, unidentified
MVAVVTSTGKPLMPTSAYRARKLLKKGRAVIFKYRPYFTIQLVDRADGEVQEVEYKSDTGSVHVGISVCTEKKELLSEQRDLLENEPEHHNDRKKNRRTRRNRKRYRKPRFDNRKKKPQEGHEKWLPPTLLHKMEVQVRLFREFCRVVPVTSACFEMGKFDTQALKAVSKGEPVPEGEGYQKGERYGTDTLRAAVFLRDGHTCRFCGRSVKDGAILHVHHVGYWKGDRTNRPANLASACEQCHTPANHGKNGILYGKEPEFKTLKDASYMTSVRWIMLDEIKKAAPGVQVSVTYGVTTKRKRQELHLPKSHVNDAFSMASFHPKKRSDTEYWKKIPRHDRVLQKFYDAIYLDTRDGSEKKGSELSNGRISRNHKKDSENLHQYRGHKVSKGHNSIRRGASSLKPGSIVMYKGEKMTVHGTHTRYVKGKDGKTAKKVNVQFTCPASDGKKSASLEKCTPVSRVYNTGWKRYWPDKK

SEQ ID NO: 4986 - protein, 406 aa, Geobacillus sp.; identical to SEQ ID NO: 3747

SEQ ID NO: 4987 - protein, 551 aa, unidentified; identical to SEQ ID NO: 3229

SEQ ID NO: 4988 - protein, 438 aa, Ktedonobacter sp.; identical to SEQ ID NO: 3545

SEQ ID NO: 4989 - protein, 279 aa, unidentified
VVVETAEFDLQLLKAIADGKPVPQGEDYQKGEMYGHYNVRQYVLWRDNYTCQCCGAHATKKKEVRLHVHHLESRKVGGDAPDNQVTLCESCHEKLHKGLITAKDFKKRKRRSTRDATFMGIMRKTLMQMLCSELPIPVVKTRGYITKATREKLLVLPKSHTNDALAIAQGKRGFNVGYLPEIAQIDKIYTIRPVRHHNRQLHKATILKGGIRKSNQTEKYVFGYRLFDKVQFNGQDCFIWGRRTTGIFTIKTINGKMIKDGISFKKLKPVEKSTSYLIA

SEQ ID NO: 4990 - protein, 419 aa, Geobacillus sp.; identical to SEQ ID NO: 2623

SEQ ID NO: 4991 - protein, 545 aa, unidentified
VQFAWWLCHPKPSDNIEDVNHETALMLLQIKAGTETFGTAPCGSGPKAEGVSPERKAMNTVAVVTNTNKPLMPTSPYRARKLLSSGKAKIVKHRPFTILLVNRSDGNVQEIEYKSDTGYLHVGISVCSEKREFVREQRDLLPDEREKHNDRRKYRRTRRNRKRYRKARFDNRIGKIRKKEKNEHVWLPPSLEHKVDAQVQLFLRLYQVMPVKRAVFEMGQFDPALMKALEKGEAAPQGIDYQMGERYQIATRRAAVFTRDRYACVFCGRSIKDHAILHVHHIGFWKQDRSNRLDNLATCCEQCHTSENHRPGGILYGVEPKLESLASATYMNVVRFELLRRLKEAAPDVEFHISYGAKTSVIRKQRSISKSHTNDAYCLGQYFPKLRAEEIGFQKIRRNDRILQKFYDAEYLDSRDGTTKKGKELTNGRISRNHKKDHKNLHQYRGKKLSKGRITIRRGRSSLKPGGLVRFDGELLTVHGTHRSRKKNKAGHIKVSVNVEFECPSKTGRKSAALSKCQIISRSYNTGWKQIQLRKEEQGRIAAVV

SEQ ID NO: 4992 - protein, 420 aa, unidentified
MQYVYVLNKHGEPLMPCSPGKARILLKQQKACVVKRTPFTIKLLYGSAGYKQPITLGVDAGSKHIGLSASTEKRELYSEEFTPRNDVVELLSTRRQNHRSRRNRKTRYRAPRFNNRIHSKHKGWLAPSVEVKIQEHITVIKRICRILLITLVRVETAEFDTQRLKAMLSGKPLPVGTDYQLGEMYDEYNARQYVLRRDNYTCQRCGAHTTKKKTVKLHVHHLESRKTGGNAPSNLITLCVDCHKAFHAGKVKLDGKKRGKSLKDAAFMGAMRNTLLTRLRNELNIPVQNTYGYITKLLREQNDIKKSHVNDARCISKHPLAEPCSVCYRTKAIRHHNRQTHKANFSKGGIRKRSQMPYVVEGYRLWDKVLYKGQECFVSGRRASGSFTLKKLDGTRISKGVTFKKLRLLEPATNYLIERM

SEQ ID NO: 4993 - protein, 250 aa, unidentified
MVYVQDINGKPMMPTTRHGKVRRLLKDKKAVVVNLCPFTIRLTYVTSDYKQEIVLGVDAGTKHVGLSATTKSKELYSSEVILRSDIVDLLSTRRELRKTRRNRLRYRKLRFDNRVKSKRSGWIAPSVKYKIDAHIRIVDNVCSILPISRIVIEVAQFDTQKIKNPNISGKEYQEGDQLGFWNVREYVLARDGHKCQYCKGKSKDKILNVHHIESRKTGGDSPSNLITLCETCHKEYHKGNIDLKIRRGKS

SEQ ID NO: 4994 - protein, 353 aa, Arthrospira sp.; identical to SEQ ID NO: 3451

SEQ ID NO: 4995 - protein, 426 aa, unidentified
MSTVYVLNKDGKPLMPTTRGGHVRYLLKEKKARVVTSKPFTIQLLYETDDVVQPLYLGIDPGRTNIGVAVVKTDGTAVFTAHLETRNKEIPKLMQGRKKARLLQTHINLIKKIRKFLPVNDVVLEINKFAFMQLDNPNIQKWQYQQGPLYQKASLEEAVSEMQEHHCLFCKQSIVHYHHVVPQSENGSDTIGNIVGLCTKHHDLVHKDTAWQKKLAKKKTGLNKKYGALSILNQIIPALTKELSSLFPKHFFATNGKSTHDYRAAHDVSKDHWLDAYCIACSILPNDTCDKNINGRVPYKLKQFRRHDRRALHKENMSRVYTLDGKKVATNRHKAIKQTTDSLEEFRQRQPNDVCKLKVKEHHPEYRNPERNFPGCVFLVGKHTHVMQGTSGSHNGKADGYYDTNGNSYPSGKCKFVAKNKGIVFA

SEQ ID NO: 4996 - protein, 472 aa, Acidithiobacillus sp.
MAVFVLDKRHKPLMPCSEKRARILLERGRARVHRMVPFTIRLVDRLQKDSVLQDVRIGLDPGSKVTGIAVTRERDAVDQATGEVVKIRVVLMLLELQHRGSVIRDRLTSRRAFRRRRRNQLRYRPARFDNRTKPRDWLAPSLQHRVDTTMAWVSRLMRWLPITALSQELVKFDMQGMQNPEISGAEYQQGTLAGYEVREYLLEKWCRKCAYCDAENIPLEIDHIHPRSKGGSDRVSNLTLACHDCNQAKGNKPLEQFMVKQPDRVRKMLAQAKAPLRDAAAVNTIRWALFQRLKATGLDVETGTGGRTKWNRMRLSVPKAHCLDAACVGHVDTIKKWQQQPVLSIKATGRGSYQRTRLTKYGFPRGYFTRSKSVFGFQTGDMVRAMVTTGKKAGAYLGRVAIRASGSFNIQSANGLVQGIHRRFCTLVQRADGYGYSWDKIALQQGDAGMGRSSTAALSLPGMNAGVPRATG

SEQ ID NO: 4997 - protein, 471 aa, Caldicellulosiruptor sp.; identical to SEQ ID NO: 4560

SEQ ID NO: 4998 - protein, 408 aa, Fervidobacterium sp.
MVFVISKDGKPLMPTKRLGKVRRLLKQGLAKVVNREPFTIQLLYETTNYTQPVTVGIDTGSKVVGVSAVTDKEEIFSAEVQLRQDIKKLLLERRQHRRFRRYRKTRYRKPRFLNRRKEDGWLPPSLQWKVDAHVRIVNKLSKIIPITKVVVEVAPFDIQKVQNPDIEAKDYQNGPQKGFSDVRDYCLWRAGYKSELSGKTGILEIHHIIPRSEGGTDAPNNLIVLTTQEHKMLHEGKIKIPKSRLEQIKVFKHVAHVSTIGWHIVNKLRQNYHVEITYGSITKEKRILYGLEKSHRDDALVIAGGNIQERASEWYFGKFFRRQNRSLHKANPIKGGKRPINTVKQVRGFRRFDKVECEGEKGIITGLRSSGYFSISSLSGEKISDSVKYTKLRLIERAKTLMFERRER

SEQ ID NO: 4999 - protein, 267 aa, unidentified
LKAVAEGKPVPQGEDYQKGEMYGHYNVRQYVLWRDSYTCCICGVHGSVRKGVPLHVHHLESRRVGGDAPDNLVTLCTACHDKLHKGIIMAADIKKRKRRSTRDATFMGIMRMTLLRRLREQLPVPVVETRGYITKATREKLLVLPKSHTNDALAIAHGPQGFRAGYLPNIRQADRLYTIRPVRHHNRQLHKATILKSGVRKANQAETYICGFRLYDKVLYNGIECFVWGRRTSGSFLLRQLNGEKVKDGVSHKHLKLLERSQSYLVA

SEQ ID NO: 5000 - protein, 417 aa, unidentified
MSTTVFVLDKKHRPLMPCRPARARRLLRAGRARVVKRFPFVIRLVDRTVEQSEVQPVLIKLDPGSRETGAAVVRDDEKKRHHALAFFVIKHRGGAIRDALKARSAFRRRRRSQNLRCRSPRFLNRVKPKGWLPPSLRHRVETTLSFVRRMCRYLPVSGIATELVKFDSQKLQNPEVSGVKYQQGTLFEYEVREYLLEKFGRKCVYCGAEGVPLNIDHVVPRAKGGSNRVSNLVLARVRRELKTPLRDAAAVNATRWVLFNELKATGLPVETGSGALTKLNRHAFGVEKEHWLDALCVGRLNGVVTRKGLNVLEIRCMGRGSRQRTRLTKYGFPRGYLMRQKCVHGFATGDMVEANVPKGKKAGLWRGRVAVRVSGSFNIQTPKGVIQGVGWKHCRLISHNDGYGYAWLGHAPHSSPA

SEQ ID NO: 5001 - protein, 465 aa, unidentified; identical to SEQ ID NO: 3856

SEQ ID NO: 5002 - protein, 431 aa, unidentified
MPNKVYVINKHGRPLMPCSPAKARHLLDDGKAKVKKRTPFTIQLIYGSSGYTEDVILGVDAGSKTIGLSASTEQEELFAANVTPRNDVVDLLSTRREFRRTRRSRKTRHRKARFNNRVHSKHKGWLAPSVEVKIQEHITCIKRVCNILPISKVVVETAEFDLQLLKAVEEGKPVPQGEDYQKGEMYGHYNVRQYVLWRDGYTCQCCGAHSTKKKDVKLHVHHLETRKTGGDAPSNQITLCEDCHQKLHKGLIPAADFKKRKRKSTRDAAFMGIMRNTLMQRLRSELPIPVAETRGYITKATREKLLVLSKSHTNDALAIAQGRHGFNVGYLQSIPQNNRIYTIRPVRHHNRQLHKATVLKGGIRRVNQAVKYVYGFRLYDKVRYNGVECFVWARRVMGYFRLRHLGGENVKCGANYKNLELLERSQNYLIA

SEQ ID NO: 5003 - protein, 477 aa, unidentified; identical to SEQ ID NO: 2707

SEQ ID NO: 5004 - protein, 451 aa, unidentified
VTTILKTCFAAFNLAKVVVLMDAWDIIVVLNKRGKPLMPCSPAKARLLLKEKKAIVKRRTPFTIQLTIATGETKQPVSLGVDAGYKHVGLSASTEKAELYASEVELRQDVSDLLSARRALRQCRRNRKTRYRAPRFDNRIRTKRKGRLAPSVENRINAHLSRIEAVLRLLPVTKITVETASFDTQLLKNPDISGKEYQEGEQLGFWNIREYVLCRDGHVCQHCYGRSKDPVLNVHHLESRRTGGNSPGNLITLCETCHKALHRGEITLKAKRGQSFRAEAFMGIMRWEVLDRLKASHPKLEVHNTYGYRTKHARIANGIAKSHCADAFCIAGNLGAERLCEFFFQKQTRRNNRQIHKLSILKGGIRKRNQAPFEVKGFRLFDKVACKGEEGFIFGRRSSGFFDVRKLDGTRISAGISCKKLHLLEKRRTYLTEIRKEEALPPLPEGRGLRA

SEQ ID NO: 5005 - protein, 460 aa, Lactobacillus sp.
LDEWQESLFPALRKRRKNMKHENANRVFLLNRDGNPLMPCRPRKARLLLKSGKAFVVKKYPFTIQLKYGSYGYKQKVSLGVDTGQRHIGFAVVSQEKVLCQSEVELRQDVHANLYTRKIYRRSKRNRKTRYRQARFLNRVHGKRDGLWLPPSIKGKVSHNIAWIKRYLAVLPNPDLHIEVGKFDMAKMLNPQISGKQYQEGSLKDWKNYEYYVLARDEYTCQLCHKHGEGVKLVVHHIVYRSQGGTNRVDNLITLCTDCHTTKNHQPGGKLYKWMKAKKKVTKQLKGATFMNILRKRIMTAFPEASFQYGSQTYVDRKNLLLPKGHFMDAIAISGVKSVGQMPETVTMISQFRKKKRSLHEATARKGRKQPNKAAKRNAKNTKYARGIWLNDYVRIIGNNAKGYVQGFKSNGYFVYLADGLGNYVLNNGKNYINRKQCRLIMHNGNWQKAEQKLSLYEFK

SEQ ID NO: 5006 - protein, 551 aa, unidentified; identical to SEQ ID NO: 3229

SEQ ID NO: 5007 - protein, 414 aa, unidentified
MPCSPAKARLLLKEKKAIVKRRTPFTIQLTIATGETKQPVSLGVDAGYKHVGLSASTEKAELYASEVELRQDITDLLSARRALRQSRRNRKTRYRAPRFDNRIRTKRKGWLAPSVENRINAHLSRIEAVLRLLPVTKITVETASFDLQLLKNPDISGKEYQEGEQLGFWNIREYVLCRDGHVCQHCYGRSKDPVLNVHHLESRRTGGDSPGNLITLCETCHKALHRGEITLKAKRGQSFRAEAFMGIMRWEVLNRLKASHPELEVNNTYGYRTKHARIANDIAKSHCADAFCIAGNLGAERLGEFFFQKQTRRNNRQIHKLSILKGGIRKRNQAPFEVKGFRLFDKVACQGEEGFIFGRRSSGFFDVRKLDGTRISAGISYKKLHLLEKRRTYLTEIRKEEALPPLPEGRGLRA

SEQ ID NO: 5008 - protein, 454 aa, Acidithiobacillus sp.
MAVLVLDKRKKPLMPCSEKRARLLLERGRARVHRMVPFTIRLVDRLQEDSTLQPVRLKLDPGSKTTGMALVREQESVDEDTGEIQRKAIVLMLLELQHRGYAIRDALTQRRAFRRRRRGNLRYRPARFDNRAKPEGRLAPSLQHRVDTTMAWVQRLLRWAPVSALSTMLHRFDTQALQNPEISGIEYQRGELFGYEVREYLLEKWGRKCAYCDAQNTPLTIDHIHPRSAGGSDRVSNLTLACFPCNQRKSNRDVREFLAHDPKRLTRIEASRKAPLKDTAAVNSTRWALWRQLVATGLDVEVGTGGRTKWNRSRLQIPKEHCLDAACVGHVDGLEHWQQPVLGIKATGRGSYQRTRLTKHGFPRGYLTRSKSAFGFQTGDMVKAVVTKGKKVGTYLGRVAIRASGSFNIQTGNGLVQHIHYRFCKLVQRGDGYGYHWSLLHPALNHGIAEAGRN

SEQ ID NO: 5009 - protein, 423 aa, unidentified
MSNFVFVLDTQKRPINPIQPGLARKLLTSGKAVVFRRYPFTIILNENAIATPEPITLKIDPGSKTTGIALLQGEKVIWGAELTHRGQAIKASLESRRSLCRGRRNRHTRYRQARFLNRKRPKGWLAPSLQHRVETTLTWVKRLIKLAPISSIVEELVRFDLQQLENPEISGVEYQQGELVGYEVREYLLNKWERKCAYCAVENVPLQVEHIHPKAKGGTNCISNLCLACEKCNTKKGTQSIEKFLAKKPDILKRILSQAKRPLKDAAAVNSTRWGLFNRLKETGLPVSTGSGGLTKFNRTRLNLPKTHWIEAACVGQIDSVNLLTNQPLLIKAMGHGTRQMCRTDKFGFPSRYVPRLKFIKGFQTGDIVKAVVTSGKKIGTYVGRVAIRTSGSFNISVPELVSGINYKYCKTVHKKDGYSYAF

SEQ ID NO: 5010 - protein, 429 aa, unidentified; identical to SEQ ID NO: 3501

SEQ ID NO: 5011 - protein, 443 aa, Oligella sp.; identical to SEQ ID NO: 4852

SEQ ID NO: 5012 - protein, 414 aa, Parasutterella sp.
MPCSPAKARLLLKEKKAIVKRRTPFTIQLTIATGESKQPVSLGVDAGYKHVGLSASTEKAELYASEVELRQDITDLLSARRALRQSRRNRKMRYRAPRFDNRIRTKRKGWLAPSVENRINAHLSRIETVIRLLPVTKISVETTSFDMQLLKNSDIAGKECQESEQLGFWNVREYVLFRDGHVCQHCHGRSKDPVLNVHHLESRRTGGDSPGNLITLCETCHKALHRGEITLKAKRGQSFRAETFMGIMRWEVLDRLKASHPKLEVQNTYGYRTKHARIVNGIAKSHCADAFCIAGNLGAERLCEFLFQKQTRRNNRQIHKLSILKGGIRKRNQVPFEVKGFRLFDKVACKGEEGFIFGRRSSGYFDVRKLDGTHVSAGISYKKLRLLEKRQTYLTEIRKEEALPPLPEGRGLRA

SEQ ID NO: 5013 - protein, 437 aa, Ktedonobacter sp.
MVLVSVLNSDGRPLMPCLPPIARLLLKAGKAKVVRRTPFTIKLLVPLTHEHTQPLTLGMDTGSTVVGAAVADEQGKVVYLSEAELRNDITTTMKERAAKRRNRRQRKTRYRPARFNNRRNSTKQGRFSPTMGSKIEGHLREFRFVQAIFPITHIVLETGTFDPHALKHPEVLRKKWLYQQGINYGFANTKAFVLTRDDYTCQQCKGKSKDRRLEVHHIIFRSQNGSNEPENLLTLCKTCHDGLHAGTITLKQKGKKKGTLRHATQMNSIRVQLLKRLRAEETWGFVTKEHRMLAGLPKTHAHDAAIIATRGIAPIFCTTQVLQKKCISDGDYQQTKGVRSEQPITTGKIQGFRKFDTVRYRGQEYFIKGRMSTGYAILMGLDGKKVDLKPIPKFEKMKRVSARSTWMISQKPCQVVDPLPPHVRAEGSQKAAGFLWR

SEQ ID NO: 5014 - protein, 279 aa, unidentified
VVVETAEFDLQLLKAIADGKPVPQGEDYQKGEMYGHYNVRQYVLWRDNYTCQCCGTHPSKKKEVRLHVHHLESRKVGGDAPDNQVTLCESCHEKLHKGLIAEKDFKKRKRRSTRDATFMGIMRKTLMQRLCSELPIPVVKTRGYITKATREKLLVLPKSHTNDALAIAQGKQGFNVGYLPGIVQIDKICTIRPVRHHNRQLHKATILKGGIRKSNQTEKYVFGYCLFDKVQFNGQDCFIWGRRTTGIFTIKTINGKMIKDGISFKKLKLVEKSTSYLIA

SEQ ID NO: 5015 - protein, 452 aa, Ktedonobacter sp.; identical to SEQ ID NO: 4845

SEQ ID NO: 5016 - protein, 317 aa, Lamprocystis sp.
MAVFVLDRRGKPLMPCSEKRARLLLTRGRARVHRVVPLQNPQISGVAYQQGTLAGYEVREYLLEQWGRRCAYCTGDGVPLEIDHITPRSRGGSDRVTNLTLACHPCNQAKGNRSAAEFGHPEIEAKAKQSLGDAAAVNSTRWSLLNALTATGLAVETGTGGRTKWNRTRLGVPKTHALDAACVGVVEGVTGWVAPVLSIRCTGRGAYQRTRVTQDGFPRGYLMRHKQVRGFQTGDLVRATVPSGKKAGIHMGRVAVRATGRFNIQTPQGVVQGIGYRHCCVIQRGDGYGYAQLGATALPSPAIRSRPEGRGFSRRNG

SEQ ID NO: 5017 - protein, 515 aa, unidentified
VTDVSTIYVLNKDGKPLMPTTRCGHVRRLLKEQKARAVASKPFTIQLLYETDNIVQPLYLGIDPGRTNIGVAVVKADGTAVFTAHLETRNKEIPKLMKKRKDSRRARRTNGRRCRRQRRAKANGTISKKCVKQATAQNGSASKRAKKIGVIKRHLPDCEKEVLCIGIKNKEAKFNNRARPEGWLTPTANQLLQTHVNLVKKIQKFLPISDIVLEVNKFAFMQLDNPNIQKWQYQQGPLYQKANLEEAVSEMQEHHCLFCKKPIEHYHHVVPQHKNGSNTISNIVGLCTKHHDLVHKDTEWHEKLTKKKTGLNKKYGALSVLNQIIPALTKELSSIFPKHFFVATGKSTYDYRAAHGVSKDHWLDAYCIACSVLPNDVCDSSINNRVPYELKQFRRHDRRALHKENMSRVYTLNGKKVATNRHKAIEQTTDSLEEFRQNNLDNVCKLKVKEHHPEYRNPKRNFPGCVFLVGKQTHVMQGTSGSHNGKADGYYDTNGNSYSSGKCKFVAKNEGIIFT

SEQ ID NO: 5018 - protein, 424 aa, unidentified
MRVFVLNMRGEPLMPCSQRKARLLLKSNKAVIYKYNPFTIQLAYATGEAKQGCRIGVDTGSKHIGLAVTSEDKVMWKAEVELRQDVKSKIDKRRMYRENRRYRKTRYRKPRFLNRKREPKWLPPSLQNKVNHTFHWIDALISLVPNPNLHIEVGKFDTAKMINPEINGVDYQHGQTYGFYDERYFVFARDNYTCQCCGKSKDKILNTHHIIYRSNGGTNRVDNLITICTDCHTSQNHKKGGILYEWQEQHKKVTQYKEPPFMNTLRRRIFTAYPDAKITYGSETTPKRKDMGLNKTHYNDAIIISGINDINENDEEWLLIKQFRKKKRSLHEATARKGRKKPNSSQVRNSKNTPYYKGFYLNDKVVVFGKSGYITGFTSDGAYIKDGDDNYITLPNKNYKQVGISKMKFECHNNNWQYIVKNAV

SEQ ID NO: 5019 - protein, 444 aa, unidentified
  source 1..444: note = Candidatus Anoxychlamydiales bacterium
MLAFVLNKLKKPLMPCSSAKAKRLLKKGLAKVISKKPFTIKLLFGSSGHKQEVISGMDTGSKTIGIAAIANGKILYQAQTKLRGEEIKKKMDQRRMYRRSRRSRKLRYRKPRFLNRRASTAINRLAPSVKHKLLSHLREKKFIESILPVSMWIVETASFDIHKITNPKGVSKALGKGRTYQKGRMLDFYNVKQYVLNRDKYQCQVCKKKNNLKLHVHHIQFRSNGGSNSPDNLVILCETCHDKLHKLKKEEAEKSSKKLQKSAQKQTKHATESSILRSQLCKHFKKLESSQVFEETFGYITKFNRERALLPKSHYIDAICIASRGKIPEMHIQNNTSDLFLRRCVSKGDYKQRRGICSELKIPTGKLFGLKKFDLVKTSKGVGFVKGKRSSGFFAISDINGTLISDSVNIKKNIGRIQARKAVLTWRSQFLPDLKDRVSLREKR

SEQ ID NO: 5020 - protein, 431 aa, unidentified
MPNKVYVINKHGRPLMPCSPAKARHLLDDGKAKVKKRTPFTIQLVYGSSGYTQEVILGVDAGSKTIGMSASTTKEELLSAEVKPRNDVVDLLSTRREFRRARRNRKTRYRKPRFDNRVRSKHKGWLAPSVEVKIQEHITAIRRVCGILPVSKVVVETAEFDLQLLKAIADGKPVPQGEDYQKGEMYGHYNVRQYVLWRDNYTCQCCGTHPSKKKEVRLHVHHLESRKVGGDAPDNQVTLCESCHEKLHKGLIAEKDFKKRKRRSTRDATFMGIMRKTLMQRLCSELPIPVVKTRGYITKATREKLLVLPKSHTNDALAIAQGKRGFNVGYLPEIAQIDKIYTIRPVRHHNRQLHKATILKGGIRKSNQTEKYVFGYRLFDKVQFNGQDCFIWGRRTTGIFTIKTINGKMIKDGISFKKLKLVEKSTSYLIA

SEQ ID NO: 5021 - protein, 465 aa, unidentified
MSTCVCVLSNNGERLMPTFRLGRVRHLLKDGKAKIIKRHPFTIQLLYDSKTNTQPIEICEDVGYNYIGISVKSESHEYVSAQYDTLQDEKKHHDDCRKYRRTRRNRLRYRKPRFDNRKRSEGWLAPSLEHKKQLNIRLIERYVSVIPITRATVEVGSFDTMLLQAIQKGKSKPEGVDYQKGPRYNLATLREAVFYRDNYTCQVCGRKIADGAILHMHHMFYWKGRHGYQLDELVTACEKCHTPANHQKGGKLYGFGEDIKFANLSGAAFMNTVRWQIVNVLYAAFGKPFVTFTYGAMTKEKRIALHLEKSHNNDAYAMGSFHPVNRCAFEHYEKVKRNNRILEKFYDSQYIDTRTGELTNGKSLFNGRISRSHKKDSENLHKYRGKRICKGHRALRRKKLALNPGDLVSLNGEILVVHGTHTKKNGSVNVEFKTPSRGGKKSASLKKLKIVKTSNSMHSAWKKVS

SEQ ID NO: 5022 - protein, 420 aa, unidentified; identical to SEQ ID NO: 3153

SEQ ID NO: 5023 - protein, 413 aa, unidentified; identical to SEQ ID NO: 2605

SEQ ID NO: 5024 - protein, 494 aa, unidentified; identical to SEQ ID NO: 2450

SEQ ID NO: 5025 - protein, 471 aa, Caldicellulosiruptor sp.; identical to SEQ ID NO: 3268

SEQ ID NO: 5026 - protein, 436 aa, unidentified
MTKTLTTQTIQACVLDRQGKPLMPTTRLGKVYRLLKAKKAHIVSYEPFTIQLDYEPDTQVIQPMTLGVDSGAIHSGYSVANEHREYYSAEVIARNDISNRLSERHMYRQNRRSRKTRYRKPRFNNRKNKKKGWLPPSLEQKVAVQVNEINHIHRYFPIETIIVEVAEFDIQKIKNPGISGIEYQQGTLQGYNVRNYLLEKHGRKCFYCGKAVSDFEVEHMFPKSKGGSNRIDNLTLSCHDCNEKKGTLTAEEFIQQTLPVKKATAKLKQLPNEKRLFKYMAYMNTTRWALYDAIKERYPNVKMTYGYITKYNRIQAGLPKAHHIDAKCITGFATVPSMSQTVVKVKMRRHNRQLHRATFSKGHVRKAANLPTTVFGFQLYDLVCFNNHRYYIKSRRSSGYFVLVSVENLKNEERTYKKLTLLAHTNAYLTNHYVNA

SEQ ID NO: 5027 - protein, 518 aa, Nocardiopsis sp.; identical to SEQ ID NO: 3757

SEQ ID NO: 5028 - protein, 413 aa, unidentified; identical to SEQ ID NO: 3621

SEQ ID NO: 5029 - protein, 412 aa, unidentified
MIYVLNQNGQPLMPTKNHAKVRILLKSKKAKVIRRCPFTIQLMYSSTNYTQSINLGVDAGSKHIGISATTKNKVLFESDVELRNDIVNLLSTRRQNRRTRRNRKTRYRKPRFDNRKRKDGWLAPSVQNKVDTHLTVIRKVHEILPVSKIIVEVASFDIQKIKNPTIGGTEYQQGSQLDFWNVREYVLFRDNHTCQCCKGKSKDKILNVHHIESRKTGGDAPNNLITLCGTCHTGYHKGTVNLPKRIKRGMSFKDASFMGIMRWAFYNKLKEIYPNVSLTYGYITKNTRIENKLPKDHYIDARCISGNPKAVSDWGVYYQKKVRCHNRKIHKNTILKDGYRKRNQAPYEVMGFRLYDKVRWKQQNCFIFGRRSTGRMDLRLLDGTKVNASVGYKNLKMLEMCKNILIELRMEV

SEQ ID NO: 5030 - protein, 413 aa, unidentified; identical to SEQ ID NO: 3476

SEQ ID NO: 5031 - protein, 431 aa, unidentified
MDAWDIIVVLNKRGKPLMPCSPAKARLLLKEKKAIVKRRTPFTIQLTIATGESKQPVSLGVDAGYKHVGLSASTEKAELYASEVELRQDVSDLLSARRALRQSRRNRKTRYRAPRFDNRIRTKRKGWLAPSVENRINAHLSRIEAVLRLLPVTKITVETASFDMQLLKNPDIAGKEYQEGEQLGFWNVREYVLFRDGHVCQHCHGRSKDPVLNVHHLESRRTGGDSPGNLITLCETCHKALHRGDITLKAKRGKSFRAEAFMGIMRWEVHNRLRALHPGIEVSNTYGYRTKHARIANGIAKSHCADAFCIAGNLGAERLCEFFFQKQTRRNHRQIHKLSILKGGIRKRNQAPFEVKGFRLFDKVACQGEEGFIFGRRSSGYFDVRKLDGTCISAGISYKKLHLLEKRRTYLTEIRKEEALPPLPEGRGLRA

SEQ ID NO: 5032 - protein, 419 aa, unidentified
MYVYVINKHGEPLMPCSARKARLLLKNKKACVIKRTPFTVKLLYGSSGYKQDITLGVDAGSKNIGLSASTEKHEFYREELAPRNDVVDLLSTRREFRSARRNRKKRYRPARFDNRVHSKPKGWVAPSVKVKIQEHVTAIKHICRILPITLVRVETAEFDTQRLKAMLEGKPLPVGTDYQLGEMYDEYNVRQYVLKRDNYTCQCCGAHSTKTKSVKLHVHHIESRKTGGNAPNNLITVCPACHKAIHEGKKTLGTKKRGKPFRDAAFMGIMRNTLLAILRDELTVPVQQTYGYITKMLREKNHLPKSHTNDALCIAQHPQAAPCENSYRSKAVRHHNRQLHKAKILKGGVRKKSQAPYLVKGFRLWDKVLYNRQECFISGRRSSGYFALKKLDGTVVSNSASHKKLRLLEVAKNYLIERM

SEQ ID NO: 5033 - protein, 419 aa, unidentified
GQPLMPCSPAKARHLLKAGKAAVRRRTPFTIQLRIATGETKQSVTLGVDAGAKHVGLSAATEKEEVFASEVELRQDITGLLAARLSLRRERRQRKTRYRAPRFLNRVRSKHNGWLPPSVENRIQAHLSRIDAICGLLPVTKIVIETASFDIQKIKHPDVEGTDYQQGDQLGFWNVREYVLFRDGHVCQHCHGHAKDKILNVHHLESRQTGGDAPNNLITLCETCHKACHAGKIKLKVKRGQSFRAEAFMGIMRWTLLDRVRKAHPGLPVENTYGYLTKNTRITLGLPKAHCVDAYCIAGNLKAVRRGVYLHQRQVRKHNRQIHKCTVLSKTLKDGTKIGYRKLNQTPHLVKNFRLFDKVRCLGQTGFIFGRRSSGYFDVRRLDGVKISSCISYRKLTLLEKRSTCLTELRKEDGASSPV

SEQ ID NO: 5034 - protein, 482 aa, unidentified
LVWNVQAPWDVYPSPTLCGLCLKVLRGRNGDADKKPFPTLTKDENRPSGRTTGLRAEQAEPAGIRKGDALKVFVLNMRSKPLMPCSPAKARHMLKAGKAVVVRRTPFTIKLTIATGETKQDVTLGVDAGARHVGISATTEKEEVFASEVALRQDITGLLADRLAFRRARRNRKTRYRAPRFNNRVRSKHKGWLAPSVENRIQAHISRIEAVCRLLPVTKIVIETASFDIQKIRNPEVEGTGYQQGDQLGFWNVREYVLFRDGHVCQHCHGRSRDKILNVHHLESRKTGGDAPNNLITLCETCHKAYHAGKIKLKVKRGQSFRAEAFMGIMRWTLLDRVRKTHPKLPVENTYGYLTKHKRIALGLPKTHCADAFCIAGNLKALRRGDFLFQQQTRKHNRQIHRCSILKGGVRKLNQAPFLVKGFRLFDKVRIGGQIGFVFGRRVRGIFNIRRLDKTVIGTDINCKKLSLLETRKTFLTELRKE

SEQ ID NO: 5035 - protein, 442 aa, unidentified
MSTTVFVLDKKHRPLMPCRPARARRLLRAGRARVVKRFPFVIRLVDRTVEQSEVQPVLIKLDPGSRETGAAVVRDDGKKRHHALAFFVIEHRGGAIRDALKARSAFRRRRRSQNLRCRSPRFLNRVKPKGWLPPSLRHRVETTLSFVRRMCRYLPVSGIAAELVKFDSQKLQTPEVSGIEYQQGTLFEYEVREYLLEKFGRKCVYCGAEGVPLNIDHVVPRAKGGSNRVSNLVLACVSCNQKKGARSLEDFLKGKPEVLARVRRELKTPLRDAAAVNATRWVLFNELKATGLPVETGSGALTKFNRHAFGVEKEHWLDALCVGRLNGAVTRKGLNVLEIRCMGRGSRQRTRLTKYGFPRGYLMRQKCVHGFATGDMVEANVPKGKKAGLWRGRVAVRVSGSFNIQTPKGVIQGVGWKHCRLISHNDGYGYAWLGHAPHSSPA

SEQ ID NO: 5036 - protein, 428 aa, unidentified
VPVMVYIISQDGQPLMPTDRHGKVRRLLKSDKAKVIKRCPFTIQLLYNSTDYTQRISLGIDAGSKHIGISATTQNRVLYEADVELRNDIVNLLSTRRQNRKTRRSRKTRYRKPRFNNRVSCKKKGWLAPSVKQKVNTHLTVVAKVHQILPVTKIIIETASFDIQKIKNPTISGTDYQKGDQLGFWNVREYVLFRDGHICQCCKGNSKDKILNVHHIESRKTGGDSPDNLITLCETCHKGYHKGTIKLPKTIHRGMSFRDASFMGIMRWSFYDKLKTLYPNVNLTFGYITKSTRIKNNLLKEHYVDARCISGHPLAVSDGTYYYQKKVRCHNRQIHKNTILKGCVRKRNQAPYFVKDFRLFDKVMYEGQECFIFGRRSTGRMDLRLLDRTHINASVSYKKLKLIESRKNYITERRTAVHPTDKSMGFSA

SEQ ID NO: 5037 - protein, 458 aa, unidentified
LKGVGMMSEIKKVDYIYVVDSNGTPLMPTSRLGMVRRWLKTGQAKWFGNSRNTIQFVRPVTTNTQELTLGVDAGFHLGLSVVGNNREYYVSESLRKSEKDRITSRRESRRTRRNCLRYRKARFDNRRRKDSWLAPSIQYRLDFTIKEIKRLYMFLPITNLVFEVTPFDNQKLLNPDIQDWQYQKGKMYGFKTIKDYLLARDNYRDALDGKQYPASQLRVHHLVQRKDGGSNQPDNLVLLSDINHNQANHNNGILAKLRENRQKTLDYRGAYFMNILATRLSNYFDNYTITQGYLTANLRQKYEIEKSHLNDAFVIAGGTDTTLRTNNVYSRQKLRNNNRVLQKFYDAKYIDSRDGKKKTGKELSSGRTRRSRELNYTNLRQFRKEKVKKGRVSIRRGHYQLRPHDVVLNTRTNRIETVKGVQNSGTVIKFQTGKTCSIKSVVSLYHVNGILEKKMENI

SEQ ID NO: 5038 - protein, 471 aa, Caldicellulosiruptor sp.; identical to SEQ ID NO: 3268

SEQ ID NO: 5039 - protein, 429 aa, Ktedonobacter sp.; identical to SEQ ID NO: 4203

SEQ ID NO: 5040 - protein, 452 aa, Ktedonobacter sp.; identical to SEQ ID NO: 4590

SEQ ID NO: 5041 - protein, 425 aa, Planktothrix sp.; identical to SEQ ID NO: 3728

SEQ ID NO: 5042 - protein, 416 aa, unidentified
MTNCENYAFVLDAEGKQLSPTKEKKAWYLIRKKRAILVSKYPMVIQLNKIVSNDNICKDEIRCGIDDGGLHVGIALVQKCQTKNKTLFKGTIEQRNDVKHLMKVRWDYRRYRRYHKRYRPKRINNRSSSKRTDRIAPSILQKRQATLRVITQLNKWINITSYWLEDVTIDVRVLTDGFSSYGWQYQKSNRLDENIRKAVILRDGCRCMECGQSNCRLEVHHIKPRRLNGSNTLGNLITLCESCHQKTEGKEEQYMQHYFNILESSDNKNLNYASYVMIGKTWLRKQLSQLGVLNLTTGGNTANKRIDWNIEKSHSNDAVCITDLQPDSCNVKDWIIKPMRRQSKAKTDNVLGIKHRDLVSYVYKNGELHTGYVTALYPELNALNFQSPTKHCKKVNVRKCRVLWKYNKIYWLDSVS

SEQ ID NO: 5043 - protein, 423 aa, Moorena sp.; identical to SEQ ID NO: 3865

SEQ ID NO: 5044 - protein, 625 aa, Streptomyces sp.
VPLGAPPPRVHLGLGSHEGAFPGPCSTFRTARTTNFDGIHETGGHPLPGRRPSGDQLQSSRSEGSGRCDPMTTFPVGEQTHQAVLPQQPALESVGADTPGSRDETAHGHSAAVRGTGREHGRGETGGRGTAARRRHAKRAVPAAQAAETGSGDVPALDRSGRPYTGGTGASRVFVLSRDGRPLMPCHPARARELLRKGRAVVVRQVPFVIRLKDRTHDESEVEGVQLRIDPGSKGTGLVLTDEKKESGDQGAVITVRRGLVSVELRHRGDQIRAGMRQRAGYRRRRRSANLRYRAGRSDNRARRAGWLPPSVRHRVDTTFSLADRLCRCAPVTEIHVEHVAFDTHSLSAGRLLKGTEHQRGPLAGTSVRDHLRVTWDGSCAYCGVSGVPLNVEHVRPRSRGGSDRISNLVLACSPCNKAKGSKPVEAFLADSADRLTAILTQVRAPLDDAASMNATRWQLTDALSALGKPVHTWSGSLTKANRVAMGLDKTHTLDALCVGPLDHAVGDRIVRFPQHVLTARATGRGSYARTTPDRYGFPRLLRTRAKRHFGYVTGDLVRAVVPGGKWAGTWTGRVSVRARGQHSLSTPRGRINVSHRNLRLLQRGDGYGWAMRPESPQSPSPKMG

SEQ ID NO: 5045 - protein, 442 aa, unidentified; identical to SEQ ID NO: 2903

SEQ ID NO: 5046 - protein, 417 aa, unidentified
MPCSPAKARLLLKEKKAIVKRRTPFTIQLTIATGEAKQPITLGVDSGYKHIGLSATTEKAELYASQVELRQDITDLLSARLALRRSRRSRKTRYRAPRFNNRVASKRKGWLAPSVENRITAHMSRVEAVMRVLPVTAITVETAAFDTQLLKNPDIAGEAYQQGEQLGFWNVREYVLFRDGHVCQHCRGKYKDPILNVHHIESRRTGGDAPNNLITLCETCHKAFHRGEIKLKVKRGKSFKAATFMGIMRWTLFERLKKAHPELSVRNTYGYLTKHKRISHGIAKSHCADAYCIADNLGAKRLEGFFFQKQTRKHNRQIHKLSILKGGLRKKNQAPYEVKGFRLFDKVICKGKEAFIFGRRTSGSFDVRRLDGTRISAGISYKKLRLLEPRTTYLTEFRKEAALPPLHKCRGFCAEFL

SEQ ID NO: 5047 - protein, 415 aa, unidentified
MIYVRSKVGKALMPSERGGRIGYLLRHGKAHVVSRVPFVVQLDYESTTYTQEVSLGIDAGSKHIGVSASSEKKELLAAQVELRNDVVNLLSTRRELRRTRRNRKTRYRKVRFDNRKKKDGWLAPSVKQKVESHLKVIRLVRKLLPITKTTIEVAQFDAQKIKRPDIQGEEYQQGEQMGFWNVREYVLARDGHRCVHCKGKSKDHILNVHHLESRKTGGNSPSNLVTLCETCHKAYHRGEFELKIKRGNSLRDAAVMNIMRWVVYERAKEEFENVHLTYGYVTKHTRIENGIAKTHAADAFCIAKNVHAMRLSSFFMCRCVPRHTRVLHVANPKKGGIRRSTIASHKIGKSRFQRFDMVRWRGKECFIFGSTHGNVVLRKIDGVKVHETQAVSAKTIKFLKRIRNNILVEEIVSIS

SEQ ID NO: 5048 - protein, 412 aa, unidentified
MPCSPAKARLLLKEKKAIVVRRTPFTIQLTIATGEAKQPVSLGVGYKHVGLSASTEKAELYASEVELRQDVSDLLSARRALRQSRRSRNTRYRAPRFDNRIRTKRKGWLAPTVENRINVHLSRIETVLRLLPVTKITVETASFDTQLLKNPDIAGKEYQEGEQLGFWNVREYVLFRDGHVCQHCHGRSKDPVLNVHHLESRRTGGDSPGNLITLCETCHKALHRGEIKLKAKRGRSFRAETFMGIMRWEVLNRLKASHPKLEVHNTYGYRTKHARIANGIAKSHCADAFCIAGNFGAKRLGEFFFQKQTRRNNRQIHKLSILKGGIRKRNQAPFEVKGFRLFDKVACQGEEGFIFGRRSTGYFDVRKLDGTCISAGISYKKLHLLEKRRTYLTEIRKEEALPPPPEGRGLRA

SEQ ID NO: 5049 - protein, 568 aa, Branchiibius sp.; identical to SEQ ID NO: 4833

SEQ ID NO: 5050 - protein, 423 aa, Lactobacillus sp.
MPCRPRKARLLLKSGKAFVVKKYPFTIQLKYGSYGYKQKVSLGVDTGQRHIGFAVVSQDKVLHQSEVELRQDVHTNLYTRKIYHRGRRNRKTRYRQARFLNRVHGKRDGLWLPPSVKSKVSHNIAWIKSYLAVLPNPDLHIEVGKFDMAKMVNPDISGKQYQEGSLKDWKNYEYYVLARDEYTCQLCHKHGECVKLVVHHIVYRSQGGTDRVDNLTTLCTNCHTTKNHQPGGKLYKWMKAKKKVTKQLKGATFMNILRKRIMTTFPEASFQYGSQTYVDRKNLLLPKGHFMDAIAISGIKSVGQMLETVTMISQFRKKKRSLHEATARKGRKQPNTSSKRNEKNTKYACGLWLNDYVRVIGNHVKGYVKGFKSNGYYVYLTDGLGNYVLNSGRNYVNTKQCQLITHNGSWQKAEQKLSLYKFK

SEQ ID NO: 5051 - protein, 470 aa, unidentified; identical to SEQ ID NO: 2825

SEQ ID NO: 5052 - protein, 411 aa, unidentified; identical to SEQ ID NO: 3762

SEQ ID NO: 5053 - protein, 412 aa, unidentified
MENNIKYCFVIDKDNQPLAPTKVNKGWYLIRKSRAKLKSMYPMVIQLNKKVESNENDKSYMACGIDDGSVHVGLAIVQKCPTKNKVVFKGTIEQRQDVKHLMDTRRGYRQYHRYHKRHRPARFNNRSSSKRIGRLVPSIKQKKDAILRVLYQLNKWINIKEYYLEDVCIDIRAMTDDYKPYKWQYQKSNRLDENLRKAAIIRDNYKCQECGKSNCKLEVHYIRARKYHGADTIGNLITLCSKCHEKTEGKEKDFEDKYFKMINSKPKRFDYAMHVMQGKNYLRNKISKLGLLHLTNGCTTANKRIEWNIEKSHSNDAICITNSIPDSCNIKEWTIKPMRRKSKAKTDNVLGIKHRDLVSYTYKNGETHIGYVTALYPEQLALNFQSKTKHCKKVNAQKCRLLWKFNKIYWLK

SEQ ID NO: 5054 - protein, 431 aa, unidentified
MYLHERSTCMVYVLGYNGQPLMPTCRHGKIRHLLDSGKAKVVRRCPFTIKLLYESTTYTQNLTLGQDTGSGTLATAVVDSKGFVVYMSEVTLRNDISERLSQRSRYRRNRRSRKTRYRKARFLNRRNSIRKDRFSPTMVSKFYGHVKEIEFIKKLLPVTRMVLETGTFNPHLMKDPMLAYRPWGYQKGPNYGFGNTKAMVLNRDNYTCQHCKGKHKDSHLEVHHIVYRSQGGSDAPENLITLCHTCHTGVHKSIIKLQISGKKKGSLKYATQMNSIRCQLLKSYPDAIETFGYITKENRQLLGVPKEHYYDACTIASGGDPFVVNTLLYRKRCIPAGDFQQTKGVRSEQKITTGKILGFRKFDKVSYMGSVYFIKGRMSSGYAVLMDLDGNKADFSQMPKGFRTPKLSNLTRLEARPTWMTIPVVVTQNTA

SEQ ID NO: 5055 - protein, 428 aa, unidentified
LKVFVLNMRGQPLMPCSPAKARHLLKAGKAVVKRRTPFTIQLRIATGETKQNVTLGVDAGAKHVGLSATTEKEEVFASEVELRQDITGLLAARLSLRRDRRHRKTRYRAPRFLNRVRSKHKGWLAPSVENRIQAHMSRIDAVCRLLPVTKIVIETASFDIQKIKDPSVEGTDYQQGDQLGFWNVREYVLFRDGHVCQHCHGRSKDKILNVHHLESRQTGGDAPNNLITLCETCHKAYHAGKIKLKVKRGQSFRAEAFMGIMRWTLLDRVRKAHPGLPVENTYGYLTKHTRITHGLPKTHCVDAYCIAGNLKAVRRGVYLHQRQMRKHNRQIHKFTVLSKRLEDGTKIGYRKLNQSPYLVHGFRLFDKVRCLGQIGFIFGRRSSGYFDVRRLDGVKLSPSISWRKLTLLEKRSTYLTELRKQDGASSPV

SEQ ID NO: 5056 - protein, 451 aa, unidentified; identical to SEQ ID NO: 4938

SEQ ID NO: 5057 - protein, 509 aa, unidentified
VYVLNKDGKPLMPTTRCGHVRYLLKEKKARVVKTKPFTIQLLYETNDVVQPLYLGIDPGRTNIGVAVVKADGTAVFTAHLETRNKEIPKLMKKRKDSRRARRTNGRRCRRQRRAKANGTISKKCVKQATAQNGSASKRAKKIGVIKRHLPGCEKEVLCIGIKNKEAKFNNRTRPAGWLTPTANQLLQTHINLIKKIQKLLPISDVVLEINKFAFMQLDNPNIQKWQYQQGPLYQKANLEEAVSEMQEHHCLFCKKKIDHYHHVVPQHKNGSNTIDNIVGLCTKHHDLVHKDTAWHEKLTKKKTGLNKKYGALSVLNQIIPALTKELSSIFPKHFFVTTGKSTYDYRAAHGVSKDHWLDAYCIACSVLPNDVCDSSINNRVPYELKQFRRHDRRALHKENMSRVYTLNGKKVATNRHKATEQTADSLEEFRQNHPDDVCKLKVKEHHSEYRNPKRNFPGCVFLVGKRTHVMQGTSGSHNGKADGYYDTNGNSYSSGKCKFVAKNEGIIFA

SEQ ID NO: 5058 - protein, 408 aa, unidentified
MVYVQDINGKPMMPTTRHGKVRRLPKDKKAVVVDLCPFTIRLMYVTSDYKQEIVLGVDAGTKHVGLSATTKSKELYSSEVILRNDIVDLLSTRRELRRSRRNRLRYRKPRFDNRIKSKRPGWVAPSVKYKVDAHIRVIDNVCSILPISRIVIEVAQFDTQKINNPNISGKEYQEGDQLGFWNVREYVLARDGHKCQYCKGKSKDPVLNVHHIESRKTGGDSPSNLITLCETCHKEYHKGNIDLKIKRGSSLRDAAVMGIMKWRLYEELKSKYDNISMTFGYVTKYNRIKHGIEKSHVFDAFVISKNFDAIRLGYYYKVRLVRRHNRQIHKQKIPKGGIKRPNQSPFEVFGFRLFDRVMFENSYYFIFARRKTGSFNIRDIDGKNQRDITYKKLKLSRCKRFMVQKEMD

SEQ ID NO: 5059 - protein, 424 aa, unidentified; identical to SEQ ID NO: 3434

SEQ ID NO: 5060 - protein, 471 aa, Caldicellulosiruptor sp.; identical to SEQ ID NO: 3375

SEQ ID NO: 5061 - protein, 456 aa, unidentified
  source 1..456: note = Competibacteraceae bacterium UBA2788
MAVLVWDRHKKPLMPCSEKRARKLLAMGRARVHRLMPFSIRLVDRTIADSCLQPIKIKIDPGSKTTGIALVHESETIHEDTGEINTTVHVLSLFELHHRGKQISESLTARRQMRRRRHGNLRYRQPRFLNRGNKGKGWLAPSLQHRMDTICAWVHRFQRLSPVTGIAQELARFDLQQMENPEISGVEYQQGTLAGYEIREYLLNKWNRTCAYCGVKNVPLHVEHIHPKALGGSNRVSNLAMACSPCNQNKGSRPVAEFLKDKPDVLRRIQTQAKAPLKDAAAVNSTRWALFNTLKNTGVPATTGSGGRTKFNRIRLDLPKTHALDAACVGEMDALRDWKKITLAIKATGRGNYQRTRLNADGFPRGYLTRQKRIKGFQTGDRVKAKVTQGKKIGFYLGRVAVRATGSFNIQTAQGVIQGISYRYCKVIQRSDGYGYLQPMNPKQTELRSARSSSPA

SEQ ID NO: 5062 - protein, 427 aa, unidentified
MVYVLAIDGEPLMPTERHGKVRRLLKEKKAKVVKRCPFTIQLLYDSTRYVQEINLGIDAGSKHIGVSATTKEKVLYEADVELRNDIVDLISTRRELRHLRRIRKTRYRKARFNNRVSTKKTGWLAPSVKQKIHTHLTVINNVYKILPIKNLIVETASFDIQKIKNPDISGEEYQQGEQRDFWNVREYVLFRDNHTCQCCKGKSKDKVLNVHHIESRKIGGNAPNNLITLCETCHKGYHNGSVKLPKSIHRGMSFRDAAFMGIMRKTLLSELRKIYPNVKETYGYITKDTRITYNLPKEHYVDARCISGNPDAKPLGYYFYQKKARCHNRQIQKMSILRGGLRKNNQAEYLVKGFRLFDKVKHNSKEYFIFGRRKTGYFDIRNFFGEKVNKGSVSYKKLKFLETRHNMLTERRKAIPYPAIKAEGLLA

SEQ ID NO: 5063 - protein, 447 aa, unidentified; identical to SEQ ID NO: 4640

SEQ ID NO: 5064 - protein, 443 aa, Caldicellulosiruptor sp.; identical to SEQ ID NO: 2385

SEQ ID NO: 5065 - protein, 427 aa, unidentified; identical to SEQ ID NO: 5062

SEQ ID NO: 5066 - protein, 521 aa, unidentified; identical to SEQ ID NO: 3983

SEQ ID NO: 5067 - protein, 426 aa, Nitrosococcus sp.
VNSVFVLDANKTPLMPCRPSRARRLLRDRKAAVYRMQPFTLMLKYRVEASPQPIEFKVDPGSKTTGLALVGKFQAQGRVVLWAGNLTHRGQAIRDRLERRRALRRGRRYRNTRYRAPRFLNRTKPKGWLPPSLRSRVENVSTWLNRLLDRAPISECHIETVRFDIQKIQNPEISGVEYQQGELLGYEVREYLLEKWGRKCAYCNKQDIPLEVEHITPRCRGGSHRVSNLTLACTPCNQRKNHQTAAEFGYPKIQAKAKLPLRDAAVNATRYAIGRAIQSLSLPTSFWSGGRTKKNRLSQGYPKDHWIDAVCVGENGAKVTITEDVRALHIKAMGRGARQVVRTDKHGFPRGKAGRCKRVKGFQTGDLAKLIQPKGKYAGIHIGMLAGIRARGTFDIKAKAGKISANWKNFQLIQRGDGYDYGLLTV

SEQ ID NO: 5068 - protein, 481 aa, unidentified
MWTTVLRDEKPYGRSSALPVRECVSIAKKRRHHMVAVLSKTGIRLMPTSSYRARKLLAKKKAVICGYRPFTIRLTERETGDVQPVELAVDTGYFHVGNSLKTAKHELAAVEIRTLMDEKQRYDDRRQYRRMRRSRLRYRAPRFDNRRRPEGWLAPSIQGRMEQNLAFLRRVLSVVPVTRIVMEMGQFDTQVLKAVEEGRPLPEGADYQQGERYGIATLREAVFTRDNYTCQCCKKTVHDGVILHVHHIVYRSQGGTNRMGNLITVCEKCHTPKNHKPGGKLYKWKPTVKSFKGATFMTAVRWIMYRSVKESFPDVDVRITYGAKTKLQRRTLDITKSHVNDAYVMGDFHPKHRARPVILQKKRRNNRILEKFYDAKYIDTRDGSKKTGQQLFNGRTNRNHNTDTENLRPYRGTKLSKGKRAIRTTRYRIQPHDILVYQGQEMEASGCHCKGTRVMTTAKKSLPIGKVRVRRYSGGYYAVAE

SEQ ID NO: 5069 - protein, 443 aa, Caldicellulosiruptor sp.; identical to SEQ ID NO: 2385

SEQ ID NO: 5070 - protein, 429 aa, Parasutterella sp.; identical to SEQ ID NO: 4241

SEQ ID NO: 5071 - protein, 443 aa, Caldicellulosiruptor sp.; identical to SEQ ID NO: 2385

SEQ ID NO: 5072 - protein, 396 aa, unidentified
VVRRTPFTIQLTIATGESKQPVSLGVDAGYKHVGLSASTEKAELYASEVELRKDITDLLSARRALRQSRRNRKTRYRAPRFDNRIRTKRKGWLAPSVENRINAHLSRIEAVLRLLPITKITVETASFDMQRLKNPDISGKEYQEGEQLGFWNVREYVLFRDGHVCRHCHGRSKDPVLNVHHLESRRTGSDSPDNLITLCETCHKALHRGEITLKAKRGQSFRAQAFMGIMRREVLNRLKASYPELKVHETYGYLTKHARIANGIVKSHGADAFCIAGNLGAERLGEFFFQKQTRRNNRQIHKLSILKGGIRKRNQAPFEAKGFRLFDKVACQGEEGFIFGRRSSGSFDVRKLDGTRISTGISCKKLRLLEKRRTYLTEIRKEEALPPLPEGRGLRA

SEQ ID NO: 5073 - protein, 471 aa, Caldicellulosiruptor sp.; identical to SEQ ID NO: 3268

SEQ ID NO: 5074 - protein, 421 aa, unidentified
MLNKHFKNKLNEMVYVQNIDGNPLMPTTRHGKVRRLLKTKQAVVVNLCPFTIRLTYTTTYYKQEVTLGVDAGTKHIGLSATTKSKELYVGEVTLRSDIVDLLSTRRESRRTRRNRLRHRKPKFDNRISSKKEGWIAPSVRQRISSHLKQISDIHRILPISKIVIEVAQFDTQKIKNPDIKGEEYQQGEQLGFWNIREYVLARDGHKCQHCKGKSKDPILNVHHLESRKTGGNSPSNLITLCETCHKEYHREKFDLKIKRGKSLRDAAVMGIMKWKLYEDLKSLYPEVKMTFGYITKYNRIKHGIQKSHTSDAFVISKNFETKRIGFSYNIKSTRRHNRQIHKMNIPKGGIKRLNQCSFEVFGFRLFDKVKFNNQYYFIYGRRRSGYFNIRDFNGKNPKEISYKKLKLCRGKRNPIHIKENE

SEQ ID NO: 5075 - protein, 424 aa, unidentified
MASMQYVYVLNKHGEPLMPCSPGKARLLLKQQKACVVKRTPFTIKLLYGSAGYKQPVALGIDAGSKHVGLSASTEKRELYREEFTPRNDVVELLSTRRQNRRSRRNRKTRYRAPRFDNRVHSKHKGWLAPSVEVKIQEHITVIKRICRILPITLVRVETAEFDTQRLKAMLKGKPLPVGTDYQLGEMYDEYNVRQYVLKRDNYTCQCCGAHPTEKKPIRLHVHHIESRHVGGNAPNNLITLCVACHKALHEGKITLDKGKKRGKPLRDAAFMGIMRNTLLARLKDELNIPVKQTYGYITKLLREKNKIPKSHVNDARCIAKAPNAKPCDTMLYTRALRHHNRQIHKAKILKGGIRKKNQAPYLVKGFRLWDKVRYNGEECFITGRRSSGYFALKKYDGTVISNSASYKKLMLLEAATNYITERS

SEQ ID NO: 5076 - protein, 392 aa, Moorena sp.
MQNYVFVIDTNKQPLNPIPPKKARRLLNKGKAAVFRMYPFTIILKTAIRQSRRCANNNPTISPSQIKIDPGSKVTGFALVQNNQVIWGMELEHRGGLIKKKLESRGAVRRGRRNRNTRYRKPIFLNRKRPEGWLPPSLEHRILTIQTWVKRLIKFCPVNEIWVERVKFDTQKMQNPEISGIQYQQGELAGYEVREYLLEKWGRECTYCGKQSVPLQIEHIHPRSLGGSDSALPTLRERVSNLCLACEKCNQRKGNKPIEDFLKKKPSLLQKIKSKAKQPLKDATAVNATRNKLVKVLQLIKVVVTGTGAQTKYNRTRLELPKQHWIDAACVGDIETLVLRTSQPLLVTCKGPGGRQKAALNKYGYPIRHNPLKPIKGACYWGHSQASKTRNR

SEQ ID NO: 5077 - protein, 512 aa, unidentified; identical to SEQ ID NO: 4031

SEQ ID NO: 5078 - protein, 412 aa, Fervidobacterium sp.
MVFVISKDGKPLMPTKRHGKVRRLLKQGLAKVVNREPFTIQLLYETTSYTQPVTVGIDIGSKTVGVSAVTDKEEIFSAEVQLRQDIKKLLLERRQHRRFRRYRKTRYRKPRFLNRRKEDGWLPPSLQWKVDAHVRIINKLAKMIPITKVVVEVAPFDIQKVQNPDIEGEDYQNGPQKGFADVREYCLWRAGYKSELSGKTGILEVHHIIPRSEGGTDTPSNLIVLTVEEHKMLHEGKIKIPKSRLEQIKVFKHAAHVSTIGWHIVNKLRQNYHVEITYGSITKERRDMYGLEKSHRDDAFVIAGGSIQRRASEWYFGKFFRRQNRLLHKANPIKGGKRPVNTIKQVRGFRRFDKVECEGKIGIVTGLRSSGYFSISELSGEKISDSVKYTKLRVIERSKTLMFERMVEAAWS

SEQ ID NO: 5079 - protein, 462 aa, unidentified
MSVLVIGRNGRALMPTNPRKARLLLKKKTASVVCRHPFTIQLLYKTGCATQEGSIGIDTGSQHIGVGITCGDKVILKDEHALRSSMEKRSLLATRAVMRRGRRYRKVRYRKPKWRHHTKRMYFEKANRRGQHWRKVKTTTQSPRPKGWLPPSLQSKCDHHFRIIDRYLKYLPDPITRNLVIEAGRFDMARMNDPTIHGEMYQRGPMYDAENLRAYIFARDNYQCACCKAKAGTTRKADGTTVKLVAHHILFRSRGATDNPKYIISVCDHCHTTKAHQPGGILYSWMENNKKVARGLRDATFMNILRKRLFARYPQAAFTYGNITAADRKKLRLPKSHANDAVAISLFGKEASTVKNICQTMHYKQIRKSKRSLHEAIPRKGRKNPNTKAVRNKKNTTQVNGFKLWDSVLADGKKLFICSFTGTSAYLIDKNGCYISQPGKTYKQWPLSKLKRLHPNGNWLMA

SEQ ID NO: 5080 - protein, 437 aa, unidentified
  REGION 1..437: note = Ga0315284_10013789
VADLKTFSNNLDASLTGAILYYSERSFFVVYIISKTGKPLMPTKRLGRVRHLLKDGLAKVVQRTPFTIQLLYESEEYTQPITLGIDSGYQNIGVSVVTEKEEVFSAEVKLRTDIIKLNSERRAYRRTRRNRKTWHRKLRFLNRKKDKGWLAPSIQHKIDSHIKLVDMVKRILPITKINVEVASFDIQKIKNPDIEGVNYQNGAQLGFWNVREYVLHRDGHICRHCKGKSGDKILNVHHLKSRQTGGDRPENLITLCSNCHQLVSKGKLKLNIKVSSGLKAETFMTMIRWRIVNLLRQTNTNVSHTYGYLTKCKRIAFGISKSHVNDAFVIACGTIQQRMDGYAMQQVRKCNRKLYKGIRSHIKNTAPRLVFGFQRFDKVLWKGIECFVFGRRTRGYFDIRRLDGTKLNTDVKYTELTLLETFRTFLTERKVGNSSPA

SEQ ID NO: 5081 - protein, 420 aa, unidentified
  REGION 1..420: note = Ga0373627_0078149
MLLIHITRKEDLTKMLVYVLNKEGKPLMPTKPSIARILLKEGKAKAIKKTPFTIKMLIETTNYKQEVIAGMDTGSKVIGTACISNGKVLYKSETFIRQDVSKKMEQRKMYRRNRRGRKTRYREARWNNRANSLRKDRLAPSLLSKLNSHLREKKFIEKLLPVSKWILELASFDIHKISNSEVKDYQKGQQKGFYNVKAFILDRDGFTCQHCKTKKSKLHVHHIIFRSNGGTDSPENLITLCEGCHDKLHKGEFEIKGKKSITKHATEIGITKSQLKKKFGDFVETFGYETKFKREQILQLSKSHCNDAIAICCSDSEIIKDLNYYFIKKNVAKGDYQQTKGIRSEKKIPTGKLFGFKKFDKVKTPEGIGFIKGKRSSGAFVIMDILGNIFNKSWNAKKYLERISARKNYIMEVCAVPMQL

SEQ ID NO: 5082 - protein, 279 aa, unidentified
VVVETAEFDLQLLKAIADGKPVPQGEDYQKGEMYGHYNVRQYVLWRDNYTCQCCGTHPSKKKEVRLHVHHLESRKVGGDAPDNQVTLCESCHEKLHKGLIAEKDFKKRKRRSTRDATFMGIMRKTLMQRLCSELPIPVVKTRGYITKATREKLLVLPKSHTNDALAIAQGKRGFNVGYLPEIAQIDKIYTIRPVRHHNRQLHKATILKGGIRKSNQTEKYVFGYRLFDKVQFNGQDCFIWGRRTTGIFTIKTINGKMIKDGISFKKLKLVEKSTSYLIA

SEQ ID NO: 5083 - protein, 440 aa, Fervidobacterium sp.
MYGVCVGQKQKASDALFRKARKTVSRGRAVVHKMHPFTIRLKDRTVQQSQLQPLRLKLDPGAKTTGVAVLREDGDVAETVFLCEIHHKTDIKQKLDARCAVRRSRRNRKTRYRKPRFLNRRRPEGWLPPSLKARVDQLINAVRKLTKLLPISAISIEDAKFDTQKLQNPETSGIEYQRGTLFGYEVREYLLEKWGRKCAYCGRSDVPLEIDHIVPRSRGGTDRVSNLTLACRECNQKKGNKTAAEFGYPHIEERARQTYKQAAFMNSIRSYLSKSLSSFGIPVEYGTGALTKANRIRLGFPKEHYFDACCVGESTSSEIRITQSYVQIWRAVGRGTRQMCNTDKFGFPRGHRQRCKKHFGFQTGDIVKAIVPRGKYTGIWIGAVAVRGSGFFDIKDTNGKRICEGIRYKYCKLIQIADGWQYSKRKANYSKSHTTEVACL

SEQ ID NO: 5084 - protein, 377 aa, unidentified
MVYVQDIDGKPMMPTTRHGKVRRLLKDNKAVVVNTCPFTIKLTYKTSDYKQEIVLGVDSGTKHVGLSATTKSKELYASEVILRSDVVDLLSTRRGLRRTRRSRLRYRKQRFNNRVKSKKDGWIAPSVRHKIDSHIRIISFVYSILPVSKLIVEVAQFDTQKIKNPEISGKEYQEGEQLGFWNVREYVLARDGHKCQHCKGKSKDPILNIHHIESRKIGGDSPSNLITLCETCHKEFHKGNIKLKVSRGKSLRDAAVMGIMKWKLYEELKSKYDNVSMTFGYITKYNRINHGIEKSHVSDAFVISRNFNSCRLGYYYKRKLVRRHNRQIHKMKILKGGIRKRNQAPFKVFGFRLFDKVMFQGEEHFIYARRLSGQFNI

SEQ ID NO: 5085 - protein, 445 aa, unidentified
VAVFVLDKTGKALMPCTEKRARLLLVRGRARVHRVVPFVIRLKDRQAVSSQFQPVKIKLDPGSRITGIAVVRETGNNGVAVLNLFELVHRGRRISEALTARRAMRRRRRGNLRYRAPRFLNRSKPQGWLAPSLQHRVDTVMSWVARLRKWVPVTSVAQELVRFDMQQMENPEISGAEYQQGTLAGYEVREYLLEKWGRKCAYCGVEHTPLNLDHIHPKAKGGSNRVSNLTLACVPCNTRKGAQPVEAFLAKQPDRLKRIQAQAKRPLKDAAAVNSTRWALFNSLKTTGLPAEVASGGQTKWNRSRLGIPKTHALDAACVGQVESVTNWQKPTLTIKATGRGSYQRTRLDAFGFPRGYLMRQKSIRGFQTGDQVKAIVPLGKKAGIHTGRVAVRKRGVFNVQTGNGLIKDISYRHCRLIQRADGYGYNLVPTSPGTTSRFHLHPRL

SEQ ID NO: 5086 - protein, 457 aa, unidentified
MDAVAVISASGKPLMPTNPVRARKLIKKGKAVIYKYRPLFTIRLTERTDGDIQTIEYCCDTGYQHIGLSIKSRKHEYVNERRDLLPNETERHNDSRKYRKARRRRKLRHRACRRDNRHDNQICKDGYAPSIRNKRDQHISLYRSYTEILPVERAVFEMGQFDTQVLKAIEKGEPLPQGKDYQHGERYGYATLREAVFARDDYTCICCGKNAFKDKRILCVHHLGFRIGDRTNRLANLATVCTKCHTPKNHQPRGKLYNLKPELKDFKGATFMTMVRWDMLDKLKVVSKDIQVDVTYGAATKEARRDLKIKKSHANDAYCMGSFHPSHRTDLKRYEKCRRNNRVLSKFYDATYIDIRDGKKKKANALGCNRTKRRESRRSEKNERIYRGEKVSKGRIVLRTKRVVIRPGDIVYVGKKKYIVASSKNLGKQLKLADGSLLTTSKVTKIIHCGGWKTVTL

SEQ ID NO: 5087 - protein, 456 aa, unidentified
MSTCVCVLSNSGERLMPTFRLGKVRRLLKDGKAKIVKYHPFTIQLLYDSKTNTQPIEICEDVGYNYIGISVKSESHEYVSAQYDTLQDEKEHHDDCRKYRRTRRNRLRYRKPRFDNRKRSEGWLAPSLEHKKQLNIRLVERYVSVIPITHATVEVGSFDTMLLQAIQKGESKPEGADYQKGPRYNLATLREAVFYRDNYTCQVCGRKIADGAILHMHHMFYWKGRHGNSLDELLTVCEKCHTPANHQKSGKLYGFGEDVKFANLSGAAFMNTVRWQIVNELYAAFGKPFVTFTYGAMTKEKRIALHLEKSHNNDAYAMGDYHPAHRCEFGHYQKRCRNNRVLEKFYDATYIDTRTGNKAKGKELFNGRISRNHKKDSEDLHKYRSKKVSKGRRSIRRQRYAIQPYDTVRLESKTYITSGCHNKGTRLLIPANGKSKSVAISKVQVVCHAGAWIQII

SEQ ID NO: 5088 - protein, 442 aa, unidentified
MSTSVFVLDKKHRPLMPCRPARARRLLRAGRARVVKRFPFVIRLVDRTVEQSEVQPVLIKLDPGSRETGAAVVRDDEKKRHHALAFFVIKHRGGAIRDALKARSAFRRRRRSQNFRCRSPRFLNRVKPKGWLPPSLRHRVETTLSFVRRMCRYLPVSGIATELVKFDSQKLQNPEVSGVKYQQGTLFEYEVREYLLEKFGRKCVYCGAEGMPLNIDHVVPRAKGGSNRVSNLVLACVSCNQKKGARSLEDFLKGKPEVLARVRRELKTPLRDAAAVNATRWVLFNELKATGLPVETGSGALTKLNRHAFGVEKEHWLDALCVGRLNGVVTRKGLNALEIRCMGRGSRQRTRLTKYGFPRGYLMRQKCVHGFATGDMVEANVPKGKKAGLWRGRVAVRVSGSFNIQTPKGVIQGVGWKHCRLISHNDGYGYAWLGHAPHSSPA

SEQ ID NO: 5089 - protein, 434 aa, unidentified
LDTNKQALNPVHPGRARRLLSLGQAAVFKRYPFTIILKSAASSPHVWPLRVKLDPGSKTTGLAIVNDASGEVVFAASLIHRGDAIRERLEKRRAARRSRRQRKSRYRQSRFDNRGTKKKGWIAPSVQSRVCNVITWVKRLVRLCPITAISQELVKFDLQQMDHPEISGVNYQQGTLSGYEVREYLLDKWGRQCAYCGAKDVPLEVEHINPRSKSGDDRVCNLTLACEPCNTKKGTQDIRVFLAHQPELLAKLLAQAKSPLKDAAAVNITRWVLHAQLKAFGLPLECGSGGRTKFNRITRGLEKTHWCDAACVGASTPEVLHIGQVRPLSIAAYGHGRRQMCLMNKSGFPRTNPKQKKFKHGFRTGDLVKAVVPPHLKHAGTHVGRMSAKASGAFTIATAGGTVTDIGKKYCRMLQRADGYGYTQKGELAFPPVP

SEQ ID NO: 5090 - protein, 512 aa, unidentified
MQKLEERNTYTPTDIPHVSGNCDLLLNRTETSVHAVSRYGKAIRVCDVNWRNGLEETLSVIGLKTSPNNSDAALIATEHAKQNTSVSAVYVLNMRGKTLMPTTPQKAKKLLKEDKAKVIRRTPFTIQLKYATGETKQPIILGVDSGFLNVGLSAITDRKEVYSAKVILRSDTVKLNSERKQYRRARRSRKTWYRPPRFLNRKKPDGWLAPSIQHKLESHIKLIDNIKRLLPITKIVIEVAAFDIQKIKNPKISGAGYQNGVQKDSWNVREYVLHRDDHTCQACKGKSKDPILEIHHIISRQIGGNAPDNLLTLCQTCHTKVSKGKLKLDIKLPTSFKPETFMSIVRWKMVNMLRAAGNIVNHTYGYITKFNRIALDLDKSHNTDAFVIAGGTIQERSPVSHLIQQVRKCNRKLFKGDRSHIKNTAARFIHGFQRFDKVLWNNIECFVFGRRKTGYFELRQLDGTKIHASAKAKELTLLETANTFLISNLRRGTLPHTLKSVVSATATPHGVL

SEQ ID NO: 5091 - protein, 471 aa, Caldicellulosiruptor sp.; identical to SEQ ID NO: 3375

SEQ ID NO: 5092 - protein, 417 aa, unidentified
MPCSPAKARLLLKEKKAIVKRRTPFTIQLTIATGEAKQPVTLGVDSGYKHIGLSATTEKVELYASEVELRQDITDLLSARLALRRSRRSRKTRYRVPRFDNRVASKRKGWLAPSVENRITAHMLRVEAVMRVLPVTAITVETAAFDTQLLKNPDITGAAYQQGEQLRFWNVREYVLFRDGHVCQHCRGKSKDPILNVHHIESRRTGGDAPNNLITLCETCHKAFHRGEIKLKVRRGKSFKAETFMGIMRRTLFERLKKAHPELNVRNTYGYLTKHKRISYGIVKSHCADAYCIADNLGAKRLEGFFFQKQTRKHNQQIHKLLILKGGLKKKNQAPYEVKGFRLFDKVICKGEEAFIFGRRTSGSFDVRRLDGTRISAGINYKKLRLLEPRTTYLTEFRKEAALPPLHECRGFRAEFL

SEQ ID NO: 5093 - protein, 420 aa, unidentified; identical to SEQ ID NO: 3685

SEQ ID NO: 5094 - protein, 427 aa, Enterococcus sp.; identical to SEQ ID NO: 2410

SEQ ID NO: 5095 - protein, 515 aa, unidentified
MTALEERLSKTEYIYVLGFDGKPQMPTRRKRHVLKLLKTGRARIAEDIPFTIRLTYRNAPVLQPVTLAEDPGRTNIGAAVLSPLGDLLFAAVIETRNKEIKKLMTDRQKSRQASRRGERKARQRLAKRYGSMVKSGMVMRKLPMYAADRFVTCKFIRNTQARFCNRKRCPDWITPTVQHLVQTHLNIIRKISRYLPVTDIAFEVNRFAFMHMENPEAMGVDFQNGPLKGYGDVKEAIRTQQHGKCLMCKKPISHFHHIVPRSRGGSDTIQNLAGLCPECHTKVHTDTAFRKDFDEKKSGQLKKYGVLSALNQAVPFICKKLLEEYGEEHVHFCRGLDTSLIRTALGFEKTKKNQMHEVDAYCIGLAALEVNEVETPAFDHTFQIRQFRRQDRSIIHHQTGRSYYQGKEKVAQNRKPGFEQKTTALSQWYEEQVRIHGEKEAEKLRSQLRVEKSCRHYNDMDRFLPGAVFLYEGKRYVLSGRITNGKYLRACGQGMKNFPAAECTFIRHNAGLVFI

SEQ ID NO: 5096 - protein, 437 aa, Thermoanaerobacterium sp.
VVYVISKEGKPLMPTKRHGKARHLLKDGKAKVIRTKPFTIQLLYDTTKYTQPVTLGIDSGYDHIGFSAVTEKEELISGEVELLKSMSERLKERRMYRRQRRNRLRYRPPRFDNRKKDEGWLPPSIQHKFDSHIRFVDFIKKILPITEVIIEVAKFDIQKIKNPDIKGSEYQEGKQKGFWNVREYVMYRDNYECQNPNCQNKSKKKKLQVHHIGYWKNDYSNRPSNLITLCSKCHVPKNHKKTGFLYKWQPKLKSFKAETFMTTVRWKLVDTLKCKYTFGYVTNAKREELKLKKTHYNDAFVIARGSNQERVMPVFFEQIRRNNRSLEKFYDAKYVDARDKKIKTGQELFNGRRTRNKNYNTENLHKYREQKISKGRRSTRKQRYFYQPKDIVIFENNKYIVKGVQNKGSYIKLHGISKPVKTELIKPYMFRKGLCAV

SEQ ID NO: 5097 - protein, 471 aa, Caldicellulosiruptor sp.; identical to SEQ ID NO: 3375

SEQ ID NO: 5098 - protein, 423 aa, unidentified
  source 1..423: note = Microcoleaceae bacterium UBA11344
MSNFIFVLDTNKKPLTPCKPSIAHKLLTAGKAAVFRRYPFTIILKKAVTATPKLITLKLDPGSQTTGIALLQDEKVIFGAELTHRGQSIKASLESRRSLRRSRRNRHTRYRPARFLNRTRHKGWLAPSLQHRVETTLTWVTKLIKLAPIGSIVQELVRFDLQQLENPEISGIEYQQGELAGYEVREYLLNKWDRKCAYCGIENVPLQIEHIHPKAKGGSDRISNLCLACEKCNLKKGTQDVEQFLVKKPDVMKCILAQAKRPLKDAAAVNSTRWALFNRLKETGLSVSSGSGGLTKFNRTRLKLPKTHWLDAACVGQVESLSVLTNKPLLIKATGHGTRQMCRTDKFGFPSRYVPRLKFVKGFQTGDIVKAIVTAGKKIGTYVGRVTVRSSGSFNISADTLVQGISSKYCKTIHQKDGYNYAF

SEQ ID NO: 5099 - protein, 462 aa, unidentified; identical to SEQ ID NO: 4759

SEQ ID NO: 5100 - protein, 419 aa, unidentified; identical to SEQ ID NO: 4877

SEQ ID NO: 5101 - protein, 420 aa, unidentified; identical to SEQ ID NO: 2812

SEQ ID NO: 5102 - protein, 470 aa, unidentified
MSVFVVGLNGCRLMPTSERKARLLLKQGKAFVEQKVPFTIRLNYKTGSTTQLGYLGIDTGSQHIGVSVVREDGTVLHKEEIGLMDSMSKRKLLEAKASLRRGRRYRKTRYRHPKWRPKTKRVYCEVPDRKGRHWQKKKITFTSKRPKGWLPPSLQSKTDHHIRWIKKLQDLLPEGYRLSIELGRFDPARMKNPEIHGDLYQKGPQYDYENVRAYVLDRDRYTCQICKKKGGKLHVHHILYRSHGATDDPQYMVTVCSDCHSAQNHLPGGILYQWMQEQKRFSRGLRDATFMNILRKRLIRAFPEAVFTYGNVTKVDREKLKLPKSHGNDATAIALVKTGITAVKDKESVICIQQVRRKKRSLHEETPRKGRKEPNRTAARNNKNTKAVTVTKRQNKKKVSMTGCLFDRVELNGKKGWISGFTGKSCYVKDADDQYLSTSPKYKQVSLSKLRILHHCGNWIIGAKKTLGKG

SEQ ID NO: 5103 - protein, 471 aa, Caldicellulosiruptor sp.; identical to SEQ ID NO: 3268

SEQ ID NO: 5104 - protein, 320 aa, unidentified
RAPRFDNRIRTKRKGWLAPSVENRINAHLSRIEAVLRLLPVTKITVETASFDLQLLKNPDISGKEYQEGEQLGFWNIREYVLCRDGHVCQHCYGRSKDPVLNVHHLESRRTGGDSPGNLITLCETCHKALHRGEITLKAKRGQSFRAEAFMGIMRWEVHNRLRALHPGIEVSNTYGYRTKHARIANGIAKSHCADAFCIAGNLGAERLCEFFFQKQTRRNNRQIHKLSILKGGIRKRNQAPFEVKGFRLFDKVACQGEEGFIFGRRSSGFFDVRKLDGTRISAGISCKKLHLLEKRRTYLTEIRKEEALPPLPEGRGLRA

SEQ ID NO: 5105 - protein, 442 aa, Anaerostipes sp.; identical to SEQ ID NO: 2903

SEQ ID NO: 5106 - protein, 470 aa, unidentified; identical to SEQ ID NO: 2825

SEQ ID NO: 5107 - protein, 471 aa, Caldicellulosiruptor sp.; identical to SEQ ID NO: 3268

SEQ ID NO: 5108 - protein, 415 aa, unidentified
MENRIEYCFVVDKNNRPLTPTKVNKGWYLVRKSRAKLKSKYPMVIQLEKEVKSDEDDESHIVCGIDDGSAHVGLAIVQKCPTKNKVVFKGTIEQRQDVKHLMDVRRGHRRYHRYHKRYRQARFNNRSSSKRTCRLAPSIKQKKDAILRVLYQLNKWVNIQEYHLEDVCIDIRALTDDYKPYRWQYQKSNRLDENLRKATILRDECRCQECGKSNCVLEVHHIRARKYGGADTIGNLITLCSGCHQKTEGRERDFEDRYFNMIKSKPKRFDYAMHVMQGETYLREKISELGSLHLTNGGETANKRIEWNMEKSHGNDAICVTDCIPDNCDVKEWIIKPMRRKSKAKTNNLLGIRHRDLVSYTYKNGETHTGYVTALYPEQLVLNFQSKTKHCKKVNARKCRLLWKFNKIYWLEQCV

SEQ ID NO: 5109 - protein, 415 aa, unidentified
MVYVQDINGKPMMPTTRHGKVRRLLKDKKAVVVNLCPFTIKLMYVTSDYKQEIVLGVDAGTKHVGLSATTKSKELYSSEVILRNDIVDLLSTRRELRRARRNRLRYRKPRFDNRIKSRRPGWVAPSVKYKVDAHIRVIDNVCSILPVSRIVIEVAQFDTQKIKNPNISGKEYQEGDQLGFWNVREYVLARDGHKCQYCKGKSKDKILNVHHIESRKTGGDSPSNLITLCETCHDDYHKGNIDLKIKRGSSLRDAAVMGIMKWRLYEELRSKHNRVSITFGYVTKYNRINHGIEKSHVSDAFVISKNFNAIRLGCYYKVRLVRRHNRQIHKQKIQKGGIKRLNQSTFEVFGFRLFDRVMFENGYYFIFGRRKIGSFDIRDIDSKRQNNITYKKLKLSRCKRFMIQMELNKKNTDMF

SEQ ID NO: 5110 - protein, 388 aa, unidentified
VPFVIRLVDRSAADCEFQPVRVKLDPGSKTTGIAVMREDSNEQAVLSLINLIHRGRQISEAMTARRQMRRRRRGNLRYRAPGFLNRTKPQGWLAPSLRHRIETTMSWMARLQRWAPVSAFSQELVRFDMQQMENPEISGAEYQQGQLQGYEVREYLLEKWGRKCAYCGAGHTPLQVEYIQPKARGGSSRISNLTLACQPCNQRKGAMPVEQFLAKKPEVLKWLLAQAKHPLKDAAAVNSTRWALANALKASGLHVELASGGRTKFNRTRMGIPKDHALDAAWVGNVEAVTGWEVPTLQAKAMGRGRHQRTRLDKFGFPRGYCMRTKFVKGFQTGDWVKAVVLKGKHAGTHVGRVAVRATGSFNVGALQGINHKACKVIQRACGYQLTY

SEQ ID NO: 5111 - protein, 515 aa, unidentified
MIPNERRHLMPYIYVIGMDGKPQMPTKRRRHVQKLLDTGKARITERVPFTIQLLYDNDPVLQPVILAEDPGRTNIGVATLDLKGNLLLSAAVETRNKEIAKLMEKRRQCRRASRNGERKARQRLAKKYGTMIQAGMRMRKLPQYAADAFITCKVIRNTQARFCNRRRLDGWLTPSARHLVQTHINLVHKVQKYLPVTDVAIEVNRFAFMQLEDPAICGVDFQTGPLKGYDDRDAAVYDLQDGKCLMCKHEITQYHHIVPRSRNGSNTIGNIAGLCDQCHDRVHKDADFAEQMKEKKEGMDKKYGALSVLNQAIPFICKQLETEFGRGHVHYCTGRETSLVRQSTGYQKTRKNQLHEVDAWCIGALALAELPENVPDFKEIHLIRQFRRQDRSLVNAQTERVYKLGGKMVAKNRKKRTGQEIYALEDWYNRQVETYGKQEADCMRSRLKVTKSRRRYNNPNRMMPGAVFLYEGVRYVMRGQHSKGAYLQAVGMENRDFPVRKCKILTRNTGLVFVS

SEQ ID NO: 5112 - protein, 450 aa, unidentified
MVYVINFEGKPLMPTTNAKARKLLKQKKATVKRVNPFIIQLLYKTDTEYIQTITLGIDSGYLNIGFSAITDSKELIVGEVKLLQGMKDRLLEKSQYRRIRRQRLRYRKPRWNNRKIRQGWLAPSLQHKLDTHIKFIDYLNTILPIRNIVLEVANFDIQKIKNPDISGVEYQQGEQMGFWNVREYVLHRDGHKCQNPNCKNKSKEQILEIHHIKYKSEGGSDAPSNLITLCNKCHTSPNHKKGKFLYDWCENGKKVRGFRDATFMSMIRWYLLEQLKEKYTNIKATYGYLTKNHRIEHGIEKSHFNDAFAIAKGVNQVRNLEIFKVEQSRLNNRSLEKFYDAKYIDNRTGEKVSASELNCGRRTRNKNLNSENLRVFRGQKISKGQRRIRKKKSLYQPNDLIKYESKVYTVKGSQNEGKYIALKEIKKVPNVKLIKPYIFKKGVNWSHGLC

SEQ ID NO: 5113 - protein, 472 aa, Acidithiobacillus sp.; identical to SEQ ID NO: 4996

SEQ ID NO: 5114 - protein, 420 aa, Petrotoga sp.
MLVYVLNKHGKPLMPCKPSKARKLLKEGKAKVVKKEPFTIQLLYGSSGYKQPITLGVDAGSKTVGLSATTENKELFAAEVELRDDIPKLISQKGQYRRDRRFRKTRYRKLRFLNRVHSKNKGWLAPSVEHKIKSHIKLIDLVHSLLPVTKIVVEVASFDIQKIKNPNIEGKQYQQREQLDFWNVRQYVLWRDNYTCQHCKGKTKDKRLNVHHIESRQIGGNAPSNLITLCETCHKDYHDGKIKLNFKRGQKFKDATFMGIMRWTLYNRLKDLYSNIHLTYGYITKNTRIQNNLPKTHRIDALCISGHPQAKQLEYYYHIKEVRRHNRQIHKANILKGGIRKLNQAPYLVHGFRLFDKIRYNGIECFIFGRRSTGYFDIRKVDGTVIHRSAKSKDLILVSKTKTLLWERRENSAFLSPLKW

SEQ ID NO: 5115 - protein, 426 aa, unidentified; identical to SEQ ID NO: 3604
  source 1..426: note = Cyanobacteria bacterium UBA11166

SEQ ID NO: 5116 - protein, 419 aa, Geobacillus sp.; identical to SEQ ID NO: 3993

SEQ ID NO: 5117 - protein, 442 aa, Lactobacillus sp.; identical to SEQ ID NO: 3226

SEQ ID NO: 5118 - protein, 481 aa, unidentified
GIDSGRENIGSGASNEDGDCLYLGELKTSNKSIKLKMTERAGFRKERRRHDRQNKQRKARKDHTEIQNGNADICRTTISCKSVQISYPAAEKSVTHKIIRGKEGKFANRHRDEGWITPSARQLVQMHMNDLKSMCKILPISHVTLERVAFDFQKLENENIKVWEYGKGKLYGYDSPEEYIHDVQNGKCLVCGKPHIDYLHHIIPRSKGGSDKVSNIAGLCYDCHYGPMGVHNCQNTQDRLPELKSEANKQYKVSLLNSVMPVLIEEMDKFCKANSIMFSICEGHDTAKVRDMYDLQKDHCIDGFAISLVDRNVKSVDVMPDRIYQKQRYKKKSKNIIQKRNCREYYDDKKLVAVNRHKGTDQKADSLEEYMNTYAETHTTDECKKHFDSLVVKPARRTYTFHKEWRICPFHIGDKVRYEKKNKIKGNTKVDTFICEGIRFVKDENKAEVKHNKTKSKKMKFCRVLESGCTPYVDYRKLALM

SEQ ID NO: 5119 - protein, 431 aa, unidentified
MSKVFVVDTNSQPLDPVHPARARILLHGGKASVFRMYPFTIILKTEVLEPEVQPLRIKLDPGSRTTGIALVNDTSGEVVFAAELDHRGQTVKASLDDRRAVRRSRRQRKTRYRKARWQNRTRAKGWFPPSLESRLANVLTWVNRLSRYAPISAISMELVRFDMQLMENPEVSGVEYQQGSLAGYEIREYVLEKWQRACAYCEAKDVPLQIEHIHPRAKGGTNRVSNLCLACEKCNTAKGTQDIAVFLKKKPEVLKKIQAQAKKPLKDAAAVNSTRWKLFERLKATGLPVECGSGGLTKYNRTTRNLPKTHWLDAANVGTSAPVVLITKGIKPLKIKATGHGRRKMCVTDAYGFPKHHKERKSSYMGYRTGDMVKAITPKGTYWGRIAIRHRPSFRLGKTDVHPKYMRRLHRADGYEYTYETKGVRDAPPHG

SEQ ID NO: 5120 - protein, 406 aa, unidentified; identical to SEQ ID NO: 3475

SEQ ID NO: 5121 - protein, 423 aa, Deinococcus sp.
MSNRVFVLNPDKSPLMPCTAKRARKMLEAGRAAVFRRYPFTIILKQESPRQSQPLTLKLDPGSKTTGMALVLEGKTGRKCIWGAELKHRGMAIKMKLQARRALRSSRRSRKLRHRPARFQNRTKPAGWLPPSLMHRVLTILSWAKRLDRWTPLDSFSMELVSFDAQKMLNPDIQREEYQKGTLFGAEIRAYLRQKWDDKCAYCGKKGEEVEHLVPRSRGGSNRISNLVWSCRSCNEQKGSLTLEEFLKRKPAVLRKIQERQSASLHDAAAVNVTKYRLLDELKRFGYPVETGSGAQTSFNRSQQGYEKAHWVDAACVGESGEQVAVRPLKPLRITCMGRGNRQMCGTDKYGFPVRHRTRQKVFFGFQTGDIVRAVVPAGKKAGTYIGRVSVRATGSFKLPHLDGLHHRFFSTLHKGDGYGYSF

SEQ ID NO: 5122 - protein, 518 aa, unidentified; identical to SEQ ID NO: 3878

SEQ ID NO: 5123 - protein, 406 aa, unidentified
LDANNKQLTPTKEQKAWFLIRKKRATLVSKYPMVIQLKKKIPDKEICKDEVRCGIDDGGLHVGVALVQKCQTRNKVVFKGVIEQRNDVKHLIDVRCGYRRYHRYHKRYRSARFNNRNSSKREERIAPSILQKRQATIRVINQLNKWINITNYWLEDVAIDIRALTDGYKPYRWQYQKSNRLDENIRKAVILRDGCKCMECGKSNCRLEVHHIKPRRLKGSSTLDNLITLCTKCHQKTESVEELYMDRYFALLNSSDNKNLNYAQHVMIGKKWLREQLSNLGMLYLTNGGDTANKRIDWDIAKSHSNDAICITDLRPDTCEIKEWAIKPMRRQSKAKTDNVLGIKHRDLVEYTFRNGKTHRGYVTALYPEQNAINFQSPTKHCKKVNAKKCKVLWKYSKIYWLDNVG

SEQ ID NO: 5124 - protein, 357 aa, Calothrix sp.; identical to SEQ ID NO: 4929

SEQ ID NO: 5125 - protein, 442 aa, Sutterella sp.; identical to SEQ ID NO: 3234

SEQ ID NO: 5126 - protein, 465 aa, Calothrix sp.
MLTNHVFVLNADKSFLNMVHPARARKLLTQEKAAVFRTYPFVIIVKKQVLNPTIKEYFLKIDPGSKWTGFAIQCGSDIVFRMELQHRGLQIRSNLLTRAGFRCGRRSRDLRYRKKRFNKRKRLGWLAPSLMHRVSTVETWIQRFCKFCPIVVIEIEQVKFDMQKLANPEISGIEYQQGTLWGYEVREYLLEKWGRECVYCGVKDVQLEIEHIAPKSKGGSDRVSNLTLACHDCNQRKGDMDISDFLSDRQKLSKILSQAKSPLRDATAVNSTRIAISNMAGKYNNVKNWTGGRTKMNRVKQNLSKTHSIDAACVGESGSNIKILTQQPLFVTSKGHGNRQSRKTNDKGFPALITETCQKTGNKIVKKNPDGTVKTIAPKTEYNHVHTGDIVRFKLEKPSMTLGNKKKGIEKKVKVPCGSYTARVKTPTPKGFEVLINKERVSVPVMNGVSFAYRADGYDYKFVHV

SEQ ID NO: 5127 - protein, 428 aa, unidentified; identical to SEQ ID NO: 3484

SEQ ID NO: 5128 - protein, 415 aa, unidentified
KDSRRARRTNGRRCRRQRRAKANGTLSKKCVKQTTAQNGSVSKRAKKIGVIKRHLPGCEKEALCIGIKNKEAKFNNRTRPEGWLTPTANQLLQTHINLVKKIQKFLPISDVVLEVNKFAFMRLDNPNIQKWQYQQGPLYQKASLEEAVSEMQEHHCLFCKNTIDHYHHVVPQHKNGSNTIDNIVGLCTKHHDLVHKETAWQEKLAKKKTGLNKKYGALSVLNQIILALTKGLSFLFPKHFFVTTGKNTYDYRTAHSVSKDHWLDAYCIACSVLPNDVCDSSINSHVPYELKQFRRHDRRALHKENMSRVYTLNGKKVATNRHKAIEQTTDSLEEFRQRQPNDVYKLKVKEHHPEYRNPKRNFPGCVFLVGKRTHVMQGSSGSHNGKADGYYDTNGNSYSSGKCKFVAKNEGIVFA

SEQ ID NO: 5129 - protein, 471 aa, Caldicellulosiruptor sp.; identical to SEQ ID NO: 3268

SEQ ID NO: 5130 - protein, 443 aa, Oligella sp.; identical to SEQ ID NO: 3586

SEQ ID NO: 5131 - protein, 406 aa, unidentified; identical to SEQ ID NO: 3475

SEQ ID NO: 5132 - protein, 408 aa, unidentified
MVYVQDIDGKPMMPTTRHGKVRRLLKAKKATVVNLCPFTIRLTYAISGYKQEIVLGVDAGTKHVGLSATTKSKELYSSEVILRSDIVELLSTRRELRRTRRNRLRYRKPRFGNRVKSKHHGWVAPSVRHKVDAHIRVIDNICSTLPISRIIVEIAQFDTQKIKNPDISGNEYQEGDQLGFWNVREYVLARDGHKCQHCKGKSKDPILNVHHIESRKTGGDSPSNLITLCETCHKEYHKGNIDLKVKRGKSLRDAAVMGIMKWKLYEELKSRYPNVSMTFGYITKYNRIKYGIEKYHISDAFVISKNFNALRLEYHYKVRLVRRHNRQIHKQKVLKGGAKKPNQSPFEVFGFRLFDRVMFEGNYYFIFGRRKSGSFNIRDINGGNQRNVTYKKLKLSIGKRFMIQKEMN

SEQ ID NO: 5133 - protein, 456 aa, Halomonas sp.
MAVFVLGKNKQPLMPCSEKRARLLLERGRAAVVNLTPFVIRLRDRCLSDCALQPTLLGIDPGSKETGLALMRLEENATDEQAPATRHVLCLFQLVHRGFQIRQALEQRAGFRRRRRSKNLRYRQPRFDNRTRKKGWLPPSLQHRVDTTIAWVNKLCRWAPVTHLSMELVRFDLQKMENPEISGVEYQQGTLLGYEVREYLLEKWGRECAYCGTGDTPLEIEHVVAKSRNGSSRVANLTIACHDCNQTKDSQWLADFFATNKGLKKRLKANGLSAEVRLERVQRQLKLPLRDATAVNATRWALFGAMKTTGLPVAVGSGGRTKYNRQRLGIPKTHALDAACVGKFDTLKGWRVPTQVIKAMGRGSYQRTRLDKYGFPRGYLMRQKQVQGFQTGDRVRAVVPSGKKAGTHTGRVAIRKTGSFNIQTEQGAVQGISWRHCTLLQRGDGYGYHPLPTIQH

SEQ ID NO: 5134 - protein, 427 aa, Ktedonobacter sp.
MVFVLDTKKKPLMPCTPKRARQLLARGRAVVHRVAPFVIRLKDRQVEDSVLQPLALKIDPGSQTTGMTLARVEDRSEGAIHHAVLLAEVQHRGHEVQVRKVTQRYARRRRRSANLRHRAARAANRRIARGWLPPSLLSRIGNVVSWTKRLRRFAPVTRVDVECVRFDTQLLQNPEITGVQYQHGELFGWEIRAYLLLKYAYQCVYCGKRDTPFELDHIRPRSRGGSSRITNLALACHDCNRQKGAQTAAEWGHPEVEVQAQTPLRDAAAVNATRHKLVQELRVFGLPVGTWTGGRTRWNRARFGIAKTHAKDALCVGDLAGVREGRLKTVAITATGRGEHCRTNWSKQGFPRGYRLRHKQVKGFKTGDRVRAVVPDKLKTRGIHVGRVQVRKSGSFDIQTHEREVEGVNATYCCLVQRGDGYAYALA

SEQ ID NO: 5135 - protein, 338 aa, unidentified; identical to SEQ ID NO: 4723

SEQ ID NO: 5136 - protein, 420 aa, unidentified
MQYVYVLNKHGEPLMPCSPCKARLLLKQKKACVVKRTPFTIKLLYGSTGYKQPITFGVDAGSKHIGISATTEKYELYREEAAPRNDVVDLLSARRAFRRNRRNRKIRYRAPRFNNRVHSKHKGWLAPSVEVKIQEHITLIKRVCRILPVTLVRVETAEFDTQRLKAMLEGKPLPVGTDYQLGEMYDEYNVRQYVLKRDKYTCQCCGAHPTKTKAVKLHVHHIETRRTGGNAPNNLITLCTACHKALHAGKVTLNGKKRGKPLKDAAFMGIMRKTLMERLLKELKIPVQETYGYITKYLREKHSIPKSHTNDARCISKNPLAIPCDTCYYTKAIRHHNRQLHKATILKGGIRKANQAPYTVKGYRLWDKVFYHGSECFITGRRTSGYFALKKLDGTVVSNSASYKKLRLLEVATNYITERR

SEQ ID NO: 5137 - protein, 419 aa, Geobacillus sp.; identical to SEQ ID NO: 4579

SEQ ID NO: 5138 - protein, 428 aa, unidentified
LKVFVLNMRGQPLMPCSPAKARHLLKAGKAAVRRRTPFTIQLRIATGETKQSVTLGVDAGAKHVGLSAATEKEEVFASEVELRQDITGLLAARLSLRRDRRHRKTRYRAPRFLNRVRSKHKGWLAPSVENRIQAHMSRIDAICGLLPVTKIVIETASFDIQKIKHPNVEGTDYQQGDQLGFWNVREYVLFRDGHVCQHCHGHSKDKILNVHHLESHQTGGDAPNNLITLCETCHKAYHAGKIKLKVKRGQSFRAEAFMGIMRWTLLDRVRKAHPGLPVENTYGYLTKNTRITLGLPKAHCVDAYCIAGNLKAVRRGVHLYQRQVRKHNRQIHKCTVLSKTLKDGTKIGYRKLNQTPHLVKNFRLFDKVRCLGKTGFIFGRRSSGYFDVRRLDGVKLSSGISYRKLTLLEKRSTYLTELRKEDGASSPV

SEQ ID NO: 5139 - protein, 413 aa, unidentified; identical to SEQ ID NO: 3476

SEQ ID NO: 5140 - protein, 427 aa, Oscillatoria sp.
MSIQPNYVFVLDANRKPLTPCKPSLARKLLKAGKCKVFRLYPFTMILKKEVIQDPQPVTLKIDPGSKVTGFALILDSNLIWVAELTHRGQVIKALLESRRSLRRGRRSRHTRYRQARFLNRTRPKGWLAPSLQHRVETTLTWVNKLSRLAPIKTIFQELVRFDLQKMETPEISGIKYQQGELQGYEVREYLLEKWERRCAYCGEENIPLQVEHIQPKSSGGTNRISNLCLACESCNTKKGTKDIKVFLAKKPDVLKKILSQAKRPLKDAAAVNSTRWALFNRLKETGKIIVTGSGGMTKFNRLRLELPKTHFFDAACVGDTPNISVLANQPLNIKATGHGSRQMCRTDKFGFPSRYVPRLKFVKGFQTGDIVKAVVTSGKKIGTYTGRVAVRSSGSFNVSAVQGLIQGINHKYCFSIHQKDGYNYGF

SEQ ID NO: 5141 - protein, 427 aa, Anabaena sp.
MSKVFVLDTNFIPLNPIHSAQARQLLRNKKAAIFRQFPFTIILKESRPDSPVSSLRLKIDPGAKFTGMALVNDSTGEVVFAAELKHRGFAIRDALTSRRQLRRSRRARKTRYRQPRFLNRTRPEGWLAPSLQSRIENIKTWVKKLRQFAPIGAISQELVRFDMQLMANPDLQGREYQQGTLAGYETREYLLEKWDRQCAYCGVKDVPFQVEHIHPRAKGGSDSITNLTLSCEKCNTKKGTKDIKDFLKKDPSRLEKILKQAKRPLADAASVNTTRLALLKVLKATGLPVETGSGGLTKFNRSQQKLEKTHWIDAACVGQLTPILNIKGVKPLLITANGHGTRQSCRTDKYGFPSRYVPRFKFVNGFQTGDIVKAVVTKGKKIGAYIGRVAVRTSGSFNISTVSGLIQGISYKYCKSIHKKDGYEYGK

SEQ ID NO: 5142 - protein, 438 aa, Scytonema sp.; identical to SEQ ID NO: 3630

SEQ ID NO: 5143 - protein, 428 aa, unidentified
LKVFVLNMRGRPLMPCSPAKARHLLKAGKAVVRRRTPFTIQLRIATGETKQSVTLGVDAGAKHVGLSAATEKEEVFASEVELRQDITGLLAARLSLRRDRRHRKTRYRAPRFLNRVRSKHKGWLAPSVENRIQAHMSRIDAVCRLLPVTKIVIETASFDIQKIKDPSVEGTDYQQGDQLGFWNVREYVLFRDGHVCQHCHGHAKDKILNVHHLESRQTGGDAPNNLITLCERCHKACHAGKIKLKVKRGQSFREEAFMGIMRWTLLDRVRKAHPGLPVENTYGYLTKNTRITQGLPKAHCVDAYCIAGNLKAVRRGVHLYQRQVRKHNRQIHKCTVLSKTLKDGTKIGYRKLNQTPHLVKNFRLFDKVRCLGQTGFIFGRRSSGYFDVRRLDGVKISSCINYRKLTLLEKRGTCLTELRKEDGASSPV

SEQ ID NO: 5144 - protein, 427 aa, unidentified
MKQGNRVFVLNMRGEPLMPCSQRKARILLKEGKAVINKYNPFTIQLIYATGETKQDCHIGVDTGAKHIGIAVTSEDKVFYKAEVELRQDVSSNLDTKRIYRRGRRKRKCRYRKPRFLNRKRTDKWLSPSLQNRIDHTFAWIDRFSALVPKPILHIEVGKFDTAKMINPDIHGVDYQHGQTYGFFDERYFVFARDNYTCQVCGKSKGKILQTHHIIYSSNGGTDRVDNLITVCTDCHTSANHKKGGILYEWQAKHKKVKQYKEPPFMNTLRRRIFDKYPNAIITYGSETTPKRKEIGLEKTHYNDAIAISSITAIKENPNEWLLIRQFRKKKRSLHESTARKGRKEPNRTQKRNRKNTPYYKGFWLNDKVSVLDQVGYITGFTSGGAYIKNKNDEYITLPGKSYKQVGISNLRLLSHNNNWQYIRNAV

SEQ ID NO: 5145 - protein, 396 aa, unidentified
MKVFVINMHGEPLMPCSPRKARILLKEKKAKVVQREPFTIQLLYGSSGYKQDITIGIDTGHDEVGVSVTTETKELFSSVFKMRNDISKKMTTRRMYRRNKRSRLRYRKPRFDNRSASTRKGRLAPSVEWKVEAHKRIISFYQNRLPKCKLILETGIFDMQKMQNPEIKNEMYQKGVQYGYANTKAYVLTRDGHKCQAGKSGCTNRLEVHHIKFKSQGGSDNPNNLITLCSKHHKELHEGKLILNIKKHKSLRSATTMNVIRKRLLEYYPNAIETFGYVTKENRFRLGLEKSHQNDAFVIAGGNTQQRAETIDYKFKQANNRAIGINRKGYAPTARKVRYPIQSGDIVKYEGNIYTSKGNKSKGKSIYLEIENKKKAVSSKKVELIYNRKNIQYVYA

SEQ ID NO: 5146 - protein, 426 aa, Anoxybacillus sp.
MVFVLDTNKRPLAPCHEAVARKLLKQGKAAIYRRFPFTIILKKSVDESEIKATYRLKIDYGSRHTGLAILRGQEVVWLGQLDHRTDIKERIDKRRAFRRARRNRKTRYRKPRFLNRKRKEGWLPSSLESRVQNIQTWVNRLKKLCPIGYISYENAKFDTQLMRNPEINGVEYQQGTLQGYEVREYLLEKFGRKCCYCGKENVPLEVEHIIPKSRGGTDRVDNLCLACHDCNQRKGSKTAEEFGYPHIQKQVKESLKDASAINSTRWKAYEVLKQTGLDVECGTGARTKMNRIRLDLPKTHYFDACCVGESTTNHLYFKTKEVLFIKAKGRGSRSRTNLDRYGFPRGYLARQKFFFVFQTGDMVKAVVPRGKYQGVWFGEVACRKTGSFDIKGKDGKRIAQGINYRYVQVIQRFDGYAYGKGVAELA

SEQ ID NO: 5147 - protein, 421 aa, unidentified
MVYVLSASGNPLMPTRRFGHVRRMLRSGRAKVVRRTPFTIQLMYESTAYTQPVSLGVDAGSKHIGISATTEKSVLYEADFELRNDIVELLSARREARRSRRSRKTRYRGPRFLNRTKPKHKGWLAPSVEQKVQTHLTAVRKACRMLPVSKITVETAAFDTQLLISQEKGLALPEGTDYQRGEQLGFWNVREYVLFRDGHTCRCCKGRSRDPVLEVHHIQSRKTGGNAPDNLVTLCRTCHRGYHDGTAKLPDSIRRGNRYNDAAFMGIMRWTVYNRLKEEYGPDTVHMTYGYITKDTRIRHGLPKEHCIDARCISGHPEAEPSGEVFFQKKVRCHNRQIHKAKTYKGGVRKRNQASYLVKSFRLFDKVEYNGEECFIFGRRSSGYFDIRMLDGTKVHAGISYKKLRFLETRHTTLTERRTAG

SEQ ID NO: 5148 - protein, 504 aa, unidentified; identical to SEQ ID NO: 3854

SEQ ID NO: 5149 - protein, 443 aa, Oligella sp.; identical to SEQ ID NO: 4469

SEQ ID NO: 5150 - protein, 440 aa, Lactobacillus sp.
MKGEKAMQNRVFVINQHGEALMPCKPKKARILLRDGKAKVLKKEPFTIQLLYGSAGYKQDISIGIDSGQRHIGLAVTSQDKVLFQGEVELRQDVKKLLDTRRIYRRGRRNRKTRYRKARFLNRTASRKDNWLPPSVASKVNHNINWINRLLLVLPKADLHIEVGKFDIQKMKNPEINGEGYQQGDLYGYQTVKQFVLARDNYTCQACKKKGGKLKIHHIIYRSLGGTNTVDNLITVCSNCHTTKNHQTGILAKWCKNKKKVNKSYKGATFMNILRRRLFLAFPQAKFQYGAWTTLQRADLDLTKSHYNDAVAISGIRKIKAKPTSIMMFKQFRKKKRSLHEATARKGRKTPNVTSKRSAKNTKYAKGFWLNDYVKIKDSNKKGYISGFMSKGTNVRLRDIFGEYVSNSDKSYTSTKNINLINHSNNWQKQVITVKQYVMG

SEQ ID NO: 5151 - protein, 405 aa, unidentified
MVYVINFEGKPLMPTTNAKARKLLKQKKATVKRVNPFIIQLLYKTDTEYIQTITLGIDSGYLNIGFSAITDSKELIVGEVKLLQGIKDRLLEKSQYRRIRRQRLRYRKPRWNNRKIKQGWLAPSLQHKLNTHLKFIDYLNSILPIRNIVIEVANFDIQKIKNPDISGVEYQQGEQMGFWNVREYVFHRDGHKCQNPNCKNKSKEQILEIHHIKYKSEGGSDAPSNLITLCNKCHTSPNHKKGKFLYDWCENGKKVRGFRDATFMSMIRWYLLEQLKEKYTNIKATYGYLTKNHRIEHGIEKSHFNDAFAIAKGVNQVRNLEVFKVEQSRLNNRSLEKFYDAKYIDNRTGEKVSASELNCGRRTRNKNLNSENLRMFRGQKISKGQRRIRKQKSLYQPNDLIKYNG

SEQ ID NO: 5152 - protein, 470 aa, unidentified; identical to SEQ ID NO: 2825

SEQ ID NO: 5153 - protein, 443 aa, Caldicellulosiruptor sp.; identical to SEQ ID NO: 2385

SEQ ID NO: 5154 - protein, 257 aa, unidentified
MPVPQGEDYQKGEMYGFYNVRQYVFFRDGYTCQCCGAHGKGIKFHTHHLESRKTGGNAPDDLVTVCDKCHKAFHAGLITDAKLKKRRRKSTRDAAFMGIMRKTLLQRLRAELPIPVVETRGYITKATRERLLKLPKSHTNDALAIAMGRHGFGIEEVTYMPQSDRIYQIKPVRHHNRQLHKALPKKGGRRQRSQGPKYVQGFRRFDKVLYRGQECFIWGLRTRGYFQLKLLNGTKVHESAKASELILLEHSSGYLIA

SEQ ID NO: 5155 - protein, 468 aa, Thioalkalivibrio sp.
MAVFVLDRRKQPLMPCSEKRARLLLARGRAVVVRLHPFTLRLKDRVVAASALQPLAIKLDPGSRVTGMALVREEAGTDGGRAHVLWLGEITHRGAAIRKALTQRRAFRCRRRSQLRYRPARFDNRTRPKGWLAPSLQHRVDTTSAWVRRLCRWAPVTDLRQELVRFDMQAMENPEISGVAYQQGTLLGYELREYLLAKWHRTCAYCGAENVPLEIDHIHPRSRNGSDRVSNLTLACVPCNQAKGAQAIETFLVQDPERLRRIQAQAKAPLQDAAAVNSTRWALFQVLTATGLPVTTGSGGQTKFNRRRLGIPKTHALDAACVGTVATVTGWQVPTLAIKATGRGSYQRTRLDRYGFARGYLLRQKKVCGFQTGDHVRALVPAGKKAGTHVGRVAVRASGSFNIQTATGVVQGIGHRRCTLLQRADGYGYATTPFMVPSPTEAVTPSRPLGGTPIPPRPERRGFSEQNG

SEQ ID NO: 5156 - protein, 493 aa, unidentified; identical to SEQ ID NO: 2644

SEQ ID NO: 5157 - protein, 413 aa, unidentified; identical to SEQ ID NO: 2636

SEQ ID NO: 5158 - protein, 476 aa, unidentified
LAASGTEGVSHPGLPGKYKHKGGQLMSVAVISKTGERLMPTSEYRARKLLKSGKAIKHSYHPFTIQLTERETGDIQPIELCMDTGYIHIGISVKSEKHEYLAEQIDTLTDERGRHDACRMYRRQRRSRKRYRQARFNNRKRDQGWIAPSLEHKKKIHIQAISRINNVMPITDITLEMGNFDTQVLKAKEEGKPLPHGADYQHGGRYGIATLREAVFSRDGYKCQCCGRTIKDGAILHIHHIKYRSQGGTNSMSNLATVCDKCHTPKNHKPGGKLYNWKPKLSSFKGATFMTAIRWQLYNEVKALFPDIDIHITYGAATKERRRKLDIDKSHVNDAFVMGQLHPKHRIKAILCKKKRRNNRCLEKFYDAKYIDSRDGKKRSGQELFNGRINRNHKKNSENLHQYRLQKVTAGKRTVRKQHYKIQPHDIVIYENRKRETAGCHCNGTRMMLLPDKKSASIKKVKIYKYAGGYFKSAFN

SEQ ID NO: 5159 - protein, 406 aa, unidentified; identical to SEQ ID NO: 2874

SEQ ID NO: 5160 - protein, 423 aa, unidentified
MRVFVFNMRGEPLMPCTQRKARLLLKAGKAKIYKYNPFTIQLKYATGETKQECHVGIDTGSKYIGLAVTSENKVLFKGEVELRQDVKSKIDTKRIYRRSRRNRKTRYRRCRFLNRKRFGKWLPPSLQNRINHTFKWIDKLCSFIPESILHIEVGKFDIAKMINPEVHSVDYSQGQTYGYQGERYFIFARDNYTCQVCGERNKPLQTHHIIYVSNGGTNRVDNQITVCKECHTSTNHKNGGIFYKWQKEHKKVKQYKAPPFMNVLRQQILNQYPQALITYGFETTIKRKNIGLEKTHYNDAIVISGVSTISENFHEWLLIRQFRKKKRSLHEGVPRKGRKEPNRIQKRNSKNTPYYRGFYLNDKVSVFGKSGYITGFTNSGAYVKGVDGEYIVLPNKSYKRVNIASLKFICHNNNWQYITKNAV

SEQ ID NO: 5161 - protein, 453 aa, unidentified
  source 1..453: note = Nitrospirae bacterium
MWTYRLQGLIYSFKGVTVMVYVISKDGIPLMPTKRYGKVRRLLKQKLARVIRRKPFTIKLLYQTTIYTQPVSLGIDSGYTYIGFSAVTDKKELISGELKLLSGISERLKERLMYRRMRRSRLRYRKPRFLNRTRPAGWLAPSIQHKLDSHIRFINFIKSILHVTDTNIEVSNFDIQKIKNLDISGTDYQNGDQKGFWNVREYVLYRDGHKCQLCGKSDLPLEVHHIGYWKHDRTDRPSNLITLCTNCHTPNNHLPSGKLYQWQPNLKSFRDATFMSTVRWKLINKLNCNLTYGYLTKSKRIDMNLPKSHYNDAFCIAGGTANHTRVEPIYFTQSRRNNRSLEKFYDAKYIDIRTGKPAKGQELFNGRRTRNKSLSSDNLHKYRGAKLSKGRRQIRRQHYFYQPNDLVRLNGKVLMVKGIQNNGQYIKLAELPKPVRTDLVKPYMFRRSIYACG

SEQ ID NO: 5162 - protein, 395 aa, unidentified
MMPTTRHGKVRRLLKDNKAVVVNTCPFTIKLTYKTSDYKQEIVLGVDSGTKHVGLSATTKSKELYASEVILRSDVVDLLSTRRGLRRTRRSRLRYRKQRFNNRVKSKKDGWIAPSVRHKIDSHIRIISFVYSILPVSKLIVEVAQFDTQKIKNPEISGKEYQEGEQLGFWNVREYVLARDGHKCQHCKGKSKDPILNIHHIESRKIGGDSPSNLITLCETCHKEFHKGNIKLKVNRGESLRDAAVMSIMKWELYDELKSLYPNVKMTFGYITKYNRINHGIEKSHVSDAFVISRNFDSERLGYYYKRKLVRRHNRQIHKMKAPKGGNKRMNQSPFKVFGFRLFDKVMFQGKERFIYARRLRGIFNIRDINGENKKDISYKKLEYVSHGLISIVAG

SEQ ID NO: 5163 - protein, 470 aa, unidentified
MSVFVVGLNGCRLMPTSEREARLLLKHGKASVYRKVPFTIKLNYKTGSTTQPGYLGIDTGSQHIGVSVVREDGTVLHKEEIGLRDSMSKRKLMESRSSLRRGRRHRKTRYRHPKWRLKAKRVYYETPDRKGRHWKKQKITFASKRPQGWLPPSLQSKTDHHIQWIKKLQDLLPDGYRLSIELGRFDPARMKNTEIHGDLYQKGPQYDYENVRAYVLDRDRYTCQVCGKKGGKLHIHHILYRSHGATDNPQYMATICSDCHSTENHQPGGILYQWMQEQKKFTRGLRDATFMNILRKRLMKAFPKATFTYGNITKADREKLKIPKSHGNDATAIAIVKTGIMTVKDNEPVIYIQQVRRKKRSLHEETPRKGRKEPNRKASRYNKNTKAVTVTKRKNKKRISITGCLFDRVELNGKKGWISGFTDKSCYIKDENDQYIRISPKYKQVSLSKLKILHHCGNWVIGARRSLGKG

SEQ ID NO: 5164 - protein, 427 aa, unidentified; identical to SEQ ID NO: 5062

SEQ ID NO: 5165 - protein, 471 aa, Caldicellulosiruptor sp.; identical to SEQ ID NO: 3375

SEQ ID NO: 5166 - protein, 414 aa, unidentified
MVYVINKQGQALMPTERFGKVRRLLKNSLAHVVCRIPFTIQLDYDTTDYTQPVSLGVDAGSKHIGISATTSEKELYAADVELRNDIVDKLSTRRELRRTRRSRLRYRKARFNNRVSSKRKGWLAPSVENKIQTHLTVVEKIHKFLPITNIVVETASFDIQKINNPSISGVEYQQGEQLDFFNVREYVLFRDNHICQHCKGKSKDKVLNVHHIESRKTGGDSPKNLITLCETCHKAYHRGEFELNVKRGKSFRDSAFMGIMRWKLYDRLKNIYPNVSMTFGYITKNTRITNNLSKEHYVDARCISGNPTAKPLGYYFYQKKVRCQNRQIHKANFLKGGRKKLNQAPFLVKGFRLFDLVEYKKELYYIFGRRSNGSFDIRKLDGTKVNKGSINCKYLRLIDKRKSILTEKRTQVNL

SEQ ID NO: 5167 - protein, 415 aa, Selenomonas sp.
MPTENHAKVRLLLKSSKAVVVKRTPFTVKLIGTNKTFVQDVTLGVDAGSKHVGLSATTTKKELFSAELRPRNDVVELMSSRREMRRSRRNRTTRYREPRFNNRVHLKNKGWLAPSVEVKIWNHIQAIKLVAKLLPLAVIRVETAEFDLQRIKAMEQGKPSPVGTDYQLGEQYDHYNTRQYVLHRDGYKCACCGAKPTSKKEVKFHVDKVKLNTHHIESRKTGGDAPDNLITLCDKCHKLHHAGKLDIPEKKRRLRSTRDAAFMGIMRKTLIQRLKMMFPTIKVCETYGYITKYWRERKNIEKTHISDAFVVAKNFDAARLDKSLLVVPKRQHNRQIYKCKINKGGVRKLNQTPKFVFGYQLFDRVLCKGQEGFVFGRRAKGSFDIRKLDGMRIAEISYKKLRRIEHRKPLLIAYN

SEQ ID NO: 5168 - protein, 477 aa, unidentified; identical to SEQ ID NO: 2707

SEQ ID NO: 5169 - protein, 471 aa, Caldicellulosiruptor sp.; identical to SEQ ID NO: 4560

SEQ ID NO: 5170 - protein, 443 aa, Caldicellulosiruptor sp.; identical to SEQ ID NO: 2385

SEQ ID NO: 5171 - protein, 413 aa, Blautia sp.; identical to SEQ ID NO: 2636

SEQ ID NO: 5172 - protein, 456 aa, unidentified
MSTCVCVLSNSGERLMPTFRLGKVRRLLKDGKAKIVKHHPFTIQLLYDSKANTQPIEICEDVGYNYIGISVKSESHEYVSAQYDTLQDEKEHHDDCRKYRRTRRNRLRYRKPRFDNRKRSEGWLAPSLEHKKQLNIRLVERYVSVIPITHATVEVGSFDTMLLQAIQKGESKPEGADYQKGPRYNLATLREAVFYRDNYTCQVCGRKIADGAILHMHHMFYWKGRHSNSLDELLTVCEKCHTPANHQKSGKLYGFGEDVKFANLSGAAFMNTVRWQIVNELYAAFGKPSVTFTYGAMTKEKRIALHLEKSHNNDAYAMGDYHPAHRCEFGHYQKRCRNNRVLEKFYDATYIDTRTGNKAKGKELFNGRISRNHKKDSEDLHKYRSKKVSKGRRSIRRQRYAIQPYDTVRLESKTYITSGCHNKGTRLLISANGKSKSVAISKVQVVCHAGAWIQII

SEQ ID NO: 5173 - protein, 406 aa, unidentified
MVYVQDINGKPMMPTTRHGKVRRLLKDKKAVVVNLCPFTIRLTYISDSYKQEIVLGVDAGTKHVGLSATTKSKELYSSEVILRNDIVDLLSTRRELRRTRRNRLRYRKPRFDNRIKSRRPGWVAPSVKYKVDAHIRVVENVCSILPISRIVIEVAQFDTQKIKNPNISGKEYQEGDQLGFWNVREYVLARDGHKCQYCKGKSKDHVLNVHHIESRKTGGNSPSNLITLCETCHKEYHKGNIDLKIKRGSSLRDAAVMGIMKWRLYEELRSKYDRVSMTFGYVTKYNRINHDIEKSHVSDAFVISKNFNAIRLGYYYKVRLVRRHNRQIHKQKIPKGGIKRLNQSPFEVFGFRLFDRVMFENNCYFIFARRKTGSFNIRDINGKNKRDITYKKLKLSRCKRFMIEKS

SEQ ID NO: 5174 - protein, 512 aa, unidentified
MSTVYVLNKDGKPLMPTTRGGHVRHLIKEQKARVVRAKPFTIQLLYETNDVVQPLYLGIDPGRTNIGVAVVKANGTAVFTAHLETRNKEIPKLMQDRKKARRARRTNGRRCRRQRRAKANGTISKKCVKQTTAQNGSVSKRAKDIGVIKRRLPGCEKDVLCIGIKNKETKFTNRTRPEGWLTPTANQLLQTHINLVKKIQKFLPISDVVLEVNKFAFMRLDNPNIQKWQYQQGPLYKKESLESAVSEIQEHHCLFCKKPIDHYHHVVPQHKNGSNTIGNIVGLCAKHHDLVHKDSAWEKKLAQKSTGLNKKYGALGVLNQIIPTLTNELSSLFPKHSFVTNGKSTYDYRAAHGVSKDHWLDAYCIACSVLPSNVCDSNINNHMPYVLKQFRRHDRRVLNNENMNRVYTLNNKAVAINRHKAKDQKTVSLEEFRKEHPDDVCKLKVKEHHPTYRNMNRNFPGSVFLVGKQIHVMQGIASSKDGKATKYNDTSATAIAAGKCKFVAKNTGILFV

SEQ ID NO: 5175 - protein, 408 aa, unidentified; identical to SEQ ID NO: 4810

SEQ ID NO: 5176 - protein, 493 aa, unidentified; identical to SEQ ID NO: 4345

SEQ ID NO: 5177 - protein, 457 aa, unidentified
MDAVAVISASGKPLMPTNPVRARKLIKKGKAVIYKYCPLFTIRLTERTDGDIQTIEYCCDTGYQHIGLSIKSRKHEYVNEQRDLLPNETERHNDSRKYRKARRRRKLRHRACRRDNRHDNQICKDGYAPSIRNKRDQHISLYRSYTEILPVERAVFEMGQFDTQVLKAIEKGEPLPQGKDYQHGERYGYATLREAVFARDDYTCICCGKNAFKDKRILCVHHLGFRIGDRTNRLANLATVCTKCHTPKNHQPKGKLYNLKPELKDFKGATFMTMVRWDMLDKLKAVSKGIQVDVTYGAATKEARRDLKIKKSHANDAYCMGSFYPSHRTDLKRYEKCRRNNRVLSKFYDATYIDIRDGKKKKANALGCNRTKRRESRRSEKNERIYRGEKISKGRIVLRTRRAVIRPGDIVYVGKKKYIVASSKNLGAQLKLADGSLLTTSKVTKIIHCGGWKRVTL

SEQ ID NO: 5178 - protein, 480 aa, unidentified
LYTKPLDNIGEGSLPPSGEINLKGMTFMVYVKSIDGKVLMPTSNAKARKLLKQKKAKVVSLRPFVVKLTYKTKTEYIQKLNLGVDSGYSNIGFSVIDAKQEYIAGEVKLLEGMKKRLLEKASYRRIRRSRLRYRKARWNNRVKSKKKGWLAPSLKHKLDTHIKFIDYLKNILPIEKITIEVANFDIQKMKDDLISGIDYQNGDMFGFWNVREFVLHRDGHKCQNPNCKHKDKKEQILKVHHIRYRSEGGSDRPENLITLCSKCHTPANHKKGKFLYDWCVNGKKVRGFKDATFMSMIRWYLVNELKSKHNNVSITYGYITKNHRIQNGIEKSHLNDAFAIAKGTNQARTKDRFLVIQDRLKNRSLEKFYDSKIIDIRTEKKVSGGDLNCGRSTRNKNLNTENLRKYRGAKISKGQRRIRKQKYFYQSNDLVKYDGKVYTVKGTQNEGKYIALKEIKKVPKVELLIPYVFKKGLNWSYRLC

SEQ ID NO: 5179 - protein, 406 aa, Geobacillus sp.
MPCSPRKARLLLKQKKAKVVRRTPFTIQLLYGSSGYKQPVSLGVDMGTRHVGISATTKKDVLFEAEAQLRTDIVELLAIRRQFRRSRRNRKTRYREARFLNRRKPEGWLPPSIQHKINSHIKLIDLVHNILPVTSVTIEVAAFDTQKLKNLNIRGVEYQQGEQMGFWNVREYVLYRDNHTCQYCKGKKKDPVLQVHHIESRKTGGDSPDNLITLCKTCHHEIHEKGLEHIFQRKRPPMRDASQMTAMRWAMFSRIREKYSHANITYGYITKFIRIANGLSKSHMVDARCISGNPLAKPSGTVYLLKFVRKNNRQLHKATILKGGKRKSNKAPRFVKGFQLFDKVVYERKECFIFGRRSSGYFDLRLLDGTKVHASASWKKLKRVEHASTLLIERRKGDSSPTFALA

SEQ ID NO: 5180 - protein, 415 aa, Selenomonas sp.; identical to SEQ ID NO: 5167

SEQ ID NO: 5181 - protein, 443 aa, Caldicellulosiruptor sp.; identical to SEQ ID NO: 2385

SEQ ID NO: 5182 - protein, 413 aa, unidentified; identical to SEQ ID NO: 2636

SEQ ID NO: 5183 - protein, 424 aa, Enterococcus sp.; identical to SEQ ID NO: 4410

SEQ ID NO: 5184 - protein, 430 aa, Citrobacter sp.
MNRVFVLGKTGQALMPCHPARARQLLQSKKARVKRLYPFTIQLTQRSDGYIQPVELKFDPGSKQTGVGLVLHGKNRLSAIYAAVLTHRGQEIKSNLDSRRMIRRARRNRKTRYRQERFLNRVRSKHKGWLAPSVHSRVDNIVEWSKRFMRLSHVDFITVESVKFDMQKMESAAVEGLEYQRGTLFDYEVKEYLLEKYHYSCVYCGIKNVPFEKEHVVPRSRGGSNRISNLVLSCRSCNEKKDNLPIEEFLKDNPALLKKIKAQLKSSLKDAAAVNITRKQIVKELSDLNVPVLTGIGAETKYNRVSQGYGKEHYIDALCAGTTGTKVYIPSKLKPLLIKKERRNNRQMCLVDKYGFPRGKAKGSKIVHGFKTGDIVKAVVLKGKKKGVYKGKVAVRSSGSFNINVKQGRIEGIGWKNCVMLHRFDGYSYT

SEQ ID NO: 5185 - protein, 470 aa, unidentified; identical to SEQ ID NO: 4959

SEQ ID NO: 5186 - protein, 458 aa, Lactobacillus sp.; identical to SEQ ID NO: 4474

SEQ ID NO: 5187 - protein, 480 aa, unidentified
LYTKPLDNIGEGSLPPSGEINLKGMTFMVYVKSIDGKALMPTSNAKARKLLKQKKAKVVSLRPFVVKLTYKTKTEYIQKLNLGVDSGYSNIGFSVIDAKQEYIAGEVKLLEGMKKRLLEKASYRRIRRSRLRYRKARWNNRVKSKKKGWLAPSLKHKLDTHIKFIDYLKNILPIEKITIEVANFDIQKMKDDLISGIDYQNGDMFGFWNVREFVLHRDGHKCQNPNCKHKDKKEQILKVHHIRYRSEGGSDRPENLITLCSKCHTPANHKKGKFLYDWCVNGKKVRGFKDATFMSMIRWYLVNELKSKHNNVSITYGYITKNHRIQNGIEKSHLNDAFAIAKGTNQARTKDRFLVIQDRLKNRSLEKFYDSKIIDIRTEKKVSGGDLNCGRSTRNKNLNTENLRKYRGVKISKGQRRIRKQKYFYQPNDLVKYDGKVYTVKGTQNEGKYIALKEIKKVPKVELLIPYVFKKGLNWSYGLC

SEQ ID NO: 5188 - protein, 426 aa, unidentified
MSNYVFVIDQNQTPLKPVHPKRARQLLSFGKAAVFRLFPFTLILKQEVSEPNVHPLILKIDPGSQVTGFALVTEGGEVVWRMQLEHRGGIIKKRLEQRRALRRQRRSRLRYRKPRFLNRKRKEGWLPPSLMHRVQTTETWVKRLLKFCPIQEIWIERVKFDTQLMENPEISGQEYQQGTLQGYTVREYLLEKWYRKCTYCKKEGIPLQVEHIYPRSKGGSNRVSNLGLACEKCNQKKGNTLIEDFLKRKPTLLESVLKQAKTPLKDTSAVNATRKKIVEVISKHSSLKTATGAQTKMNRVRLGLPKEHCLDAACVGEVERLTILSDQPLMVTATGTGGRQKCQTNKFGYPIKHRPLRPIQGFQTGDIVKVDIPKGKNQGQWRGRLCPYSDGNCEIYPKGRKRLGTKLSNVSEVMHRKDGYKYRHQP

SEQ ID NO: 5189 - protein, 237 aa, unidentified
MYDEYNVRQYVLKRDHYTCQCCGAHTTTKKTVKLHVHHLESRKVGGNAPSNLITLCTTCHDALHKGKVSLDGKERGKPLRDAAFMGIMRKTLMARLRDELSIPVQGTYGYITKMRREQNDIKKSHVNDARCISKHPLAEPCSVCYRTKAIRHHNRQTHKANFSKGSIRKRSQMPYVVEGYRLWDKVLYKGQECFVSGRRASGSFTLKKLDGTRISKGVTFKKLRLLEPATNYLIERM

SEQ ID NO: 5190 - protein, 419 aa, unidentified; identical to SEQ ID NO: 4877

SEQ ID NO: 5191 - protein, 406 aa, unidentified
LRVFVLNKRGKPLMPCSPAKARLLLKEKKAIVVRRTPCTIQLTIATGESKQPVSLGVDAGYKHVGLSASTEKAELYASEVELRKDITDLLSARRALRQSRRNRKTRYRAPRFDNRIRTKRKGWLAPSVENRINAHLSRIEAVLRLLPITKITVETASFDMQRLKNPDISGKEYQEGEQLGFWNVREYVLFRDGHVCRHCHGRSKDPVLNVHHLESRRTGSDSPDNLITLCETCHKALHRGEITLKAKRGQSFRAQAFMGIMRREVLNRLKASYPELKVHETYGYLTKHARIANGIVKSHGADAFCIAGNLGAESSANSSSRSRLAETTGRFTNFPSSKGAFESAIRHPLRPKASVFLIRLPAREKKASFSAVDHPGLLMYESSTAPAFQPASAARSCVCWRRDGPI

SEQ ID NO: 5192 - protein, 417 aa, unidentified
MSTTVFVLDKKHRPLMPCRPARARRLLRAGRARVVKRFPFVIRLVDRTVEQSEVQPVLIKLDPGSRETGAAVVRDDGKKRHHALAFFVIKHRGGAIRDALKARSAFRRRRRSQNLRCRSPRFLNRVKPKGWLPPSLRHRVETTLSFVRRMCRYLPVSGIAAELVKFDSQKLQTPEVSGIEYQQGTLFEYEVREYLLEKFGRKCVYCGAEGVPLNIDHVVPRAKGGSNRVSNLVLARVRRELKTPLRDAAAVNATRWVLFNELKATGLPVETGSGALTKFNRHAFGVEKEHWLDALCVGRLNGAVTRKGLNVLEIRCMGRGSRQRTRLTKYGFPRGYLMRQKCVHGFATGDMVEANVPKGKKAGLWRGRVAVRVSGSFNIQTPKGVIQGVGWKHCRLISHNDGYGYAWLGHAPHSSPA

SEQ ID NO: 5193 - protein, 442 aa, Lactobacillus sp.
MKHENANRVFLLNKDGKPLMPCRPRKARLLLKSGKAFVVKKYPFTIQLKYGSYGYKQKVSLGVDTGQRHIGFAVVSQDKVLHQSEVELRQDVHTNLYTRKIYRRGRRTRKTRYRQARFLNRVHGKRDGLWLPPSVKSKVSHNIAWIKRYLAVLPNPDLHIEVGKFDMAKIVNPDISGKQYQEGSLKDWKNYEYYVLARDEYTCQLCYKHGEGVKLVVHHIVYRSQGGTDRVDNLITLCTNCHTTKNHQPGGKLYKWMKAKKKVTKQLKGATFMNILRKRIMTTFPEASFQYGSQTYVDRKNLLLPKGHFMDAIAISGIKPVGQMPETVTMISQFRKKKRSLHEATARKGRKQPNTSSKRNEKNTKYACGLWLNDYVRVIGNHVKGYVKGFKSNGYYVYLTDGLGNYVLNNGKNYINGQQCRLIMHNGNWQKAEQKLSLYEFK

SEQ ID NO: 5194 - protein, 450 aa, unidentified
LTKRTNPSNRSIHIMRVFVLDKNRKPLDPCHPAKARKLLKSGRAKVLRRYPFTIIIKDLEVENCSTHDHQLKIDPGAKTTGLAIVQGDRVIWGAELTHRGFQIKEALTSRRQLRRSRRNRKTRYRKPRFLNRTRPKGWLPPSLMSRVHNILTWVKKLIKFCPVTGISQELVRFDTQKMLNPEISGIEYQQGTLYGYELREYLLEKWNITCAYCGANNTRLEIEHIKPKSKGGSDRVSNLAIACHNCNQAKGNLEIEEFLSSKPNILKRILSQAKKPLADAAAVNATRWKLHDELKLIGLPVEVGSGGLTKYNRCRQNLPKTHWLDAANVGKVETLYIEDYQPLLITAKGHGTRQICRTDKFGFPRLHCSPKKIHKGFQTGDIVRAVVTKGKKIGTYMGRIATRKTGSFDITTHLAGFQELAINIAKLSIAKMDIVINFTADKSAESTSSA

SEQ ID NO: 5195 - protein, 419 aa, unidentified
MVYVISQDGKPLMPCSNVIARLLLKQGKAKVKRREPFTIKLTCETTNYTQDLTLGVDTGSGTIGTAVSKNNGDIVYMAEIAVRNDITDKMTQRAKYRRNRRNRKTRYRKARWLNRANSIRNNRFSPTMQSKLHSHVKEIEYIKSILPVTEMVFETNQFDTHLLKNPMLASEKVKHWGYQKGTNYGFEDTKAFVLNRDKYTCQCCKGKHKDNKLEVHHIIFRSQGGSDGESNLITLCHTCHKNLHSGKINPKLRGKVKGNLKYATQMNSIRKQLLRLYPNTIETFGYITKSNRLNLRVDKKHYYDACTIATQGNAFYIKSNLYKKKCVSDGDFQKTKGVRSEQCITTGKICGFRKFDKVKYFGKKCFIKGRMSTGYAILMDIDGDKIDFSAMPKGYKTPKLFNCKRITARTTQIIQTIAI

SEQ ID NO: 5196 - protein, 448 aa, unidentified
MSVYVINQRKQLLMPTTEQKARLLIKQGKAKVIKIKPFIIQLLYATGETKQPITLGIDSGYNNIGFSAITDKKELIVGELKLLQNIKERLLERAMYRRQRRSRLRYRKPRWNNRIKSKQKGWLAPSLQHKLNSHIKFIDSLYKILPITKCIIEIANFDIQKIKNPNIKGIEYQQGDMLGFWNLREYVLYRDGHKCQNLNCKNKDKNPILEVHHIKYKSFGGTNNPNNLITLCTKCHTSDNHKKGKFLYKWCQKGKKVREFKDATFMSIIRWYLVNQLKEKYNNVSFTYGYITKNHRIEYKIEKSHYNDAFCIAKGINQIRNNKIWQLQQCRRNNRSLEKFYDAKYIDIRTGHKVSGSELNNGRRTRNKNKNSENLKVYRGQKLSKGQRRIRKSKYFYQPNDLIKYEGKIYTVKGTQNGGKYVALKEIKKVPKVELIKPYKFQKGIVWN

SEQ ID NO: 5197 - protein, 443 aa, Anoxybacillus sp.; identical to SEQ ID NO: 2800

SEQ ID NO: 5198 - protein, 429 aa, Ktedonobacter sp.; identical to SEQ ID NO: 4951

SEQ ID NO: 5199 - protein, 413 aa, unidentified
MTSYAFVLDANGKQLAPTKEQKAWFFIRKKRASLVSKYPIVIQLMKEIPEKEICQDEIRCGIDDGGLHVGIALVQKCKTKNKVVFKGTMEQRNDVKHLMEVRRGYRRYHRYHKRYRQARFDNRKSSKREGRIAPSILQKRQATIRVIHWLNKWINITNYWLEDVSVDIRALTDGYQSYRWQYQKSNRLDENIRKAAILRDGGKCMECGKSNCRLEVHHIKPKRRNGSNTLDNLITLCESCHQKTEGQEELYMDRYFSLLKSSDNKNLNYAQHVMIGKMWLRKQLSGLGVLYLTSGGDTANKRIDWNIEKSHANDAVCITDLRPDTCDVKEWTMKPMRRQSKAKTDHVLGIHHRDLVEYTFKNGETHRGYVTALYPDQKAINFQSQTKHCKKVNARKCKLLWNYSKIYWFENAS

SEQ ID NO: 5200 - protein, 406 aa, unidentified
MVYIQDIDGKPMMPTTRHGKVRRLLKDSKAVVVNTCPFTIKLMYKTSGYKQEIVLGVDAGTKHVGLSATTKSKELYSSEVILRSDIVELLSTRRESRRTRRNRLRYRKPRFNNRIKSKRTGWVAPSVRHRIDAHIRVIDNICSILPVSRVIVEVAQFDTQKIKNPDISGDEYQEGDQLGFWNVREYILARDGHKCQHCKGKSKDPILNVHHIESRKTGGDSPSNLITLCETCHKEYHKGNIDLKVKRGKSLRDAAVMGIMKWKLYDELKSRCDNVSMTFGYITKYNRIKYGIEKSHTSDAFVISRNFNAKRIERQYLKRLIRRHNRQIHKMKILKGGKKKNNQAPFEIFRFRLFDKVLYNNEILFVYGRRKSGNFNIRDFNGENPKDVSHKKLKLIRGKRHLIILK

SEQ ID NO: 5201 - protein, 471 aa, Caldicellulosiruptor sp.; identical to SEQ ID NO: 3375

SEQ ID NO: 5202 - protein, 456 aa, Halomonas sp.
MAVFVLDKKKQPLMPCSEKRARLLLARGRAVVHKRYPFTIRLKDRVGGETQPLRLGIDPGSKTTGLALMREPDSQQRHVLCLFELIHRGYQIKKALQQRAAFRRRRRSANLRYRAPRFNNRTKPKGWLAPSLQHRVDTVMAWVNRLSKSAPITGISQELVRFDTQKLENPEISGVEYQQGTLLGYEVREYLLEKWGRECAYCGTADTPLEIEHVVPRSRGGSNRVSNLTLSCHPCNAEKDSQTLTDFFATNKGLKKRLKANGLSADAQLERVQRQLKQPMRDASAVNATRWALFSALKTTDLPVAVSSGGRTKYNRQRLNIPKTHALDAACVGAFGKLHDWTVPTLTIKAMGRGSYQRTRLTKHGFPRGFLMRQKQVHGFQTGDMVRAIVPTGKKAGTHTGRVAIRKTGSFNIQAEYGAVQGISHKYCTLIQRSDGYGYYVTLFSNLTGEAGRAVA

SEQ ID NO: 5203 - protein, 451 aa, unidentified
MSVAVMSKTGMRLMPTSEYRARKLLKSKKATVYRYNPFTIQLTERETGDVQTVELCMDTGYLHIGTSVKSEKHEYLGVQIDTLTDEKQKHDACRMYRRQRRSRKRYRQSRFNNRKRSDGWIAPSLEHKKDIHIQTISRICNAMPITNITLEMGNFDTQVLKALEENRPLPQGTDYQHGERYGIATLREAVFARDKYTCQCCRKTIADGAILHVHHIIYRSRGGTNRMSNLATVCDRCHTPANHKPGGRLYNWKPKIASFKGATFMTAVRWKMYNEVKSKFSDINIHITYGAETKEQRRAFDITKSHVNDALVMGQFHPKHRSRPVCYKKKRRNNRCLEKFYDAKYIDSRDGKKRSGQELFNGRINRNHKKDSENLHQYRQQKVSAGRRTIRKQHYSIQPHDIIVFNRQQFETSGCHCNGARAILLPQKKSVAIKKLSIHKYAGGYFKSDFT

SEQ ID NO: 5204 - protein, 422 aa, unidentified
LNKRGKPLMPCSPAKARLLLKEKKAIVVRRTPFTIQLTIATGESKQPVSLGVDAGYKHVGLSASTEKAELYASEVELRKDITDLLSARRALRQSRRNRKTRYRAPRFDNRIRTKRKGWLAPSVENRINAHLSRIEAVLRLLPITKITVETASFDMQRLKNPDISGKEYQEGEQLGFWNVREYVLFRDGHVCRHCHGRSKDPVLNVHHLESRRTGSDSPDNLITLCETCHKALHRGEITLKAKRGQSFRAQAFMGNMRREVLNRLKASYPELKMHETYGYLTKHARIANGIVKSHGADAFCIAGNLGAERLGEFFFQKQTRRNNRQIHKLSILKGGIRKRNQAPFEAKGFRLFDKVACQGEEGFIFGRRSSGSFDVRKLDGTRISAGISCKKLRLLEKRRTYLTEIRKEEALPPLPEGRGLRA

SEQ ID NO: 5205 - protein, 443 aa, Oligella sp.
MAVFVLGKNKRPLMPCSEKRAWLLLERGRARVHRLVPFTIRLVDRTVADCALQPLELKIDPGSKTSGLALVRTRQSVNAQSGEITATAHGLNLFELIHRGFQISQALTARSQMRRRRRSANLRYRAPRFLNRTRPTGWLAPSLQHRVDTIQSWVQRIRRYAPVTHLAQERVHFDMQQLENPEITGVEYQQGELVGYEVREYLLEKWQRQCAYCDAIDVPLQIEHIHPKARGGPNRISNLTLACAPCNVKKAAQHITEFLATDPKRLTHIQAQAKRPLRDAAAVNATRWALLNTLNATGLPVNTGSGGLTKFNRTRLKIPKTHALDAVCVGSVDHVKQWQKPTLVIKATGRGSYQRTRLNRFGFPRGYLTRQKQIHGFQTGDRVKAVVAQGKKIGTYVGRVAVRASGSFNIQTAQSLIQGISYRYCTLIQRGDGYGYSLRTDSN

SEQ ID NO: 5206 - protein, 441 aa, Acidithiobacillus sp.
MPCHPARARELLREGRARVHRMVPFTIRLVDRLQADSVLQPLRLKLDPGSRTTGLALVREKETVDISTGEIIRTITVLMLLELKHRGHAIRDALTSRRAFRRRRRGNLRYRPARFNNRTRKDGWLAPSLQHRVDTTLAWVKRLMRWAPVMALSQELVRFDTQAMQNPEISGTEYQQGTLLGYEVREYLLEKWGRECVYCGAEHTPLEIDHIHPRSKGGSDRVSNLTVSCHDCNQAKGNRPLEQFLAKHPERIRKILAQAKAPLRDAAAVNSTRWALFQRLKATNLPVEVASGGRTKYNRHRLHISKEHCLDAVCVGHVDAIKNWQQPVLSIKATGRGSYQRTRLTKYGFPRGYLTRSKSAFGFQTGDMVKAVVTKGKKAGIYLGRVAIRASGSFNIQTGNGLAQHIHHRFCTLVQRGDGYGYNLTLLHPALNHGVAEAGEY

SEQ ID NO: 5207 - protein, 412 aa, unidentified; identical to SEQ ID NO: 3155

SEQ ID NO: 5208 - protein, 442 aa, unidentified; identical to SEQ ID NO: 3161

SEQ ID NO: 5209 - protein, 420 aa, unidentified
MQYVYVLNKHGEPLMPCSPRKARLLLKQKKACVVKRTPFTIKLLYGSTGYKQPITLGVDAGSKHIGISAATEKYELYCEEATPRNDVVDLLSARRAFRRSRRNRKTRYRAPRFNNRVHSKHEGWLAPSVEVKIREHITLIKRVCRILPVTLVRVETAEFDTQRLKAMLEGKPLPVGTDYQLGEMYDEYNVRQYVLKRDNYTCQCCGAHPTKAKAVKLHVHHIETRRTGGNAPNNLITLCTACHKALHAGKVTLDGKKRGRSLKDAAFMGVMRKTLMERLLKELKIPVQGTYGYITKYLREKHSIPKSHTNDARCISKNPLAIPCDTCYYTKAIRHHNRQLHKATILKGGIRKANQAPYTVKGYRLWDKVSYNGSECFITGRRTSGYFALKKLDGTVVSNSASYKKMRLLKVATNYITERR

SEQ ID NO: 5210 - protein, 430 aa, unidentified
MSNFVFVIDTGLQPLDPVPPGQARRLLKQGKAAVYRRYPFSIILKYAVPDPKTQPHQLKLDPGSKTTGLAIVQSDKVVWGAELTHRGQQIKNDLESRRAIRRNRRNRKTRYRKPRFLNRTRSVGWLPPSLQSRVENTLTWVNRICQYVPITGISQELVKFDTQAMQNPEVSGVQYQQGELTGYEVREYLLEKWGRKCAYCGGENTPLEIEHIHPKSKGGSNRVSNLTLACSPCNQAKGNRDIKDFLAQKPDVLNRILKQVKQPLKDASAVNSTRWCLFNRLKQIGLPIETGTGGRTKYNRTRLELPKTHWLDATCVGVVESLRVLTQQPLLITAKGWGNRQMCTPNKYGFPTKHKTRYKTFFGFQTGDMVRAILPTGKFAGTHVGRLTIRESGVFEMRTPKGKVSPVRYKYCKSIHRNDGYMYSFSTNVQ

SEQ ID NO: 5211 - protein, 427 aa, Enterococcus sp.; identical to SEQ ID NO: 2410

SEQ ID NO: 5212 - protein, 415 aa, unidentified
MVYVLNICMAPLMPCKEAKARKLLKSGKAKIIKRNPFTIQLLFECENVTQDIALGVDAGSKHIGLSATTDKKELYAAEVELRNDIVDLLSTRRENRRTRRNRKTRYRKPRFENRMRNAGWLAPSVQNKVDTHLTLVRRVHEILPVTRIIVEVAAFDIQKIKNPNIEGIEYQHGEQLGFWNVREYVLFRDGHTCQCCKGKSKDKILNVHHIESRKTGGDAPNNLITLCETCHKGYHEGKVKLPKNIRRGMSFKDATFMGIMRWAFYNQLKKLYSDASLTYGYLTKNSRIRNGLPKTHCVDARCISGHPLAEPLGYYFYQKKIRCHNRQIYKRTILKGGYRKRNQAPYIVKGFRLFDKVVYNNQECFIFGRRSSGYFDLRKLDGTKIHASASYRKLKLLETRKLMLCERRLAIPPTA

SEQ ID NO: 5213 - protein, 414 aa, unidentified; identical to SEQ ID NO: 2588

SEQ ID NO: 5214 - protein, 449 aa, unidentified
MVFVLDKSKKPLDMITNAEARILIKKKLAVIHKVYPFTIRLRDNSCVSKDRAYTVKIDPGSRYTGIAITDDKDSVVMLAEIEHRGHLIKKDMDSRRNVRNSRRQRNTRYRAARFLNRARHKGWLAPSVKSRANNVINFIKKYKKLINIDKVMIEHASFDVAQMTSDDCLIGIDYQQGPLYQQKLKSFIFNRFNNKCVYCGSKAEEIDHVIPRAKGGTNSVYNLVASCRSCNEKKSNLTLKAFGKLMNKDYSNLKPKRLPKDAAIVQLARNYMVREITKLVSDTTTYNAWLTKYNRDQLGLPKEHYYDALSVGNVANYKFPTDKVLQISAKGRGARQMCSMNKYGFPRTSTKTSKSVYGFQTGDMVKAIVPTGSKAGEYLGKVAVRSRGYFDIQTKTKRIQGIWHKHCHIVQRCDGYLYSYKECDPLSDMLTSALQTKRSKNNRVSIANS

SEQ ID NO: 5215 - protein, 413 aa, unidentified
MTSYSFVLDANGKQLAPTKEPKAWFLIRKKRAALVSKYPMVIQLKKKIQENEICKDEIRCGIDDGGLHVGIALVQKCKSKNKVVFKGTIEQRNDVKHLMEVRRNYRRYHRYHKRYRQARFDNRKSSKRKGRIAPSILQKRQATIRVINRLNKWINITNYWLEDVSIDIRVLTDGYKSYSWQYQKSNRLDENIRKATILRDGGKCMECGKSNCRLEVHHIKPRRRNGSNTLDNLITLCESCHQKTEGQEELYMDRYFSMLKSSDHKNLNYAQHVMIGKKWLRKQLSSLGVLYLTNGGDTANKRIDWNIEKSHANDAVCITDLQPDTYDMKEWTMKPMRRKSKAKTDNVLGIRHRDLVEYTFKNGETHRGYVTALYPEQKAINFQSQTKHCKKVNARKCKLLWNYSKIYWFENAS

SEQ ID NO: 5216 - protein, 448 aa, unidentified
MSTGLRAVQAEPAGIRKGDALKVFVLNMRGRPLMPCSPARARHLLKAGKAVVRRRTPFTIQLRIATGETKQSVTLGVDAGAKHVGLSAATEKEEAFASEVELRQDITGLLAARLLLRRERRQRKTRYRAPRFLNRVRSKHKGWLAPSVENRIQAHMSCIDAVCRLLPVTRIVIETASFDVQKIRNLEVEGTGYQQGDQLGFWNVREYVLFRDGHVCQHCHGYSKDKILNVHHLESRQTGGDAPNNLITLCETCHKACHAGKIKLKVKRGQSFRAEAFMGIMRWTLLDRMRKAHSGLPVENTYGYLTKNTRITLGLPKTHCVDAYCIAGNLKAVRRGVCLHQRQVRKHNRQIHKCTVLSKTLKDGTKIGYRKLNQTPHLVKSFRLFDKVRCLGQTGFIFGRRSSGYFDVRRLDGVKISSCISYRKLTLLEKRSTYLTELRKEDGASSPV

SEQ ID NO: 5217 - protein, 471 aa, Caldicellulosiruptor sp.; identical to SEQ ID NO: 3268

SEQ ID NO: 5218 - protein, 423 aa, Moorena sp.
MRVFVLNKNRQPLDPCRPARARILLSTGKAKVYRRYPFTIILTEEIIDPVTHDHKIKIDPGAKTSGFAIVQGERVVWGAELIHRGFQIRDSLTSRRQLRRSRRNRKTRYRKPRFLNRTRPKGWLAPSLMSRVQNIETWTKKLIKLCPVAGISQELVKFDTQKLENPEISGIEYQQGTLYGYELREYLLEKWNRKCAYCGTTGTQLEIEHIKPKSKGGSDRVSNLAIACHPCNQAKSNQDIELFLSNKPSILKRILSKAKRPLADAACVNSTRWKLYHDLKSTGLPVEVGSGGLTKFNRCRQNLPKTHWLDAANVGKVETLIIEVTNPLIITAKGHGTRQICRTNKYGFPTRHCSRIKFHKGFQTGDIVRAVVTKGKKIGTYVGRVATRKSGSFNISTKSGLVEGISHKYCQFIHRKDGYAYTT

SEQ ID NO: 5219 - protein, 417 aa, unidentified
MPCSPAKARLLLKEKKAIVKRRTPFTIQLTIATGEAKQPVTLGVDSGYKHIGLSATTEKAELYASQVELRQDITDLLSARLALRRSRRSRKTRYRAPRFDNRVASKHKGWLAPSVENRIAAHLSRVEAVMRVLPVTAITVETAAFDTQLLKNPDVAGAAYQQGEQLGFWNVREYVLFRDGHVCQHCRGKSKDPILNVHHIESRRTGGDAPNNLITLCETCHKAFHRGEIKLKVRRGKSFKAETFMGIMRWTLFERLKKAHPELSVRNTYGYLTKHKRISHGIAKSHCADAYCIADNLGAKRLEGFFFQKQTRKHNRQIHKLLILKGGLKKKNQAPYEVKGFRLFDKVICKSEEAFIFGRRTSGSFDVRRLDGTRISAGISYKKLRLLEPRTTYLTEFRKEAALPPLHKCRGFRAEFL

SEQ ID NO: 5220 - protein, 431 aa, unidentified
MPDKVYVISRLGHPLMPCSPAKARHLLDDKKAKVVKRMPFTIRLLYGSTKYIQPIILGVDAGSKTIGLSASTAKEEVFAAEVMPRNDVVENLSTRREFRRARRNRTTRYRKPRSDNRVRSNHERWLAPSVKVKIQEHITSIKRVCTILPISKVVIETAEFDLQLLKAIQEGKPIPEGEDYQKGEMYGSYNVCQYVLWRDNYTCICCGVRGTPKNPVRLHVHHFESRKYGGNAPDNHGTLCDDCHKKFHLGIITDVKLKTRRRQSTRDAAFMGIMRKTLMWRLRTELFIPVAETKGYITKATREKLLVLPKSHTRDALAIAQGRHGFGIKEYAYVEPANHIYTVRPVRHHNRQLHKASILKGGIRKRNQASKYVFGFRLYDKVLYQGKACFVWGRRTRGTFLLRTIDGIKVKDGVSYRNLTLLERSSNYLIA

SEQ ID NO: 5221 - protein, 513 aa, unidentified
LKKEAAGHRQGKDCRPVRYGPPYRAGMPDGRRKPERKHMVAVVTSTGKPLMPTSAYRARKLLKKGRAVIFKYRPYFTIQLVDRADGEVQEVEYKSDTGSVHVGISVCTEKKELLSEQRDLLENEPEHHNDRKKNRRTRRNRKRYRKPRFDNRKKKPQEGHEKWLPPTLLHKMEVQVRLFREFCRVVPVTSACFEMGKFDTQALKAVSKGEPVPEGEGYQKGERYGTDTLRAAVFLRDGHTCRFCGRSVKDGAILHVHHVGYWKGDRTNRPANLASACEQCHTPANHGKNGILYGKEPEFKTLKDASYMTSVRWIMLDEIKKAAPGVQVSVTYGVTTKRKRQELHLPKSHVNDAFSMASFHPKKRSDTEYWKKIPRHDRVLQKFYDAIYLDTRDGSEKKGSELSNGRISRNHKKDSENLHQYRGHKVSKGHNSIRRGASSLKPGSIVMYKGEKMTVHGTHTRYVKGKDGKTAKKVNVQFTCPASDGKKSASLEKCTPVSRVYNTGWKRYWPDKK

SEQ ID NO: 5222 - protein, 424 aa, unidentified; identical to SEQ ID NO: 3434

SEQ ID NO: 5223 - protein, 415 aa, unidentified
MVYVLDKNGQPLMPTDRHRKVRLMLQSGQAKVIKRCPFTIQLNYDSGHQTQEISLGIDAGSKHIGVSATTKIKVLYEADVELRNDIVDLLSSRRELRRGRRNRKTRYRQAKFNNRRRGNGWLAPSIRQKIGTHLTVVENICKILPISRIMVETASFDIQKIKNPDIQGAEYQQGDQLGFWNVREYVLFRDGHTCQCCKGKSKDKILNVHHIESRKTGGNAPNNLITLCETCHTGYHKDTVQLPKAIKRGMRFKDAAFMGIMRWAFYEALKQQYEPVALVHNTYGYITKHTRIEHNLPKEHYVDARCISGNPDAFPNGEYYYQKKVRCHNRQIHKLTILKGGIRKQNQATYLVKGYRLFDKVSYQGKGYFVFGRRQSGFFDIRTLSGEKVNKGSLSCKKLKFIATRTYYLTERRAV

SEQ ID NO: 5224 - protein, 427 aa, Nostoc sp.
MSKVFVIDSEKRPLNPIHPAQARQLLRNKKAAIYRQFPFTLILAKSVPETPVSPLRLKLDPGAKVTGIALVNDASGEVVFAAELKHRGFAIRDVLTSRRQLRRGRRARKTRYRQPRFLNRTRPDGWLAPSLQSRVDNIETWIKKLRQFAPIEAISQELVRFDMQLMRNPDIQGEEYQQGTLQGYETREYLLEKWGRQCAYCGVKDVPFQVEHIHPRAKGGSNSISNLTLSCEKCNTKKGTKDIKDFLKKDPSKLTKILAQAKKPLADAAAVNTTRWALLETLKSTRLPVETGSGGLTKFNRSQQMLEKRHWLDAACVGKSTPVLIIKGIKPLLITANGHGSRQSCRTDKFGFPSRHVPREKIHFGFQTGDIVKAVVTTGKKIGNYVGKVAIRSSGSFNISTKNGLIQGISHNFCLRIHAKDGYSYAI

SEQ ID NO: 5225 - protein, 352 aa, Caldicellulosiruptor owensensis
  VARIANT 352: note = X can be any naturally occurring amino acid
LLHGSSGYKQKCIAGIDAGSKNIGIAVTTEDGRVIYKAQVELRQDIKENIETRRRLRRARRSRKKRYRKPRYLNRKRPEGWLPPSVRAKIEAHYNIIKRLSKIIPIAEIKVEVGQFDTQALQNPDIQGIEYQNGEMKGFDSVKEYVKIRDKFKCHYAELRPDISCSDKLTVDHIIPRSRGGTNNPSNLVCCCEAHNIAKGNMSYKEFTGKELPAIEDFRPATFMNVLRDYLVPRLMEIAPTSYTFGLYTRRTRKEWELEKSHINDAIAITGIKPKWQDDVWYCIRQVRKKKRSLHEEIPRRGRKEPNREAKRNSKNTKEIIVNGNKWCLWDKVYIPAINKTGYISGFSNNWX

SEQ ID NO: 5226 - protein, 411 aa, unidentified
MVYVQDIDGKPMMPTTRHGKVRRLLKDNKAVVVNTCPFTIKLTYKTSDYKQEIVLGVDAGTKHVGLSATTKSKELYSGEVILRNDIVELLSTRRESRRTRRNRLRYRKPRFENRVKSKRLGWVAPSVRHRIDAHIRIINNVCSILPVSRVIVEVAQFDTQKIKNPEISGKEYQEGDQLGFWNVREYVLARDGHKCQHCKGKSKDPILNIHHIESRKTGGDSPSNLITLCETCHKEFHKWNIKLKVKRGKSLRDAAVMGIMKWRLYDKLKSLYPNVRMTFGYITKHDRINHGIEKSHVSDAFVISRNFDSERLGYYYKLKLVRRHNRQIHKMKIPKGGKKRMNQSPFKVFGFKLFDKVMFQGEERFIYARRLSGQFKIKDIDGNNERNISYKKLRYVSHGLISIKTNLFLSQ

SEQ ID NO: 5227 - protein, 422 aa, Lactobacillus sp.
MPCRPSKCRHLLHCNRAIIVSHTPFTIQLKYQSGSCLQDVSIGVDSGQRHIGLAVTSNEKVLWQGEVTLRQNVKSLLDTRHMYRHTRRQRHTRYRMVRFSNRKPRDIRLGVWLPPSVRQKCEHNIQWINRVRNVLPQADISIEVAKFDVQKLKDPTIHGIGYQQGDAFGYENVKQYVLERDEHTCQLCKRKIDTETKKTLKLHIHHIVYRSKGGTNAATNLLTVCTKCHTDRNHRAGGPLYALFEQKKTIPPLKNATFMNMLRNRLLTAFPEAHFTYGYITTVQRKKLGLAKAHYRDAVAISGIQQIIEEPKSVVMFDQFRTKKRSLHEATARRGRKQKNVTQKRVKKNTKKVKGWCLNDYVRISDGRCGFITGFSGLWMAHIRDRQGGLVKKLVSLTKLAFLHHTGTWRCTTLPTDVYDMQ

SEQ ID NO: 5228 - protein, 395 aa, unidentified
VGYNYIGISVKSESHEYVSAQYDTLQDEKEHHDDCRKYRRTRRNRLRYRKPRFDNRKRSEGWLAPSLEHKKQLNIRLIERYVSVIPITRATVEVGSFDTMLLQAIQKGESKPEGVDYQKGPRYNLATLREAVFYRDNYTCQVCGRKIADGAILHMHHMFYWKGRHGYQLDELVTACEKCHTPANHQKGGKLFGFGEDKEFANLSGAAFMNAVRWQIVNALYATYGKEFVTITYGAMTKEKRIILGIEKTHNNDAYAMGDYHPAHRCVFRHYQKRRRNNRVLEKFYDATYIDARTGNKAKGKELFNGRINRNHKKDSENFHKYRSKKVSKGRRSIRRQRYAIQPYDTVHLEGKTYITSGCHNKGTRLLIPVNGKSKSVAISKVQVVCHAGAWIQII

SEQ ID NO: 5229 - protein, 450 aa, unidentified; identical to SEQ ID NO: 4205

SEQ ID NO: 5230 - protein, 438 aa, unidentified
VAVFVLDRRGKPLMPCNEKRARLLLARGRARVHRVIPFVIRLVDRQIGVCSFQPLRLKLDPGSRVTGMALVRETDDAIAVLNLFELVHRGRQIGEALTARRACRRRRRTNLRYRTPRFLNRTRPSGWLPPSLMHRVHITIAWVNRMRRWAPVTALSSEQVRFDMQALANPEISGVMYQQGTLAGYEVREYLLGEWSRTCIYCDATDRPLQVEHLTARARNGSNRIGNLGLACGECNQDKGALDVREYVKDPKRLARILATASRPLNDAAAVNATRRALSSALRTTGLPLELASGGQTKFNRVTHNIPKTHALDAVCVGEVAALRGWQRPSLTIRATGRGSYQRTRLTRHGFPRGYLMRQKQVQGFQTGDHVRADVPHGKKAGVHTGRVAVRATGSFNIQTAMTVVQGISHRYCKLVQRGDGYAYSLQPNDSFRQDGGG

SEQ ID NO: 5231 - protein, 455 aa, Thiomicrospira sp.
VSVFVLAKNKKPLMPCSEKRARLLLSRGRAVVHLMVPFTIRLKGRTDGAIQPLHVKLDPGSKQTGMAVVLESKLDLKVLWLSVIHHRSHQISEQLTARRAMRRRRRNQLWYRPARFDNRTRPSGWLAPSLQHRVDTTLAWVKKLSKLAPVSDIGLERVKFDMQKMVNGDIAGAEYQQGTLFGFEVKEYLLAKHKHTCAYCNGVSGDNRLEVEHVQPRSKGGGNSVKNLVIACRSCNEAKGSQLLPEWKQSLGKSKLDKSRAIGIEKTIKGKWTGLRDAAAVNTTRNALLHELLLFAKDNVSVYTGTGAMTKFNRKQQGISKHHALDALCVGESLKPVKNWTKPVLEIKCTGRGSYQRTRLNKFGFPRGYLMRQKAVHGFQTGDQVKAVVPSGKKQGIYTGRVAVRASGSFNIQAANGLVQGISHKHCTLIQRGSGYGFNLTTIALTHGEREKQAA

SEQ ID NO: 5232 - protein, 431 aa, unidentified
MPNKVYVINKHGRPLMPCSPAKARHLLDAGKAKVKKRTPFTIQLVYGSSGYTQEVILGVDAGSKTIGMSASTTKEELLSAEVKPRNDVVDLLSTRREFRRVRRNRKTRYRKPRFDNRVRSKHKEWLAPSVEVKIQEHITSIKRVCRILPVSKVVIETAEFDLQLLKAIADGKSVPQGEDYQKGEMYGHYNVRQYVLWRDNYTCQCCGAHATKKKEVRLHVHHLESRKVGGDAPSNLITLCDSCHEKFHKGIITAANLKKRKRRSMRDATFMGIMRKTLIQRLRAELTIPVAETRGYITKTTREKLLVLPKSHTNDALAIALGKHGFNVGYLPEIAQIDKIYTIRPVRHHNRQLHKVTILKGGIRKSNQAEKYVFGYRLFDKVQFNGQDCFIWGRRTTGIFTIKTINGKMIKDGISFKKLKLVEKSTSYLIA

SEQ ID NO: 5233 - protein, 458 aa, unidentified; identical to SEQ ID NO: 4474

SEQ ID NO: 5234 - protein, 551 aa, unidentified; identical to SEQ ID NO: 3229

SEQ ID NO: 5235 - protein, 414 aa, unidentified
MVYVINKQGQALMPTERFGKVRRLLKNSLAHVVCRIPFTIQLDYDTTDYTQPVSLGVDAGSKHIGISVTTSEKELYAADVELRNDIVDKLSTRRELRRTRRSRLRYRKARFNNRVSSKRKGWLAPSVENKIQTHLTVVEKIHKFLPITNIVVETAAFDIQKIKNPSISGSGYQQGEQLDFFNVREYVLFRDNHICQHCKGKSKDKVLNVHHIESRKTGGDSPNNLITLCETCHKAYHRGEFKLNVKRGRSFRDAAFMGIMRWSFYDRLKNIYPNVSMTFGYITKNTRITNNLPKEHYVDARCISGNPTAKPLGYYFYQKKVRCQNRQIHKANFLKGGRKKLNQAPFLVKGFRLFDLVEYKKELYYIFGRRSNGSFDIRRLDGTKVNKGSINCKYLRLIDKRRSILTEKRMQVNL

SEQ ID NO: 5236 - protein, 414 aa, unidentified
MVYVINKQGQALMPTERFGKVRRLLKNSLAHVVCRIPFTIQLDYDTTDYTQPVSLGVDAGSKHIGISATTSEKELYAADVELRNDIVDKLSTRRGLRRTRRSRLRYRKARFNNRVSSKRKGWLAPSVENKIQTHLTVVEKIHKFLPITNIVVETASFDIQKINNPSISGVEYQQGEQLDFFNVREYVLFRDNHTCQHCKGKSKDKVLNVHHIESRKTGGDSPNNLITLCETCHKAYHRGEFKLNIKRGKSFRDSAFMGIMRWSFYDRLKNIYPNVSMTFGYITKNTRITNDLPKDHYVDARCISGNPTAKPLGYYFYQKKVRCQNRQIHKANFLKGGRKKLNQAPFLVKGFRLFDLVEYQKELYYIFSRRNSGFFDIRKLDGTKVNKGSINCKYLRLVDTRKSILTEKRMQVNL

SEQ ID NO: 5237 - protein, 413 aa, unidentified; identical to SEQ ID NO: 2636

SEQ ID NO: 5238 - protein, 512 aa, unidentified
MSTVYVLNKDGKPLMPTTRGGHVRYLLKEKKARVVTSKPFTIQLLYETDDVVQPLYLGIDPGRTNIGVAVVKTDGTAVFTAHLETRNKEIPKLMQGRKKARRARRTNGRRCRRQRRAKANGTISKKCVKQTTAQNGSVSKRAKKIGVIKRHLPGCEKKVLCIGIKNKEAKFSNRTRPEGWLTPTANQLLQTHINLIKKIRKFLPVNDVVLEINKFAFMQLDNPNIQKWQYQQGPLYQKASLEEAVSEMQEHHCLFCKKSIVHYHHVVPQSENGSDTIGNIVGLCTKHHDLVHKDTAWQKKLAKKKTGLNKKYGALSILNQIIPALTKELSSLFPKHFFATNGKSTHDYRAAHDVSKDHWLDAYCIACSILPNDTCDKNINGRVPYKLKQFRRHDRRALHKENMSRVYTLDGKKVATNRHKAIKQTTDSLEEFRQRQPNDVCKLKVKEHHPEYRNPERNFPGCVFLVGKHTHVMQGTSGSHNGKADGYYDTNGNSYPSGKCKFVAKNKGIVFA

SEQ ID NO: 5239 - protein, 432 aa, Thiorhodovibrio sp.
MNTVFVLSNTKKPLMPTRPARARRLLRDKKAAVYRMYPFTIILKERADGETQPIEAKFDPGSKTTGIALVAEFPQQGRVVLWAANLNHRGDSIRKRLADRRAIRRNRRNRKTRYRQMRVLNRKRPQGWLPPSLQSRVDNVENWLKKIIDRAPIAAVAVETARFDTQALQNPEISGVEYQQGELAGYELREYLLEKWNRTCAYCGAQHVPLEIEHIVSRSKGGSDRVSNLTLACHDCNQKKGNQPLEVFLAHDPKRLARIKAHAKAPLKDAAAVNVIRYAIGNALKKFGLPVSFWSGGRTKKNRVLQGYTKDHWIDAACVGETGAEVHIPQEMRPLIITATGRGHRQFTRVNKFGFPCAKAKTGKTVNEIRTGDVVKLIQPKGKYAGEYCARVTAIKNSNNYISITVNHKQTWFAAKLAHIMQRGDGYAYAYA

SEQ ID NO: 5240 - protein, 439 aa, Aeromonas sp.
MSVFVLDKHGKPLMPCSEKRARLLLSRHRARVHRLVPFVIRLTDIRLQDVSLQPLQVKLDPGSKTTGIAVVRVAEPVGIGRSVSVLFLMELIHRGRQISESLTARRAMRRRRRGQLRYRAPRFNNRTKPKGWLAPSLRHRVETTINWVARLRRWAPVTGLVSELVRFDMQVMENPDISGVEYQQGTLFGYEVREYLLEKWGRSCAYCSKKEVPLQIEHVVPKARGGSNRISNLTLACGPCNTKKGARSIEEFVKDSATLKRILAKLKAPLRDAAAVNSTRWALLNELKKTGLPVESASGGRTKFNRSQLGIPKTHALDAVCVGKIDAVIDWRRPTLTVTCMGRGTYQRAKLNKFGFPRGYSIREKRIKGFQTGDIVLAMVPASSKKAGQYIGRVAIRKTGSFNIQAGGNVIEGISHKYCQLIQRGDGYRYHQSQTKIAN

SEQ ID NO: 5241 - protein, 430 aa, unidentified; identical to SEQ ID NO: 4817

SEQ ID NO: 5242 - protein, 406 aa, unidentified; identical to SEQ ID NO: 2752

SEQ ID NO: 5243 - protein, 476 aa, unidentified
LEIVDTEGVSIPACRENIRIKGGQLMPVAVISKTGERLMPTSEYRARKLLKSGKAIKYSYRPFTIQLTERETGDIQPIELCMDTGYIHIGISVKSEKHEYLADQIDTLTDEKARHDACRMYRRQRRSRKRYRQPRFNNRKRNDRWIAPSLEHKKSIHIQAILRICKVMPVTDITLEMGNFDTQVLKAREEGKSLPQGVDYQHGERYGITTLREAVFSRDGYTCQCCGRTIKDGAILHVHHIVYRSQGGTNRMSNLITVCDKCHTPANHKQGGKLYNWKPKIASFKGATYMTTIRWKLYNEVKALFPDIDIHVTYGAETKERRRALDIDKSHVNDAFVMGQFHPKHRSKPICYKKKRRNNRCLEKFYDAKYIDSRDGKKRSGQELFNGRISRNHKKDSENLHQYRLQKVTPGRRAIRRQHYPIQPHDIIVYNGNKIEVSGCQHKGTRVVFSKTKKSVQISKIKLFKYAGGYSKSVFN

SEQ ID NO: 5244 - protein, 443 aa, Caldicellulosiruptor sp.; identical to SEQ ID NO: 2385

SEQ ID NO: 5245 - protein, 414 aa, unidentified
MPCSPAKARLLLKEKKAIVKRRTPFTIQLTIATGESKQPVTLGVDAGYKHVGLSASTEKAELYASEVELRQDVSDLLSARRALRQSRRNRKTRYRAPRFDNRIRTKRKGWLAPSVENRINAHLSRIEAVLRLLPVTKITVETASFDLQLLKNPDISGKEYQEGEQLGFWNVREYVLFRDRHVCQHCYGRSKDPVLNVHHLESRRTGGDSPDNLITLCETCHKALHRGDITLKAKRGKSFRAEAFMGIMRWEVHNRLRALHPGIEVSNTYGYRTKHARIANGIAKSHCADAFCIAGNLGAERLCEFFFQKQTRRNHRQIHKLSILKGGIRKRNQAPFEVKGFRLFDKVACQGEESFIFGRRSSGFFDVRKLDGTRISAGISCKKLHLLEKRRTYLTEIRKEEALPPLPEGRGLRA

SEQ ID NO: 5246 - protein, 465 aa, unidentified
MSTCVCVLSNSGERLMPTFRLGKVRHLLKDGKAKIVKHHPFTIQLLYDGKTNTQPIEICEDVGYNYIGISVKSQSHEYVSAQYDTLQDEKACHDSCRKLRRSRRNRLRYRKPRFDNRKRGEGWLAPSLEHKKQLNIRLIERYVSVIPITHATVEVGSFDTMLVKAIEEGKATPESADYQKGPRYNLATLREAVFYRDNYICKVCGRKATEGAILHMHHMFYWKGRHGNSLSELITVCEKCHTPANHQKSGKLYGFGENVKFADLSGAAFMNTVRWQIVNELYAAFGKDFVTVTYGAMTKEKRIALHLEKSHNNDAYAMGSFHPVNRCAFEHYEKVKRNNRILEKFYDSQYIDTRTGELTNGKSLFNGRISRSHKKDSENLHKYRGKRICKGHRALRRKKLALNPGDLVSLNGEILVVHGTHTKKNGSVNVEFKTPSRGGKKSASLKKLKIVKTSNLMHSAWTKVS

SEQ ID NO: 5247 - protein, 544 aa, Blautia sp.; identical to SEQ ID NO: 4004

SEQ ID NO: 5248 - protein, 471 aa, Caldicellulosiruptor sp.; identical to SEQ ID NO: 4560

SEQ ID NO: 5249 - protein, 437 aa, Ktedonobacter sp.; identical to SEQ ID NO: 5013

SEQ ID NO: 5250 - protein, 570 aa, Streptomyces sp.
MRHVRSLNSNVTHTTPLSPKSLRAPASGATCPRRPHVRVISPDPCSLGNPRCVASGASREGRSLAPSYRVTSPGHHDLRISRGASMTTFFTGEQTHQAVLPQQPALESAGAYTPGSRDETAHGLPDPKPGTGVGHGRGETGAVRTRTRRRHARRLDPGSKATGIAVTDERDEVGAKGRTALVRRGLVSIELRHRGRQIHSGMVRRAGHRRRRRSANLRYRAPRRDNRTRPDGWLPPSLRHRIDSTMSLVARLCRYAPVLEIHVEQVAFDTALIAAAVSSREQDFSERTHAGSEIREVLLAKWERSCAYCGATGVLLNIEHVRPRSRGGSDRVANLVIACVPCNQAKGTARIDEFLADRPARLERVIARLRRPLHDVAAMNTTRLLLVKTLATHGVAVHTWSGGRTSWNRLAMGLPKSHTLDALATGVIDLERGDAVVRIPAQILVVRSTGRGSYARTTPDRYGFPRLQRPRRKIHHGFSTGDLAAAVVPKGKWAGRWVGRVSVRAGGQHRITTLTSRFDVSHRNLRLLQRADGYTYGFADEIRLSEEHGPAYSGRTLKGGDPGNVRTPDA

SEQ ID NO: 5251 - protein, 406 aa, unidentified
MVYVQDIDGKPMMPTTRHGKVRRLLKDNKAVVVNTCPFTIKLTYKTSDYKQEIVLGVDSGTKHVGLSATTKSKELYASEVILRSDVVDLLSTRRGLRRTRRSRLRYRKQRFNNRVKSKKDGWIAPSVRHKIDSHIRIISFVYSILPVSKLIVEVAQFDTQKIKNPEISGKEYQEGEQLGFWNVREYVLARDGHKCQHCKGKSKDPILNIHHIESRKIGGDSPSNLITLCETCHKEFHKGNIKLKVSRGKSLRDAAVMGIMKWKLYEELKSRYDNVSMTFGYITKYNRINHGIEKSHVSDAFVISRNFDSERLGYYYKRKLVRRHNRQIHKMKAPKGGNKRMNQSPFKVFGFRLFDKVMFQGKERFIYARRLRGIFNIRDINGENKKDISYKKLEYVSHGLISIVAG

SEQ ID NO: 5252 - protein, 442 aa, unidentified; identical to SEQ ID NO: 2903

SEQ ID NO: 5253 - protein, 443 aa, Caldicellulosiruptor sp.; identical to SEQ ID NO: 2385

SEQ ID NO: 5254 - protein, 446 aa, unidentified
  source 1..446: note = Cyanobacteria bacterium UBA8543
MSKVFLIDQGKQPLNPIHPAQARQLLRDGKAAVFRRYPFTLILKEEVSLLTLASCAGITSRTQRRSNPNINSLRIKIDPGAKTTGLALVDDNTGEVVWVAELQHRGFQIRDALTSRRQLRRSRRNRKTRYRKPRFLNRTRPKGWLPPSLSSRVANILTWVKRLSSSSQIIAISTELVRFDTQKMEDVEISGVGYQQGTLAGYEVREFLLEKWDRTCAYCGAKDTKLEIEHIQPRSKSGSNRASNLCLACVPCNQKKGNQDIKDFLKDKPDLLKRILSHAKKPLADTAAVNATRWNLYENLKKTGLPVEVGTGGRTKYNRTVRGLEKTHYWDAACVGVSTPEQLITSGVKPLRIAAKGHGTRQQCRTDKWGFPVRYCSRTKFHKGFQTGDIVAAVVTSGKKIGIYVGRVATRATGSFNISTPDGLIQGISHKYCTHIHKKDGYSYVQ

SEQ ID NO: 5255 - protein, 433 aa, Lactobacillus sp.
MPNRVFVINKHGQALMPCKPRKARVLLRTGKAKVIKKEPFTIQLLYGSTGYKQAVSLGVDSGQRHIGLAVTSQAKVLFQTEVELRQDVKSLLDTRRTYRRSRRNRKTRYRKARFLNRIASKKANWLPPSVASKVNHNINWVKRLLAVLPKPELHIEVGKFDMQKMKNPNIKGEGYQQGDLYGYQTVKQFVLARDNYTCQACKKKGGKLKIHHLIYRSLGGTNTVDNLITVCSECHTTKNHQTGILAKWCQDKKQVHKSYKGATFMNILRRRLFTAFPQAKFQYGAWTTLQRADLGLAKSHYNDAVAISGIKQIKVKPTRIVMFKQFRKKKRSLHEATARKGRKTTNVMSKRNAKNTKYAKGFWLNDYVKIKDSRSKGYISGFSKATCYIKDIFENYLTVSPKYKQVALSKLVRITHNNNWSRQEINEKNYQMY

SEQ ID NO: 5256 - protein, 386 aa, Ktedonobacter sp.
MSKVFVVDMMHRALDPVHPGYARKLLTEGKAAVFRRYPFTIILKREVEQPVTHPLRIKLDPGSKTTGLAIVNDASGEVVWAAELTHRGHAIKAALNTRRAVRRSRRLRHTRYRKARFQNRRRKEGWLPPSLESRIANIETWVRRLMRLCPVQAISQEVVKFDTQMMDNPEIQGVEYQQGTLVGYEVREYLLEKWNRQCVYCSANDVPLHVEHIHPRAKGGTNRVSNLTLACEPCNTKKGTQDIQAFLHDKPDVLNTILAQAKASLKDASAVNTTRWALFRRLQALDVPVECGTGGRTKFNRVIRGLDKAHWIDAACVGASMPDVLCIEGVKPLLITATGHGNRQMCGTDKYGFPMRHRTRQKRLYGFQTGDSVKAVVPSGKSRAYM

SEQ ID NO: 5257 - protein, 443 aa, Caldicellulosiruptor sp.; identical to SEQ ID NO: 2385

SEQ ID NO: 5258 - protein, 471 aa, Caldicellulosiruptor sp.; identical to SEQ ID NO: 3375

SEQ ID NO: 5259 - protein, 442 aa, Deinococcus sp.
MTERPIVHLDSFKPRDRQLPNRALVVSATHKPLMPCHPARARELLRKGRAAVLRHQPFTIVLKDRACGVTQPLSLKLDPGSKTTGICAVAEMKRGPKVVWAALLHHRGRAIQQSLDARRVLRRARRSRKLWYRQPRFDNRTRPMGWLPPSLTHRVLTTLTWVGRLSRWAAATHLATELVSFDTQRLQNPFIRREGYQRGTLYGYTVRRYLLQKWQGRCAYCDRNDRPLEVEHLTPRSQGGSDRISNLVLSCTPCNLKKGTQSLQQFLAENLILLKKIRAQVQDPLHDSAAVNATKAKLLRELQKTGLLVEIGDGAQTSFNRDIQGYPKAHWIDAACVGPSGARVIVPNLRPLAIICIGHGNRQMCGTNKFGFPTRHRTRQKTHFGFQTGDLVRAVVTTGKKAGSYVGRVSVRATGKFRLPMVDGLHYRFFVLIQKGDGYAYS

SEQ ID NO: 5260 - protein, 431 aa, Klebsiella sp.; identical to SEQ ID NO: 3801

SEQ ID NO: 5261 - protein, 443 aa, Caldicellulosiruptor sp.; identical to SEQ ID NO: 2385

SEQ ID NO: 5262 - protein, 442 aa, Lactobacillus sp.
MKHENANRVFLLNKDGKPLMPCRPRKARQLLKSGKAFVVKKYPFTIQLKYGSYGYKQKVSLGVDTGQRHIGFAVVSQDKVLHQSEVELRQDVHTNLYTRKIYRRGRRNRKTRYRQARFLNRVHGKRDGLWLPPSVKSKVSHNIAWIKRYLAVLPNPDLHIEVGKFDMAKMVNPDISGKQYQEGSLKDWKNYEYYVLARDEYTCQLCHKHGEGVKLVVHHIVYRSQGGTDRVDNLITLCTNCHTTKNHQPGGKLYKWMKAKKKVTKQLKGATFMNILRKRIMTTFPEASFQYGSQTYVDRKNLLLPKGHFMDTIAISGIKSVGQMPETVTMISQFRKKKRSLHEATARKGRKQPNTSSKRNEKNTKYARGLWLNDYVRVIGNNAKGYVKGFKSNGYSVYLTDGLGNYVLNDGRNYVNSKQCQLITHNSSWQKAEQMLLLYEFK

SEQ ID NO: 5263 - protein, 413 aa, unidentified
MTSYAFVLDANGKQLAPTKEQKAWFFIRKKRASLVSKYPIVIQLMKEIPEKEICQDEIRCGIDDGGLHVGIALVQKCKTKNKVVFKGTMEQRNDVKHLMEVRRGYRRYHRYHKRYRQARFDNRKSSKREGRIAPSILQKRQATIRVIHWLNKWINITNYWLEDVSIDIRVLTDGYKSYSWQYQKSNRLDENIRKATILRDGGKCMECGKSNCRLEVHHIKPKRRNGSNTLDNLITLCESCHQKTEGQEELYMDRYFSLLKSSDNKNLNYAQHVMIGKMWLRKQLSGLGVLYLTSGGDTANKRIDWNIEKSHTNDAVCITDLQPDTCDIKEWAIKPMRRQSKAKTDHVLGIHHRDLVEYTFKNGETHRGYVTALYPDQKAINFQSQTKHCKKVNARKCKLLWKYSKIYWFENAS

SEQ ID NO: 5264 - protein, 431 aa, unidentified; identical to SEQ ID NO: 5119

SEQ ID NO: 5265 - protein, 431 aa, unidentified
MSYVFVIDQEKRPLDPVHPGRARKLLSSGKAAVYRRFPFVLILKHPVSEAHPQPLRLKIDPGSKTTGLAVLNDTSGQVLWAAELVHRGEEVHQALQKRAGVRRGRRSRHTRYRAARFSNRRRKRGWLAPSLCSRMQNVQTWTRRLMRWCPLGAISYEAVRFDTQAIQNPEIKGVAYQHGTLAGLEVKEYLLLKWRHKCVYCQKGDIPLEVEHIVPKRRGGSDRITNLTLACEACNQQKGSQTAQAFGFPHLQAQALQPLKDAAAVNSTRWALYERLKATGLPIEVSTGGQTKWNRKQRGIPKSHWLDAVCVGPSTPERVQWQHVIPLLITARGRQCRQLCNVDGWGFPRSRPKGPSKVFGFQTGDMVQAVVTRGKRMGTYVGRVAIKTDGYFKITGTHGMVEGIHARYCSPLHRVDGYEYQKGSAALPPQM

SEQ ID NO: 5266 - protein, 433 aa, unidentified
  source 1..433: note = Candidatus Falkowbacteria bacterium
MVRVIAKDGTVLQPTNRHGKVRRLLRDRKARVVSKEPFTIQLLYKTRRKKTQPIKVYFDTGSKYQGFGLVSNNKVISKGTIELRDGISEHISQRRRYRRSRRHRKKRYRPPRFDNRKRKEGWLPPSIESKYQHIIHWIDKLTSYLPDYQLIVEIAKFDIQAMDNPGIEGEGYQRGDLYGYENTKQYMIHREKGRCQLCGNPKGDDKWNLHHRSAKKGGGSDRAKNLALLHSICHRKFHNQDLNDSDLTSLEAKSQRFKDATFMNIIKNRLQKELKVYYDKQVHFTYGFITNINRRMLDLEKTHYNDALAIHGLPVINKVKPLYIKQVRQKKRSLHEAVPRAGRGDKVNREQVRRAKNSKSITKNGKLFSLWDKVYVPKLKTTGFISGFSGKWVYLQDIDGKYLKLPGKSYKQMNPDQLELVGRNNNWICKIAG

SEQ ID NO: 5267 - protein, 424 aa, unidentified
MVFVLNKSKKPLNMISNAEARILLRKKLAVIHKIYPFTIRLKDNSYVSKDKTYTVKLDPGSRTTGVAIIDNKDSVVMLAEIEHRGHIIKKNMDSRRMVRRHRRNRKTRYRPARFLNRTKPKGWIAPSVKSRADNVINFIKKYKKFLNINKVMIENVSFDTAQMTSDDNLVGTDYQQGPLYQNKLRSFIFNRSNNQCIYCGAKAEEIDHIIPRSNGGTNSVYNLVASCKSCNEKKSNLTLKEFGKLMGKDFSYLTPKKLPKDASIVQIARNYMVKEITKLVPDTKSYNAWLTKYNRDELGLPKQHYYDALSVGNIQDYKFLADKVLQISAKGRGKRQMCRADKYGFPRTSAKAYKSVEGFQTGDMVRAIVPNGSKAGEYLGRIIVRSNKCFDIQTKAKIIQGIWYKHFHIVQRGDGYSYNYKERS

SEQ ID NO: 5268 - protein, 428 aa, unidentified
LKVFVLNMRGQPLMPCSPAKARHLLKAGKAAVRRRTPFTIQLRIATGETKQSVTLGVDAGAKHVGLSAATEKEEVFASEVELRQDITGLLAARLSLRRDRRHRKTRYRAPRFLNRVRSKHKGWLAPSVENRIQAHMSRIDAVCRLLPVTKIVIETASFDIQKIKDPSVEGTDYQQGDQLGFWNVREYVLFRDGHVCQHCHGHAKDKILNVHHLESRQTGGDAPNNLITLCETCHKACHAGKIKLKVKRGQSFRAEAFMGIMRWTLLDRVRKAHPGLPVENTYGYLTKHTRITHGLPKTHCVDAYCIAGNLKAVRRGVYLHQRQMRKHNRQIHKFTVLSKRLEDGTKIGYRKLNQSPYLVHGFRLFDKVRCLGQIGFIFGRRSSGYFDVRRLDGVKLSPSISWRKLTLLEKRSTYLTELRKQDGTSSPV

SEQ ID NO: 5269 - protein, 557 aa, unidentified
MIYNLVSIRERSFMKQKKQKVMVYILNKKGKPLMPTTRCGHVRKLLDSKKAVVVSSNPFTIRLKYDTPNGVQDVFAGIDSGRENIGSGASNEDGDCLYLGELKTSNKSIKMKMTERAGFRKERRSHDRQNKQRKARKDHTEIQNGNADICRTTISCKSVQISYPAAEKSVTHKIIRGKEGKFANRHRDEGWITPSARQLVQMHMNDLKSMCRILPISHVTLERVAFDFQKLENENIKAWEYGKGKLYGYDSPEEYIHDVQGGKCLICGKPHIDYLHHIIPRSKGGSNKVSNLAGLCYDCHYGPMGVHNCQDTQDRLPELKNEANKQYKVSLLNSVMPVLIEEMDKFCKANSIIFSICGGHDTAKVRDMYDLQKDHCIDGFAISLAGRNVKSVDVMPDRIHQKQRYKKKSKNIIQKRNCREYYDGKKLAAVNRHKGTDQKADSLEEYMNTYAETHTADECKKHFESLTVKPARRTYTFHKEGRICPFHIGDKVRYEKKNKIKGNTKVETFICEGIRFPKDENKAKVEHNKTKSKKMKFCRVLEPGCTPYIDYRKLVLI

SEQ ID NO: 5270 - protein, 465 aa, unidentified
LAKALKGVVYTRLPHKINQFKRKDFVKRMTKTETQKVTQVCVLDQNGQPLMPTQRLGKVYRLLKTRKAHIVNYEPFTIKLDYEPKTHIIQPMTLGVDSGAIHSGYSLANEHREYYNAEVIARDNISKNLSDRRMYRRTRRSRKTRYRKPRFNNRKNKKKGWLPPSLEQKVYVQVKEIEHLHKYFPINNIIIEVAEFDTQKIENPDISGNEYQQGTLHGYNIRNYLLEKYHHKCFYCAKEVSAFEVEHMIPKARNGSNRIDNLTLSCHDCNQKKGTLTAEEFIEQTLSPQKAAQKLRQLPKTKQLLKYMAHMNATRWVLYNTIKETYDSVSITYGYITKYNRINAGLPKTHHIDAKCITGFSTVPSFDVTVVKTKMRRHNRQLHRATFSKGHIRRAATLPRFVHGFQLYDIVLFNNHRYYIKSRRSSGSFALVSLEGLKNENRNYKKITFLAHTNAYLTNHYVNDK

SEQ ID NO: 5271 - protein, 419 aa, unidentified
MVYVISQDGKPLMPCSNPIARLLLKQGKAKAKCREPFTIKLIYETTDYTQDLTLGIDTGSGTIGTAVSKNNGDIVYMSEVVVRNDITDKMAQRAKYRRNRRNRKTRYRKARWLNRSNSIKKDRFSPTMQSKLHSHVREIEYIQSILPITEMVFETGQFDMHLMKNPSLANPKVRHWGYQKGTNYGFENTKAMVLNRDNYTCQCCKGKHKDSKLEVHHVIFRSQGGSNEESNLITLCHTCHKNLHSGKVNLKLKGKMKGNLKYATQMNSICKQLFRLYPNAIETFGYVTKANRLHLGVDKEHYYDACIIATQGNAFNVKSNLYKKKCVSDGDFQKTKGIRSEQSIVTDKIWGFRKFDKVCYFGNDYFIKGRMSTGYAILMDIDGNKIDFSTMPRGYKTPKLSNCKRITARSTVMMQVEVV

SEQ ID NO: 5272 - protein, 558 aa, unidentified
MLASFFWWHSRMFLVLDSAEPAPSLRKHFICCAQAYHRCRDTVISAILHSYKKGNNMSEYIYVLGMDGRPQMPTRRKRHIDRLLSTGKAKVVEYVPFTVQLLYENHPVLQPVILAEDPGRTNIGVAAVSQKGELLFSAVVETRNKEITKFMEKRRKARQRLAKRCHTMIKAGQVMRKLPMFGEEKYITCRYIRNTESRFYNRRRKDGWLTPSAEQLVRTHINLVHRIQGFLPVTDVALEVNRFAFMQLEDPYITGVDFQNGPLKGYDDRKAAVYDQQDGQCLLCNKKPIEHYHHIVPVAKRGSDTLANIAGLCCRCHEKVHKDAGAARRLQNKKQGLTKKYGALSVLNQAIPFICKRLEEEFGEHVHYCSGRDTSRLRQSFGFHKTKDEPLHEVDAWCIGVLSLREIPEKCPDFTKVYQIKQFRRQNRRRINHQTERRYYLDGKLVAVNRKKRMGQTGRKDNQTKDSLADWFTKMVHLYREKEAEHLRSRLTVKKSQHSYNDLKREMPGAEFIYENQRYILSGQLTNGKYYRAVGSTQNFPAAKCRIRRHNRGLVFVS

SEQ ID NO: 5273 - protein, 443 aa, Caldicellulosiruptor sp.; identical to SEQ ID NO: 2385

SEQ ID NO: 5274 - protein, 431 aa, unidentified
MPDKVYVISRLGHPLMPCSPAKARHLLDDKKAKVVKRMPFTIRLLYGSTKYIQPIILGVDAGSKTIGLSASTAKEEVFAAEVMPRNDVVENLSTRREFRRARRNRTTRYRKPRSDNRVRSNHERRLAPSVKVKIQEHITSIKRVCTILPISKVVIETAEFDLQLLKAIQEGKPIPEGEDYQKGEMYGSYNVCQYVLWRDNYTCICCGVRGTPKNPVRLHVHHFESRKYSGNAPDNHGTLCDDCHKKFHLGIITDVKLKTRRRQSTRDAAFMGIMRKTLMWRLRTELFIPVAETKGYITKATREKLLALPKSHTRDALAIAQGRHGFCIKEYAYVEPANHIYTVRPVRHHNRQLHKASILKGGIRKRNQASKYVFGFRLYDKVLYQGKACFVWGRRTSGTFLLRTIDGIKVKDGVSYRNLTLLERSSNYLIA

SEQ ID NO: 5275 - protein, 485 aa, unidentified
MQKLKERNTYTPTVIPQDCSNCGLSLNSPFEVRDSVASLKTSFNSSDAALTAREQAGQNLRVSVVNVLNKRGVPLMPCKPQKARRLLKEGKAKVLKRTPFTIQLLYTTGESKQNLTLGVDAGYSNVGLSVVSADKELYSAELKLRTDMVKLNSERATYRRTRRSRKTWYRKARFLNRKKPQGWLAPSIQNKLDTHLKIIERIRGILPISNVVIEVAAFDTQKIQNPEITGVEYQQGELVGYKIREYLLEKWKRKCAYCGEKDIPLEIEHIIPKSRGGSSRISNLTISCNKCNLKKGNKTAEEFGHQEIQKQAKESLRATVFMNNVRWKLVNLLGCKWTYGYITKHNRIKLGLKKSHSNDAFIIAGGSTQKRNDQIFWIKQVRKCNRKLFKGKRSHLKNTAPRFVKEFQRFDKVLWKNIECFIFGRRSTGYFDIRMLNGHKLSSSAKAKDLKLLETFKTLLTEKMRFLPYLKDGVSAQRMEDEKRI

SEQ ID NO: 5276 - protein, 414 aa, unidentified
MPCSPAKARLLLKEKKAIVKRRTPFTIQLTIATGETKQPVSLGVDAGYEHVGLPASTEKAELYASEVELRQDITDLLSARRTLRQSRRNRKTRYRAPRFDNRIRTKRKGWLALSLENRINAHLSRIEAVLRLLPVTKITVETASFDLQLLKNPDISGKEYQEGEQLGFWNIREYVLCRDGHVCQHCYGRSKDPVLNVHHLESRRTGGDSPGNLITLCETCHKALHRGEITLKAKRGQSFRAEAFMGIMRSEVLNRLKASHPELEVNNTYGYRTKHARIANDIAKSHCADAFCIAGNLGAERLGEFFFQKQTRRNNRQIHKLSILKGGIRKRNQAPFEVKGFRLFDKVACQGEEGFIFGRRSSGFFDVRKLDGTRISAGISCKKLHLLEKRRTYLTEIRKEEALPPLPEGRGLRA

SEQ ID NO: 5277 - protein, 471 aa, Caldicellulosiruptor sp.; identical to SEQ ID NO: 3268

SEQ ID NO: 5278 - protein, 450 aa, unidentified; identical to SEQ ID NO: 5112

SEQ ID NO: 5279 - protein, 420 aa, unidentified
MQYAYVLNKRGEPLMPCSPGKARILLKQQKACVVKRTPFTIKLLHGSAGYKQPITLGVDAGSKHVGLSASTEKRELYSEEFTPRNDVVELLSTRRQNRRSRRNRKTRYRAPRFNNRVHSKHKGWLTPSVEVKIQEHITVIKHICRILPITLVRVETAEFDTQRLKAMLAGKPLPVGTDYQPGEMYDEYNVRQYVLKRDNYTCQCCGAHTTAKKTVKLHVHHLESRKVGGNAPSNLITLCTTCHNNLHKGKITLDGKKRGKTLRDAAFMGIMRNTLLTRLRNELNIPVQNTYGYITKLLREQNDIKKSHVNDARCISKHPLAKPCSVCYRTKAIRHHNRQIHKAKILKGGIRKANQAPYIVKGFRLWDKVLYNEQECFISGRRSSGYFALRKFDGTTITNSISFKKLRLLEPATNYLIERK

SEQ ID NO: 5280 - protein, 451 aa, unidentified
VTTILKTCFAAFNLAKVVVLMDAWDIIVVLNKRGKPLMPCSPAKARLLLKEKKAIVVRRTPFTIQLTIATGEAKQPVSLGIDAGYKHVGLSASTEKAELYASEVELRQDITDLLSARRALRQSRRNRKTRYRAPRFDNRISTKRKGWLAPSVENRINAHLSRIEAVLRLLPVTKITVETASFDLQLLKNPDISGKEYQEGEQLGFWNIREYVLCRDGHVCQHCYGRSKDPVLNVHHLESRRTGGDSPGNLITLCETCHKALHRGDITLKAKRGKSFRAEAFMGIMRWEVHNRLRALHPGIEVSNTYGYRTKHARIANGIAKSHCADAFCIAGNLGAERLGEFFFQKQTRRNNRQIHKLSILKGGIRKRNQAPFEVNGFRLFDKVACKGEEGFIFGRRSSGFFDVRKLDGTRISAGISCKKLHLLEKRRTYLTEIRKEEALPALPEGRGPRA

SEQ ID NO: 5281 - protein, 463 aa, Mahella sp.
MVFVLDKHKKPLMPCSEKRARLLLERSRAVVHKKEPFTIRLKDRTEEESQLQSLRLKLDPGSKATGAAVLADDTKAIWLGEIHHKSNIKKKLKDRRALRSSRRNRKTRYRQARFNNRHPAKCVACGKNAKHGSRYCRPCQKARNYVDNGYREKRLPPSLQARVNQTINCVTKLCKLLPITAISTEHVKFDTQLMQNPDINDVEYQHGELFGYEVKEYLLEKWGRKCAYCGKENVPLEVEHIIPKSRGGTDRISNLTIACHKCNQKKGNMTAEEFGYPEIQKQAKQPLKDAAMMNATRWALYDNLKKFGLPVECGTGAMTKKQRLAHKLPKTHYYDACCVGASTSDEITISTEYVSIWSAIGRGTRQMCRTDKYGFPKGYRKNRKQYFGFQTGDIVKANIPNGKYQGNFTGRVAVRSSGYFDIKDSTGNCLCQGVSWKYMQVLQRNSGWQYDKERRNPLLSQLK

SEQ ID NO: 5282 - protein, 533 aa, Verrucomicrobium sp.
MRQVRKPTPWMLPQSRTLEGEDHVGERESAEGSLRRREAEAGCIPSRGERSRKTPVTAERREERGNSMRIFVIGSHREPLMPCHPARARELLREGRAVVHRRYPFTIRLKDREDGIRQPIRLKLDPGSRTTGLALVREAANGTQHALWLAELEHRGSAIRERLATRRAFRRRRRSTLRHRPARFNNRRRPEGWLAPSLRHRVDTTMTWVARLRRLAPVTGLSQELVRFDTQAMQNPEIAGVEYQQGTLAGYEVREYLLEKWSRQCAYCGKKNLPLEVDHIDPKSRGGSDRVSNLTLACHECNQDKGNRDIREFLANHPDRLMAVLAKAQTPLHDAAAINSTRWALFERLKDTDLPVETATGGRTKWNRNRLNIPKTHCLDAACVGDLDRLLGWNVPVLGVKAAGRGSYQRTRLMKDGFPRGYLTRSKRHCGFQTGDLVRASVPRGKKAGIHIGRVAVRASGSFNIQTLHGVVQGISHRRCSLIQRADGYGYAIKPKIAERKDVGTGAACSRRAIPPRHECQGSPAQKRWSLGQ

SEQ ID NO: 5283 - protein, 412 aa, Enterococcus sp.
MVYVLSINNEPLMPCSNVIARLLLKQGKAKVKYREPFTIKLTYETTTYTQPLTLGVDTGSQTFATAVTNGKGNILYTSEVVLREDKNHSIKKKMDQRRMYRRNRRNRKTRYRKARFNNRKNSKRKNRFSPTMTSKLHSHQKEIEFIKSILPIAKLILETGTFDPHLMKNPSLANLKVKPWGYQQGPNYGFENMKARILARDNHTCQICKKKPKNERLEVHHIIFRSQGGSDEENNLVTVCHSCHVELHKGLIHPNFEGSLKNALKYATQMNSIRVQLLKLYPDAIETFGYVTKANRLNLGLPKEHYVDAAVIATAGNQVNFACNLMIKRCIPKGDFQRTKGIRSEKIIPKGKIDGFKKYDKVRYFGNEYFVKGRMTTGYIQLMNIYGEKISFNHMPKGFKTPKTKKLSKNIC

SEQ ID NO: 5284 - protein, 421 aa, unidentified
MQNRVFVLDTNKQPLSPTHPARARKLLKQGKAAVFRTYPFTIILRKTVKDPGDEPHRIKLDPGAKVTGIALVNERTGTVVWAAELTHRGDMIRQKLEKRRVVRRNRRKHKTRYRPARFNNRKRPNGWLAPSLQHRVETAMTWVKRLRKYCPITDISMELVRFDMQKLRNPEISGVSYQQGVLFGYELREYILTKWRHQCAYCGAKEVPLEIEHIHPKSKGGSDRVSNLAIACHKCNQKKGDKHVEQFLKKKPEVLKRLLAQAKAPLRDAAAVNSTRWALYNRLKETGLAIETGTGGLTKYNRTLQGLSKTHWLDAACVGKSTPMLKIATTQPLLITCKGRGGRQKAVVNKYGYPISHRPLKPIKGWQTGDITKHQVYGIGRITPRSRGSFVLTKSDKTQKSVKPTDLKPVSRRDGYSYKWV

SEQ ID NO: 5285 - protein, 430 aa, unidentified
MGELLRKEADYMLVYVINRHGKPLMPCKPQKARKLLKEQKAKVVKRTPFTIQLLYGSSGYKQDVILGVDAGSKTIGLSATTENREVFSAEVELRTDIVDLLSTRRMLRRSRRNRKTRYRQSRFLNRKKPEGWVAPSVQNKIDTHIKVVKMVHDILPITKVIVEVAQFDIQKIKNPDILGEDYQQGEQLGFYNVREYVLFRDKHTCQHCNGKSKDPVLNVHHIESRKSGGNSPDNLITLCETCHRKYHKGEIELKVKRNSSFRDAASMNIMRWAFYNKLKELYSNVSLTFGYITKNVRIKHNLEKSHRIDARCISGNPSTKESDCWYFFKQVRKQNRQLHKTNPKKGIRRENKAPGYIHGYQLFDKVEYLDRECFVFGRRSSGYFDLRTLDGEVVSRSASVGKLKLVERASSLLCERREASFLTGLKHGVS

SEQ ID NO: 5286 - protein, 438 aa, unidentified
VSYGLYDAGLPQKIIQKERSTYMVYVLSQNGQPLMSTIRHGKVRRLLKEGKANVVKKCPFTIRLTYPSGDQTQEISLGIDSGSKYIGISATTQKKVLYEAEVELRNDISKLLAARRQNRRSRRSRKTRYRKPRFDNRKRKEGWLAPSVQQKVDCHLKVVEDVCKLLPVTRIIAEVASFDIQKIKDPKIHGTDYQQGDQLGFWNVREYVLFRDGHTCQCCKGKSKDKILNVHHIESRQTGGNAPNNLITLCETCHKGYHKGQVKLPKKIKRGMTFKDAAFMGIMRWAFYDRLKEIYLPLGIDVSLTYGYLTKNTRIAHQLPKTHYLDARCISGHPDAISDGIYYHQKKIRCHNRQLHKANTLKGGIRKRNQAEYLVHGFRLFDKVRYQGKDYFIFGRRKSGYFDIRDLNGEKVNKGSISYKKLRLVETRRSYLTERRLA

SEQ ID NO: 5287 - protein, 393 aa, unidentified
MSNYVFLIDANKTPMNPIHPAHARKLMEAGKAAVFRRYPFTLIVNRAVENIVTYPLALKIDPGSKTTGISLVTNQNEAIWGMELEHRGQGIKDALLARRAVRRGRRGRHTRYRQARFLNRSRAKGWLAPSLMHRVLTVETWVKRLCKFAPVAQIRQELVKFDMQQMQNPEISGTDYQQGTLAGYEVREYLLVKWGRKCTYCSKEGVPLQIEHIQARANGGTDRVSNLCLACEKCNLKKGNKDIRDFLKGKPDLVSRILKQASSPLKDAAAVNSTRWKLFLMLKATGLPVKTGTGGQTKYNRTRLGLPKEHWLDAACVGVVESLKVLTSKILRVKSTGQGGRQRCQTDKLGYPQKYRPLRPIHGFCTGDIVKTVIPLMCECWNVYREAMPVQQW

SEQ ID NO: 5288 - protein, 296 aa, unidentified
INAHLSRIEAVLRLLPVTKITVETASFDLQLLKNPDISGKEYQEGEQLGFWNIREYVLCRDGHVCQHCYGGSKDPVLNVHHLESRRTGGDSPGNLITLCETCHKALHRGEITLKAKRGQSFRAEAFMGIMRSEVLNRLKASHPELEVNNTYGYRTKHARIANDIAKSHCADAFCIVGNLGAERLGEFFFQKQTRRNNRQIHKLSILKGGIRKRNQAPFEVKGFRLFDKVACKGEEGFIFGRRSSGFFDVRKLDGTRISAGISYKRLRLLEKRQTYLTEIRKEEGLPPLPEGRGLRA

SEQ ID NO: 5289 - protein, 420 aa, Bacillus sp.
MTHCFVLDAQGRKLSPTKEKRAWYLIRKQKAILKCKFPMVIQLVREVPEEEIDSTPIHLGIDDGSKLVGIALVQECRTENKPVFKGTIELRIDVKEKLAVRRGYRRYRRHHKKYRPARFDNRSSSRKEGRIPPSIRQKKDSILRVVRQLTKWVRIDEIFLEDVLIDIRALEKGYNPYRWEYQLSNRLDENIRKAAILRDRNTCQDCGATNTRMEVHHITPRRLNGSDSIHNLITLCLTCHEKIAGEELLHSQRFYQKIKGKSISFRDAMHVMQGKTYLQKALKEIAPLNPTTGGDTANKRIDWDIEKTHANDSIVICNLRVNPEQCEMKDWVIKPMKKRSNKKIKSANGIYHRDFVRYTKRNGESYIAYITALYPERNQCNMTTIDGKILKRYGLSRLSLLWRFNKIYWLINSNEGGESW

SEQ ID NO: 5290 - protein, 494 aa, unidentified
MPLNSLDGVRTVGNPYKPWDNIGEGHLTDLPVWAACSSIAATQKEIQMVYVQNRSGQPLMPTEDHRKVRLLLKNGLAVVVKRTPFTIRLATGSKNYVQPVILGVDAGSRTAGLSVSTKQRELFAAEVTLRNDVVNNLSARREFRKARRHRKPRYRQPRFHNRVHSKQKGWLAPSVEVKIQEHITVIKRVCRILPVSRVVVETAEFDLQLLKAIADGRPVPQGEDYQKGEQAGFYNVRQYVLWRDDYRCQCCRKHGKGIKLHTHHKESRKTGGDAPENLVTLCEVCHRKLHQGLIAEQSLKKRSRMSTRDAVFMGIMRRTLTERLCRELKVPVAGTKGYITKYTRVELLHLPKSHTGDALAIAQGRYGFGIGQVTFIKPAERIYQIKPVRHHNRQLHKATILRGGIRKSNQAPKYVKGSRLYDKVLYQGRECFIWGRRTTGSFLLKLLDGTKVKDGVSCKHLKLLEGAASIWLRKRKEEAAHPHGSIYGAPLIFG

SEQ ID NO: 5291 - protein, 427 aa, Oscillochloris sp.
MSFVFVLSSDGQPLDPCHPARARQLLDHGKAAVWRRYPFTIRLSERSVAERVTHPHRLKLDPGSKTTGIAVVAETTGRVVWAGELTHRGQAIRDALLSRRASRRSRRQRKTRYRQPRFLNRRRPAGWLAPSLQHRVATTLTWVNRLRRFVPVTAISTEMVRFDTQLLENAEISGVAYQQGTLAGYEVREYLLEKWGRRCAYCGATNTPLQVEHIVPRARGGSDRISNLALACEPCNIKKGTQTAAEFGHPDIQAQARRPLKDAAAVNTTRWALYQHLIATGLPVEVGTGGHTKFNRTRLGLEKAHWHDAACVGASTPEALDVRGVRPLLITATGHGNRQMAGLNRYGFPIRHRQRKKRHFGFQTGDIARATVTTGTKQGVYIGRVAVRAIGAFNITTTTSAKIQGLNHRFFRTVHRSDGYTYAAALG

SEQ ID NO: 5292 - protein, 456 aa, unidentified
MSTCVCVLTNNGERLMPTFRLGKVRHLLKDGKAKIVKHHPFTIQLLYDSKTNTQPIETCEDVGYNYIGISVKSESHEYVSAQYDTLQDEKEHHDDCRKYRRTRRNRLRYRKSRFDNRKRDKGWLAPSLEHKKHLNISLIERYVSVIPITHVTVEVGSFDTMLLQSIQKGEAKPEGADYQKGPRYNLATLREAVFYRDNYTCQVCKRKIADGAILHMHHMFYWKGRHGYQLDELVTVCEKCHTPANHQKGGKLYGFGKDKKFANLSGAAFMNAVRWQIVNALYATYGKEFVTITYGAMTKEKRIALQLVKTHNNDAYAMGDYHPARRCKFRHYQKRRRNNRVLEKFYDATYVDTRTGNKAKGKELFNGRISRNHKKDCKNLHKYRSKKVSKGRRSIRRQHYAIQPYDTVRLEGKTYITSGCHNKGTRLLIPVNGKSKSVAISKVQVVCHAGAWIQII

SEQ ID NO: 5293 - protein, 292 aa, Turicibacter sp.
LSRIKAVLRLLPVTKITVETASFDLQLLKNPDISGKEYQEGEQLGFWNIREYVLCRDGHVCQHCYGRSKDPVLNVHHLESRRTGGDSPGNLITLCETCHKALHRGEITLKAKRGQSFRAEAFVGIMRWEVLNRLKASHPELEVNNTYGYRTKHARIANDIAKSHCADAFCIAGNLGAERLGEFFFQKQTRRNNRQIHKLSILKGGIRKRNQAPFEVNGFRLFDKVACKGEEGFIFGRRSSGFFDVRKLDGTRISAGISCKKLHLLEKRRTYLTEIRKEEALPALPEGRGLRA

SEQ ID NO: 5294 - protein, 418 aa, unidentified
MVYVIGKEGQALMPTERFGKVRRLLKNGLAHVVCRIPFTIQLDYETTYFVQPISLGVDAGSKHIGISATTSEKELYAADVELRNDIVEKLSTRREQRRTRRNRLRYRKVRFNNRVSSKRKGWLAPSVENKIQTHLTVVEKIHKFLPITNIVVETASFNIQKIKNPSISSEEYQKGEQLGFWNVREYVLFRDNHTCQHCKGKSKDHILNVHHIESRKIGGNSPSNLITLCESCHKAYHNGKIDIKVKRGASFRDAAFMGITRWTTYERLKNIYPNVNMTFGYITKNNRITNGLPKDHYVDARCISGNSKAKPLGYYFYQKKVRCQNRQIHKVNFLKGGRKKLNQAPFLVKGYRLFDLVEYQNDLYYIFGRRDSGFFDIRKLDGTKVKKGSISCKYIRLVDIRRSVLTERRKSCSIPPTN

SEQ ID NO: 5295 - protein, 462 aa, Halomonas sp.
MAVFVLDKQKQPLMPCSEKRARLLLERGRAVVHKRYPFTLRLKDRVGGDTQPLRLSIDPGSKTTGLALMREADGAEPDDQQRHVLCLFDLVHRGFQIRKALEQRRGFRRRRRSKNLRYRAPRFDNRTRKAGWLPPSLQHRVDTVMAWMERLSRLAPITAISQELVRFDTQRMENPEISGVEYQQGTLLGYEVREYLLEKWGRECAYCGATETHLEIEHVVPSSSGGSDRVSNLTIACHDCNQAKDSLPLATFFASDKGLKKRLKANGLSADARLERVQRELKRPLRDASAVNATRWALFNALNATGLPVAVGTGGRTKFNRERLDIPKTHSLDAACVGAFDMLHDWRVPTLTIKCTGRGSYQRTRLTKHGFSRGYLMRQKQVHGFQTGDMVKAIVPTGKKAGTHTGRVAVRKTGSFNIQTDHGAVQGILHKHCTVIQRGDGYGYHLTPTIHQLKGGAGQAVA

SEQ ID NO: 5296 - protein, 436 aa, unidentified
MVLVIDKHKKPCNTISNAYARVLLFKKQAVIHKRFPFTIRLKNDSAVLKDRAYTVKVDPGSRTTGIAVTDDKDSVVMLAEIEHRGKIVKRNLDSRKVIRRSRRNRKTRYREARFLNRTKPKGWLAPSVKSRADNVINFIRKYKKLLTIDKIMIESVSFDVAQMSSDDYLIGTDYQEGPLYQKKLREFIFSKTKGRCAYCGAKAEEIDHIIARANGGSNSTYNLIASCRKCNKLKSNLALKDFGKLVGKDFSKLTPKKLPKDAAIVQSARNYMVKEIVKLVPDTTTHDAWLTKYNRNELGLPKEHYYDALSIGNVQDYKFLTDKVLQISAKGRGSRQMCLMNKFGFPRTSPKGSKLVKGFQTGDIVKAIVPKGLNRGEYLGRVIIHSSGYFDIKINDCLVHGIGHKYCSLIQKNDGYSYNYKERNFLSATWSVNPSI

SEQ ID NO: 5297 - protein, 471 aa, Caldicellulosiruptor sp.; identical to SEQ ID NO: 3375

SEQ ID NO: 5298 - protein, 414 aa, unidentified; identical to SEQ ID NO: 2588

SEQ ID NO: 5299 - protein, 457 aa, Ralstonia sp.; identical to SEQ ID NO: 2434

SEQ ID NO: 5300 - protein, 424 aa, unidentified; identical to SEQ ID NO: 3434

SEQ ID NO: 5301 - protein, 443 aa, Caldicellulosiruptor sp.; identical to SEQ ID NO: 2385

SEQ ID NO: 5302 - protein, 408 aa, unidentified
MVYVQDIDGKPMMPTTRHGKVRRLLKANKATVVNLCPFTIRLTYATSGYKQEIVLGVDAGTKHVGLSATTKSKELYSSEVILRSDIVELLSTRRELRRTRRNRLRYRKPRFGNRVKSKHHGWVAPSVRHKVDAHIRVIDNICSTLPISRIIVEIAQFDTQKIKNPDISGNEYQEGDQLGFWNVREYVLARDGHKCQHCKGKSKDPILNVHHIESRKTGGDSPSNLITLCETCHKEYHKGNIDLKVKRGKSLRDAAVMGIMKWKLYEELKSRYPNVSMTFGYITKYNRIKYGIEKYHISDAFVISKNFNALRLEYHYKVRLVRRHNRQIHKQKVLKGGAKKPNQSPFEVFGFRLFDRVMFEGNYYFIFGRRKSGSFNIRDINGGNQRNVTYKKLKLSIGKRFMIQKEMN

SEQ ID NO: 5303 - protein, 419 aa, Halobacteroides sp.
MAQLQYALVIDNEGKILDPTKVKKAWYLIRKGRVKLVEEYPLIIQLKKKIPKEEVNNDKIVLGIDDGYDKVGFALIQKCQSKNKVLFKATMKQRQEVSKLMTQRREYRRYRRQHKRYRAKRFDNRSSSKRKGRIAPSIKQKKQAILRVVNYLNKFIRIDKIVLEDVAIDIRKAVEGKELYSWEYQESNRLDENLRKATLYRDDCAFQICGATDTMLEAHHIIPQRDSGADSIYNLITLCKDCHKDKVDGSEYKYKDEFLNIIDGKELNIKPAMHVMQGKTWLREKLSKIVNLEITTGGDTANKRIDYDIKKSHSNDSICITNLLPVDNLDVKEYFIKPLRKKSKAKIKELKGFKHRDIVRYTKRNGETYDGYITSLRIKNNKYKSKVCNFTTLNGEKTFRGYGLTNLTLINRPKGLMII

SEQ ID NO: 5304 - protein, 462 aa, unidentified; identical to SEQ ID NO: 2823

SEQ ID NO: 5305 - protein, 414 aa, unidentified; identical to SEQ ID NO: 2588

SEQ ID NO: 5306 - protein, 443 aa, Oligella sp.; identical to SEQ ID NO: 5205

SEQ ID NO: 5307 - protein, 477 aa, unidentified
MIIALDKYKRPLGFLTERRCRILMERKRAVLYRVFPTVVILMDVDARTIPGLPSFRIKIDPGSKYTGIAIIRNDTDEFVYAMQIEHRGDAVRAALNKRKNARRNRRSRETGYRRAKWGNRCLSEKDKRSYDSSREDGWLPPSIRSAADNVISWVRRLGRWINLTECSFEAVRFDTQLMEDPDIEGEEYQHGTLFGLEIKEYLMEKFGHTCQYCGGKSGDPVLEWEHMRPKSRGGSDRVKNALLSCSSCNKDKGNRTPEEWLELIKARLPREKGKRKELDEERVELIQKVIDGKPQGGALRYAAWVSSSRRYLEKALFGIFGNVECSSGGRTKYNRTELGYPKEHHYDALCVGTVPEKGYHDRTNGYYLYAKAAGRGTRLRGHLNKCGMIVTKWTDRKNGFFGFQTGDIVVAEVPHKTPKPYKYEGRFVGRVMVRATGSFDIKTTDGKLVTVKEQYCRLLQANSGYQYTMKRAIPLGH

SEQ ID NO: 5308 - protein, 471 aa, Caldicellulosiruptor sp.; identical to SEQ ID NO: 3268

SEQ ID NO: 5309 - protein, 447 aa, unidentified
MVAVLSKTGIRLMPTSSYRARKLLARKKAVIAGYRPFTIRLTERESGEIQPIEYTIDTGYYHIGNSVKTVKHELAAVEVRTLMDEKLRQEDRHRYRRQRRSRLRYRAARFDNRRRREGWLAPSVRHRMEQNLSVLNRIARVVPVSRIVMEMGQFDTQVLKAVASGIPLPQGADYQQGDRYGIATLREAVFTRDNYTCQCCGKKGTDGVILHVHHIRYRSQGGTDAMSNLATVCYKCHTPKNHKPGGILYGWKLKLPSFKGATFMTSVRWMLYHQVKELYPELEIQLTYGAATKEQRRILDVPKSHVNDAYTMGDFHPSHRVRPVIYQKKRRNNRVLEKFYDAKYIDLRDGKKHSGQELFNGRTNRNHNRDTENLHKYRGKKVSKGRRSIRRRRYPFQPHDLVVYRGKSLETAGCHNKGTRLLIGKRSIAVKEVKIRQYCGGYFAVEI

SEQ ID NO: 5310 - protein, 414 aa, unidentified
MVYVINKQGQALMPTERFGKVRRLLKNSLAHVVCRIPFTIQLDYDTTDYTQPVSLGIDAGSKHIGISATTSEKEMYAADVELRNDIVDKLSTRREQRRTRRSRLRYRKARFNNRISSKRKGWLAPSVENKIQTHLTVVEKIHKFLPITNIVVETASFDIQKINNPSISGSEYQQGEQLDFFNVREYVLFRDNHICQHCKGKSKDKVLNVHHIESRKTGGDSPKNLITLCETCHKAYHRGDFELNVKRGKSFRDSAFMGIMRWKLYDRLKNIYPNVSMTFGYITKNTRITNNLPKDHYIDARCISGNPVAKPLGYYFYQKKVRCQNRQIHKSNFLKGGRKKLNQAPFLVKGFRLFDLVEYQKDLYYIFGRRDSGFFDIRKLDGTKVNKGSINCKYLRLVDKRKSILIEKRMQVNL

SEQ ID NO: 5311 - protein, 429 aa, Parasutterella sp.; identical to SEQ ID NO: 4241

SEQ ID NO: 5312 - protein, 451 aa, unidentified; identical to SEQ ID NO: 5203

SEQ ID NO: 5313 - protein, 471 aa, Caldicellulosiruptor sp.; identical to SEQ ID NO: 3375

SEQ ID NO: 5314 - protein, 476 aa, unidentified
LAASGTEGVSHPGLPGKYKHKGGQLMSVAVISKTGERLMPTSEYRARKLLKSGKAIKHSYHPFTIQLTGRETGDIQPIELCMDTGYIHIGISVKSEKHEYLAEQIDTLTDERGRHDACRMYRRQRRSRKRYRQARFNNRKRDHGWIAPSLEHKKKIHIQAISRINNVIPITDITLEMGNFDTQVLKANEEGKPLPQGADYQHGERYSIATLREAVFSRDSYKCQCCGRTIKDGAILHIHHIKYRSQGGTNSMSNLATVCDKCHTPKNHKPGGKLYNWKPKLSSFKGATFMTAIRWQLYNEVKALFPDIDIHITYGAATKERRRKLDIDKSHVNDAFVMGQFHPKHRIKAILCKKKRRNNRCLEKFYDAKYIDSRDGKKRSGQELFNGRINRNHKKNSENLHQYRLQKVTAGKRTVRKQHYKIQPHDIVIYENRKRETAGCHCNGTRMMLLPDKKSASIKKVKIYKYAGGYFKSAFN

SEQ ID NO: 5315 - protein, 477 aa, unidentified; identical to SEQ ID NO: 4853

SEQ ID NO: 5316 - protein, 447 aa, unidentified
VPAYRIKHITKKEAPYMVYVLDIDGQPLMPTSRHRKVRKLLNSHLAKVVKRCPFTIQLLYQSTKETQPVSLGVDAGSRHIGLAATTEQKVVYQEELVPRNDVVKLLSARRALRSSRRSRKTRYRKPRFNNRVHSKHKGWLAPSVEVKIQEHITAIKRICQILPISDIHVETAEFDLQRLKAMEEGRPLPVGTDYQLGEQYDFYNTRQYVLHRDEYTCQCCGTHDNNVKLHVHHIESRQTGGDAPNNLITLCEHCHKLLHAGKTILPKGKKRGKSYRDATFMGIMRKTLLERLKKEIDVPVEGTYGYITKYWRERAGLEKSHINDAICISKHPYARPLETYYLTKAVRHHNRQIHKTKFSKGGIRKRNQAPYLVKGFRLFDKVLYQGESYFIFGRRITGYFDIRTLDGTKVNKGSTSYKKLRIQDTAEAYLTEVRAIPHMNEFTCVLA

SEQ ID NO: 5317 - protein, 507 aa, unidentified
MPEVIYVLGMDGKPQMPTARKRHVRKLLDTGRARIAEHVPYTIQLLYENHPVLQPVILALDPGRTNIGAAAISEKGELLFSAVAETRNREIAKLMLKRRQYRRASRNGERKARQRLAKRFGTVFKAGIRMRKLPMYGGEKFLACKWIRNTEARFCNRKRPKGWLTPSVNHLVNTHLNLVHKCRKYLPVTDVALEVNRFAFMLLEDPSVSGVDFQDGPLRGFASLQDAVNHLQHGKCLLCGDRIEQYHHIVPRSRNGSNTISNVAGLCCHCHEKVHKDKKHAGILSDKKSGIDKKYGALSVLNQAVPFICGKLEAEFGLDHIHYCTGKDTSGMRHCYGFHKTKEEQMHEADAWCIGICALGISPEKIPDFAAVHTIRQFRRQDRSLIKALTERTYRLDGKAVAKNRKKRMDQKTDSLEEWYGKQAQVHGEAKAKQLRNQLSVTKSCRRYQNPDRIMPGAVFLYKGTRHVLSSSITHGRYFRAVGDPKTNYPARDCVILKQNEGLVFMD

SEQ ID NO: 5318 - protein, 408 aa, unidentified; identical to SEQ ID NO: 4142

SEQ ID NO: 5319 - protein, 324 aa, unidentified
MVYVQDIDGNPLMPTTRHGKVRRLLKSNKAVVVNLCPFTIRLTYDSNRYKQEIMLGVDAGTKHLGLSATTKSKELYASEVTLRSDIVDLISTRRESRRTRRSRLRYRKPRFNNRVKTKKEGWIAPSVRQRTNSHLKQISDIHRILPISKIIIELAQFDIQKIKNPDIKNEEYQQGEQLGFWNVREYVLDRDGHKCQHCKGKSKDPILNVHHMESRKTGGDSPSNLITLCEKCHKEYHKGELELKIKRSKSLRDAAVMGIMKWRLYEELKSSYQDVKITFGYITKYNRINYGIQKSHTSDAFVISKNFDASRIKFLSRHQTYEKT

SEQ ID NO: 5320 - protein, 470 aa, unidentified
MSVFVVGLNGCRLMPVSERKARLLLKGGKASIYRKVPFTIKLNYKTGSTVQPGYLGIDTGSQHIGVSVVQKDGTVLHKEEIGLRDSMSKRKLLESRASSRRGRRYRKTRYRHPKWKPKTKRTYNEKADRKGRHWKKQKNTFTSKRQAGWLPPSLQSKTDHHIQWIRKLLDLLPEGYRLSIELGRFDPARMKDPEIHGELYQKGPQYDYENVRAYVLARDGYTCRVCKKKGGKLHVHHILYRSRGASDNPKYMAAVCSKCHTTENHLPGGILYQWMQDQKKFTRGLRDATFMNILKKRLRKAFPDAVFTYGNITKADREKLELPKSHGNDATAIALVKTEVKSVKDEEPVIHIQQVRRKKRSLHEETPRKGRKEPNRTASRSDKNTKSVTVTKGSGEKKASMTACLFDRVELDGKKGWITGFTGTSCYVKDKEDNYICTSPKYKQVSISRLRILHHCGNWAIGAEKPLGKG

SEQ ID NO: 5321 - protein, 438 aa, Ktedonobacter sp.; identical to SEQ ID NO: 2377

SEQ ID NO: 5322 - protein, 454 aa, unidentified
LDTVAVISASGRKLMPTNSYRARRLLKSKRAVIYRYRPVFTIKLVDRTNGYTQPIEYKCDTGYQNIGISICSDTKEFVNEQRDLLKDEVKRHSDSRKYRRTRRNRLRYRKARWNNRKGMISKDGFAPSIRNKRDVHARLYEEYYKVFPITKAVFEMGQFDTQVLKAVEVGLPILDGTDYQRGEQYGYATLREAVFARDSYTCICCGKSAIKDGVKLRIHHIGYLSGDRSNRMANLGSVCENCHTSKNHKPGGKLYSLKPELKTFKGATFMTTVRYSMVKQLKAATPDVDIRVTYGAATKLARKALNVKKTHSNDAYCMGEFHPKHRSDFKHYRKCRRNSRVLSRFYDAKYRDLRDGSVKTGSQLSCGRTNRKISRHTELDERIYRAHKISKGRVSTRRQHYSLRPGDKVLYDGKVYFVTGMQNSGTHVKLTNGKVCSLKKVHVLQHCNAWTAVI

SEQ ID NO: 5323 - protein, 427 aa, unidentified
MSKTLVLDTNKRPLYPIHPAQARQLLKNKKAAVFRQFPFTIILKESRPDSPVSPLRLKIDPGAKFTGMALVNDSTGEVVFAAELKHRGFVIRDALTSRRQLRRSRRARKTRYRQPRFLNRTRPNGWLAPSLQSRVENIKTWVKKLRKFAPIEAISQELVRFDMQLMANPDIQGKEYQQGTLAGYETKEYLLEKWNRQCAYCGVKDVPFQVEHIHPRAKGGSNSITNLTLSCEKCNTKKGTKDIKDFLKKDPTRLQKILKQAKRPLADAAAVNATRWALFRVLKDTGLPVETGSGGLTKFNRSQQNLAKTHWIDAACVGQSTPILTIKGIKPLLIAANGHGSRQSCRTDKFGFPSRYVPRFKFVKGFQTGDIVKAVVTAGKKVGEYFGRVAIRTSGTFNISTNSRLVQGISHKYCLATHKKDGYSYAN

SEQ ID NO: 5324 - protein, 465 aa, Calothrix sp.; identical to SEQ ID NO: 5126

SEQ ID NO: 5325 - protein, 471 aa, Caldicellulosiruptor sp.; identical to SEQ ID NO: 3375

SEQ ID NO: 5326 - protein, 470 aa, unidentified
MSVFVVGLNGCRLMPTSERKARLLLKQGKAFVEQKVPFTIRLNYKTGSTTQLGYLGIDTGSQHIGVSVVREDGTVLHKEEIGLRDSMSKRKLLEAKASLRRGRRYRKTRYRHPKWRPKTKRVYCEVPDRKGRHWQKKKITFTSKRPKGWLPPSLQSKTDHHIRWIKKLQDLLPEGYRLSIELGRFDPARMKNPEIHGDLYQKGPQYDYENVRAYVLDRDRYTCQICKKKGGKLHVHHILYRSHGATDDPQYMVTVCSDCHSAQNHLPGGILYQWMQEQKRFSRGLRDATFMNILRKRLIRAFPEAVFTYGNVTKVDREKLKLPKSHGNDATAIALVKTGITAVKDKESVICIQQVRRKKRSLHEETPRKGRKEPNRTAARNNKNTKAVTVTKRQNKKKVSMTGCLFDRVELNGKKGWIFGFTGKSCYVKDADDQYLSTSPKYKQVSLSKLRILHHCGNWIIGAKKTLGKG

SEQ ID NO: 5327 - protein, 551 aa, unidentified; identical to SEQ ID NO: 3229

SEQ ID NO: 5328 - protein, 419 aa, Anoxybacillus sp.
LFVYVINKHGNPLMPCSPRKARILLKNKKAKVVKRTPFTIQLLYGSSGYKQPISLGVDTGTKHVGLSATTKNQVLLEAEVQLRTDIQELLATRRQFRRSRRNRNTRYRKARFLNRKKPNGWLAPSIQHKVDSHIKLVKWVHSLLPITHITVEVAQFDTQKIKNPDIQGAAYQQGEQLGFWNVREYVLYRDGHTCQWCKGKSKDPVLNVHHIESRKTGGDSPSNLMTLCKTCHDMIHREGLEHEIQRRFSSLKDASHMTVMRWFIWNGLKKVYPHANITYGYITKCIRIANGLPKSHMVDARCISGNPLAKPSGTVYFLKFVRKNNRQLHKATILKGGKRKSNKAPRFVKGFQLFDKVVYEGKECFIFGRRSSGYFDLRLLDGTKVHASASWKKLKRVEYASTLLIERRKGDSSPTFALA

SEQ ID NO: 5329 - protein, 426 aa, unidentified; identical to SEQ ID NO: 3294

SEQ ID NO: 5330 - protein, 431 aa, unidentified
MPDKVYVISRLGHPLMPCSPAKARHLLDDKKAKVVKRMPFTIRLLYGRTKYIQPIILGVDAGSKTIGLSASTAKEEVFAAEVMPRNDVVENLSTRREFRRARRNRTTRYQKPRSDNRVRSNHERWLAPSVKVKIQEHITSIKRVCTILPISKVVIETAEFDLQLLKAIQEGKPIPEGEDYQKGEMYGSYNVCQYVLWRDNYTCICCGVRGTPKNPVRLHVHHFESRKYGGNAPDNHGTLCDDCHKKFHLGIITDVKLKTRRRQSTRDAAFMGIMRKTLMWRLRTELFIPVAETKGYITKATREKLLVLPKSHTRDALAIAQGRHGFGIKEYAYVEPANHIYTVRPVRHHNRQLHKASILKGGIRKRNQASKYVFGFRLYDKVLYQGKACFVWGRRTSGTFLLRTIDGIKVKDGVSYRNLTLLERSSNYLIA

SEQ ID NO: 5331 - protein, 442 aa, Streptomyces sp.
MPCHPARARELLSRGRAVVARQVPFMIRLKDRTSAESEVEGVQLRIDPGSKGTGIVLTDEKKETGDRGAVVTVRRGLISVELQHRGDQIRAGMRKRAGHRRRRRSANLRYRMPRSNNCGRPEGWLPPSVRHRVDTTFSLTSRLCLYAPVTEIHVEHVVFDTNSLSAGRPLKGTEHQQSPLAGTTARAHLQAKWNSACAYCGVTGVPLNMEHLRPRSRGGSDRISNLVLACVPCNKAKGSKPVEVFLAHRPNCLKQFLQQVRNPLDDAATMNATGRALGYALGSIGRPVHAWFGRLTSANRSAMGLDKTHTLDALSIGPLDHATGDRIVRLPERVLIAKATGRGSYARTTPDRYGFPRLLRPRAKQHHGYVTGDLVGAVVTAGKWAGTWTGRVSVRSSGQHSLATASGRFNCSHRNLRLLQRGDGYGHSSRREPAGSTSRKNS

SEQ ID NO: 5332 - protein, 470 aa, Blautia sp.; identical to SEQ ID NO: 2925

SEQ ID NO: 5333 - protein, 422 aa, unidentified
LNKRGKPLMPCSPAKARLLLKEKKAIVVRRTPFTIQLTIATGESKQPVSLGVDAGYKHVGLSASIEKAELYASEVELRKDITDLLSARRALRQSRRNRKTRYRAPRFDNRIRTKRKGWLAPSVENRINAHLSRIEAVLRLLPITKITVETASFDMQRLKNPDISGKEYQEGEQLGFWNVREYVLFRDGHVCRHCHGRSKDPVLNVHHLESRRTGSDSPDNLITLCETCHKALHRGEITLKAKRGQSFRAQAFMGIMRREVLNRLKASYPELKVHETYGYLTKHARIANGIVKSHGADAFCIAGNLGAERLGEFFFQKQTRRNNRQIHKLSILKGGIRKRNQAPFEAKGFRLFDKVACQGEEGFIFGRRSSGSFDVRKLDGTRISAGISCKKLRLLEKRRTYLTEIRKEEALPPLPEGRGLRA

SEQ ID NO: 5334 - protein, 470 aa, unidentified; identical to SEQ ID NO: 2825

SEQ ID NO: 5335 - protein, 443 aa, Caldicellulosiruptor sp.; identical to SEQ ID NO: 2385

SEQ ID NO: 5336 - protein, 429 aa, Petrotoga sp.
MVYVIAKDGTPLMPTKRHGKVKHLLREGKATVVRNKPFTIKLSYDTTHFTQPITVGVDSGHKHIGFSAVTEKEEVLSGEVELRDDVSELIKEKGMYRRIRRNRLRYREPRFDNRRKPDGWLAPSIRHKLDTHIRFIEFIKKILPITSIVIEVAKFDTQKLVNPEIKGIEYQQGEQRDFYNLREYILYRDNYACQLCGKSNVPLEVHHIGFWKGDRTDRPSNLITLCTKCHNPVDHGVNGKLYGIKPVYKPLKAATFMTTVRWKLVDMLGCAYTYGYMTKLKRIELNLDKTHYNDAFCIVGGTNQRRIEPIYFEQIRRNNRSLEKFYDAKYIDTRDGSTKKGQELFNGRTTRNKNYNTQNLKKFRGQKVSKGRRSIRTQRYSYQPKDIVIYEGRKYTVKGIQNKGSYIKLAELSRPVKTDTVKPYMFRKV

SEQ ID NO: 5337 - protein, 417 aa, unidentified
MYRRQRSSRKRYRQSRFNNRKRSDGWIAPSLEHKKDIHIQTISRICNAMPITNITLEMGNFDTQVLKALEKNRPLPQGTDYQHGERYGIATLREAVFARDKYTCQCCRRTIADGAILHVHHIIYRSRGGTNRMSNLATVCDRCHTPANHKPGGKLYNWKPKLASFKGATFMTAVRWKMYNEVKSKFSDINIHITYGAETKGQRRAFDITKSHVNDAFVMGQFYPKHRSRPVCYKKKRRNNRCLEKFYDAKYIDSRDGKKRSGQELFNGRINRNHKKDSENLHQYRQQKVSAGRRTIRKQHYSIQPHDIVVFNRQQFETSGCHCNGARAILLPQKNLLLSKNLASTNMLVDISNQILRKEKGVRIPPTPDYEKYFFVGWGFLRRIQMKYSYICLFCAKIYLSECRRQLFIYYYNGIVI

SEQ ID NO: 5338 - protein, 418 aa, unidentified
MTSYAFVLDANGKQLAPTKEQKAWFFIRKKRASLVSKYPIVIQLMKEIPEKEICQDEIRCGIDDGGLHVGIALVQKCKTKNKVVFKGTMEQRNDVKHLMEVRRGYRRYHRYHKRYRQARFDNRKSSKREGRIAPSILQKRQATIRVIHWLNKWINITNYWLEDVSVDIRALTDGYQSYRWQYQKSNRLDENIRKAAILRDGGKCMECGKSNCRLEVHHIKPRRRNGSNTLDNLITLCESCHQKTEGQEELYMDRYFSLLKSSDNKNLNYAQHVMIGKMWLRKQLSGLGVLYLTSGGDTANKRIDWNIEKSHANDAVCITDLRPDTCDVKEWTMKPMRRQSKAKTDHVLGIHHRDLVEYTFKNGETHRGYVTALYPEQKAINFQSPTKHCKKLMRESANYYGNIQKSIGLRMRAKHTCL

SEQ ID NO: 5339 - protein, 423 aa, Arthrospira sp.
MSNHIFVLDTNRKPLTPCKPGVARSLLKAGKASVFRRYPFTIILNKEVDANPEPLELKLDPGSKVTGIALKQGNHIIFAAELQHRGQQIKEALLSRRQLRRSRRNRKTRYRPARFLNRTRSKGWLAPSLQHRVDTLMTWVHRFRRLAPVGRITQELVRFDLQLMENPEISGVEYQQGELQGYEIREYLLEKWGRTCAYCGAQNVPLEVEHIQPRSKGGSDRVSNLTMACHSCNQAKGNGDIRDFLSGQPDVLSRLLRQAKSPLKDAAAVNSTRWALFKALKATGLPVTTGTGGQTKFNRLRLNLPKAHWLDAACVGPVESLEVLTSKPLLILAKGHGTRQMCGTNKYGFPNRHRSRRQIHKGFQTGDMVTALVTAGKKIGSYLGRVLCRASGSFDITTASVRVAGISHKYCQPIHRKDGYAYA

SEQ ID NO: 5340 - protein, 507 aa, unidentified
LKKEAAGHRQGKDCRPVRAGMPDGRRKPERKHMVAVVTSTGKPLMPTSAYRARKLLKKGRAVIFKYRPYFTIQLVDRADGEVQEVEYKSDTGSVHVGISVCTEKKELLSEQRDLLENEPEHHNDRKKNRRTRRNRKRYRKPRFDNRKKKPQEGHEKWLPPTLLHKMEVQVRLFREFCRVVPVTSACFEMGKFDTQALKAVSKGEPVPEGEGYQKGERYGTDTLRAAVFLRDGHTCRFCGRSVKDGAILHVHHVGYWKGDRTNRPANLASACEQCHTPANHGKNGILYGKEPEFKTLKDASYMTSVRWIMLDEIKKAAPGVQVSVTYGVTTKRKRQELHLPKSHVNDAFSMASFHPKKRSDTEYWKKIPRHDRVLQKFYDAIYLDTRDGSEKKGSELSNGRISRNHKKDSENLHQYRGHKVSKGHNSIRRGASSLKPGSIVMYKGEKMTVHGTHTRYVKGKDGKTAKKVNVQFTCPASDGKKSASLEKCTPVSRVYNTGWKRYWPDKK

SEQ ID NO: 5341 - protein, 384 aa, unidentified
VVTVQRSTQHLLFGRVFIRRNLFMVYVISQDGKPLMPCSNPIARLLLKQGKAKVKKREPFTIKLTYEAPNYTQDLTLGVDTGSGTIGTAVSKDNGDIVYMSEVIVRNDITDKMTQRVKYRRNRRNRKIRYRKARWLNRANSIKNDRFSPTMQSKLHSHVKEIEYIKSILPITEMVFETGQFDTHFMKNPSLANPKVKHWGYQKGTNYGFENTKAMVLNRDSYTCQCCKGKHKDSKLEVHHIVFRSQGGSDEESNLITLCHTCHKDLHSGKINPKLSGKVKGNLKYATQMNSIRKQLFRLYPNAIETFGYVTKANRLHLGVNKEHYYDACTIATQGNAFNVKSNLYKKKCVSDGDFQKTKGVCSEQPIVTDKICGLDCQHFFRQI

SEQ ID NO: 5342 - protein, 423 aa, Clostridium sp.
LRVYVINQRKEPLMPTSQRKARVLLKQGKAKIHSYNPFTIQLLSSTGETKQDITLGVDAGSKTIGISATTKKVELYSAELELRTDIVELLSTKKQYRRSRRNRKTRYRKSRFLNRVKSKNKGWLAPSIENKIQGHFRIIEKVNQLLPISETIVEVASFNIQKINNPTIQGKEYQQGNQLDFWNVREYVLFRDGHKCQGKKNCKGKILNVHHIESRKVGGNAPANLITLCEDCHNDYHSGKLNKTFKRGKSFKDSTFMGIMRWTFYNRLKEIYPNVKMTYGYITKTIRITNKLEKAHRIDARCISGNSLAKESDVWYHVKQVRKKKRSLHEAVARKGRKTPNRQSKRNSKNTKEIIYKEKKWCLYDKVKVNGGIGFISGFSGNMVYVQDIDGKYIQLSPKYKQISTDNIELINRNNNYICECIA

SEQ ID NO: 5343 - protein, 413 aa, unidentified; identical to SEQ ID NO: 2605

SEQ ID NO: 5344 - protein, 536 aa, unidentified; identical to SEQ ID NO: 2718

SEQ ID NO: 5345 - protein, 427 aa, Enterococcus sp.; identical to SEQ ID NO: 2410

SEQ ID NO: 5346 - protein, 465 aa, unidentified
MSTCVCVLSNSGERLMPTFRLGKVRHLLKDGKAKIVKHHPFTIQLLYDSETNIQPIEICEDVGYNYIGISVKSQSHEYVSAQYDTLQDEKACHDSCRKYRRTRRNRLRYRKPRFDNRKRSEGWLAPSLRHKKELNVNVIKMYCEVVPITHATVEVGSFDTMLVKAIEEGKATPEGADYQKGPRYNLATLREAVFYRDNYTCQVCGREASEGAILHVHHMFYWKGRHGNSLSELITVCEKCHTPANHQKGGKLYGFGENVKFADLSGAAFMNTVRWQIVNELYAAFGKPFVTFTYGAMTKEKRIALHLEKSHNNDAYAMGEFHPNCRCTFEHYEKVRRNNRILEKFYDSRYIDIRTGEIATGKELFNGRINRSHKKDSENLHKYRGKRIRKGYRALRRKKVALNPGDLVSLNGEILTVHGTHTKKNGSVNVEFKTPSKSGKKSTSLKKLKIIKTISPMRSAWDKVS

SEQ ID NO: 5347 - protein, 431 aa, unidentified
MPNKVYVINKHGRPLMPCSPAKARHLLDDGKAKVKKRTPFTIQLVYGSSGYTQEVILGVDAGSKTIGMSVSTTKEELLSAEVKPRNDVVDLLSTRREFRRARRNCKTRYRKPRFDNRVRSKHKGWLAPSVEVKIQEHITTIRRVYGILPVSKVVVETAEFDLQLLKAIADGKPVPQGEDYQKGEMYGHYNVRQYVLWRDDYTCQCCGAHATKKKEVRLHVHHLESRKVGGDAPDNQVTLCESCHEKLHKGLIAEKDFKKRKRKSTRDATFMGIMRKTLMQRLYSELPIPVIETRGYITKATREKLLVLPKSHTNDALAIAQGKRGFNVGYLPEIAQIDKIYTIRPVRHHNRQLHKAAILKGGIRKSNQAGKYVFGYRLFDKVQFNGQDCFIWGRRTTGIFTIKTINGKMIKDGISFKKLKPVEKSTSYLIA

SEQ ID NO: 5348 - protein, 413 aa, unidentified
MTSYAFVLDANGKQLAPTKEQKAWFFIRKKRASLVSKYPIVIQLMKEIPEKEICQDEIRCGIDDGGLHVGIALVQKCKTKNKVVFKGTMEQRNDVKHLMEVRRGYRRYHRYHKRYRQARFDNRKSSKREGRIAPSILQKRQATIRVIHWLNKWINITNYWLEDVSVDIRALTDGYQSYRWQYQKSNRLDENIRKAAILRDGGKCMECGKSNCRLEVHHIKPKRRNGSNTLDNLITLCESCHQKTEGQEELYMDRYFSLLKSSDNKNLNYAQHVMIGKMWLRKQLSGLGVLYLTSGGDTANKRIDWNIEKSHANDAVCITDLRPDTCDVKEWTMKPMRRQSKAKTDHVLGIHHRDLVEYTFKNGETHRGYVTALYPEQKAINFQSPTKHCKKVNARKCKLLWKYSKIYWFENES

SEQ ID NO: 5349 - protein, 498 aa, unidentified
MPTTRCGHVRRLLKEQKARVVTSKPFTIQLLYETNDVVQPLYLGIDPGRTNIGVAVVKTDGTAVFTAHLETRNKEIPKLMQGRKKARRARRTNGRRCRRQRRAKANGTISKKCVKQTTAQNGSVSKRAKEIGVIKRHLPGCEKDVLCIGIKNKEAKFNNRTRPTGWLTPTANQLLQTHVNLVKKIQKFLPISDVVLEVNKFAFMQLDNPNIQKWQYQQGPLYRKANLEKAVSEMQEHHCLFCKKKIDHYHHVVPQHKNGSNTIDNIVGLCTEHHDLVHKETAWQEKLAKKKTGLNKKYGALSALNQIVPVLTKELGSLFLKHFYVTTGKSTYDYRAAHGVSKDHWLDAYCIACSVLPNDVCDSNINSHVPYELKQFRRHDRRALHKENINRVYTLNGKKVATNRHKAIEQTTDSLEEFRQNHPNDVCKLKVKEHHPEYRNPKRNFPGCVFLVGKHTHVMQGTSGSHNGKADGYYDTNGNSYPFGKCKFVAKNEGIVFA

SEQ ID NO: 5350 - protein, 427 aa, unidentified; identical to SEQ ID NO: 2980
  source 1..427: note = Cyanobacteria bacterium UBA11153

SEQ ID NO: 5351 - protein, 450 aa, unidentified; identical to SEQ ID NO: 2935

SEQ ID NO: 5352 - protein, 412 aa, unidentified; identical to SEQ ID NO: 3973

SEQ ID NO: 5353 - protein, 427 aa, Anabaena sp.; identical to SEQ ID NO: 5141

SEQ ID NO: 5354 - protein, 456 aa, Lactobacillus sp.
MNLTPWSGLLYLTENYSSKEGIMQNRVFVINRQGEPLMPCKQQKCRKLLQGGRAKVIKKEPFTIQLLFGSTGYKQPISIGVDSGQHHIGLAVTSQDKVLFQGEVSLRQDVKKLLDTRRSYRRGRRNRNTRYRPPRFLNRAKPAGWLPPSVANKVQHNINWIQRIQAVLPKAELHIEVGKFDMAKMVQPGITGLGYQQGDLYGYETTKQYVLDRDNYTCQICRGKNKDPKLKIHHIIYRSNGGTNQVSNLLTVCASCHTQANHQPGGKLFVLQAKKFQSHRSLKGATFMNILRRRLFTAFPEAKFQYGAQTTLDRAKLDLPKAHYNDAVTISGIQKIAQRPTAVVMFHQFRKKKRSLHEATARKGRKTPNRASKRNAKNTKAVSGFHLNDYVQLPDGQKGNISGFSGKTKCFVKAGDGHYLAISSKYKHISLSKLKVIRHQNNWNVTEIKAMTYEMA

SEQ ID NO: 5355 - protein, 424 aa, unidentified
LYTKPLDNIGEGSLPPSGEINLKGMTFMVYVKSIDGKVLMPTSNAKARKLLKQKKAKVVSLRPFVVKLTYKTKTEYTQKLNLGVDSGYSNIGFSVIDAKQEYIAGEVKLLEGMKKRLLEKASYRRIRRSRLRYRKARWNNRVKSKKKGWLAPSLKHKLDTHIKFIDYLKNILPIGKITIEVANFDIQKIKDDLISGVDYQNGDMFGFWNVREFVLHRDGHKCQNPNCKHKDKKEQILKVHHIRYRSEGGSDRPENLITLCSKCHTPANHKKGKFLYDWCVNGKKVRGFKDATFMSMIRWYLVNELKSKHNNVSITYGYITKNHRIQNGIEKSHLNDAFAIAKGTNQARTKDRFLVIQDRLKNRSLEKFYDSKIIDIRTGKKVSGGDLSCGRSTRNKNLNTENLRKYRGVKISKGQRCKCQYIFV

SEQ ID NO: 5356 - protein, 427 aa, Enterococcus sp.; identical to SEQ ID NO: 2410

SEQ ID NO: 5357 - protein, 442 aa, unidentified; identical to SEQ ID NO: 2637

SEQ ID NO: 5358 - protein, 414 aa, unidentified
MPCSPAKARLLLKEKKAIVKRRTPFTIQLTIATGETKQPVGLGVDAGYKHVGLSASTDKAELYASQVELRQDITDLLSARRALRRARRNRKTRYRAPRFNNRIRTKRKGWLAPSVENRINAHLSRIEAVLRLLPVTKITVETASFDMLLLKNPDIAGKEYQEGEQLGFWNVREYVLFRDGHVCQHCYGRSKDPVFNVHHLESRRTGGDSPGNLITLCETCHEALHRGEIALKTKRGHSFRAEAFMGMMRWEVLNRLKASHSELEVNNTYGYRTKHARIVNGIDKSHCADAFCIAGNLGAERLCEFFFQKQTRRNNRQIHKLSILKGGIRKRNQTPFEIKGFRLFDKVACKGEESFIFGRRSSGYFDVRKLDGTRISAGISYKKLRLLEKRRTYLTEIRKEEALPPLPEGRGLRA

SEQ ID NO: 5359 - protein, 426 aa, unidentified
MLVYVLKQNGQPFMPTERFSKVRRLLKEGKAKVVRREPFTVKLLYEPETDVVQECYCGVDTGSRHIGVAVVGNDKVLYQSQTELRDDIKKKMDARRMFRRHRRFRKTRYRKPRFLNRRNSIRKDRYCPTIISKCYGHEREIEFCKKILPVSDLILEVSQFDTQLMEKPWLQEYKWAYQKGINYGYANAREHALVRDKYTCQCCGKKNCRLEVHHIVFRRNGGSDNIENLITLCEDCHKAIHLGEVDLKLKGKRKSTLRYATQMSVIRNMLLKKYPDAIETFGFVTKANRENLGIGKEHYIDACVIASGGLEFEQSGILYQKRCVPKQDRQLCKGIRGERKLPKGKVHGFNRYDKVKYLGDICFVKARRVSGNFTLMDISNNSLDFRDREGKQNPSYKSIKRINARKSILCINKRIERQERFGKVSN

SEQ ID NO: 5360 - protein, 450 aa, unidentified
ARLLLKQGKAFVEQKVPFTIRLNYKTGSTTQLGYLGIDTGSQHIGVSVVREDGTVLHKEEIGLRDSMSKRKLLEAKASLRRGRRYRKTRYRHPKWRPKTKRVYCEVPDRKGRHWQKKKITFTSKRPKGWLPPSLQSKTDHHIRWIKKLQDLLPEGYRLSIELGRFDPARMKNPEIHGDLYQKGPQYDYENVRAYVLDRDRYTCQICKKKGGKLHVHHILYRSHGATDDPQYMVTVCSDCHSAQNHLPGGILYQWMQEQKRFSRGLRDATFMNILRKRLIRAFPEAVFTYGNVTKVDREKLKLPKSHGNDATAIALVKTGITAVKDKESVICIQQVRRKKRSLHEETPRKGRKEPNRTAARNNKNTKAVTVTKRQNKKKVSMTGCLFDRVELNGKKGWISGFTGKSCYVKDADDQYLSTSPKYKQVSLSKLRILHHCGNWIIGAKKTLGKG

SEQ ID NO: 5361 - protein, 429 aa, unidentified
LKDGKAKIVKHHPFTIQLLYDSKTNTQPIEICEDVGYNYIGISVKSESHEYVSAQYDTLQDEKKHHDDCRKYRRTRRNRLRYRKPRFDNRKRGEGWLAPSLEHKKQLNIRLIERYVSVIPITRATVEVGSFDTMLLQAIQKGESKPEGTDYQKGPRYNLATLREAVFYRDNYTCQVCGRKIADGAILHMHHMFYWKGRHGYQLDELVTACEKCHTPANHQKGGKLFGFGEDKEFANLSGAAFMNTVRWQIVDALHATYGKEFVTITYGAMTKEKRIILGIEKTHNNDAYAMGDYHPACRCKFRHYQKRCRNNRVLEKFYDATYIDTRTGDKAKGKELFNGRISRNHKKDSEDLHKYRSKKVSKGRRSIRRQRYAIQPYDTVRLENKTYITSGCHNKGTRLLIPANGKSKSVAISKVQVVCHAGAWIQII

SEQ ID NO: 5362 - protein, 413 aa, unidentified
LKVFVLNMRGKPLMPCSPAKARHMLKAGKAFVVRRTPFTIKLTIATGETKQDVTLGVDAGARHVGISATTEKEEVFASEVALRQDITGLLADRLAFRRARRNRKTRYRSPRFNNRVRSKHKGWLASSVENRIQAHMSRIDAVCRLLPVTKIVIEAASFDVQKIKNPTIEGTDYQQGDQLGFWNVREYVLFRDGHVCQHCHGRSRDKILNVHHLESRKTGGDAPNNLITLCETCHKAYHAGKIKLKVKRGQSFRAEAFMGIMRWTLLDRVRKTHPELPVEYTYGYLTKHKRIALGLPKTHCADAFCIAGNLKALRRGDFLFQQQTRKHNRQIHKCSILKGGVRKLNQAPFLVKGFRLFDKVRIGGQIGFVFGRRVRGTFNIRRLDKTVIGTDINCKKLSLLETRKTFLTELRKE

SEQ ID NO: 5363 - protein, 471 aa, Caldicellulosiruptor sp.; identical to SEQ ID NO: 4560

SEQ ID NO: 5364 - protein, 452 aa, Pseudoalteromonas sp.
MGSQPRCEAKLSGREEVEFAVCLKHSYTHNSKEIRAMLAYVLNKHGKPLMPCKAAKARKLLKNGMAKVIKRAPFTIKLLYGSSGHTQHVVAGMDTGSKHVGCAAIANGKVIYQSEVALRTDVSKKMQQRAMYRRTRRNRKLRYRPARWLNRASMRKEGRLAPSLKSKLDSHLREKKQVEAILPISHWKVETASFDIHKITNPIVTGAGYQQGYYNVKAYVLQRDNYKCQSGHKTKHNAKLHVHHKVLRSQGGTDTPSNLIALCETCHNDLHAGKFDLKVKRSKTKHATEIGILKAQLKQCWDFEETFGYVTKFKREQVLGLPKTHYYDAVSICCENGELVQQAKHVLRKRHVASGDYQQIKGVRSEKRIPVGKLFGLKKHDFVQTPQGTGFVKGKRSSGYFALETILGDKVHASANIKKNTVRISARTTTLTQPMEAAIPLGTKVPRGIAVN

SEQ ID NO: 5365 - protein, 413 aa, Blautia sp.
MTSYSFVLDANGKQLAPTKEPKAWFLIRKKRAALVSKYPMVIQLMKEIPEKEICQDEIHCGIDDGGLHVGIALVQKCKTKNKVVFKGTMEQRNDVKHLMEVRRGYRRYHRYHKRYRQARFDNRKSSKREGRIAPSILQKRQATIRVIHWLNKWINITNYWLEDVSVDIRALTDGYQSYRWQYQKSNRLDENIRKAAILRDGGKCIECGKSNCRLEVHHIKPKRRNGSNTLDNLITLCESCHQKTEGQEELYMDRYFSLLKSSDNKNLNYAQHVMIGKMWLRKQLSGLGVLYLTSGGDTANKRIDWNIEKSHANDAVCITDLRPDTCDVKEWTMKPMRRQSKAKTDHVLGIHHRDLVEYTFKNGKTHRGYVTALYPEQKAINFQSPTKHCKKVNARKCKLLWKYSKIYWFENAS

SEQ ID NO: 5366 - protein, 425 aa, Caldicellulosiruptor sp.
MVYVISKDGKPLMPTKRHGKVRRLLKQGLAKVVRREPFTIQLLYDTTTYTQPVTVGVDIGSKVVGVSAITEKQELFSSEVELRQDIRKLLLERREHRRFRRYRKRRYRKPRFLNRRRPEGWLAPSVQWKVDAHIRLVNFVAKILPVTKVVVEVAPFDIHKIVNPTVEGTKYQEGPQKDFWDVREYCLWRAGHKSELSGKKGVLEIHHIIPKSQGGTNNPSNLIVLTVEEHKAIHEGKIKIPRSKLEKVKIFKDASHVSTIGWYIVNRLKYQYEVEITYGSITKAKRVEMGLERTHRNDAFVIAGGNKNVNRVPEWYFGKFFRRQNRSLHKANPIKGGKRPVNTVKEVHGFRRFDKIEYQGGTYIIFGLRSSGYFATGTLSGEKISDSVKYTCLRLVEKAKTLMFERREQRIFLHLAEDGVSCAVL

SEQ ID NO: 5367 - protein, 443 aa, Caldicellulosiruptor sp.
MVFVLNKNKKPLAPCHEAVARKLLKEGKAVVHRVYPFTIRLKELKDTSTFTPNYRLKIDYGSRHTGIAILKNDSEVIFMMQIHHRTDVKEKMDARRSSRRNRRNRKTRYRKPRFLNRKRDEDWLPPTLQSRVNNIETWIKRLCKLCPITTISYENVKFDTQKLRNPEISGVEYQQGTLQGYEVKEYLLEKFNRRCVYCGATNVPLEVEHIIPKSRGGTDRVDNLVIACHECNQRKGNRTAEEFGYPEIQELVKEPLKDCALVNATRWKIYEVLKKTGLPIECGSGGLTKMNRIKLGLPKDHHFDAICVGQSTPERIWFKTKTVLHVTAKGRGTRQMANVNKYGFPVGYRARQKLFFGFQTGDIVKVVVPRGKYKGTWKGTVACRNSGYFDIKDRNGKRIVQGISYKYCRVIQRFDGYSYELEQAKISGTFPLQPAEAGASMCH

SEQ ID NO: 5368 - protein, 424 aa, unidentified
MVLVVDKHKKPCNTISNAYARMLLFKKQAVIHKRFPFTIRLKNDNAVLKDRAYTVKIDLGSRHTGIAIVDDKDQVVMLAEIEHRGHIIKKDLASRRMVRRNRRNRKTRYRPARFLNRTRPEGWLAPSIKSRADNVINFIKKYKKLLHITKVMIENVSFDVAQMTTSTNLVGTAYQQGPLYQNQLRTFIFSRSNNKCVYCGAKATEIDHIIPRSSGGTNSTYNLVASCRVCNQRKSNKTLKEFGKIMNKDYSHLAPKKLPKDAAIVQSARNYMVKEVTKLVADTTLHDAWLTKYNRDQLGLPKEHYYDALSVGNVENYKFLTDKILTISARGRGSRQMCSMDKYGFPRTKPKGSKLVEGFQTGDMVKAIVPKGPKQGEYLGRVAVKSSGYFDIKTKNGLAQSIGYKYCRLIQKNDGYSYNYKERI

SEQ ID NO: 5369 - protein, 451 aa, Erysipelotrichaceae sp.
MSVCVVTPDKNPLMPTSEYRARKLLKSGKAVIFKHKPFTIMLTRVVSENMQPIEYCCDTGYKHIGVSIKSEKHEYFDCQFDMLQDEKKRHDDRRKLRRTRRNRLRYRKPRFSNRTASKKKGWLAPSLRNIRDQHIRIFEQFLEVMPIASATFEMGSFDVHAMHEFEATGTVLKGEGYQKGPRYGMNTLRKAVFYRDGYECQVCGKTTDEGAILRAHHIGFRTGDHSDRMSNLLSVCTKCHTPANHKPGGKLYDLKPKVRPLNGAAFMNAVRWQMLSMLKSAHPDVEWHMTYGAATQEARRVLCLGKSHANDAYAMGRFHPKHRTPFMHFKKLRCNNRILEKFYDAKYTDARDGKKKKGAELSCGRTNRSESRHSKKNLRIYRKQKVSKGRRVIRRRHYALRPGDIVVVDSKKHRTKGVHNQGASIALDTGKSVSVKKVEKIIHAGGYMLVK

SEQ ID NO: 5370 - protein, 338 aa, unidentified
LLCKDEIRCGIDDGGLHAGIALVQKCQTRNKVVFKGTIEQRNDVKHLMDVRRGYRSYHRYHKRYRPARFNNRSSSKREGRIAPSILQKRQAAVRVINQLNRWINITNYWLEDVAIDIRALTDGYKPYRWQYQKSNRLDENIRKAVILRDGCRCMECGKSNCRLEVHHIKPRRLKGSSTLGNLITLCTECHQKTEGVEELYMNKYFALLNSSDNRNLDYAQHVMIGKKWLREQLSNLGMLYLTNGGDTANKRIDWDITKSHSNDAICITDLRPDTCEIKEWVIKPMRRQSKAKTDNVLGIKHRDLVEYTFRNGETHRGYVTALYPEQNAINFQSPIKHC

SEQ ID NO: 5371 - protein, 425 aa, Nodularia sp.; identical to SEQ ID NO: 3113

SEQ ID NO: 5372 - protein, 412 aa, unidentified; identical to SEQ ID NO: 3155

SEQ ID NO: 5373 - protein, 471 aa, Caldicellulosiruptor sp.
LVIFTVDKHGRPGHPTRRFDMVRKLVKQGRAKIIGGGTSGKPPVVMFLDREFDYTKTIERRLFVVLDPGYHHIGFAVCELRWGVLIVYCIGVLETRIPEIKDLMTKRRGYRRNRRYHSRCRKKRMSKRQSRVLTKFKAPRNVRTKDRTNATLRHGIETHLNLYKKLLKFFPFPVEQFVFVMEDNIFDVRTMTWGKTDGTGYQKSPRVPAEKKCILCGTEDNLQKHHLIQRKCGGTDVQENVVYLCRDCHEDVHAGRVYIPVDGVKQWRALGTVNAIIGRLREIPWLKFVPASDVVQMRKRLGLEKGHANDALATAAVFCNCTETDRTHMIELNMVKFRRHNRARIHAVRDRLYKVDGKIVAKNRRKRTDQKEPSFADISPLPPEIQRKLKVYPGTKILNPLRKEMPTIAGEVWVHEPTGKRFVTTGVVSQKYLYSPQLEKIVGKTYVKPEECKRILRNEGIVVMYNSLYHS

SEQ ID NO: 5374 - protein, 415 aa, unidentified
MVYVQNVHGNPLMPCKEAKARKLLKNNRATVIQRTPFVIRLNFECENQTQPITLGVDAGSKHVGLSATTEKEELYAAEVELRTDIVDLLSTRRQYRRTRRNRLRYRPARFDNRVHSKNKGWLAPSIEQKIQSHLKAVEDVHRLLPISKIIVETASFDIQKIKNPDISGKEYQEGEQLGFWNVREYVLWRDDHVCQNCKGRSGDKILNVHHIESRKTGGDAPNNLITLCDTCHDKYHKGESELHIKRGQSFKDAAFMGVMRWAFYARLKEQYSDVHITYGYITKHIRISNHLEKDHCVDARCISGNPLAKPLGYYYYQKKVRCHNRQIYKVNFLNGGKKKRNQASYLVHGFRLFDKVLYAGRECFIFGRRATGYFDLRLLTGERVHSSASYKKLQLLEPKRPFLTERRMRQFLPSL

SEQ ID NO: 5375 - protein, 545 aa, Actinomadura sp.; identical to SEQ ID NO: 4885

SEQ ID NO: 5376 - protein, 430 aa, unidentified
MPSPTKITPKGRYPEMENRIEYCFVVDKNNRPLTPTKVNKGWYLVRKSRAKLKSKYPMVIQLEKEVKSDEDDESHIVCGIDDGSAHVGLAIVQKCPTKNKVVFKGTIEQRQDVKHLMDVRRGHRRYHRYHKRYRQARFNNRSSSKRTCRLAPSIKQKKDAILRVLYQLNKWVNIQEYHLEDVCIDIRALTDDYKPYRWQYQKSNRLDENLRKATILRDECRCQECGKSNCVLEVHHIRARKYGGADTIGNLITLCSGCHQKTEGRERDFEDRYFNMIKSKPKRFDYAMHVMQGKTYLREKISELGSLHLTNGGETANKRIEWNMEKSHGNDAICVTDCIPDNCDVKEWIIKPMRRKSKAKTNNLLGIRHRDLVSYTYKNGETHTGYVTALYPEQLVLNFQSKTKHCKKVNARKCRLLWKFNKIYWLEQCV

SEQ ID NO: 5377 - protein, 410 aa, unidentified
YDSKTNKQPIEICEDVGYNYIGISVKSESHEYVSAQYDTLQDEKEHHDDCRKMRRARRNRLRYRKPRFDNRKRSEGWLAPSLEHKKQLNISLVERYVSVIPITHATVEVGSFDTMLLQAIQKGETKPEGADYQEGPRYNLATLREAVFYRDNYTCQVCGRKITDGAILHMHHMFYWKGRHGYKLDELVTACEKCHTPANHQKGGKLFGFGEDKEFADLSGAAFMNAVRWQIVNALHTTYSKEFVTITYGAMTKEKRIALQLEKSHNNDAYAMGDFHPVHRCGFRHYQKRRRNNRVLEKFYDATYIDARTGNKAKGKELFNGRISRNHKKDSENLHKYRSEKVSKGRRSIRKRRYAIQPYDTVRLKGKTYITSGCHNKGTRLLIPVNGKSKSVTISKVQVVCHAGPWIQII

SEQ ID NO: 5378 - protein, 443 aa, Caldicellulosiruptor sp.; identical to SEQ ID NO: 2385

SEQ ID NO: 5379 - protein, 418 aa, unidentified; identical to SEQ ID NO: 4424

SEQ ID NO: 5380 - protein, 471 aa, Caldicellulosiruptor sp.; identical to SEQ ID NO: 3268

SEQ ID NO: 5381 - protein, 407 aa, Succinatimonas sp.
MVYVLNCKGVPIMPTTRHGMVRRLLREHKAKVVKRCPFTIQLSYECANITQLITLGVDTGYENVGISACTEKKVLFEAKAKIRTDIVKLLSARKEARRTRRNRKTRYRKARFLNRGIANGWLPPSIRAKVESHLRLVAKAHEILPIGKIVVEIASFDIQKIKNPEIKCAEYQQGDQLGFKNVKAYVLARDGCTCRCCNGKSKDKVLRVHHLESRLIGGDAPNNLVTLCDSCHTKFHKGLISLDDIKRGKSFKAETFMGLMRNFFFKELCNKYPCVKCTYGYITKHLREKYHLKKDHHVDARCICGVPQALPSDVYLMKKVRCHNRQIHKFTTLKGGRRKLNQAPYTVKGFRLFDKVKVGDRVGFIFGRRTSGAFDIRTVYGERINGSISYKKLQLIETRKIWLIEKC

SEQ ID NO: 5382 - protein, 442 aa, unidentified; identical to SEQ ID NO: 3161

SEQ ID NO: 5383 - protein, 471 aa, Caldicellulosiruptor sp.; identical to SEQ ID NO: 4560

SEQ ID NO: 5384 - protein, 415 aa, unidentified
MVYVLDKNGQPLMPTDRHRKVRLMLQSGQAKVIKRCPFTIQLNYDSGHQTQEISLGIDAGSKHIGVSATTKIKVLYEADVELRNDIVDLLSSRRELRRGRRNRKTRYRQAKFNNRRRGNGWLAPSIRQKIGTHLTVVENICKMLPISRIMVETASFDIQKIKNPDIQGAEYQQGDQLGFWNNREYVLFRDNHTCQCCKGKSKDKILNVHHIESRKTGGNAPNNLITLCEICHTGYHKGAIQLPKTVKRGMRFKDAAFMGIMRWAFYEALKQQYEPVALVHNTYGYITKHTRIEHNLPKEHYVDARCISGNPDAFPNGEYYYQKKVRCHNRQIHKLTILKGGIRKQNQATYLVKGYRLFDKVSYQGKGYFVFGRRQSGFFDIRTLSGEKVNKGSLSCKKLKFIATRTYYLTERRAV

SEQ ID NO: 5385 - protein, 475 aa, unidentified
MVAVVTSTGKPLMPTSAYRARKLLKKGRAVIFKYRPYFTIQLVDRADGEVQEVEYKSDTGSVHVGISVCTEKKELLSEQRDLLENEPEHHNDRKKNRRTRRNRKRYRKPRFDNRKKKPQEGHEKWLPPTLLHKMEVQVRLFREFCRVVPVTSACFEMGKIDTQALKAVSKGEPVPEGEGYQKGERYGTDTLRAAVFLRDGHTCRFCGRSVKDGAILHVHHVGYWKGDRTDRLANLASACEQCHTPANHGKNGILYGKEPEFKTLKDASYMTSVRWIMLDEIKKAAPGVQVSVTYGVTTKRKRQELHLPKSHVNDAFSMASFHPKKRSDTEYWKKIPRHDRVLQRFYDAVYLDTRDGSEKKGSELSNGRISRNHKKDSENLHRYRGYKVSKGHNSIRRGASSLKPGSIVMYKGEKMTVHGTHTRYVTDKDGKTVKKVNVQFTRPASDGKKSASLKKCTPVSRVYNTGWKRYWPDKK

SEQ ID NO: 5386 - protein, 431 aa, unidentified; identical to SEQ ID NO: 4306

SEQ ID NO: 5387 - protein, 470 aa, unidentified; identical to SEQ ID NO: 2825

SEQ ID NO: 5388 - protein, 443 aa, Oligella sp.; identical to SEQ ID NO: 3678

SEQ ID NO: 5389 - protein, 406 aa, unidentified
MPCSSRKARTLLNNKKACVVKRTPFTIKLLHGSAGYKQPITLGVDAGSKHIGLSVSTETHEIYREEFAPRNDVVDLLSTRREFRRARRNRKTRHRAPRFNNRVHSKHKGWLAPSVEVKIQEHITVIKHVCQIMPISLVRVETAEFDTQRLKAMIAGKPLPVGTDYQLGEMYDEYNVRQYVLKRDNYTCQCCGAHATKTKQVKLHVHHLESRKVGGNAPNNLITLCPICHKAIHEGKKALGKKKRGKPLRDAAFMGIMRKTLLARLREELSIPVQQTYGYVTKMLREKNNLLKSHMNDALCIAKHPKAAPCENCYRSKAVRHHNRQIHKATILKGGIRKNNQAPYIVKGFRLWDKVLYNRQECFISGRRATGYFALKKLDGTVVTTGASYKKLRLLETTKNYLRERM

SEQ ID NO: 5390 - protein, 415 aa, Bacillus sp.
MRVFVKNLRGEPLMPCSNRKARLLLKQGKAKIIGYTPFTIQLQYATGETVQSVAIGVDSGSKYVGIAITTEDKVLAKGTIELRQDVKENLTMRATLRRSRRQRKTRYRKARFLNRKKREGWLPPSIQSRMHNQIHWIEIFRSLLPSPKVIVEVGKFDAQKLKNSDIQGKEYQQGDAFGFWNTRYYVFTRDHYTCQICKKKGGILHTHHIIERCSGGSDMADNLVTVHEECHQKFHQGTIKHIFKKPKQYKETAFMNILRLQIMNRLGCEITYGSYTTPKRKELRLSKTHYNDAIAITTPTKLQEYEQSGEFRIKQFRKKKRSLHESTARKGRKTKNTTAKRNNKNTPKVHGIYLGDKVKVFGQVGFVTGFTGKMMYVQDIDGHYLQNPSKSYKQVKISDIECIHHNNNWLFLQIS

SEQ ID NO: 5391 - protein, 424 aa, Halobacteroides sp.
MEVAEMPNKYAFVLDSKGKLLDPTKSKKAWYLIRKGKASLVEEYPLIIKLKREVPKDQVNSDKLILGIDDGAKKVGFALVQKCQTKNKVLFKAVMEQRQDASKKMEERRGYRRYRRSHKRYRPARFDNRSSSKRKGRIPPSILQKKQAILRVVNKLKKYIRIDKIVLEDVSIDIRKLTEGRELYNWEYQESNRLDENLRKATLYRDDCTCQLCGATETMLHAHHIMPRRDGGADSIYNLITLCKACHKDKVDGREYQYKDQFLDIINSKELSDLKSASHVMQGKTWLRDKLSKIAQLEITSGGNTANKRIDYEIEKSHSNDAICTTGLLPVDNIDDIKEYYIKPLRKKSKAKIKELKCFRQRDLVKYTKRNGETYTGYITSLRIKNNKYNSKVCNFSTLKGKIFRGYGFRNLTLLNRPKGLMIV

SEQ ID NO: 5392 - protein, 470 aa, Acidithiobacillus sp.; identical to SEQ ID NO: 3952

SEQ ID NO: 5393 - protein, 471 aa, Caldicellulosiruptor sp.; identical to SEQ ID NO: 3268

SEQ ID NO: 5394 - protein, 440 aa, unidentified
LSNVFVLDTNKQALNPVHPGRARRLLSLGQAAVFKRYPFTIILKSAASSPHVWPLRVKLDPGSKTTGLAIVNDASGEVVFAASLIHRGDAIRKRLEKRRAARRSRRQRKSRYRQSRFDNRGTKKKGWIAPSVQSRVCNVITWVKRLVRLCPITAISQELVKFDLQQMDHPEISGVNYQQGTLSGYEVREYLLDKWGRQCAYCGAKDVPLEVEHINPRSKSGDDRVCNLTLACEPCNTRKGTQDIRVFLAHQPELLAKLLAQAKSPLKDAAAVNITRWVLHAQLKAFGLPLECGSGGRTKFNRITRGLEKTHWCDAACVGASTPEVLHIGQVRPLSIAAYGHGRRQMCLMNKSGFPRTNPKQKKFKHGFRTGDLVKAVVPPHFKHAGTHVGRMSAKASGAFTIATAGGTVTDIGKKYCRMLQRADGYGYTQKGEVAFPPVP

SEQ ID NO: 5395 - protein, 415 aa, unidentified
MVYVLNINGAPLMPTDRHGKVRRLLKTKKAKVVKRTPFTIQLLYVSTEYTQPLTLGVDAGSKHIGISVTSSNKEVYCGQVEPRQDVSKHLDARRKVRRSRRNHLRYRKPRFNNRVASKHKGWLAPSVECKINTHIKVIENITKILPITNIIVEVAEFDTQKLLNPDIQGVEYQQGPLYQSNLRQYVLARDNYTCQWCKGKSKSKILHLHHWNYWNNDHSNKPSSLITLCDVCNDSKNHKENGFLYGWQPKITNNLKDAALMNCMRWALYNRLKEIYPNVKLTYGYITKTTRSEHNIPKSHVNDALCITGNSDVIRMDTMYLSKKNRVHNRQIHKANKLPKGRLKLNQAPYIVKGFRLNDKVLYNGTICFITGRRKTGYFGLKDIEGQTLSNSAKWKDLTLLEKAKYYSTERISRS

SEQ ID NO: 5396 - protein, 442 aa, unidentified
MSTSVFVLDKKHRPLMPCRPARARRLLRAGRARVVKRFPFVIRLVDRTVEQSEVQPVLIKLDPGSRETGAAVVRDDGKKRHHALAFFVIEHRGGAIRDALKARSAFRRRRRSQNLRCRSPRFLNRVKPKGWLPPSLRHRVETTLSFVRRMCRYLPVSGIAAELVKFDSQKLQTPEVSGIEYQQGTLFEYEVREYLLEKFGRKCVYCGAEGVPLNIDHVVPRAKGGSNRVSNLVLACVSCNQKKGARSLEDFLKGKPEVLARVRRELKTPLRDAAAVNATRWVLFNELKATGLPVETGSGALTKFNRHAFGVEKEHWLDALCVGRLNGVVTRKGLNVLEIRCMGRGSRQRTRLTKYGFPRGYLMRQKCVHGFATGDMVEANVPKGKKAGLWRGRVAVRVSGSFNIQTPKGVIQGVGWKHCRLISHNDGYGYAWLGHAPHSSPA

SEQ ID NO: 5397 - protein, 364 aa, unidentified
MSASTTKEELLSAEVKPRNDVVDLLSTRREFRRVRRNRKTRYRKPRFDNRVRGKNKEWLAPSVEVKIQEHITAIKRVCYILPVSKVVVETAEFDLQLLKAIEEGKPVLQGEDYQQGEMYGHYNVRQYVLWKDNYICQCCGAHATKEKEVRLHVHHLESRKTGGDAPGNLVTLCDSCHEKLHKGLIAEKDFKKRKRRSTRDATFMGIMRKTLMQRLCSELPIPVVETRGYITKATREKLLVLPKSHTNDALAIAQGKRGFNVGYLPGIIQTDKIYTIRPVRHHNRQLHKAAILKGGIRKSNQAGKYVFGYRLFDKVQFNGQDCFIWGRRTTGIFTIKTINGKMIKDGISFKKLKLVEKSTSYLIA

SEQ ID NO: 5398 - protein, 447 aa, unidentified
VPAYRIKHITKKEAPYMVYVLDIDGQPLMPTSRHRKVRKLLNSHLAKVVKRCPFTIQLLYQSTKETQPVSLGVDAGSRHIGLAATTEQKVVYQEELVPRNDVVKLLSARRALRSSRRSRKTRYRKPRFNNRVHSKHKGWLAPSVEVKIQEHITAIKRICQILPISDIHVETAEFDLQRLKAMEEGRPLPVGTDYQLGEQYDFYNTRQYVLHRDEYTCQCCGTHDNNVKLHVHHIESRQTGGDAPNNLITLCEHCHKLLHAGKTILPKGKKRGKSYRDATFMGIMRKTLLERLKKEIDVPVEGTYGYITKYWRERAGLEKSHINDAICISKHPYARPLETYYLTKAVRHHNRQIHKTKFSKGGIRKRNQAPYLVKGFRLFDKVLYQGESYFIFGRRITGYFDIRTLNGTKVNKGSTSYKKLRIQDTTEAYLTEVRAIPHMNEFTCVLA

SEQ ID NO: 5399 - protein, 444 aa, Fervidobacterium sp.
MPTKRHGKVRRLLKQGLAKVVNREPFTIQLLYETTSYTQPVTVGIDIGSKTVGVSAVTDKEEIFSAEVQLRQDIKKLLLERRQHRRFRRYRKTRYRKPRFLNRRKEDGWLPPSLQWKVDAHVRIVNKLSKIIPITKVVVEVAPFDIQKVQNPDIEGEDYQNGPQKGFADVREYCLWRAGYKSELSGKTGILEVHHIIPRSEGGTDTPSNLIVLTVEEHKMLHEGKIKIPKSRLEQIKVFKHAAHVSTIGWHIVNKLRQNYHVEITYGSITKERRDMYGLEKSHRNDAFVIAGGSIQKRANEWYFGRFFRRQNRSLHKANPIKGGRRPINTVKQVNGFIRFDKVECEGEIGIIKGLRSSGYFSISSLSGEKISDSVKYTKLRLIERAKTLMFERRERATCSWLKPRVSVARFHEIKTAHSRSFKRSTICFTMDNWFSYFYAYTAH

SEQ ID NO: 5400 - protein, 430 aa, unidentified; identical to SEQ ID NO: 5210

SEQ ID NO: 5401 - protein, 428 aa, Enterococcus sp.; identical to SEQ ID NO: 4335

SEQ ID NO: 5402 - protein, 459 aa, Tolypothrix sp.; identical to SEQ ID NO: 3010

SEQ ID NO: 5403 - protein, 422 aa, Petrotoga sp.
MLVYVLNKHGKPLMPCKPSKARKLLKEGKAKVVRKEPFTIQLLYGSSGYKQPITLGVDAGSKTVGLSATTENKELFAAEVEIRDDIPKLISQKRQYRKGRRFRKTRYRKPRFLNRVHSKNKGWLAPSVEHKIKSHIKLIDLVHSILPITKIVVEVANFDIQKIKNPYIEGKQYQQGEQLDFWNVREYVLRRDNYTCQHCKGKTKDKRLNVHHIESRQIGGNAPNNLITLCETCHKDYHDGKIKLNFKRGQKFKDATFMGIMRWTLYNRLKTLYPNIHLTYGYITKNTRIQNGLPKTHRIDALCISGHPQAKQLEHYYHIKEVRRHNRQIHKAKILKGGIRKLNQAPYLVHGFRLFDKIRYNGIECFIFGRRSTGYFDIRKVDGTVIHRSAKSKDLILVNKAKTLLWERRENSAFLSPLPYLP

SEQ ID NO: 5404 - protein, 423 aa, Arthrospira sp.; identical to SEQ ID NO: 3079

SEQ ID NO: 5405 - protein, 414 aa, unidentified
MPCSPAKARLLLKEKKAIVVRRTPFTIQLTIATGESKQPVSLGVDAGYKHVGLSASTEKAELYASEVELRQDITDLLSARRALRQSRRNRKTRYRAPRFDNRIRTKRKGWLAPSVENRINAHLSRIETVIRLLPVTKISVETTSFDMQLLKNSDIAGKEYQESEQLGFWNVREYVLFRDGHVCQHCHGRSKDPVLNVHHLESRRTGGDSPGNLITLCETCHKELHRGEITLKAKRGQSFRAETFMGIMRWEVLDRLKASHPKLEVQNTYGYRTKHARIVNGIAKSHCADAFCIAGNLGAERLGEFFFQKQTRRNNRQIHKLSILKGGIRKRNQAPFEVNGFRLFDKVACQGEEGFIFGRRSSGFFDVRKLDGTRISAGISYKKLHLLEKRRTYLTEIRKEEALPPLPEGSGLRA

SEQ ID NO: 5406 - protein, 461 aa, Parasutterella sp.; identical to SEQ ID NO: 3646

SEQ ID NO: 5407 - protein, 462 aa, unidentified
MSVLVIGRNGRALMPTNPRKVRLLLKKKTASVVCRHPFTIQLLYKTGCATQEGCIGIDTGSQHIGVGITCGDRVILKDEHALRSSMEKRSLLATRAVMRRGRRYRKVRYRKPKWRHHTKRMYFEKANRRGQHWRKVKTTTQSPRSKGWLPPSLQSKCDHHFRIIDRYLKYLPDPITRNLVIETGRFDMARMNDPTIHGEMYQRGPMYDAENLRAYIFARDNYQCACCKAKAGTTRKADGTTVKLVAHHILFRSRGATDNPKYIISVCDHCHTTKAHQPGGILYSWMENNKKVARGLRDATFMNILRKRLFARYPQAAFTYGNITAADRKQLRLPKSHANDAVAISLFGKEASTVKNICQTMHYKQIRKSKRSLHEAIPRKGRKNPNTKAVRNKKNTTQVNGFKLWDSVLADGKKLFICSFTGTSAYLIDKNGCYISQPGKTYKQWPLSKLKRLHPNGNWLMA

SEQ ID NO: 5408 - protein, 431 aa, unidentified
MPNKVYVINKHGRPLMPCSPAKARHLLDDGKAKVKKRTPFTIQLVYGSSGYTQEVILGVDAGSKTIGVSALTKKEELFAANVIPRNDVVDLLSTRREFRRARRNRKTRYRKPRFDNRVRSKHKGWLAPSVEVKIQEHITAIRRVCGILPVSKVVVETAEFDLHLLKAIADGKPVPQGEDYQKGEMYGHYNVRQYVLWRDNYTCQCCGAHATKKKEVRLHVHHLESRKVGGDAPDNQVTLCESCHEKLHKGLIAEKDFKKRKRKSTRDATFMGIMRKTLMQRLCSELPIPVIETRGYITKATREKLLVLPKSHTNDALAIAQGKQGFNVGYLPGIVQINKIYTIRPVRHHNRQLHKATILKGGIRKSNQVGKYVFGYCLFDKVQFNGQDCFIWGRRTTGIFTIKTINGKMIKDGISFKKLKPVEKSTSYLIA

SEQ ID NO: 5409 - protein, 512 aa, unidentified
MSTVYVLNKDGKPLMPTTRGGHVRHLLKEQKARVVRTKPFTIQLLYETNDVVQLLYLGIDPGRTNIGVAVVKTDGTAVFTAHLETRNKEIPKLMKKRKNSRRARRTNGRRCRRQRRAKANGTISKKCVKQDTAQNGSVSKRAKKIGVIKRHLPGCEKEVLCIGIKNKEAKFSNRVRPEGWLTPTANQLLQTHINLVKKIQKFLPISDVVLEVNKFAFMQLDNPNIQKWQYQQGPLYQKANLEEAVSEMQEHHCLFCKKPIAHYHHVVPQSENGSDTIGNIVGLCTKHHDLVHKDTEWQKKLAKKKTGLNKKYGALSVLNQIIPALTKELSSLFPKHFFATNGKSTYDYRAAHGVSKDHWLDAYCIACSVLADDVCDNNINSHVPYELKQFRRHDRRALHKENMSRVYTLNGKSVATNRHKATEQTTDSLEEFRQCQPDDVCKLKVKEHYPEYRNPKRNFPGCVFLVGKHTHVMQGTSGSHNGKADGYYDTNGNSYSSGECKFVAKNEGIVFA

SEQ ID NO: 5410 - protein, 423 aa, unidentified
MSNHVFVLDTHKRRLNPVPPGKARLLLDQGKAAVFRRYPFTIILKEAYPDVPVQDLELKVDPGSRVTGIALKQGNKVIFAAELQHRGQQIKDVLLSRRQLRRGRRNRKTRYRQARFLNRTRPVGWLAPSLQHRVLTTLTWVRKFMRLAPISSIAQELVRFDLQLMQNPEISGVEYQQGELAGYECREYLLKKWSRKCAYCGAENAQLEVEHIQPRSKGGSDRVSNLTLACHPCNQSKGNQDVRDFLVDNPDLLNRILKQAKSPLKDAAAVNSTRWALFNALKETDLPVTSGTGGQTKFNRTRLNLPKAHWIDAACVGQVDSLQLLTAQPLLIAAKGHGTRQMCGTDKYGFPIRHRANQKTWFGFQTGDLVCAVVLSGKYAGRWTGRISVRSRPSFKLSGKQVFDVHPKYLEVIHRADGYSYGF

SEQ ID NO: 5411 - protein, 450 aa, unidentified; identical to SEQ ID NO: 2935

SEQ ID NO: 5412 - protein, 438 aa, Lactobacillus sp.; identical to SEQ ID NO: 4646

SEQ ID NO: 5413 - protein, 431 aa, unidentified
MPNKVYVINKHGRPLMPCSPAKARHLLDAGKAKVKKRTPFTIQLVYGSSGYTQEVILGVDAGSKTIGLSASAETEELLSAEVKPRNDVVDLMSTRREFRRARRNRKIRYRKPRFDNRVRSKHKGWLAPSVEVKIQEHITSIKRVCRILPVSKVVIETAEFDLQLLKAIADGKPVPQGEDYQKGEMYGHYNVRQYVLWRDNYTCQCCGAHATKKKEVRLHVHHLESRKVGGDAPDNQVTLCESCHEKLHKGLITAKDFKKRKRKSTRDATFMGIMRKTLMQRLCSELPIPVVKTRGYITKATREKLLVLPKSHTNDALAIAQGKHGFNVGYLPGILQIDKIYTIRPVRHHNRQLHKAAILKGGIRKSNQTEKYVFGYRLFDKVQFNGQDCFIWGRRTTGIFTIKTINGKMIKDGISFKKLKPVEKSTSYLIA

SEQ ID NO: 5414 - protein, 512 aa, unidentified
MSTVYVLNKDGKPLMPTTRGGHVRHLLKEQKARVVRAKPFTIQLLYETNDVVQPLYLGIDPGRTNIGVAVVKANGTAVFTAHLETRNKEVPKLMQDRKKARRARRTNGRRCRRQRRAKANGTISKKCVKQDTAQSKNPSKRAKEIGIIKRRLPGYKKDVLCIGIKNKEAKYTNRTRPEGWLTPTANQLLQTHINLVRKIQKFLPISDVVLEVNKFAFMRLDNPDIQKWQYQQGPLYQKGSLENAVSEMQEHHCLFCDKPIDHYHHVVPQSENGSNTIANIVGLCAEHHNLVHKDAAWQKKLAEEKVGLNKKYGALSVLNQIIPALTNKLSVLFPKHFFVTAGKSTHDYRATHGVSKDHWLDAYCIACSVLPNDTCDKTINSRVPYELKQFRRHDRRALNNENMSRVYTFNGKMVATNRHKATEQTTDSLEEFRQRRPNDVCNLKVKEHHPTYRNMNRNYPGSIFLVGKHVHIMQGIAGSKDGKATTYKDSNANSITASKCKFVAKNSGILFV

SEQ ID NO: 5415 - protein, 402 aa, unidentified
CRRQRRAKTNGTISKKCVKQTTAQNGSVSKRAKEIGVIKRHLPGCEKDVLCIGIKNKEAKFTNRARPEGWLTPTANQLLQTHINLVKKIQKFLPISDVVLEVNKFAFMQLDNPNIQKWQYQQGPLYQKGSLENAVSEMQEHHCLFCEKPIEHYHHVVPKSENGSNTIANIVGLCTEHHNLVHKDATWQKKLAKEKVGLVKKYSALSVLNQIIPALTKEMNSLFPKHFFVTNGKSTYDYRTAHGVSKDHWLDAYCIACSVLPNDVCDSNINSHVPYELKQFRRHDRRVLHKANMSRVYTLNGKTVATNRHKAIKQTTDSLEEFRQSHPGDVCKLKVKEHHPAYRNLNRNYPGSVFLVDGQVHVMQGVSGSHNGKADGYYNTNGNAYPYYKCKFVVKNEGIVFA

SEQ ID NO: 5416 - protein, 442 aa, unidentified
MVYVLNKDGQPLMPTNRHGKVRRLLKTKKAKVIKRCPFTIQLLYDTTNHTQNITLGIDAGSKHIGLSATTKNKVLFEADVELRNDISKLLEARHTFRCSRRNRKTRYRKKRFDNRVSSKHKGWLAPSIEHKIQSHFAMVEKVHRILPVTKIVVETASFDTQLLKAQLEGKPIPQGTDYQNGELAGWNIREYIFHRDNYTCQWCRGKSKDPVLVTHHHAYWKGDHTNKPSSLITLCNTCNDSKYHKKEANRLWGWEPKITNSYKHAVFMGVMRWTFYNRLKEIYPNISITYGYITKNTRIENNLPKAHYVDARCISGHPKAKSSGEYFYYKKVRCHNRQLHKANTLKGGIRKRNKAEYIVKGFRLFDRVEYQNNEYFVFGRRASGFFDIRTLDGQKVNKGSISFKKLKLKETSRTYLIERRMADTGVSLAHLTTEVTSLRQTD

SEQ ID NO: 5417 - protein, 427 aa, unidentified
LRVFVLNKRGKPLMPCSPAKARLLLKEKKAIVVRRTPFTIQLTIATGESKQPVSLGVDAGYKHVGLSASTEKAELYASEVELRKDITDLLSARRALRQSRRNRKTRYRAPRFDNRIRTKRKGWLAPSVENRINAHLSRIEAVLRLLPITKITVETASFDMQRLKNPDISGKEYQEGEQLGFWNVREYVLFRDGHVCRHCHGRSKDPVLNVHHLESRRTGSDSPDNLITLCETCHKALHRGEITLKAKRGQSFRAQAFMGIMRREVLNRLKASYPELKVHETYGYLTKHARIANGIVKSHGADAFCIAGNLGAERLGEFFFQKQTRRNNRQIRKLSILKGGIRKRNQAPFEAKGFRLFDKVACQGEEGFIFGRRSSGSFDVRKLDGTRISAGISCKKLRLLERRRTYLTEIRKEEALPPLPEGRGLRA

SEQ ID NO: 5418 - protein, 462 aa, unidentified
MSVLVIGRNGRALMPTTSRKARLLLKKKTASVVCRHPFTIQLLYKTGCATQEGCIGIDTGSQHIGVGVTCGDRVILKEEHELRSSMEKRSLLVTRAAMRRGRRYRKVRHRKPKWRHHTKRIYFEKPNRRGQHWRKVKTTTQSPRPKGWLPPSLQSKCDHHFRIIDRYLKYLPDSITRNLVIEAGRFDMARMNDPMIHGEMYQRGPMYDAENRRAYIFARDNYQCACCKAKAGTTRKTDGTTVKLVAHHILFRSQGATDNPKYMVSVCDHCHTTKAHQPGGILYSWMENNKKVTRGLRDAAFMNILRQRLFARYPQAAFTYGNITAADRKQLRLPKSHANDAVAISLFRKEVSAVRDTCQTVHYKQVRKSKRSLHEAIPRKGRKNPNTKAVRNKKNTTQVNGFKLWDSVLADGKKLFICSFTGTSAYLVDKNGCYVSQPGKTYKQWPLSKLKRLHHNGNWLMT

SEQ ID NO: 5419 - protein, 456 aa, unidentified; identical to SEQ ID NO: 2773

SEQ ID NO: 5420 - protein, 482 aa, unidentified
LVWNVQAPWDVYPSPTLCGLCLKVLRGRNGDADKKPIPTLTKDENRPSGRTTGLRAEQAEPAGIRKGDTLKVFLLNMRGKPLMPCSPAKARHMLKAGKAFVVRRTPFTIKLTIATGETKQDVTLGVDAGARHVGISATTEKEEVFASEVALRQDITGLLADRLAFRRARRNRKTRYRAPRFNNRVRSKHKGWLAPSVENRIQAHISRIEAVCRLLPVTKIVIETASFDIQKIRNPEVEGTGYQQGDQLGFWNVREYVLFRDGHICQHCRGRSKDPILNVHHLESRKTGGDAPNNLITLCETCHKAYHAGKIKLKVKRGQSFRAEAFMGIMRWTLLDRVRKTHPKLPVENTYGYLTKHKRIALGLPKTHCADAFCIAGNLKALRRGDFLFQQQTRKHNRQIHRCSILKGGVRKLNQAPFLVKGFRLFDKVRIGGQIGFVFGRRVRGTFNIRRLDKTVIGTDINCKKLSLLETRKTFLTELRKE

SEQ ID NO: 5421 - protein, 423 aa, unidentified; identical to SEQ ID NO: 3951

SEQ ID NO: 5422 - protein, 426 aa, unidentified
MSNYVFLIDANKQPMNPIHPAHARKLMEAGKAAVFRRYPFTLIMNRVIENIVTYPLTLKIDPGSKTTGISLVNNRNEVVWGMELEHRGQQIKDTLESRRAVRRGRRQRNTRYRKARFLNRRRVKGWLAPSLMHRVLTIETWVKRLCKFAPIVEIRQELVRFDMQQMENPEISGAGYQQGTLAGYEVREYLLEKWGRKCTYCSKENVPLQIEHIQARANGGSNRVSNLCLACEKCNQKKGTKDIRDFLKSKPDLVSRILKQAKAPLKDAAAVNATRWKLFETLKATELPVTTGTGGQTKFNRSRLGLPKAHWIDAACVGVTESLKVLTSKILRVKATGQGGRQRCQTDKLGYPQKYRPLRPIHGFCTGDIVKTVILKGVNAGTYIARLCPYSNGNGEIYPTSGKKRIGIKLGYVEKPIYRKDGYSYA

SEQ ID NO: 5423 - protein, 471 aa, Caldicellulosiruptor sp.; identical to SEQ ID NO: 3268

SEQ ID NO: 5424 - protein, 443 aa, Oligella sp.
MAVFVLGKNKRPLMPCSEKRARLLLERGRARVHRLVPFTIRLVDRTVADCVLQPLELKIDPGSKTSGLALVRTRQSVNAQSGEITATAHVLNLFELIHRGFQISQALTARSQMRRRRRSANLRYRAPRSLNRTRPTGWLAPSLQHRVDTIQSWVQRIRRYAPVTHLAQELVRFDMQQLEHPEITGVEYQQGELAGYEVREYLLEKWQRQCAYCDATDVPLQIEHIHPKARGGSNRISNLTLACAPCNVKKAAQHITEFLAKDPKRLAKIQAQAKRPLRDAAAVNATRWALLNTLNATGLPVNTGSGGLTKFNRTRLQIPKTHALDAVCVGSVDHVKQWQKPTLVIKATGRGSYQRTRLNRFGFPRGYLTRQKQIHGFQTGDRVKAVVTQGKKIGTYVGRVAVRASGSFNIQTAQSLIQGISHRYCTLIQRGDGYGYSLRTDSN

SEQ ID NO: 5425 - protein, 417 aa, unidentified
MLMAVAVVSRTGVPLMPTSPYRARKLLASGKAEKYGYDPFTIRLTERETGDTQPVELCMDTGYIHIGVSVKSEKHEYLALQIDTLTDEKKKHEKCREKRRNRRSRKRYRKPRFDNRKRDKGWLAPSLKHKKEIHVRAAERICRVVPVTDITMEMGNFDTQVLKAKEEGRPLPQGTDYQQGERYGTATLREAVFSRDNYTCLCCGRTMKDGAYFHVHHIRYRSQGGTDRMANLATVCEKCHTPANHQPGGKLYNWKPEIKSFKGATFMTAVRWQMYREIKEKIPDVSVHLTYGAATKERRRALDIEKSHVNDAFVMGRFHPGHRARPELYIKKRRNNRVLESFYDARYIDSRDGKRKSGKELFNGRISRNHKKDSENLHKYRLRKVSKGKRCIRKKHYLIQPHDILVYCGRKYETAGC

SEQ ID NO: 5426 - protein, 417 aa, unidentified
MFVYVISKDGQPLMPTTRFGKVRRLLRDKKAKVVRSCPFTIKLLYEPETSVVQEVVLGQDTGSKHIGTACVSNDKVLYQSEVTLRDDIKKKMDDRRVSRRNRRQRKTRYRKTRFLNRANSTKKDRLPPSVKSKVQSHIDEIEFCKKILPISKIVLEVSQFDTHLMKNPSLIFEKVKYWGYQKGFDYEYSSRREAVLHRDNYTCQCCGKKHVRLEVHHIIFRIMGGTDDERNLIALCEKCHKLIHDGVLILTKKPRKLNLKYATQMSIIRSQLLKIYPDAIETFGFVTKENRNNLNLSKGHYIDACVIASGGKEFKQSNWLFKRRHIAKQSRRLCKGAHGEKKLPIGKILGFKRFDKVRYLGEICFVKSRKNSGFFTLMDVDNNTIDFRDRGGRAYPSYKLLKRLNTRKGILCISQRI

SEQ ID NO: 5427 - protein, 425 aa, unidentified
MVYVISQDGQPLMPTDRHGKIRRLLKSDKAKVVKHCPFTIQLLYGSTDYTQEISLGIDAGSKYIGISATTQNRVLYESDVELRNDIVSLLSARRQNRRTRRNRKTRYRKPRFNNRISCKKKGWLAPSVRQRVNTHLTVVAKVHQILPVTRIIVETASFDIQKIKNPTISGTDYQQGDQLGFWNVREYVLFRDGHVCQCCKGKSKDKILNVHHIESRKTGGDSPDNLITLCKTCHTGYHRGTIKLPKTIHRGMSFRDASFMGIMRWSFYDELKTLYPDVNLTFGYITKNTRIKNNFPKEHYIDARCISGHPLTVSDETYYYQKKVRCHNRQIHKNTILKGGVRKRNQAPYFVKGFRLFDKVMYQGQECFIFGRRSTGRMDLRLLDRTHINASVSYKKLKLIESRKNYITERRTAVPPTGKSVDFPA

SEQ ID NO: 5428 - protein, 427 aa, unidentified
MSVYVISKDGQPLMPTERFGKVRRLLRDKKAKVIRRCPFTVKLLYEPETKAVQEVVLGQDTGSKCAGTACIANDKVLYQSEVILRDDIKKKMDNRRGARRNRRNRKTRYRKARFLNRANSTRKDRLPPSVSSKVQSHVDEIEFCKKILPISKIVLEVSQFDTQLMKNPVLINEKVRHWGYQKGFNYEYSSRREAVLNRDNYTCQCCGKKRVRLEVHHIIFRSKGGTDDENNLITVCKGCHDAIHNGTLVLTKTPRRLNLKHATHMSIIRGQLLKIYPDAIETFGFVTKENRNNLNLQKEHFIDACVIASGGKEFKQLDLLFKKRRVPRQNRQLCKGIRGEKKIPTGKILGFRRYDKIKYLNEICFVKGRRSRGVFVLMDIDNKTIDFRDRGGRLNVSYKLLERLNTRRSVLCIGQISLNCDKGVKRC

SEQ ID NO: 5429 - protein, 385 aa, Succinatimonas sp.
  source 1..385: note = isolate UBA7006
MVYVLNCKGVPIMPTTRHGMVRRLLKEHKAKVVKRCPFTIQLDYECANITQLITLGVDTGYENVGISACTEKKVLFEAKAKIRTDMVKLLSTRRETRRTRRARKTRYRKARFLNRGIAKGWLPPSIRAKVDSHLRLVAKVHEILPIGKIIVEIASFDIQKIKNPEIKGAEYQQGEQLGFKNVKAYVLARDGCTCRCCKGKSKDKVLRVHHLESRLIGGDAPDNLVTLCDSCHTKFHKGLIALDDIKRGKSFKAETFMGLMRNFFFKELCNKYPCVKCTYGYITKYLREKYYLKKDHHVDARCICGVPQALPSDVYLIKKVRCHNRQIHKFTTLKGGRRKLNQAPYTVKGFRLFDKVKLGDQVGFIFGRMSTGYLDIKNLQGDLLY

SEQ ID NO: 5430 - protein, 408 aa, unidentified
MVYVQDIDGKPLMPTTRHGKVRRLLKDKKAVVVNLCPFTIKLMYVTSDYKQEIVLGVDSGAKHVGLSATTKSKELYSSEVILRNDIVDLLSTRRELRRARRDRMRYRKPRFDNRIKSRRPEWVAPSVRYKVDAHIRVIDNVCSILPISRIVIEVAQFDTQKIKNPNISGKEYQEGDQLGFWNVREYVLCRDGHKCQHCKGKSKDEILNVHHIESRKTGGNSPSNLITLCETCHKEYHKGNIDLKIRRGKSLRDAAVMGIMKWRLYEELKSKYSNVSMTFGYVTKYNRINHGIEKSHVSDAFVISKNFDAIRLGYYYKVRLVRRHNRQIHKQKIQKGGIKRLNQSPFEIFGFRLFDRIMFENSYYFIFGRRKTGYFNIRDIDGKNQRDITYKKLKLSRCKRFMIQNEMN

SEQ ID NO: 5431 - protein, 471 aa, Caldicellulosiruptor sp.; identical to SEQ ID NO: 4560

SEQ ID NO: 5432 - protein, 417 aa, Geobacillus sp.
VYIINKHGKPLMPCSPRKARLLLKQKKAKVVRRTPFTIQLLYGSSGYKQPVSLGVDMGTRHVGISATTKKDVLFEAEAQLRTDIVELLAIRRQFRRSRRNRKTRYREARFLNRRKPEGWLPPSIQHKINSHIKLIDLVHNILPVTSVTIEVAAFDTQKLKNLNIRGVEYQQGEQMGFWNVREYVLYRDNHTCQYCKGKKKDPVLQVHHIESRKTGGDSPDNLITLCKTCHHEIHEKGLEHIFQRKRPPMRDASQMTAMRWAMFSRIREKYSHANITYGYITKCIRIANGLSKSHMVDARCISGNPLAKPSGTVYLLKFVRKNNRQLHKATILKGGKRKSNKAPRFVKGFQLFDKVVYERKECFIFGRRSSGYFDLRLLDGTKVHASASWKKLKRVEHASTLLIERRKGDSSPTFALA

SEQ ID NO: 5433 - protein, 418 aa, Exiguobacterium sp.
MFVFVLNHHGEPLMPCKPSKARKLLHNSKAKLVKQTPFTIQLFYGSSGYKQEISLGVDAGTKHIGFSATTSTKVLLEGEVQLRTDIQDLLATRRAMRSARRSRKTRYRQARFLNRKKPKGWLAPSIQHKVDAHLKLIRMIHRLLPIKHLTIEVAQFDIQKIKNPDISGDLYQKGDQLGFWNVREYVFFRDKHICQHCKGKSKDKILNVHHIESRRTGGDSPDNLITLCETCHKKIHKEKLEHLFQRKSRSFRDASQMTVMRWFIYNAVKETYPYVKLTYGFLTKNTRIENGLEKRHAVDARCISGNPLAEAPKVSYLFRQVRANNRQLHKMTIGKKGKRKANKAERLVHGYQLFDKVQYEEQTCFVFGRRKNGYFDLRTIAGFSIHKSASYKKLTLLEKAKTWLVDIQSEGGEGRSQP

SEQ ID NO: 5434 - protein, 414 aa, unidentified; identical to SEQ ID NO: 2588

SEQ ID NO: 5435 - protein, 414 aa, unidentified
MVYVINKQGQALMPTERFGKVRRLLKNSLAHVVCRIPFTIQLDYDTTDYTQPVSLGVDAGSKHIGISATTSEKEMYAADVELRNDIVDKLSTRREQRRTRRSRLRYRKARFNNRVSSKRKGWLAPSVENKIQTHLTVVEKIHKFLPITNIVVETASFDIQKINNPSISGSEYQQGEQLDFFNVREYVLFRDNHICQHCKGKSKDKVLNVHHIESRKTGGDSPNNLITLCETCHKAYHRGEFELNVKRGKSFRDAAFMGIMRWGFYDRLKNIYPNVSMTFGYITKNTRTTNNLPKEHYVDARCISGNPTAKPLGYYFYQKEVRCQNRQIHKANFLKGGRKKLNQAPFLVKGFRLFDLVEYQKELYYIFGRRSSGSFDIRKLDGTKVNKGSINCKYLRLVDKRKSILTEKRTQVNL

SEQ ID NO: 5436 - protein, 464 aa, unidentified
MAVFVLDRQGLPLMPCTEKRARLLLERGRARVHRVVPFVIRMTDRRAQASSFQSLRLKLDPGSKTTGIALVQEKADGIAVLNLMDLVHRGRQITEALTQRRAFRRRRRGANLRYRAPRFDNRTRAAGWLAPSLQHRVESSMSWVRRVMRWAPVSALSMELVRFDMHAMQNPEISGLEYQQGELFGYEVREYLLEKWGRKCAYCDAAGVPLQIEHILARARGGSNRVSNLTLGCAPCNIGKGARDVREFVKDKARLTRILSKAKAPLRDAAAVNSTRWALLNALKETELAVETGSGGRTKWNRARLEIPKTHALDAACVGEVKAVCGWQRSTLELRCTGRGSYQRTRLTAQGFARGYLTRKKHAYGFQTGDRVRAIVPKGKKAGTHVGRVAIRASGSFNIQTPVGVVQGIAHRHCTMVQRADGYGYSTVPLTKEGDSGNGTKAWLAAQAVLSLPGMNAEVSRANG

SEQ ID NO: 5437 - protein, 471 aa, Caldicellulosiruptor sp.; identical to SEQ ID NO: 3268

SEQ ID NO: 5438 - protein, 279 aa, unidentified
VVVETAEFDLQLLKAIADGKPVPQGEDYQKGEMYGHYNVRQYVLWRDNYTCQCCGTHPSKKKEVRLHVHHLESRKVGGDAPDNQVTLCESCHEKLHKGLIAEKDFKKRKRRSTRDATFMGIMRKTLMQRLCSELPIPVVKTRGYITKATREKLLVLPKSHTNDALAIAQGKQGFNVGYLPGIVQINKIYTIRPVRHHNRQLHKATILKGGIRKSNQTEKYVFGYRLFDKVQFNGQDCFIWGRRTTGIFTIKTINGKMIKDGISFKKLKLVEKSTSYLIA

SEQ ID NO: 5439 - protein, 521 aa, Streptomyces sp.
MTTSSSREKTHRAVLPQRRALESVGADTPGSRDETACGLPATVPGAGAEHGRGEILSAGTHPAGRHPAPASAGKGETREGHPAVFVLDRHHQPLMPCTPARARKLLSHGRAVVHRHTPFVIRLKDRTAAASEVTGVELGIDPGSRFTGIALFRAVDEADASVRHGLFAIELVHRGGPISVRLTSRATLRRARRQRNLRYRAPRFNNRARPEGWLAPSLRHRVDTITAWVNRMTRWAPVRAVHVELSVFDPHAMSAGTSASDAECRGGTLQGMEVREYLLMKWNRACAYCGATSTPLNIDHIHPRSRGGSDRVSNLTLACLPCNKRKSNMPVEDFLKKKPAVLSKILQQAKTPLRDAAAMNATRCAVLRALEALNPDVRPSTGGRTRWNRRRTSTPKSHTLDALCVGVLASVVRHPKAIQVVTATGRGTYRRTAPDRYGFPRLALPRTKPYFGYATGDLVRANVPNGKRQGNHTGRVAVRATGNFNIKTRRGLVQGVNHRHVRLLQRADGYAYTTRAEVTHA

SEQ ID NO: 5440 - protein, 448 aa, Chromatium sp.
MAVFVLDKTTHPLMPCSEKRARLLLARGRAVVVRLTPFVIRLKDRIGGDLQPVRLKLDPGSRTTGLALVRETDAMDPETGAITRTSTVLWLSALTHRGQAIRDALTARRAMRRRRRTTNLRYRAPRFDNRTKPTGWLAPSLQHRVNSTRSWINRLRRLAPITAISQELVRFDMQAMQKPDTSGVEYQQGTLAGYEVREYLLENWQRTCAYCGAKHVPLQIENIQPKSAGGSNRISNLTLACEPCNRKKGAQPVEVFLKGKPDTLTRIQSQAKAPLKDAAAVNATRWALLNALKDTDLPVETGSGGRTKFNRSRLDIPKTHALDAACVGQLDALHDWQRPTLAIKSTGRGSYQRTRLDRFGFPRGYLTRQKRIHGFQTGDRVIARVLSGKNAGIHVRRVAVRATGSFNIQTMSGVIQGISHRHCSVLQRADGYGYSFNPVPTEEARSAA

SEQ ID NO: 5441 - protein, 413 aa, unidentified; identical to SEQ ID NO: 2605

SEQ ID NO: 5442 - protein, 453 aa, Anaerotruncus sp.
MSVAVLSSTGRKLMPTSNYRARKLLKSKRAVIECYRPIFTIRLTDREEGNTQPIEYACDTGYQHVGVSIKSEKHEFVHAQYDMLSDETERHNDCRKCRRTRRNRLRYRKPRFDNRSKKNKEMTPSLRHRKENQIRLFESFCKVMPITSAAFEMGKFDTQLLQAIADKKPLPKGKDYQRGSKYLYQTEREAVFGRDHYTCQVCGKSVKDGVILHTHHIGFWKGYRSNRISNLLTVCEHCHTAKNHQPGGKLWGLEPKSTNLAPATYMSTVRWAMYRDLVLTHPELDIYFQYGAKTAVTRKSLHLEKTHANDAYCIGSLHPKHRTAELVYQKKRRNNRILAKFYDAKYIDIRDGEKKSGSALSCGRTNRRESRRSDKNQRIYRGKKCSSGRTSVRKKRYSYQPGDAILFRSQRFTVNGAHCNGTRVILNTGKSVKMADLTCIKMEGGWCFLPAQA

SEQ ID NO: 5443 - protein, 419 aa, Paenibacillus sp.; identical to SEQ ID NO: 3664

SEQ ID NO: 5444 - protein, 378 aa, Moorena sp.; identical to SEQ ID NO: 2642

SEQ ID NO: 5445 - protein, 424 aa, unidentified; identical to SEQ ID NO: 4676

SEQ ID NO: 5446 - protein, 411 aa, unidentified
MVYVQDIDGKPMMPTTRHGKVRRLLKDNKAVVVNTCPFTIKLTYKTSDYKQEIVLGVDSGTKHVGLSATTKSKELYASEVILRSDVVDLLSTRRGLRRTRRSRLRYRKQRFNNRVKSKKRGWIAPSVRHKIDSHIRIISFVYSILPVSKLIVEVAQFDTQKIKNPEISGKEYQEGEQLGFWNVREYVLARDGHKCQHCKGKSKDPILNIHHIESRKIGGDSPSNLITLCETCHKEFHKGNIKLKVSRGKSLRDAAVMGIMKWKLYEELKSRYDNVSMTFGYITKYNRINHGIEKSHVSDAFVISRNFNSCRLGYYYKRKLVRRHNRQIHKMKILKGGIRKRNQAPFKVFGFKLFDKVMFQGEEHFIYARRLSGQFNIRDINGENKKDVSCKKLKYVSHGLVSVKTNLFLSQ

SEQ ID NO: 5447 - protein, 417 aa, unidentified
  REGION 1..417: note = Ga0307928_10008236
MQKTYIQNKNGEPLMPTTRCGAVRRWLRDNKARVIKLTPFTIRFNKDCESNTQEVIVGLDTGAVNIGCSAVSNTKVLYASETKLRTDITKKMQRRAMYRRTRRTRKIRYRPARFDNRTRPEGWLPPSLKSKLDSTVKVIKQLSKILPISKVRVEIAKFDTQKLQNPEIRGKGYQKGVTEGYDNIRAYVFERDNYTCQICKKQLGILQTHHITQRKDGGSDRPDNMVTVHKSCHKDFHLGLIKHKFRKPKEYKMAAHVTILKDFIVNELRKDFNVETTFGHITKRIRQRLHLPKSHCFDAIAICNPKKVERTKTIFQRVCVSQRRYQMTKGVRSERRLPAGQIFGFNQWDKVRFNNQIAFIKGRRSSGYFDVCDINNNSLSHSVKYTKLHKLSSNNTMEVIVSLPTAKAVGIRNENVL

SEQ ID NO: 5448 - protein, 430 aa, Desulfobacter sp.
LSVFVLDTNKKPQNPVHPAKARLLLTEGKAAVFRQFPFTIILKETVLDVASNPLRIKIDPGSRETGIAVINDDSGEIVFAMELRHRGRQIKNNLESRRAIRRSRRNRKTRYRKPRFDNRTRAEGWLPPSLKSRIHNIETWVNRLCRFCNIQAISMELVRFDMQKIQNPEISGVAYQQGELMGYEVREYLLEKWDRTCAYCGKTDIPLEIEHIVPKSKGGSNRVSNLTLACTACNRKKGNKPLEQFLSRKPRLLKRIQKQSKVPLKDAGAVNTTRWDLFRTLKKTGLPVETGSGGLTKFNRTTRGLHKTHWLDAACVGESTPEKIFQIDKAVLIVKADGHGSRQMCRVNKFGFPRTTAKSTEKKVKGFQTGDIVKAVVTSGKKVGTYTGRVAVRKSGSFNIKTVDKTVQGISWKYCRRLHASDGYSYNTTC

SEQ ID NO: 5449 - protein, 408 aa, Fervidobacterium sp.
MVFVISKDGKPLMPTKRHGRVRRLLRQGLAKVVNREPFTIQLLYETTNYTQPVTVGIDIGSKIVGISAVTDKMEIFSAEIQLRQDISKLLPERRQHRRFRRYRKTRYRKPRFLNRRKENGWLPPSLQWKVDAHVRIVNKLSKIIPITKVVVEVAPFDIQKVLNPDIEAKDYQNGPQKGFADVREYCLWRAGYKSELSGKTGVLEVHHIIPRSKGGTDTPSNLIVLTVEEHKMLHEGKIKIPKSRLEQVKVLKDAAHVSAIGWYIVNKLKQNYQVAITYGSITKARRATYGLEKSHRDDAFVIAGGNIQERANEWYFGKLLRRQNRSLHKANPIKGGKRPLNTIKQVKGFRRFDRVECEGKIGIISGLRSSGYFSISSLNGEKISDSVKYTKLRLLERAKTLMFERRER

SEQ ID NO: 5450 - protein, 470 aa, unidentified; identical to SEQ ID NO: 2825

SEQ ID NO: 5451 - protein, 448 aa, unidentified; identical to SEQ ID NO: 5196

SEQ ID NO: 5452 - protein, 442 aa, unidentified; identical to SEQ ID NO: 2903

SEQ ID NO: 5453 - protein, 385 aa, unidentified
MGHEHRIHHVVQRLHQLTDEKQKHDACRMYRRQRRSRKRYRQSRFNNRKRSDGWIAPSLEHKKDIHIQTISRICNAMPITNITLEMGNFDTQVLKALEENRPLPQGTDYQHGERYGIATLREAVFARDKYTCQCCRKTIADGAILHVHHIIYRSRGGTNRMSNLATVCDRCHTPANHKPGGRLYNWKPKIASFKGATFMTAVRWKMYNEVKSKFSDINIHITYGAETKEQRRAFDITKSHVNDALVMGQFHPKHRSRPVCYKKKRRNNRCLEKFYDAKYIDSRDGKKRSGQELFNGRINRNHKKDSENLHQYRQQKVSAGRRTIRKQHYSIQPHDIIVFNRQQFETSGCHCNGARAILLPQKKSVAIKKLSIHKYAGGYFKSDFT

SEQ ID NO: 5454 - protein, 471 aa, Caldicellulosiruptor sp.; identical to SEQ ID NO: 4560

SEQ ID NO: 5455 - protein, 414 aa, unidentified; identical to SEQ ID NO: 2588

SEQ ID NO: 5456 - protein, 398 aa, Parasutterella sp.
  VARIANT 124: note = X can be any naturally occurring amino acid
  VARIANT 398: note = X can be any naturally occurring amino acid
MPCSPAKARLLLKEKKAIVKRRTPFTIQLTIATGETKQPVSLGVDTGYKHVGLSASTEKAELYASEVELRQDITDLLSARRALRQSRRNRKTRYRAPRFDNRIRTKRKGWLAPSVENRINAHLXTPFTIQLTIATGETKQPVSLGVDAGYKHVGLSASTEKAELYASEVELRQDITDLLSARRALRQSRRNCKTRYRAPRFDNRIRTKRKGWLAPSVENRIDAHLSRIEAVLRLLPVTKITVETASFDMQLLKNPDISGKEYQEGEQLGFWNIREYVLCRDGHVCQHCYGRSKDPVLNVQHLKSRRMGGDSPGNLITLCETCHKALHRGEITLKAKRGQSFRAEAFMGIMRWEVQNRLKASHPELEVNNTYGYRTKHARIANDIAKSHCADAFCIAGX

SEQ ID NO: 5457 - protein, 422 aa, unidentified
LNKRGKPLMPCSPAKARLLLKEKKAIVVRRTPFTIQLTIATGESKQPVSLGVDAGYKHVGLSASTEKAELYASEVELRKDITDLLSARRALRQSRRNRKTRYRAPRFDNRIRTKRKGWLAPSVENRINAHLSRIEAVLRLLPITKITVETASFDMQRLKNPDISGKEYQEGEQLGFWNVREYVLFRDGHVCRHCHGRSKDPVLNVHHLESRRTGSDSPDNLITLCETCHKALHRGEITLKAKRGQSFRAQAFMGIMRREVLNRLKASYPELKVHETYGYLTKHARIANGIVKSHGADAFCIAGNLGAERLGEFFFQKQTRRNNRQIHKLSILKGGIRKRNQAPFEAKGFRLFDKVACQGEEGFIFGRRSSGSFDVRKLDGTRISAGISCKKLRLLEKRRTYLTEIRKEEALPPLPEGRGLRA

SEQ ID NO: 5458 - protein, 447 aa, Exiguobacterium sp.
MFVFVLNHHGEPLMPCKPSKARKLLNNGKAKLVKQTPFTIQLLFGSSGYKQEISLGVDAGTKHIGFSATTSTKVLLEGEVQLRTDIQDLLATRRAMRSARRSRKTRYRQARFLNRKKPKGWLAPSVQHKVDAHLKLVRMIHRLLPIKHLTIEVAQFDIQKIKSPDISGDLYQKGDQLGFWNVREYVFFRDKHICQHCKGKSKDKILNVHHIESRHTGGDAPDNLLTLCETCHKKIHKENLEHLFQRKSRSFRDATQMTVMRWFIYNAVKETYPYVKLTYGFLTKNIRIQNGLEKRHAVDARCISGNPLSEEPNVSYLFRQVRANNRQLHKMTIGKKGKRKANKAERFVRGYQLFDKVHYEGQTCFVFGRRKTGYFDLRTLQGVRVHKCASHKKLTLLERATTWLVDIPTRRRWRSAPPMTEATGLRRPINNETNSCWYRHGSVYDGF

SEQ ID NO: 5459 - protein, 470 aa, Thermoanaerobacterium sp.
VWQTQKAEITLARRDYLLIALLVLYRTPKGEFYMVFVLDKHKKPLMPCTEKRARLLLESGRAVIHKINPFVIRLKDVTVDNCIIQPCRIKIDPGSKVTGIAILQGEKVLLLVKLYHKQGIKKSLDDRRNHRRFRRNKLRYREPRFDNRKREKGWLPLSLEARVQQVINTVKKLAKYIPIDNISIEHVKFDTQLMQNPEISGVEYQQGELQGYEVREYLLVKWGRKCAYCGKENVPLEVEHIVPKSRGGTDRVSNLTIACHECNQKKGNMTAEEFGYPDIQKQAKQPLKDAAMINATRWKTYNLLKEMYPVECGTGALTKKNRIDRNLPKEHYCDACCVGQSTPKEFVFKADYILEFHAKGRGTRQRTLLNKYGFPRAYLSRQKEYFGFQNGDYVKAEVPKGKYKGQYTGYVAVRKSGYFDIRDANGKNIAQGISYQYCHIIQRYDGYKYGRRKRHILLHPSDAMDGVSCA

SEQ ID NO: 5460 - protein, 413 aa, unidentified; identical to SEQ ID NO: 2636

SEQ ID NO: 5461 - protein, 427 aa, unidentified
MSKVFVLDTNFTPLNPIHSAQARQLLRSKKAAIFRQFPFTIILKKSRPDSPISSLRLKIDPGAKFTGMALVNDLTGEVVFAAELKHRGFAIRDALTSRRQLRRSRRARKTRYRQPRFLNRTRPEGWLAPSLQSRVENIKTWVKKLLNFAPIQAISQELVRFDMQLMANPDIQGQEYQQGTLAGYETREYLLEKWGRQCAYCGAKDVPFQVEHIHPRAKGGSNSITNLTLSCEKCNTKKGTKDIKDFLKKDFSKLEKILKQAKRPLADAAAVNTTRTALLKVLKATGLPVETGSGGLTKFNRSEQNLEKTHWIDAACVGQSTPILNIKGVKLLLITANGHGSRQSCRTDKYGFPNRHVPREKIHFGFQTGDIAKAVVTTGKKIGTYVGKVAIRSTGSFNISTKNGLIQGISHKFCKRIHAKDGYSYAV

SEQ ID NO: 5462 - protein, 519 aa, Streptosporangium sp.
VLPQPAALESTSADTPEGGHETGRGGRKASGVEHGRGEIGTDGTRPLRRHPDPAQAGQGAAREGHPAVFVLDRRSHPLDPCHPARARRLLASGRAVVVRHTPFVIRLKDRAAEQSTVQGVAVGVNPGSKHTGIAVFTETGAGRMGRFALQLDHRGSAIRGRLTARAALRRGRRSRNLRYRAPRFANRAKPQGWLAPSLRHRVDTTMSWVVRLTRWAPVRAVHVERVSFDTHALSAGRPLEGVEYQQGTLAGYEVREYLLAKWGRRCAYCGIQNVPLNIDHIRPRSRGGSDRIGNLTLACIPCNQAKGATPVEEFLTGRPRGLARVLARAKAPLRDAAAVNATRRALWRALAATGLRVHPSSGGRTKWNRSRTGAAKSHTLDALHVGHLQAVTGWPGTVLVVKATGRGGYARTRTDRYGLPRLRLPRTKSVHGYATGDLVRASVPSGKNAGVHTGRIAVRTSGSFNVRTRHALVQGIHHRHVRLLQRADGYGYTTHPETRHRSAFPSPPEGGGLHAGDIR

SEQ ID NO: 5463 - protein, 411 aa, unidentified; identical to SEQ ID NO: 3917

SEQ ID NO: 5464 - protein, 412 aa, unidentified
MENKIEYCFVVDKDNQPLAPTKVNKGWYLVRKGRARLKSKYPMVIQLEKRVKLDENDKSYMTCGIDDGSAHVGLAIVQKCPIKNKVVFKGTIEQRQDVKHLIDVRRGYRRYHRYHKRYRPMRFNNRSSSKRIGRLAPSIKQKKDAILRILFQLNKWINIKEYYLEDVCIDIRAMTDDYKPYKWQYQKSNRLDENLRKAAIIRDNYKCQECGKSNCKLEVHHIQARKYSGADTIGNLITLCSKCHQKTEGKEQDFEDKYFKIIGSKPKRFDYAMHVMQGKNYLRSKISELGLLHLTNGGETANKRIEWNIEKSHSNDAICITDSIPDSCNIKEWTIKPMRRKSKAKINNVLGIKHRDLVSYTYKNGETHTGYVTALYSKQLALNFQSRTKHCKKVNARKCRLLWQFNKIYWLE

SEQ ID NO: 5465 - protein, 470 aa, Thermoanaerobacterium sp.
VWQTQKAEITLARRDYLLIALLVLYRTPKGEFYMVFVLDKHKKPLMPCTEKRARLLLESGRAVIHKINPFVIRLKDVTVDNCIIQPCRIKIDPGSKVTGIAILQGEKVLLLVELYHKQGIKKSLDDRRNHRRFRRNKLRYREPRFDNRKREKGWLPLSLEARVQQVINTVKKLAKYIPIDNISIEYVKFDTQLMQNPEISGVEYQQGELQGYEVREYLLVKWGRKCAYCGKENVPLEVEHIVPKSRGGTDRVSNLTIACHECNQKKGNMTAEEFGYPDIQKQAKQPLKDAAMINATRWKTYNLLKEMYPVECGTGALTKKNRIDRNLPKEHYCDACCVGQSTPKEFVFKADYILEFHAKGRGTRQRTLLNKYGFPRAYLSRQKEYFNFQNGDYVKAEVPKGKYKGQYTGYVAVRKSGYFDIRDANGKNIAQGISYQYCHIIQRYDGYKYGRRKRHILLHPSDAMDGVSCA

SEQ ID NO: 5466 - protein, 418 aa, unidentified
MVYVLNIDGQPLMPTTRHGKVKHLLKDGKAKVVKRCPFTIKLLYETPNCTQDLTLGVDTGSGAIGTAVSTDDGEIVYMSEVVVRNDITDKMTQRAKYRRNRRSRKTRYRKARWLNRKNSIKKDRFSPTMVSKLHSHVKEIEYIKSILPITTMVFETGTFDTYLMKNPSIVNENVRHWGYQKGTNYGFENTKAMVLNRDNYTCQYCKGKHKDSKLEVHHIVFRSKHGSDEESNLITLCHTCHKALHSGKISLKLEGKVKGNLKYATQMNSIRKQLFRIYPEAIETFGYITKANRLKLGVDKEHFYDACVIATHGNKFSVRCNLYKKKCVSDGDFQQTKGVRSEQRIPTCKIHGFRKFDKVRYFGKEYFIKGRLSTGYAILMDIDGNKSDFSYMPKGFKTPKIINLKRLEARSSWIVIFK

SEQ ID NO: 5467 - protein, 425 aa, Aphanothece sp.; identical to SEQ ID NO: 3310

SEQ ID NO: 5468 - protein, 440 aa, Clostridium sp.
VPLMVYVLNKEGKPLMPTNRYAKIRVLLKSKKAVVVNSKPFTIKLSYNTKDFVQPITLGIDSGYLNIGFSAITKENELISGEVKLLKGMSERLKEKAMYRRQRRSRLRYRKPRFNNRKRSKEWLAPSIQHKYDSHIRFIDKLKKLLPITNIIIEVANFDTHKLKNPSIEGEAYQNGEQKDFFNLREYILHRDGHKCQNPNCKSKGAESILQVHHIGFWKQDRSDRPGNLITLCNKCHTPKNHKENGFLYGWQPKIKSFKEATFMSMIRWRLVNTLGCKHTYGYITKSNRIALKLEKTHYNDAFCIAGSSNQNRVKPLIFEQIKRNSRSLEKFYDAKVIDIRTNTKVSGAELFNGRRTRNKNLNSENLRKYRGVKVSKGQRRIRTKRYFYQPGDLVKYEDKVYTVKGTQNKGKYIALKELKKVPKVELLTPYKFRKGLVCV

SEQ ID NO: 5469 - protein, 423 aa, unidentified
MRVFVFNMRGEPLMPCTQRKARLLLKTGKAKIYKHNPFTIQLKYVTGENKQECHVGIDTGSKYIGLAVTSENKVLFKGEVELRQDVKSKIDTKRIYRRSRRNRKTRYRRCRFLNRKRFGKWLPPSLQNRINHTFKWIDKLCSFIPESILHIEVGKFDIAKMINPEVHSVDYSQGQTYGYQGERYFIFARDNYTCQVCGERNKPLQTHHIIYVSNGGTNRVDNQITVCKECHTSTNHKNGGIFYKWQKEHKKVKQYKAPPFMNVLRQQILNQYPQALITYGFETTIKRKNIGLEKTHYNDAIVISGVSTISENLHEWLLIRQFRKKKRSLHEGVPRKGRKEPNRIQKRNSKNTPYYRGFYLNDKVSVFGKSGYITGFTNSGAYVKGVDGEYIVLPNKSYKRVNIASLKFICHNNNWQYITKNAV

SEQ ID NO: 5470 - protein, 416 aa, unidentified; identical to SEQ ID NO: 4039

SEQ ID NO: 5471 - protein, 471 aa, Caldicellulosiruptor sp.; identical to SEQ ID NO: 3268

SEQ ID NO: 5472 - protein, 470 aa, unidentified
MVGGVSQIFQKKEVSVLDTVAVISASGRKLMPTNSYRARRLLKSKRAVIYRYRPVFTIKLADRTDGYIQPIEYKCDTGYQNIGISICSDTKEFVNEQRDLLKDEVKRHSNSRKYRRTRRNRLRYRKKRFDNRRGMISRDGFAPSIRNKRDVHVRLYEEYYKVFPITKSVFEMGQFDTQVLKAVEAGLPVPAGTDYQRGEQYGYATLREAVFARDSYTCVCCGKSAIKDGVKLRIHHIGYLSGDRSNRMANLGSVCESCHTSKNHKPGGKLYSLKPELKTFKGATFMTTVRYSMVKQLKAATPDVDIRVTYGAATKLARKALNVKKTHSNDAYCMGEFHPEHRSDFKHYRKCRRNSRVLSRFYDAKYRDLRDGSVKTGSQLSCGRTNRRIPRHTELNERIYRGHKISKGKLVVRRQHYQYRPGDTVWAEGKRCAVKGIISNGTRIALNERNPVSVNKIDKTVHTGGWAKAS

SEQ ID NO: 5473 - protein, 452 aa, Lactobacillus sp.
MSEIQKVNYIYVVDSNGTPLMPTSRLGMVRRWLKTGQARWFGNSRKIIQFVRPVTTNTQELTLGVDAGFHLGLAVVGNKREYYASESLRKSEKDRITSRRELRRTRRNRLRYRQARFDNRRRKASWLAPSVQHRLDFTIKEIKRLYTFLPIAKLVVEVAPFDNQKLLNPNIKPWEYTHGKTHGFKTIKDYLLARDNYRDALDGKQYPASQLRVHHLVQRKDGGTDQPDNLVLLSDINHTQANHNNGILAKLRENRQKTLDYRGAYFMNILATRLSDYFDNYTTTQGYLTANLRQKYQLEKSHLNDAFIIAGGTDTTLRTNNVYSRQKLRNNNRVLQKFYDAKYIDSRDNKTKPGKELSSGRTRRSRELNYDNLKQFRKTKVKKGRVSIRRNHYQLRPHDVVLNTKTNKIETITGVQNSGTVIKFQTGKTCSIKNVVSLYHVNGMLEKKIENI

SEQ ID NO: 5474 - protein, 428 aa, Enterococcus sp.; identical to SEQ ID NO: 4335

SEQ ID NO: 5475 - protein, 422 aa, Ktedonobacter sp.; identical to SEQ ID NO: 4796

SEQ ID NO: 5476 - protein, 435 aa, unidentified; identical to SEQ ID NO: 4814

SEQ ID NO: 5477 - protein, 413 aa, unidentified
MTNYAFVLDADGKQLAPTKEQKAWFLIRKKRAALVSKYPMVIQLNKEVPDEEICKDEIRCGIDDGGLHVGIALVQKCQTQNKVVFKGTIEQRNDVKHLMDIRRGYRHYHRYHKRYRQARFNNRSSSKQKGRITPSILQKRQATVRVINQLNKWINITDYWLEDVAIDIRAMTDGYKPYKWQYQKSNRLDENIRKAVILRDGCKCMECGKSNCKLEVHHIKPRRSKGSNTLGNLITLCAKCHHKTKGVEELYMDRYFALLNSSDNKNLNYAQHVMIGKKWLREQLSSLGILHLTNGGDTANKRIDWDIAKSHSNDAICITNLRPDECEIKEWTIKPMRRQSKAKTDNVLGIKHRDFVEYTFKNGETHRGYVTALYPEQNALNFQSPTKHCKKVNVRKCKVLWKYSKIYWLDNVS

SEQ ID NO: 5478 - protein, 465 aa, unidentified
MSTCACVLSKNGERLMPTIRLGKVRHLLKDGKAKIIKHHPFTIQLLYDSKTNTQPIEICEDVGYNYIGISVKSQSHEYVSAQYDTLQDEKSCHDACRRMRRTRRNRLRYRQKRFDNRKRDKGWLAPSLKHKKELNVNVIKMYCEVVPITHAAVEVGSFDTMLVKAIEEGKATPEGADYQKGPRYNLATLREAVFYRDNYTCQVCGREASEGAILHVHHMFYWKGRHDNSLSELITVCEKCHTPANHQKGGKLYGFGEDIKFANLSGAAFMNTVRWQIVNELYAAFGKPFVTFTYGAMTKEKRIALHLEKSHNNDAYAMGEFHPNCRCTFEHYEKVRRNNRILEKFYDSRYIDIRTGEIATGKELFNGRINRSHKKDSENLHKYRGKRIRKGYRALRRKKVALNPGDLVSLNGEILTVHGTHTKKNGSVNVEFKTPSKSGKKSTSLKKLKIIKTISPMRSAWDKVS

SEQ ID NO: 5479 - protein, 432 aa, unidentified
MEMPEMVYVLNISGQPLMPTENCAKVRILLRRGKARVVKRCPFTIQLLYKTADYTQEVTLGVDSGSKHIGLSATTEDKVLFESDVELRNGIVDLLADRRQNRRARRSRKNRYRKPRFDNRRRKDGWLAPSVQNKVDTHLTAVRRVHEILPVSRIIAEVASFDIQKIRNPAIRGTEYQQGEQMGFWNVREYVLFRDGHECQCCHGKSKDRILNVHHIESRKTGGDAPNNLITLCETCHTGYHRGTVRLPKTIHRGMSFRDATFMGIMRWAFYDKLKEIYPDVHLTYGYITKNTRVRHGLPKDHCIDARCISGHPDAVSDGTVYFQKKVRCHNRQIHKVNFIRGGKRRRNQAPYEVMGFRLFDKVQWKGCECFIFGRRSTGRMDLRLLNGTKLNPSVGYKNICLLEMRKNMLIEKRRKAVPPTGKPVVFPAKRL

SEQ ID NO: 5480 - protein, 512 aa, unidentified
MSTVYVLNKNGKPLMPTTRCGHVRYLLKEKKARVVASKPFTIQLLYETNDVVQPLYLGIDPGRTNIGVAVVKTDGTAVFTAHLETRNKEIPKLMKKRKDSRRARRTNGRRCRRQRRAKANDTISKKCVKQATAQNGSVSKRAKEIGVIKRHLPGCEKEILCIGIKNKEAKFNNRTRPEGWLTPTANQLLQTHINLVKKIRKFLPISDVVLEINKFAFMQLDDPNIQKWQYQQGPLYQKASLEEAVSEMQEHHCLFCKKPIAHYHHVVPQSENGSDTIGNIVGLCTKHHDLVHKDTVWQKKLAKKKTGLNKKYGAQSVLNQIIPALTERLNTLFPKHFFVTTGKSTYDYRAAHGVSKDHWLDAYCIACSVLPNDVCDSGINNRVPYELKQFRRHDRRALHKANMSRVYTLNDKAVATNRHKAIKQTTDSLEEFRQNHPDDVYKLKVKEHHPEYRNSKRNFPGCVFLVGKHTHVMQGTSGSHNGQADGYYDTNGNSYSSGKCKFVAKNEGIVFT

SEQ ID NO: 5481 - protein, 432 aa, Ktedonobacter sp.; identical to SEQ ID NO: 4734

SEQ ID NO: 5482 - protein, 458 aa, unidentified
LTKDENRPSGRTTGLRAEQAEPAGIRKGDTLKVFVLNMRGKPLMPCSPAKARHMLKAGKAFVVRRTPFTIKLTIATGETKQDVTLGVDAGARHVGISATTEKEEVFASEVALRQDITGLLADRLAFRRARRNRKTRYRAPRFNNRVRSKHKGWLAPSVENRIQAHMSRIEAVCRLLPVTKIVIETASFDIQKIRNPEVEGTGYQQGDQLGFWNVREYVLFRDGHICQHCRGRSKDPILNVHHLESRKTGGDAPNNLITLCETCHKAYHAGKIKLKVKRGQSFRAEAFMGIMRWTLLDRVRKAHPGLPVENTYGYLTKHTRITHGLPKTHCVDAYCIAGNLKAVRRGVYLHQRQMRKHNRQIHKFTVLSKRLEDGTKIGYRKLNQSPYLVHGFRLFDKVRCLGQIGFIFGRRSSGYFDVRRLDGVKLSPSISWRKLTLLEKRSTYLTELRKQDGASSPV

SEQ ID NO: 5483 - protein, 446 aa, unidentified
LKCLSRTRGSLRFKEKTLKVFVINKRGKPLMPCKPAKARHLLRDGKARVVRRTPFTIQLTIATGENVQPIHLGVDAGSKHIGLSATTEKEELFSSEVELRKDITDLLSSRREMRRARRNRKTRYRAPRFDNRVHAKKGWLAPTLENKINAHLSRIKAIRAILPVSRITIEVASFDIQKIKNPEIEGEQYQQGEQLGFWNVREYVLFRDGHKCCHCHGKSKDPILNVHHIESRKTGGDAPNNLITLCEICHKAYHAGKIQLTAKRGKKFTDATHMGIMRWELLKRAKEANLGIPVKATFGYITKVRRIQFGIAKTHCADAFCIAGNFNAKRLGEYLYQKQTRKHNRQIHKMTILKGGYRKRNQAPFEVFNFRLFDKVRFGGNVGFVFGRRTSGSFAVRTLFGEKLSESVSYKKLSLLERRTTFLTQLVKEGAIPPVSKDTGFLARFQ

SEQ ID NO: 5484 - protein, 471 aa, Caldicellulosiruptor sp.; identical to SEQ ID NO: 3375

SEQ ID NO: 5485 - protein, 419 aa, Butyrivibrio sp.; identical to SEQ ID NO: 4426

SEQ ID NO: 5486 - protein, 300 aa, Anoxybacillus sp.
  VARIANT 300: note = X can be any naturally occurring amino acid
MVFVLDTNKRPLAPCHGAVARKLLKQGKAAIYKRFPFTIILKKSVDESENETTYRLKIDYGSRHTGLAILRGQEVVWLGQLDHRTDIKERIDKRRAFRRARRNRKTRYRKPRFLNRKRKEGWLPSSLESRVQNIQTWVNRLKKLCPIGYISYENAKFDTQLMRNPEINGVEYQQGTLQGYEVREYLLEKFGRKCCYCGKENVPLEVEHIIPKSRGGTDRVDNLCLACHDCNQRKGSKTAEEFGYPHIQKQVKESLKDASAINSTRWKAYEVLKQTGLDVECGTGARTKMNRIRLDLPKTX

SEQ ID NO: 5487 - protein, 471 aa, Caldicellulosiruptor sp.; identical to SEQ ID NO: 4560

SEQ ID NO: 5488 - protein, 408 aa, Natranaerobius sp.
MVYVLAKNGKPLMPTKKHGKVRHLLKDGKAKIVKRTPFTIQLLYESDNYTQPVNLGVDAGTKHVGLSATTGNEVLFEGEAQLRTNIQELLSTRREARRARRNRKTRYRKPRFNNRKKPNGWLAPSIQNKVDTHLKLVDMVCSILPVSNIKVEVAQFDIHKIKNPEIEGEQYQQGEQLGFWNVREYVLYRDNHTCQYCRGKSKDSILNVHHIRSRQSHGDRPGNLVTLCETCHTKLHKESLENYFHPKDKGFKDESQFTILRWFIYNGIKEKYPDVNLTFGYITKNTRIKNNLPKSHAVDARCISGNPLAKPPVNTLYIKQVRKNNRQLHKFNPSKGGIRKANKAPYLVKGFRLFDKVLYNNRKCFIFGRRKSGYFDLRLLDGTKIHASASHKRLDLIESATSMLKEVS

SEQ ID NO: 5489 - protein, 443 aa, Caldicellulosiruptor sp.; identical to SEQ ID NO: 2385

SEQ ID NO: 5490 - protein, 428 aa, unidentified; identical to SEQ ID NO: 5036

SEQ ID NO: 5491 - protein, 500 aa, unidentified
MHYVYVQDKAGKPLMPTTRYGWVRRALKSGRAKPVTAVPFTIRLTYDPAAHETQPVTLGIDPGRTNIGLAAVTNTGKCLYSARCKTRNKEIPKFMATRRQHRQASRRGERLARKRLAKRLGTIMKSMLERMLPGCEKPVKVKDIINTEARFNNRKRPAGWLTPTATHLLRTHINLAKKIMSILPVTRIAIEMNRFAFMALENKGIRHWDYQKGPLYGYGSLHNAISEQQDGKCLLCRKRSIEHYHHIVPRRKNGSDTIGNIAGLCECCHDLVHKDTVAAEKLQSKKSGLNKKYHALSVLNQIIPYLAGELFQMFGENLFAVNGWDTKQFREDNCIQKGHDIDAYCIACSTLPDRTILDVPKHSFKILQFRRHNRANIHRQTERTYKLDGRTVACNRHKRTDQKEDSLAEWYETAVKEYGAREADAMRSRLTVTKSTRSYNTPGRLMPGTVFIFKGKRYVMSGQLTGGKYLRAVGEALQTRNFPVKKCDIVAENTGLVYAS

SEQ ID NO: 5492 - protein, 471 aa, Caldicellulosiruptor sp.; identical to SEQ ID NO: 3268

SEQ ID NO: 5493 - protein, 470 aa, unidentified; identical to SEQ ID NO: 2825

SEQ ID NO: 5494 - protein, 413 aa, unidentified; identical to SEQ ID NO: 2605

SEQ ID NO: 5495 - protein, 421 aa, unidentified; identical to SEQ ID NO: 4195

SEQ ID NO: 5496 - protein, 406 aa, unidentified
MVYVQDIDGKPMMPTTRHGKVRRLLKANKATVVNLCPFTIRLTYAISGYKQEIVLGVDAGTKHVGLSATTKSKELYSSEVILRSDIVELLSTRRESRRTRRNRLRYRKPRFENRVKSKRIGWVAPSVRHRIDAHIRIINNVCSILPVSRVIVEVAQFDTQKIKNPDISGNEYQEGDQLGFWNVREYVLARDGHKCQHCKGKSKDPILNIHHIESRKTGGDSPSNLITLCETCHKEFHKGNIKLKVKRGKSLRDAAVMGIMKWRLYDKLKSLYPNVKMTFGYITKHDRINHGIEKSYVSDAFVISRNFDSERLGYYYKLKLVRRHNRQIHKMKAPKGGNKRMNQSPFKVFGFRLFDKVMFQGKERFIYARRLRGLFNIRDINGENKKDISYKKLEYVSHGLISIVAG

SEQ ID NO: 5497 - protein, 417 aa, unidentified
MPCSPAKARLLLKEKKAIVKRRTPFTIQLTIATGEAKQPITLGVDSGYKHIGLSATTEKAELYASQVELRQDITDLLSARLALRRSRRSRKTRYRAPRFDNRVASKREGWLAPSVENRITAHMSRVEAVMRVLPVTAITVETAAFDTQLLKNPDIAEAAYQQGEQLGFWNVREYVLFRDGHVCQHCRGKYKDPILNVHHIESRRTGGDAPNNLITLCETCHKAFHRGEIKLKVKRGKSFKAETFMGIMRWTLFERLKKAHPELSVRNTYGYLTKHKRISHGIAKSHCADAYCIADNLGAKRLEGFFFQKQTRKHNRQIHKLSILKGGLRKKNQAPYEVKGFRLFDKVICKGEEAFIFGRRTSGSFDVRRLDGTRISAGISCKKLRLLEPRTTYLTEFRKEAALPPLHECSGSRAEFR

SEQ ID NO: 5498 - protein, 471 aa, Caldicellulosiruptor sp.; identical to SEQ ID NO: 3375

SEQ ID NO: 5499 - protein, 431 aa, unidentified
MPNKVYVINKHGRPLMPCSPAKARHLLDAGKAKVKKRTPFTIQLVYGSSGYTQEVILGVDAGSKTIGLSASAETEELLSAEVKPRNDVVDLLSTRREFRRARRNRKTRYRKPRFDNRVRSKHKGWLAPSVEVKIQEHITSIKRVCRILPVSKVVIETAEFDLQLLKAIADGKPVPQGEDYQKGEMYGHYNVRQYVLWRDDYTCQCCGAHATKKKEVRLHVHHLESRKVGGDAPDNQVTLCESCHEKLHKGLIAEKDFKKRKRRSTRDATFMGIMRKTLMQMLCSELPIPVIETRGYITKATREKLLVLPKSHTNDALAIAQGKQGFNVGYLPEIAQIDKICTIRPVRHHNRQLHKVTILKGGIRKSNQAEKYVFGYRLFDKVQFNGQDCFIWGRRTTGIFTIKTINGKMIKDGISFKKLKPVEKSTSYLIA

SEQ ID NO: 5500 - protein, 414 aa, unidentified
MPCSPAKARLLLKEKKAIVVRRTPFTIQLTIATGESKQPVSLGVDAGYKYVGLSASTEKAELYASEVELRQDITDLLSARRALRQSRRNRKTRHREPRFDNRIRTKRKGWLAPSVENRINAHLSRIEAVLRLLPVTKITVETASFNLQLLKNPDISGKEYQEGEQLGFWNVREYVLFRDGHVCQHCYGRSKDPVLNVHHLESRRTGGDSPGNLITLCETCHKALHRGDITLKAKRGKSFRAEAFMGIMRWEVLNRLKVSHPELEVNNTYGYRTKHARIANGIAKSHCADAFCIAGNLGAKRLGEFFFQKQTRRNNRQIHKLSILKHGLRKRNQALFEIKGFRLFDKVVCKGEEGFIFGRRSSGYFDVRKLDGTRISAGISYKTLHLLEKRQTYLTEIRKEEALPPLPEGRGLRA

SEQ ID NO: 5501 - protein, 429 aa, unidentified; identical to SEQ ID NO: 3501

SEQ ID NO: 5502 - protein, 442 aa, unidentified; identical to SEQ ID NO: 2903

SEQ ID NO: 5503 - protein, 471 aa, Caldicellulosiruptor sp.; identical to SEQ ID NO: 3268

SEQ ID NO: 5504 - protein, 410 aa, unidentified
MVYVQNIEGKLMMPTTRHGKVRRLLKLKKAVVVNLCPFTIRLMYETTDYKQEIVLGVDAGTKHVGLSATTKSNELYASEVILRSDITDLLATRRELRSTRRSRLRYRKPRFNNRVKSKKEGWIAPSVSHKINAHTRVINQVYSILPISKIIIEVAQFDTQKIKNPDISGKDYQSGDQLGFWNVREYVLCRDGHKCQYCKGKSKDNILNVHHIESRKTGGDSPSNLITLCETCHKEYHKGNIDLKIKRGKSLRDASVMGIMKWVLYDKLRSIYPNVNMTFGYITKYNRINNGIEKSHVSDAFTISKNFCAKRLGFYYKRKLVRRHNRQIHKMKIQKGGKKKMNQSPFKVFGFRLFDKVMYQNDCYFIYGRRSSGFFNIRDIDGKNAKDVSYRKLKHISHGLNSIVIDCNRI

SEQ ID NO: 5505 - protein, 458 aa, unidentified
LKGVGMMSEIKKVDYVYVVDSNGTPLMPTSRLGMVRRWLKTGQAKWFGNSRKTIQFVRPVTTNTQELTLGVDAGFHLGLSVVGNNREYYVAESLRKSEKDRITSRRELRRTRRNRLRYRKARFDNRRRKDSWLAPSIQHRLDFTIKEIKRLYMFLPITNLVVEVTPFDNQKLLNPDIQGWQYQKGKMYGFKTIKDYLLARDNYRDALDGKQYPASQLRVHHLVQRKDGGSNQPDNLVLLSDINHNQANHNNGILAKLRENRQKTLDYRGAYFMSILATRLSNYFDNYTITQGYLTANLRQKYEIEKSHLNDAFVIAGGTDITLRTNNVYSRQKLRNNNRVLQKFYDAKYIDSRDGKQKAGKELSSGRTRRSQELNYDNLRQFRKEKVKKGRVSIRKGHYQLRPHDVVLNTRTNRIETVKGVQNSGTVIKFQTGKTCSIKSVISLYHVNGILEKKMESI

SEQ ID NO: 5506 - protein, 496 aa, Streptomyces sp.; identical to SEQ ID NO: 4777

SEQ ID NO: 5507 - protein, 346 aa, unidentified
LYSQSKIAQSAQEYGVCRGGIENRRSRRNRKTRYRPPRFDNRVHSKHKGWLAPSVEVKIQEHITVIKRICRILPITLVRVETAEFDTQRLKAMLEGKPLPVGTDYQLGEMYDEYNVRQYVLKRDNYTCQCCGAHTTAKKAVKLHVHHLESRKMGGNAPGNLITLCITCHDALHKGKVSLDNKKRGKPMRDAAFMGIMRRTLMSRLREELPITVQGTYGYITKMQREQNDIKKSHVNDARCISKHPLAEPCSVCYRTKAIRHHNRQTHKANFSKGGIRKRSQMPYVVEGYRLWDKVLYKGQECFVSGRRTSGSFTLKKLDGTRISKGVTFKKLRLLEPTTNYLIERM

SEQ ID NO: 5508 - protein, 431 aa, Klebsiella sp.; identical to SEQ ID NO: 2435

SEQ ID NO: 5509 - protein, 517 aa, Leptospirillum sp.
MLPQSRALEAADADNREGQDETVGGKGAIPKPVANIPEGRRFERSALRPQGQNNVRFDGGFVQVFVLDKKKKPLMPCHPARARELLREGRAVVHRIAPFTIRLKGRIGGETQPIRVKLDPGSKTTGLAVVREEETDGEKTAHVLFQAEIHHRGSAIKKKLDQRRAFRRRRRSQLRYRTPRFDNRTRPDGWLPPSLRHRVDTTLAWVERLRRLVPVSELSQELVRFDMQKIENPEISGVEYQQGTLAGYEVREYLLEKWGRTCAYCGSENVPLEIDHIHPRSLGGSDRVSNLTLACRSCNLKKGNRPVGEFLAKTPERLSTILARAKAPLKDAAAVNTTRWALFQALKATGLPVETASGGRTKYNRTRLGIPKGHSLDAACVGKVDRIEGWNRPCLSVKATGRGSYQRTRLDSFGFPRGFLTRTKAHFGFQTGDRVRAIVTKGKKTGTYAGRVAVRSSGSFNIQTGSGVVQGISYKDCRLLQRADGYGYSIHPITEKGEAGEALSLPGMNAGVSRARG

SEQ ID NO: 5510 - protein, 414 aa, unidentified
MVYVINKQGQALMPTERFGKVRRLLKNSLAHVVCRIPFTIQLDYDTTDYTQPVSLGVDADSKHIGISATTSEKELYAADVELRNDIVDKLSTRRELRRTRRSRLRYRKARFNNRVSSKRKGWLAPSVENKIQTHLTVVEKIHKFLPITNIVVETASFDIQKINNPSISGVEYQQGEQLDFFNVREYVLFRDNHTCQHCKGKSKDKVLNVHHIESRKTGGDSPNNLITLCETCHKAYHRGEFELNVKRGKSFRDSAFMGIMRWSFYDRLKNIYPNVSMTFGYITKNTRITNNLPKEHYVDARCISGNPTAKPLGYYFYQKKVRCQNRQIHKANFLKGGRKKLNQAPFLVKGFRLFDLVEYKKELYYIFGRRSSGSFDIRKLDGTKVNKGSINCKYLRLVDKRKSILIEKRMQVNL

SEQ ID NO: 5511 - protein, 430 aa, unidentified
MPNKVYVINKHGRPLMPCSPAKARHLLDEGKAKIKKRTPFTIQLLFGSTGYTQEVILGVDAGSKTIGLSASAETEELLSAEVKPRNDVVDLLSTRREFRRARRNRKTRYRKPRFDNRVRSKHKGWLAPSVEVKIQEHITSIKRVCRILPVSKVVIETAEFDLQLLKAIADGKPVPQGEDYQKGEMYGHYNVRQYVLWRDDYTCQCCGAHATKKKEVRLHVYHLESRKVGGDAPDNQVTLCESCHEKLHKGLIAEKDFKKRKRRSTRDVTFMGIMRKTLMQRLCSELPIPVVETRGYITKATREKLLVLPKSHINDALAIAQGKHGFNVGYLPGILQIDKIYTIRPVRHHNRQLHKAAILTGGIRKSNQTEKYVFGYRLFDKVQFNGQDCFIWGRTTGIFTIKTINGKMIKDGISFKKLKLVEKSTSYLIA

SEQ ID NO: 5512 - protein, 429 aa, unidentified
MLVYVVDKNGQPLMPTHNGAKVRVLLKQRRAKVVSKCPFTIKLLYESASFTQPLTLGVDTGSKYVGSAVINDITSEVVYESQTELRDDIKKKMERRKAFRRSRRNKLRYRPSRFNDRKASKRKNHYSPTLISKFQGHTREIKFIKSILPVADVILEVGEFDPQLLQDPTLVFHKWDYANGELYQQENFKQATRARDNYTCQCCGKKDCRLEVHHLIPRSRGGSDKLANLITICSDCHQLAHSSEEQLLLFQRKFGKKAKGTLRYATQMNILRSMLQKEYPDAELTYGFITKEVRRIFKLEKTHTIDACVIASRGTLFRNNNSNKYKKKCVPKGDYVRTSVSHRKFIVLPKRKIAGFRRYDKVLYNNKEYFVVGRMSTGHVYLIDIDNNRVQIERTKRSTSEKYVSKAKIKISLIKKVASARGYICVRIF

SEQ ID NO: 5513 - protein, 420 aa, unidentified
MQYVYVLSKHGEPMMPCSPGKARLLLKQQKACVVRRTPFTIKLLYGSAGYKQPITLGVDAGSKHVGLSASTEKRELYREEFTPRNDVVELLSTRRQNRRSRRNRKTRYRAPRFDNRVHSKHKGWLAPSVEVKIQEHITIIKRICKILPISLVRVETAEFDTQRLKAMLAGKPLPVGTDYQLGEMYDEYNVRQYVLKRDHYTCQCCGTHNTAKKVVKLHVHHLESRKTGGNAPSNLVTLCTTCHKNLHKGRVTLDGKERGKPLRDAAFMGIMRKTLMVRLKEELPIPVQGTYGYITKMRREQNDIKKSHTNDARCISKHPLAEPCSVCYRTKAIRHHNRQTHKANFSKKGIRKRSQMPYLVEGYRLWDKVLYKEQECFVSGRRSSGSFTLKKLDGTSISKGVTFKKLRLLEPATNYLIERM

SEQ ID NO: 5514 - protein, 412 aa, unidentified
MFVDMVYVQDINGKPLMPTTRHGKVRRLLKDKKAVVVNLCPFTIKLTYVTSDYKQEIVLGVDAGTKHVGLSATTKSKELYSSEVILRNDIVDLLSTRRELRRSRRNRLRYRKPRFDNRIKSKRPGWVAPSVKYKVDAHIRVIDNVCSILPISRIVIEVAQFDTQKINNPNISGKEYQEGDQLGFWNVREYVLARDGHKCQHCKGKSKDPVLNVHHIESRKTGGDSPSNLITLCETCHKEYHKGNIDLKIRRGKSLRDAAVMGIMKWRLYEELKSKYDNVSMTFGYVTKYNRIKHGIEKSHVFDAFVISKNFDAIRLGYYYKVRLVRRHNRQIHKQKIPKGGIKRLNQSPFEVFGFRLFDRVMFENSYYFIFARRKTGSFNIRDIDGKNQRDITYKKLKLSRCKRFMVQKEMD

SEQ ID NO: 5515 - protein, 415 aa, Bacillus sp.; identical to SEQ ID NO: 2431

SEQ ID NO: 5516 - protein, 406 aa, unidentified
MVYVQDINGKPMMPTTRHGKVRRLLKDKKAVVVNLCPFTIKLMYVTSDYKQEIVLGVDAGTKHVGLSATTKSKELYSSEVILRNDIVDLLSTRRELRKARRNRLRYRKPRFDNRVKSKRPGWIAPSVKYKVDAHICVINNVCSILPISRIVIEVAQFDTQKIKNPEISGKEYQEGDQLEFWNTREYVLARDGHKCQYCKGKSKDSILNVHHIESRKTGGDSPSNLITLCETCHKEYHKGNIDLKIRRGKSLRDAAVMGIMKWRLYEELKSRYDRVFMTFGYITKHNRIKYGIEKSHTSDAFVISKNINAKRIERQYLKRLIRRHNRQIHKMKILKGGKKKNNQAPFEVFGFRLFDRVLYNNKIFFVYGRRKSGSFNIRDFNGENSKDVSRKKFKLIRGKRHPIILK

SEQ ID NO: 5517 - protein, 415 aa, Bacillus sp.
MRVFVKNLRGEPLMPCSSRKARLLLKQGKAMIVGYTPFTIQLQYATGETVQPVTIGVDSGAKHIGIAITTEDKVLAKGTIELRQDVKENLTLRATLRRGRRQRKTRYRKARFLNRKKKEGWLPPSIQSRVDNQVHWIETFCSLLPSPKVIVEVGKFDVQKLKNPDIQGTEYQQGDAFGFWNTRYYVFARDNYTCQICKKKGGILHTHHIIERCKGGSDMEDNLVTVHDECHQKFHQGKLKHTFKKPKQYKETAFMNILRLQIMNHLDCDITYGSYTTLKRRGLDLSKTHVNDAIAITNPTHIQEYDQSGEFCIKQFRKKKRSLHEATARKGRETKNTNVKRNKKNTPYVDGIYLGDKVKVFGQVGFVAGFTGKMVYVQDIHGQYIQNPAKSYKQVKVSDIERIHHTNNWKFLQIS

SEQ ID NO: 5518 - protein, 431 aa, Calothrix sp.
MEGHMSKIFLLDTNQQPLNPIHPAQARQLLKNKKAAIWRRFPFTLILKEAKPEVEVQPLRLKLDPGAKTTGLTLVNDTTGEVVFAAEIQHRGFQIREALTSRRQLRRGRRNRKIRYRAPRFNNRRRKEGWIPPSLQSRIDNIITWVKRLQKIANISDISQELVRFDMQKMENPEISGIEYQQGTLAGYETRQYLLEKWGRKCAYCGVEHVPLQVEHIHAKAKGGSNRISNLTLTCQKCNLKKGTKDIKDFLNKEPQKLELILKQAKKPLASAAAVNTTRFTLLNALKKAGLPVETGSGGLTQFNRTNQGLEKAHWVDAACVGESTPKLIIKGIKPLIITAKGHGTRQMCRTDKYGFPSRYVPRNKYVYGFQTGDIVKAVVTKGKKVGIYIGRVAVRTTGSFNILTKIGLVQGVSYKNCKSVHKKDGYSYAY

SEQ ID NO: 5519 - protein, 501 aa, Streptomyces sp.
MTTFSAGEQTHQAVLPQQPALESVRADTPGSRDETAHGHPATKRGTGREHGRGETGGRGARARQRHAKSTASAAQAAESGSGDAPPGDQLHEGGIGVGRVFVLSKERQPLMPCHPARARELLTEGRAVVARQTPFTIRLKDRTRAESEVDGVQLRIDPGSKGTGLALTDEKKETDQHGTTVTVRRGLISVELQHRADQISARMRQRAGYRNRRRSANLRYRARRSLNRKQRPDWLPPSLRHRVVTEIHIEQVAFDTHSMSADRPLRGAEYEQGPLAGTNARAYLRAKWNKACAYCDATGVPLNIEHLRPRGRGGSSRISNLVPACVPCNRAKGTQSLEAFLSHRPDRLAEILQQLKTPLTDAAAMNAIGQQLTAALDTLGTLIHAWPGRLTKMNRVAMGPAKTHTLDALSVGPLDHTAGCKIVRFPSHVLVAKATGRGSYARTTPDRYGFPRLLRSTAKQHFGYVTGDLAGRRVWLQQAARGISVNFSEKHLSPGKQVLRV

SEQ ID NO: 5520 - protein, 417 aa, unidentified
MPCSPAKARLLLKEKKAIVKRRTPFTIQLTIATGEAKQPVTLGVDSGYKHIGLSATTEKAELYASQVELRQDITDLLSARLALRRSRRSRKTRYRAPRFNNRVASKRKGWLAPSVENRIAAHMSRVEAVMRVLPVTAITVETAAFDTQLLKNPDIAGAAYQQGEQLGFWNVREYVLFRDGHVCQHCRGKSKDPILNVHHIESRRTGGDAPNNLITLCETCHKAFHRGEIELKVRRGKSFKAETFMGIMRWTLFERLKKAHPELRVRNTYGYLTKHKRISHGIAKSHCADAYCIADNLGAKRLSGYLFQKQTRKHNRQLHKLSILKGGLRKKNQAPYEVKGFRLFDKVICKGEEAFIFGRRTSGSFDVRRLDGTRISAGINYKKLRLLEPRTTYLTEFRKEAALPPLHKCRGFRAEFL

SEQ ID NO: 5521 - protein, 429 aa, unidentified
  REGION 1..429: note = Ga0315294_10056449
MLVYVVNKEGKPLMPCSPTKASKLLKSGKAKIHKYEPFTIQLLFGSSGYKQPITLGVDSGSKNVGIVAVTEEGKVLYTAEVELRRNIKELLDTRRMLRQNRRQRKTRYRKSRFLNRKREDGWLPPSIRSRIFSHVKLVIDVTKILPIKDIVVEVGLFDVQALMNPNIEGKEYQEGLLKGYDSVKEYVKVRDKYVCHYKDLRTDILCSKKLEVDHIIPKSKSGADRPTNLVCSCSEHNRIKGNMSYKEFTGKSRPIMESFKETAFMNVVKSHLVPLLRKLKPVTITYGYLTRLVRISFGLEKSHMNDSLAITNIKPKEYIGNSYRIKQVRKKKRSLHQMTPYYSKKGNPLSERWKKNTKEIIVRGKKWCLRDKVKVENRVGFISGFSSPQLDVSDIKGNIVRVFGRTSDSISTKYAQLICRNNNWQCCLV

SEQ ID NO: 5522 - protein, 487 aa, unidentified
MHNIGEVDHRTQVLPYSFITIVRKECSVMSNSICVISKNGERLMPTFRPGRVRHLLKDGKAKIVKHQPFTIQLLYDSNNYTQPIEICEDVGYNYIGISVKSTTHEYVSAQYDTLQDEKEHHDSCSKYRRTRRNKLRYRKARFNNRKRKEGWLAPSLEHKKQLNINLIEWYMSVIPITHTTVEVGSFDTMLLQAIQKGEAKPEGTDYQQGPRYNLATLREAVFYRDNYTCAVCGRSSMKDGAILHMHHMLYWKGRHGYQLDELVTVCEKCHTSPNHQKSGVLFGFGENKKFANLSGAAFMNAVRWQIVNALYATYGKDFVTVTYGAMTKERRILLGIEKTHNNDAYAMGDYHPAHRCEFKHYQKRRRNNRVLEKFYDATYIDARTGNKAKGKELFNGRINRNHKKDSENLHKYRARKTAKGRRSIRNKRYTIQSGDTILYAGKKHITSGCFNKGSWLRISVNGTVKSIAVSKVKLINHIGAWKEDTSI

SEQ ID NO: 5523 - protein, 458 aa, unidentified
LTKDENRPSGRTTGLRAEQAEPAGIRKGDTLKVFVLNMRGKPLMPCSPAKARHMLKAGKAVVVRRTPFTIKLTIATGETKQDVTLGVDAGARHVGISATTEKEEVFASEVALRQDITGLLADRLAFRRARRNRKTRYRAPRFNNRVRSKHKGWLAPSVENRIQAHISRIEAVCRLLPVTKIVIETASFDIQKIRNPEVEGTGYQQGDQLGFWNVREYVLFRDGHICQHCRGRSKDPILNVHHLESRKTGGDAPNNLITLCETCHKAYHAGKIKLKVKRGQSFRAEAFMGIMRWTLLDRVRKAHPGLPVENTCGYLTKNTRITLGLPKAHCVDAYCIAGNLKAVRRGVHLYQRQVRKHNRQIHKCTVLSKTLKDGTKIGYRKLNQTPHLVKNFRLFDKVRCLGQTGFIFGRRSSGYFDVRRLDGVKLSPSISWRKLTLLEKRSTYLTELRKQDGASSPV

SEQ ID NO: 5524 - protein, 456 aa, unidentified
MSTCVCVLSNSGERLMPTFRLGKVRHLLKDGKAKIVKHHPFTIQLLYDSKTNTQPIETCEDVGYNYIGISVKSESHEYVSAQYDTLQDEKEHHDDCRKYRRTRRNRLRYRKSRFDNRKRDKGWLAPSLEHKKQLNISLIERYVSVIPITHVTVEVGSFDTMLVKAIQEGKVIPEGADYQKGPRYNLATLREAVFYRDNYVCKVCGRKATEGAILHMHHMFYWKGRHGYQLDELVTVCEKCHTPANHQKGGKLYGFGKDKKFANLSGAAFMNAVRWQIVNALYATYGKEFVTITYGAMTKEKRIALQLEKTHNNDAYAMGDYHPARRCKFRHYQKRRRNNRVLEKFYDATYVDTRTGNKAKGKELFNGRISRNHKKDCENLHKYRSKKVSKGRRSIRRQHYAIQPYDTVRLEGKTYITSGCHNKGTRLLIPVNGKSKSVAISKVQVVCHAGAWIQII

SEQ ID NO: 5525 - protein, 512 aa, unidentified
MSTVYVLNKDGKPLMPTTRGGHVRHLLKEQKARVVRTKPFTIQLLYETDDVVQLLYLGIDPGRTNIGVAVVKTDGTAVFTAHLETRNKEIPKLMKKRKNSRRARRTNGRRCRRQRRAKANGTISKKCVKQDTAQNGSVSKRAKKIGVIKRHLPGCEKEVLCIGIKNKEAKFSNRVRPEGWLTPTANQLLQTHINLVKKIQKFLPISDVVLEVNKFAFMQLDNPNIQKWQYQQGPLYQKANLEETVSEMQEHHCLFCKKKIDHYHHVVPQHKNGSNTIDNIIGLCTQHHDLVHKDATWQKRLAKKKTGLNKKYGALSVLNQIIPALTKELSSLFPKRFFVTNGKSTYDYRAAHGVSKDHWLDAYCIACSVLPNDTCDKTINSRVPYELKQFRRHDRRALNNENMSRVYTFNGKMVATNRHKATEQTTDSLEEFRQRQPNDVCNLKVKEHHPTYRNMNRNYPGSVFLVGNQVHVMQGIAGSKDGEATTYKDTNANSIAAGKCKFVAKNSGILFV

SEQ ID NO: 5526 - protein, 416 aa, unidentified
MLMAVAVVSRTGVPLMPTSPYRARKLLASGKAEKYGYDPFTIRLTERETGDTQPAELCMDTGYIHIGVSVKSEKHEYLALQIDTLTDEKKKHEKCREKRRNRRSRKGYRKPRFDNRKRDKGWLAPSLEHKKEIHVRAAERICRVVPVTDITMEMGNFDTQVLKAREEGRPLPQGTDYQQGERYGTATLREAVFSRDNYTCLCCGRTMKDGAYFHVHHIRYRSQGGTDRMANLATVCEKCHTPANHQPGGKLYNWKPEIKSFKGATFMTAVRWQMYREIKEKIPDVSIHLTYGAATKERRRALDIEKSHVNDAFVMGRFHPGHRARPELYLKKRRNNRVLESFYDARYIDSRDGKRKSGKELFNGRISRNHKKDSENLHRYRKKKVSRGKRTIRVQRYKIQPHDIVLFEGRKHETSG

SEQ ID NO: 5527 - protein, 369 aa, unidentified
MKEIPEKEICQDEIRCGIDDGGLHVGIALVQKCKTKNKVVFKGTMEQRNDVKHLMEVRRGYRRYHRYHKRYRQARFDNRKSSKREGRIAPSILQKRQATIRVIHWLNKWINITNYWLEDVSVDIRALTDGYQSYRWQYQKSNRLDENIRKAAILRDGGKCMECGKSNCRLEVHHIKPRRRNGSNTLDNLITLCESCHQKTEGQEELYMDRYFSLLKSSDNKNLNYAQHVMIGKMWLRKQLSGLGVLYLTSGGDTANKRIDWNIEKSHANDAVCITDLRPDTCDVKEWTMKPMRRQSKAKTDHVLGIHHRDLVEYTFKNGETHRGYVTALYPEQKAINFQSPTKHCKKVNARKCKLLWKYSKIYWFENAS

SEQ ID NO: 5528 - protein, 529 aa, unidentified
MSTIYVLNKDGKPLMPTTRGGHVRHLLKEQKARVVRTKPFTIQLLYETNDVVQPLYLGIDPGRTNIGVAVVKTDGTAVFTAHLETRNKEIPKLMKKRKESRRARRTNGRRCRRQRRAKANDTISKKCVKQPTAQNGSISKRAKEIGIIKRRLPGCEKDVLCIGIKNKEARFNNRTRPEGWLTPTANQLLQTHINLVKKIQKFLPISDVVLEVNKFAFMQLDNPNIQKWQYQQGPLYKKESLERAVSEMQEHHCLFCDKPIDHYHHVVPQSENGSNTIANIVGLCAEHHNLVHKDAAWQKKLAEEKVGLNKKYGALSVLNQIIPALTKELSFLFPEHSFVTNGKSTYDYRATHGVSKDHWLDAYCIACSVLPSDVCDSNINNHMPYELKQFRRHDRRVLHKANTSRVYTLNGKKVATNRHKAAKQTADSLEEFRQSHPDDVCKLKVKEHHPAYRNLNRNYPGSVFFVGKQVHVMQGIASSKDGKATKYNDTSATTIAAGKCEFVAKNSGILFVQCKFRKVFSDETTKKLQ

SEQ ID NO: 5529 - protein, 359 aa, unidentified
METSYSKSLYTKRRRKKGAKRYWKKLKVQFSSPRPEGWLPPSLQSKTDHHIRWIHRFLDVLPKNTRMVLEVGRFDAARMKNPEVHGELYQRGPQYDYENVKAYVFDRDSYKCRRCHAKAGTRRKDGTVVKLIAHHIDYRSRGASDNPDALASVCDACHTAANHQPGGVLYDWMIKNKRFRRGQRDTAFMNILRRRLFEAFPDAEYTYGNITAARRKELMLPKSHADDAIAIACTGMDISSIRKRPDHVVYVQQVRKKKRSLHEANPRKWSKTKNRFAVRNSKNTKEVNGVCLFDKVKVPGKGYGWVTGFTGTSCYVLDRNGNYVTTADTYNQVAISRLKVIQHSGNWISGLKCPIGNGS

SEQ ID NO: 5530 - protein, 431 aa, unidentified; identical to SEQ ID NO: 3235

SEQ ID NO: 5531 - protein, 478 aa, unidentified
MWLNSSERKEQCCIHGNLGITLGKDSYSLRRGQFCLSLTVTTTRKETTSMYVYVLSQHGEPLMPCSPRKARTMLRDHKATVVRRTPFTIRLLHGCSGYTQRITLGVDAGSKFIGLSACTESKELFAAEVKPRNDVVDLLSTRRELRRSRRNRKTRYRVARFDNRVHSKHKGWLAPSVEVKIQEHITAIKRTCAILPISMVIVETAEFDTQRLKAMLEGKPLPVGTDYQLGEMYDEYNVRQYVLKRDNYTCQCCGIQSTDKAPVKFAVHHKESRHVGGNAPNNLITLCEKCHRLLHAGVITLDEDKRKRGKSFRDAAFMGIMRKTLIQRLRSELSVPAKETYGYITKLLRETHSIQKSHVNDARCIARVPDAKPSDTLYRIRAVRHHNRQLHKTNPIKGGIRKRNQAPYEVFGFHLWDKVLFNGQECFITGRRASGYFALKDFDGKKIHASASYKVLSVVETATSYLIERCIRKPMAAR

SEQ ID NO: 5532 - protein, 333 aa, Bacillus sp.
MLVFVQNQHGEALMPCKPQKATKLLKRKKARIVSYKPFTIQLLYGSSGYKQPIKVGVDLGAKHTGVAVTTNDKVLAKGEIEVRQDSKSLLETRRTYRRSRRNRKCRYRKPRFDNRKRQEEWLPPSVQSRLYNTFHWIDTFLSLAPHSMLTIEVGKFDIQKMINPEIQGEEYQQGQILGYHDVRYFVFARDQYTCQVCKKKGGILNTHHIVYRSHGGSDRADNLLTVCTDCHTHENHQMGAILWKWMVEGKKLPTFKEGTFMNIFRKRVFTKYPQANMTYGSVTTPRRKELGLDKTHANDAIAISGIQSIKSIEITYPIPQIWRRTGHCWSHFK

SEQ ID NO: 5533 - protein, 415 aa, Bacillus sp.
MRVFVKNLRGEPLMPCSNRKARLLLKQGKAKIIGYTPFTIQLQYATGETVQSVAIGVDSGSKYVGIAITTEDKVLAKGTIELRQDVKENLTLRATLRRSRRQRKTRYRKARFLNRKKREGWLPPSIQSRMHNQIHWIEIFRSLLPSPKVIVEVGKFDAQKLKNSDIQGKEYQQGDAFGFWNTRYYVFTRDHYTCQICKKKGGILHTHHIIERCSGGSDLADNLVTVHEECHQKFHQGTIKHIFKKPKQYKETAFMNILRLQIMNRLGCEITYGSYTAPKRKELRLSKTHYNDAIAITTPTKLQEYEQSGEFRIKQFRKKKRSLHESTARKGRKTKNTTAKRNNKNTPKVHGIYLGDKVKVFGQVGFVTGFTGKMMYVQDIDGHYLQNPSKSYKQVKISDIECIHHNNNWLFLQIS

SEQ ID NO: 5534 - protein, 464 aa, Moorena sp.
MTPRSELQPLALSPIIKTKAKRVVGKTQAIATLSRNTLPILRHLTMQNYVFVVDTNKQPLNPISPKKARRLLDKGKAAVFRMYPFTIILKTAVDNPTISPCQIKIDPGSKVTGFALVQNHQVIWGMELEHRGGLIKKKLESRRAVRRGRRNRNTRYRKPRFLNRRRPGGWLAPSLEHRVLTIETWVKRLTKFCPVDEIWIERVKFNTQKIQNPEINGVEYQQGELAGYEVREYLLEKWGRECTYCGKKSVPLQIEHIRPKSKGGSDRVSNLCLACEKCNQRKGNKPIEEFIKKKPNLLQKIKTKAKQPLLDAAAVNTTRNKLVKVLQRIKPVITGTGAQTKYNRTKLGFPKEHWIDAACVGNIETLVLKTSQPLLVTCKGQGGRQKAVLNKHGYPIRHNPLRPIKGWCSGDIAKNLLTGKFGRVNPRSKSNSFNYTVPRKKAISLHVKNLTRVHRKDGYTYGFC

SEQ ID NO: 5535 - protein, 442 aa, Lactobacillus sp.; identical to SEQ ID NO: 3826

SEQ ID NO: 5536 - protein, 451 aa, unidentified; identical to SEQ ID NO: 3199

SEQ ID NO: 5537 - protein, 431 aa, unidentified
MPNKVYVINKHGRPLMPCSPAKARHLLDAGKAKVKKRTPFTIQLIYGSSGYTQEVILGVDAGSKTIGMSASTTKEELLSAEVKPRNDVVDLLSTRREFRRARRNRKTRYRKPRFDNRVRSKHKGWLAPSVEVKIQEHIIAIRCVCGILPVSKVVIETAEFDLQLLKAIADGKPVPQGEDYQKGEMYGHYNVRQYLLWRDGYTCKCCGAHTTKKKEVRLHVHHLESRKVGGDAPDNQVTLCESCHEKLHKGLIAEKDFKKRKRKSTRDATFMGIMRKTLMQRLCSELPIPVIETRGYITKATREKLLVLPKSHTNDALAIAQGKQGFNVGYLPGIIQIDKIYTIRSVRHHNRQLHKATILKGGIRKSNQAGKYVFGYRLFDKVQFNGQDCFIWGRRTTGIFTIKTINGKMIKDGISFKKLKPVEKSTSYLIA

SEQ ID NO: 5538 - protein, 412 aa, Eubacterium cellulosolvens; identical to SEQ ID NO: 4755

SEQ ID NO: 5539 - protein, 471 aa, Caldicellulosiruptor sp.; identical to SEQ ID NO: 4560

SEQ ID NO: 5540 - protein, 426 aa, unidentified; identical to SEQ ID NO: 3614

SEQ ID NO: 5541 - protein, 452 aa, unidentified
  REGION 1..452: note = Ga0315294_10029339
MSKQTLQREFQNVPTGAPLACSPTSTPLNRDERTSVANKVLSCNNPEVGLRKRVSGRKVIVPVLSINGSPLMPCTPAKARHLLERGKAKVVSLNPFAIKLTFECENKVQEVSLGIDSGYKYIGFSAITKIKEVISGEIGLDDKTSKRLTERKMYRGNRRSRLRYRKPRFDNRKTPKGWLPPSVQRKFDTHLNMVSKLKRLTPAKRVTIEIGAFDIQKLMEPEISGKEYQQGDLYGHNNLKAFLFSREHGKCQLCDKEIVKGEKAHMHHIIPRSETGTDRPSNIALLHEDCHDKLHKKSLYKKLKAPKQYKAETFMSIVADKFKEILNCDVTYGYETATKRNLLGIEKSHVNDAFVIAGGTNQKRCLPYKVEQKRVNNRTLQTNRKGFIPSIRKKRHEIQNRDFVWIGGKKYLCGGVFSKGRQIYYFDDIERKTICYKKVSRFFSTGSLMWMN

SEQ ID NO: 5542 - protein, 460 aa, Methanohalobium sp.
LSKGDGLQDRVTCTIAERGVISMVFVLNKNKKFLTPCHPAKARILLKARKATIHKKYPFTIRLKELKSDDIKDDFRLKIDYGSKHTGLAILKNNKDVIWLAQIHHRTDIKKKLDDRRSFRRRRRSKNLRYRKPRFDNRKKPKGWLPPSLQSRVDNIQTWVRKLMKLIPINSISYENIKFDTQLMQNPEIKGVEYQQGTLKGYEVREYLLEKFQRTCAYCDKQNVQLEVEHIVPRSRGGSDRVSNLTIACHDCNQRKSNLTAEEFGYPEVHEKARKSLKDAAVINATKWKVLDVLKNTGLPVECGTGALTKMNRIKLNLPKDHHFDACCVGESTPDELRFKTNSVLHIHAKGRGSYKRCKLDKYGFPRKPAPRIKYIFGFQSGDIIKAIVENGKYKGTWKGAVTCRSKGYFDIKNGTKRIAQGINHKYFKLVQRFDGYTYQLDRLNLNSNTNTDGRNSSHC

SEQ ID NO: 5543 - protein, 443 aa, Caldicellulosiruptor sp.; identical to SEQ ID NO: 2385

SEQ ID NO: 5544 - protein, 426 aa, Bacillus sp.
MVVFIKNKHGEPLMPCSHRKARLLLKEKKAKVLTYKPFTIQLLYGSYGYKQKVYVGVDLGAKHLGLAITSEDKVLIKGEIELRQDVKSLLDTRRIYRCSRRNRKNRYRKPRFQNRTRPEGWLPPSIQSRIENTFFWIDKFCSLVPNPKLTIEVGKFDSQKMLNPDIQGVEYQQGQTHGYYDVRYFVLARDNYTCQVCRKKNKIFNTHHIVYRSHGGTDRADNLITVCMDCHTYENHQKGSILYKWMMEGKKLPRYKEGAFMNIVRRRVFTNYSHAKFTYGSTTTPKRKELGLEKSHANDAIAISGISTINKHTCSMFKIKQFRKKKRSLHEATARKGRKTKNITSKRNEKNTKQLKSFSLNDKVRAFRRIGFITGFTGTSGAYVKMIDGEYITMPNKNYKQIHLNQLERICRNNNWQFIQSLQDNA

SEQ ID NO: 5545 - protein, 312 aa, Methanohalobium sp.
MRVFVISKNKKPLMPTRPAKARRLLQSGKAKVIRRTPFSIKLLYETTEYTQPVVAGMDSGSKHIGCAAVANDEVLYQSEVELIDDISKKLQQRASYRRNRRSRKTRYRKPRFNNRGNSKKDERIAPSIKSKVQSHERERRFVESILPVKKWIVETASFDIHKITNPNVSGTGYQNGDLKGYYNIRTYVLHRDNYTCQKCKNRSKDPKLECHHIVFRSNGGTDRPDNLITLCETCHGKLHDGEFTINKKPSNTKHPTEMGIVRSQIRKLNWKFQETFGYITKYKREQKLNLEKTHYNDAVAICCNENNPNPNI

SEQ ID NO: 5546 - protein, 442 aa, unidentified
MSTSVFVLDKKHRPLMPCRPARARRLLRAGRARVVKRFPFVIRLVDRTVEQSEVQPVLIKLDPGSRETGAAVVRDDGKKRHHALAFFVIKHRGGAIRDALKARSAFRRRRRSQNFRCRSPRFLNRVKPKGWLPPSLRHRVETTLSFVRRMCRYLPVSGIAAELVKFDSQKLQTPEVSGIEYQQGTLFEYEVREYLLEKFGRKCVYCGAEGVPLNIDHVVPRAKGGSNRVSNLVLACVSCNQKKGARSLEDFLKGKPEVLARVRRELKTPLRDAAAVNATRWVLFNELKATGLPVETGSGALTKLNRHAFGVEKEHWLDALCVGRLNGVVTRKGLNVLEIRCMGRGSRQRTRLTKYGFPRGYLMRQKCVHGFATGDMVEANVPKGKKAGLWRGRVAVRVSGSFNIQTPKGVIQGVGWKHCRLISHNDGYGYAWLGHAPHSSPA

SEQ ID NO: 5547 - protein, 471 aa, Caldicellulosiruptor sp.; identical to SEQ ID NO: 3375

SEQ ID NO: 5548 - protein, 507 aa, unidentified
MPEYIYVLGIDGKPQMPTKRRRHVQKLLNTGKARIAEHVPFTIQLLYENEPVLQSVVMSEDPGRTNIGAAVVDLNGKLLFSAVVETRNKEIKKLMSDRKAYRRASRNGERKARQRLAKRFHTMLKAGLLMRKLPTYGDEKYITCNYIRNTEARFCNRRRSKGWVTPTVEHLIRTHINLIHKIQNYLPITDVAIEVNRFAFMLLEDPSITGIDFHNGPLKGFDNVNAAVADMQHGKCLLCGKPINQYHHIIPQSKGGSNTLKNLAGLCKECHVAVHTDEKTSKRLQSKKDGLMKQYTALSAINQAIPFICQRLEVEFGKEYVHYCTGLETSIMRSSFGFEKTKDNQLHEVDAYCIALQSTGIVPNTVPTFDKVYQVKQFRRQNRANINNMRERTYYLDGKVVAKNRKSRFEQKGESLETWFQKVIEKYGIKEAERMRSRLKVKKSTRYYNTPGRVMPGAVLYYRGERYVLSGQHCKGKYYRAVGQQTREFTSTDCKIKKQNEGLVFLG

SEQ ID NO: 5549 - protein, 512 aa, unidentified
MSTVYVLNKDGKPLMPTTRGGHVRHLLKEQKARVVRAKPFTIQLLYETNDVVQPLYLGIDPGRTNIGVAVVKANGTAVFTAHLETRNKEVPKLMQDRKKARRARRTNGRRCRRQRRAKANGTISKKCVKQDTAQSKNPSKRAKEIGIIKRRLPGYKKDVLCIGIKNKEAKYTNRTRPEGWLTPTANQLLQTHINLVRKIQKFLPISDVVLEVNKFAFMRLDNPDIQKWQYQQGPLYQKGSLENAVSEMQEHHCLFCDKPIDHYHHVVPQSENGSNTIANIVGLCAEHHNLVHKDAAWQKKLAEEKVGLNKKYGALSVLNQIIPALTNKLSVLFPKHFFVTAGKSTHDYRATHGVSKDHWLDAYCIACSVLPSDVCDSNINNHMPYELKQFRRHARRALNNENMNRVYTLNDKAVAINRHKATEQEAASLEEFRKEHPNDVCKLKVKEHHPTYRNMNRNYPGSIFLVGKHVHIMQGIAGSKDGKATTYKDSNANSITASKCKFVAKNSGILFV

SEQ ID NO: 5550 - protein, 424 aa, Anabaena sp.
MSNYALVIDTNKQPLSPCHPSVARKLLDSGKAAVFRMYPFTIILNKSCSDVVNQAIELKIDPGSKTTGIALVQGEKIIFGAELSNRGSAIKASLESRRSLRRGRRNRHTRYRQARFLNRTRTKNWLAPSLQHRVETTLTWVNKLIKFAPLTRISQELVRFDLQQIDNPEISGIEYQQGTLFGYEVREYLLEKWKRKCAYCGIENVPLQVEHIHPKARGGTNRISNLCLACEKCNIKKGTQDVEKFLAKKPDLLKCILAQAKRPLKDAAAVNSTRWALFSRLKETGLPVSTGSGGQTKFNRTKFNFPKTHWLDAACVGQIGELEIFTNKPLLIKATGHGTRQMCRTDKFGFPSRYVPRIKFVKGFQTGDIVKAIVTTGKKIGKYIGRVAVRATGSFNISASKLVQGISYKCCKIVHRKDGYNYAF

SEQ ID NO: 5551 - protein, 443 aa, Caldicellulosiruptor sp.; identical to SEQ ID NO: 2385

SEQ ID NO: 5552 - protein, 424 aa, Enterococcus sp.
MRVFVRNMQGKPLMPCSNRKARLLLKEGKAKIYQYNPFTIQLCYASREYVQECHIGIDTGTKHIGMAVTSEDKVLFKGETELRQDVKSNLDTRRSYRRDRRNRKTRYRKARFLNRKKKESWLPPSIENRINHTFKWINKLVALLPNPKLHIEVGKFDVAKMINLDVQGVDYQHGQTYGFYNVRYFVFARDNYTCQCCKKSKNKILQTHHIIYRSNGGSNRADNLITVCTDCHTYENHQKGGILYQWQENRKKTKQYKEPPFMNVLRKRIFTQYPNSIITYGSETTPKRKELGLEKTHYNDAIVISGITKIKENPNEWLLIKQFRKKKRSLHEATARKGRKEPNRLQKRNAKNTPYYKGFYLNDKVRVFNQVGHITGFTSSGAYIKNSENEYITLPNKSYKQIGISNIRLLHHNNNWQYIHKHIA

SEQ ID NO: 5553 - protein, 429 aa, unidentified; identical to SEQ ID NO: 3501

SEQ ID NO: 5554 - protein, 406 aa, unidentified; identical to SEQ ID NO: 2703

SEQ ID NO: 5555 - protein, 524 aa, unidentified
MEILRIDWKDICPTGRSGLPQKELFMRPVYVLDMNGKPLMPPCRFGKVRRMLKSGEAKVVDTLPFTIQLDRPTKTHVVQSVTLGCDPGRTNIGLAAVRSDGTDLYRSHCETRNKEIVDLMDARRAARRASRRGERLARKRLAAKHETATTFPDGRKLPGCEKPIMLKDIINTEARFNNRVRPAGWLTPTATQLLWTHLNLIKRISRILPVSDIALEINKFAFMQLDEPDKNKWNIDFQHGPLYGTGGLKAAVRQLQNNTCLLCQENVIEHFHHLIPRSKRGDNTINNIAGLCQKCHEAVHKSADTAEKLSTLKKGQTKRYGGTSVLNQIIPKLVEELGKTYHEHLHLTYGWQTKEFRTKHKLEKTHDTDAYCIAAGTMQTVKPNIRTDVYEIKQFRRHNRANIHHQTERTYKLNGQTVARNRRKRTDQKTDSLAEWFENTVKQYGQQKAEHLRAGLKVRKSTRYYNFKDRVMPGAVFQYEGNRYVVTGQLSGGQYYRAYGKGNQNFPAKKIRIISLNRGLVYVA

SEQ ID NO: 5556 - protein, 419 aa, Moorena sp.; identical to SEQ ID NO: 2999

SEQ ID NO: 5557 - protein, 471 aa, Caldicellulosiruptor sp.; identical to SEQ ID NO: 3268

SEQ ID NO: 5558 - protein, 515 aa, unidentified
MQYLDFTLVVDKNNKPCVPILNGRAGYLLRNNKAKIINHDPLVIKRIDDYKSDFENRDIFELKIDSGYLNIGFSVSDNYHEYLAGQVELLKGMSDRLTNRNGYRRTRRSRIRYRKNKNVDYKTVHNPTYKNGNEEGWFAPSIQHKIDSHIRLIDKIASWVPVDKVIVEVAKFDIQMIKALADGKEISGKDYQNGEMKGYENAAAYVRDRDKHTCRLCGANKNVVIEVHHIQPRSKGGTDKPSNLISLCHSCHRKVHSNNNDNKYFEKVKSMKLSDTYKDSTYMNMVRWELFERLSGKYDVKVGYGYQTKINRRNAGLRKFHYTDAVCINDYKDVTLTENIYIVDQKRCNDRSMETFSDAKYIDVRDGKEKSGNTLYKERLPNAPSKRVTQKEYINNMRQFRGKKIKPGKRTFVCNSYCLKCGDLIYINSGKHKGNIAEVESMQKLPNGNFKIRFTYKAQTVKYPSINIKPEEYELLKNNLLDKVKIVRTRRGMIWRKYNRLEYEATHADQEGMAV

SEQ ID NO: 5559 - protein, 443 aa, Caldicellulosiruptor sp.; identical to SEQ ID NO: 2385

SEQ ID NO: 5560 - protein, 408 aa, unidentified
MVYVQDINGKPMMPTTRHGKVRRLLKENKAVVVNLCPFTIKLTYVTSDYKQEIVLGVDAGTKHVGLSATTKSKELYSSEVILRNDIVDLLSTRRELRKTRRNRLRHRKHRFNNRIKSRRPGWVAPSVKYKIDAHIRVIDNVFSILSVSRIVIEVAQFDTQKINNPNISGKEYQEGDQLGFWNVREYVLARDGHKCQHCKGKSKDPVLNVHHIESRKTGGDSPSNLITLCETCHKEYHKGNIDLKIRRGKSLRDAAVMGIMKWRLYEELKSKYDNISMTFGYVTKYNRIKHGIEKSHVFDAFVISKNFDAIRLGYYYKVRLVRRHNRQIHKQKIPKGGIKRLNQSPFEVFGFRLFDRVMFENSYYFIFARRKTGSFNIRDIDGKNQRDITYKKLKLSRCKRFMVQKEMD

SEQ ID NO: 5561 - protein, 471 aa, Caldicellulosiruptor sp.; identical to SEQ ID NO: 3375

SEQ ID NO: 5562 - protein, 515 aa, unidentified
MQYLDFTLVVDKNNKPCVPILNGRAGYLLRNNKAKIINHDPLVIKRIDDYKSDFENRDIFELKIDSGYLNIGFSVSDNYHEYLAGQVELLKGMSDRLTNRNGYRRTRRSRIRYRKNKNVDYKTVHNPTYKNGNEEGWFAPSIQHKIDSHIRLIDKIASWVPVDKVIVEVAKFDIQMIKALADGKEISGKDYQNGEMKGYENAAAYVRDRDKHTCRLCGANKNVVIEVHHIQPRSKGGTDKPSNLISLCHSCHRKVHSNNNDNKYFEKVKSMKLSDTYKDSTYMNMVRWELFERLSGKYDVKVGYGYQTKINRRNAGLRKFHYTDAVCINDYKDVTLTENIYIVDQKRCNDRRMETFSDAKYIDVRDGKEKSGNTLYKERLPNAPSKRVTQKEYINNMRQFRGKKIKPGKRTFVCNSYCLKCGDLIYINSGKHRGNIAEVESMQKLPNGNFKIRFTYKAQTVKYPSISIKPEEYELLKNNLLDKVKIVRTRRGMIWRKYNRLEYEATHADQEGMAV

SEQ ID NO: 5563 - protein, 414 aa, Eubacterium sp.
  source 1..414: note = isolate UBA6991
MAVAVLSSTGKKLMPTSNYHARRLLKKGRAVIVRYKPVFTIRMTDRESGETQPMEYTSDTGYIHVGISVKSQRHEFFHEERNMLSNGTERHNNCRKYRWARRNRKRYRKPRFNNRSKKNKELAPSIRHKMECQIRLFDQYCEVLPITTATFEMGKFDTFLMQAAAEGKAKPEGKDYQKGDRYLTKTLRAAVFSRDHYTCQICGKSGIKDHVILHTHHIGFWKGYRSNRVGNLLTVCDKCHTAKNHKQDGKLWGLEPKGTDLAPAAYMNIVRWAMYRAVRDAHPEIEIHIQYGVQTDITRQNRNIEKSHANDAYCIGTMHPKHRCREAVYQKLRRHNRVRTKFYDAEYIDLRDGKKKNGAQLSCGVQNGKKAGGVKRTREFTAVENAEPEAAVSEEKNAKYRPETRCCLTAKSEL

SEQ ID NO: 5564 - protein, 443 aa, Oligella sp.; identical to SEQ ID NO: 5424

SEQ ID NO: 5565 - protein, 419 aa, unidentified
MVYVLDMNGQPLMATARHGKVRRLLNSHLAKVVKRCPFTIQLLYQSTKETQPVSLGVDAGSKHIGLAATTEKKVIYQEELIPRSDVVKLLSARRTLRRSRRNKKTRYRKARFSNRIHPKHKGWLAPSVEVKIQEHITAIKNVCKILPVSEIHVETAEFNLQRLKAMEEGKSLPVGTDYQLGEQYDFYNTRQYVLHRDGYTCQCCGAHDKEVKLHMHHIESRQTGGNAPNNLITLCEHCHKALHEGKIELPKGRKRGKSYRDAAFMGIMRNTLLERLKKEVSVPVTMTYGYITKYWREKVGLEKSHINDAICISKHPYAKPLDTYYLTKAVRHHNRQIHKANFSKGGIRKRNQAPYLVKGFRLFDKVLYQGKECFIFGRRVSGRMDVRLLDGTHINASVGYKNLKLLESKKAYLIERRTC

SEQ ID NO: 5566 - protein, 471 aa, Caldicellulosiruptor sp.; identical to SEQ ID NO: 3375

SEQ ID NO: 5567 - protein, 443 aa, Oligella sp.; identical to SEQ ID NO: 5205

SEQ ID NO: 5568 - protein, 442 aa, Lactobacillus sp.; identical to SEQ ID NO: 5193

SEQ ID NO: 5569 - protein, 431 aa, unidentified
MPDKVYVISRLGHPLMPCSPAKARHLLDDKKAKVVKRMPFTIRLLYGSTKYIQPIILGVDAGSKTIGLSASTAKEEVFAAEVMPRNDVVENLSTRREFRRARRNRTTRYRKPRSDNRVRSNHERWLAPSVKVKIQEHITSIKRVCTILPISKVVIETAEFDLQLLKAIQEGKPIPEGEDYQKGEMYGSYNVCQYVLWRDNYTCICCGVRGTPKNPVRLHVHHFESRKYGGNAPDNHGTLCDDCHKKFHLGIITDVKLKTRRRQSTRDAAFMGIMRKTLMWRLRTELFIPVAETKGYITKATREKLLVLPKSHTRDALAIAQGRHGFGIKEYAYVEPANHIYTVRPVQHHNRQLHKASILKGGIRKRNQASKYVFGFRLYDKVLYQGKVCFVWGRRTSGTFLLRTIDGIKVKDGVSYRNLTLLERSSNYLIA

SEQ ID NO: 5570 - protein, 409 aa, unidentified
VSEMTSYSFVLDANGKQLAPTKEPKAWFLIRKKRAALVSKYPMVIQLKKKIQENEICKDEIRCGIDDGGLHVGIALVQKCKSKNKVVFKGTIEQRNDVKHLMEVRRNYRRYHRYHKRYRQARFDNRKSSKRKGRIAPSILQKRQATIRVINRLNKWINITNYWLEDVSIDIRVLTDGYKSYSWQYQKSNRLDENIRKATILRDGGKCMECGKSNCRLEVHHIKPRRRNGSNTLDNLITLCESCHQKTEGQEELYMDRYFSLLKSSDNKNLNYAQHVMIGKMWLRKQLSGLGVLYLTSGGDTANKRIDWNIEKSHTNDAVCITDLQPDTCDIKEWAIKPMRRQSKAKTDHVLGIHHRDLVEYTFKNGETHRGYVTALYPDQKAINFQSQTKHCKKVNARKCKLLWNLSLI

SEQ ID NO: 5571 - protein, 442 aa, Lactobacillus sp.
MKHENANRVFLLNRDGKPLMPCRPRKARLLLKSGKAFVVKKYPFTIQLKYGSYGYKQKASLGVDTGQRHIGFAIVSQNKVLYQSEVELRQDVHKNLYTRKIYRRSKRNRKTRYRQARFLNRVHGKRDGLWLPPSIKGKVSHNIAWIKRYLAVLPNTDLHIEVGKFDMAKMINPEISGKQYQEGSLKDWKNYEYYVLARDEYTCQLCHKHGEGVKLVVHHIVYRSHGGTDRISNLITLCTDCHTTKNHQPGGKLYKWMKAKKKVTKQLKGATFMNILRKRIMTAFPEASFQYGSQTYVDRKNLLLPKGHFMDAIAISGIKSVGQMPDTVTLISQFRKKKRSLHEATARKGRKQPNTSSKRNEKNMNHARGLWLNDYVRVIGNHAKGYVKGFKSKGYYVYLTDGLGNYVLSNGKNYINRKQCRLIMHNGNWQKAEQKLSLYEFK

SEQ ID NO: 5572 - protein, 433 aa, Scytonema sp.; identical to SEQ ID NO: 2739

SEQ ID NO: 5573 - protein, 375 aa, unidentified
LNYDSGHQTQEISLGIDAGSKHIGVSATTKIKVLYEADVELRNDIVDLLSSRRELRRGRRNRKTRYRQAKFNNRRLGNGWLPPSIRQKIGTHLTVVENICKILPISRIMVETASFDIQKIKNPDIQGAEYQQGDQLEFWNVREYVLFRDGHTCQCCKGKSKDKILNVHHIESRKTGGNAPNNLITLCETCHTGYHKGTVQLPKAIKRGMRFKDAAFMGIMRWAFYEALKQQYEPVGTPVHNTYGYITKHTRIAYNLPKEHYVDARCISGNPEASSNGEYYYQKKVRCHNRQIHKLTVLKGGIRKQNQATYLVKGYRLFDKVSYQGKGYFVFGRRQSGFFDIRTLSGEKVNKGSLSCKKLKFIATRTYYLTERRAV

SEQ ID NO: 5574 - protein, 443 aa, Caldicellulosiruptor sp.; identical to SEQ ID NO: 2385

SEQ ID NO: 5575 - protein, 427 aa, unidentified
MRVFVLDKNRKPLDPCHPAKARKLLKSGRAKVLRRYPFTIIIKDLEVSNCVTHDHQLKIDPGAKTTGLAIVQGSRVVWGAELTHRGFQIREALTSRRQLRRSRRNRKTRYRQPRFLNRTRPKGWLPPSLMSRIHNVLTWVKKLIKFCPVTGISQELVRFDTQKMLNPEISGIEYQQGTLYGYELREYLLEKWNRTCAYCGANNTRLEIEHIKPKSKGGSDRVSNLAIACHDYNQAKGNLEIEVFLSSKPSILKRILSQAKKPLADAAAVNAARWKLYDELKLIGLPVEVGSGGLTKYNRCRQNLPKTHWLDAANVGKVDTLYIEDYQPLLITAKGHGTRQICRTDKFGFPRLHCSQRKTHKGFQTGDIVKAVVTKGKKIGTYMGRIATRKTGSFDITTAQGKVSGISYKYCQAIHRKDGYSYQFHGG

SEQ ID NO: 5576 - protein, 465 aa, unidentified
LEKNMAVFVIDKHKRPLMPCSEKRARLLLERGRAVVHRQVPFVIRLKDRTVQHSAVQPLRVALDPGSRATGMALVREKNTVDTGTGEVYRERIALNLFELVHRGHRIREQLDQRRNFRRRRRGANLRYRAPRFDNRRRPPGWLAPSLQHRVDTTMAWVRRLCRWAPASAIGIETVRFDTQRLQNPEISGVEYQQGALAGCEVREYLLEKWGRKCAYCGAENVPLEIEHIVPKSRGGSDRVSNLALACRACNQAKGNRDVRAFLADQPERLARILAQAKAPLKDAAAVNATRWALYRALVDTGLPVEAGTGGRTKWNRTRLGLPKTHALDALCVGQVDQVRHWRVPVLGIRCAGRGSYRRTRLTRHGFPRGYLTRNKSAFGFQTGDLIRAVVTKGKKAGTYLGRIAIRASGSFNIQTPMGVVQGIHHRFCTLLQRADGYGYFVQPKPTEAALSSPRLKAGVSSAGN

SEQ ID NO: 5577 - protein, 419 aa, unidentified; identical to SEQ ID NO: 3670

SEQ ID NO: 5578 - protein, 442 aa, unidentified; identical to SEQ ID NO: 4418

SEQ ID NO: 5579 - protein, 431 aa, unidentified
MPDKVYVISRLGHPLMPCSPAKARHLLDDGKAKVVKRTPFTIKLLYGSTEYTQPVILGVDAGSKTIGLSASTTKEELFAAEVMPRNDVVENLSTRREFRRARRNRTTRYRKPRFNNRVHSKNNGWLAPSVEVKIQEHITSIKRVCAILPISKIVVETAEFDLQLLKAVQDGKPVPEGEDYQKGEMYGSYDVRQYVLWRDNYTCTCCGVKGTDKKPVKLHVHHFESRKHGGNAPDNYGTLCEDCHKKLHLGIITDISLKTRKRPSTRDAAFMGIMRKTLMQRLITGLSIPVAETKGYITKAAREEILKLPKTHTNDALAIAQGRHGFGIREQAYVKPTNRIYTVRPVRHHNRQLHKATMLKGGIRKLNQASKYIFGFRLYDKVLYQGGECFVWGRRRSGSFLLRTIDGTKVKDGVGYRNLTLLERSTNYLIA

SEQ ID NO: 5580 - protein, 512 aa, unidentified
MSTVYVLNKDGKPLMPTTRGGHVRHLLKNQKARVVRTKPFTIQLLYETNDVVQPLYLGIDPGRTNIGVAVVKANGTAVFTAHLESRNKEIPKLMQDRKKARRARRTNGRRCRRQRRAKANGTISKKCVKQDTAQSKNPSKRAKEIGVIKRHLPGCEKDVLCIGIKNKEAKYTNRARLEGWLTPTANQLLQSHINLVKKIQKFLPISDAVLEINKFAFMRLDNPNIQKWQYQQGPLYQKGSLENAVSEMQEHHCLFCEKPIDHYHHVVPKSENGSNTIANIVGLCAEHHNLVHKDAAWQKKLAEEKVGLNKKYGALSVLNQIVPALTNKLSMLFPKHFFVTTGKSTHDYRESHSVSKDHWLDAYCIACSVLPSDVCDSNINNHVPYELKQFRRHDRRALHKENMSRVYTLNGKTVATNRHKAIKQTTDSLEEFRQNHPDDVCKLKVKEHHPAYRNLNRNYPGSVFLVGKQAHVMQGISSSHNGKADGYYDTNGNAYPYYKCKFVAKNEGIVFA

SEQ ID NO: 5581 - protein, 413 aa, unidentified; identical to SEQ ID NO: 2636

SEQ ID NO: 5582 - protein, 423 aa, Arthrospira sp.
MSNHIFVLDTNRKPLTPCKPGVARSLLKAGKASVFRRYPFTIILNKEVDANPEPLELKLDPGSKVTGIALKQGNHIIFAAELQHRGQQIKEALLSRRQLRRSRRNRKTRYRPARFLNRTRSKGWLAPSLQHRVDTLMTWVHRFRRLAPVGRITQELVRFDLQLMENPEISGVEYQQGELQGYEIREYLLEKWGRTCAYCGAQNVLLEVEHIQPRSKGGSDRVSNLTMACHSCNQAKGNGDIRDFLSGQPDVLSRLLRQAKSPLKDAAAVNSTRWALFKALKATGLPVTTGTGGQTKFNRLRLNLPKAHWLDAACVGPVESLEVLTSKPLLILAKGHGTRQMCGTNKYGFPNRHRSRRQIHKGFQTGDMVTALVTAGKKIGSYLGRVLCRASGSFDITTASVRVAGISHKYCQPIHRKDGYAYA

SEQ ID NO: 5583 - protein, 375 aa, unidentified
LSKVKTMRVFVFNMRGRPLMPCSQRKARLLLRENKAMIYKYHPFTIQLTYTTGETKQDCHIGIDTGSKYIGAAVRSEDKVFWKGEIELRQDIRSNLDTKRIYRRSRRNRKTRYRKPRFLNRKRRDEWLPPSLQSRINHTFHWIDTLSSLVPNPILHIEVGKFDVAKMINPEIHGVDYQHGQTYGFFDERYFVFARDNYTCQCCGKSKNKILNTHHIIYRSNGGTNRVDNLITVCTDCHTSQNHRKGGIFYQWQEQHKKVKQYKEPPFMNTLRKRIFVAYPDAEITYGSETTPKRKAMKLDKTHYNDAIVISGINEIKENPEEWLLIKQFRKKKRSLHEATARKGRKKPNRNQTRNSKNTPYYKGFYLNDKVSVFG

SEQ ID NO: 5584 - protein, 551 aa, unidentified
VLAPLQVLVIFRVQVQLIRLYSDISSEMIYNLVSIRERSFMKQKKQKVMVYILNKKGKPLMPTTRCGHVRKLLDSKKAVVVSSNPFTIRLKYDTPNGVQDVFAGIDSGRENIGSGASNEDGDCLYLGELKTSNKSIKMKITERAGFRKERRRHDRQNKQRKARKDHTEIQNGNADICRTTISCKSVQISYPAAEKSVTHKIIRGKEGKFANRHRDEGWITPSARQLVQMHMNDLKSMCKILPISHVTLERVAFDFQKLENENIKAWEYGKGKLYGYDSPEEYIHDVQGGKCLICGKPHIDYLHHIIPRSKGGSNKVSNLAGLCYDCHYGPMGVHNCQDTQDRLPELKNEANKQYKVSLLNSVMPVLIEEMDKFCKANSIIFSICEGHDTAKVRDIYDLQKDHCVDGFAISLVGRNVKSVDVMPDRIHQKQRYKKKSKNIIKKRNCREYYDGKKLVAVNRHKGTDQKADSLEEYMNTYAETHTADECKKHFESLTVKPARRTYTFHKEGRICPFHIGDKVRYEKKNKIKGNTKVETFICEGIRFPKDENKAK

SEQ ID NO: 5585 - protein, 509 aa, unidentified
MPDTDYIYVLGIDGKPQMPTKRKRHVKRLLNTGKARIACHVPYTIQLLYENTPVLQPVMLAEDPGRTNIGMAVLSVKGELLMSAVVETRNMEIVRLMNHRRGYRRASRNGERKARQRLAKRFGTMLKAGLLMRRLPKFAADKFITCHYIRNTELCFCNRKRLDGWLTPTSRQLVETHINLIHKIQKYLPVTDIAMEVNRFAFLSLENPSVSGVNFQNGPLKGFDSLHDAVNELQHGKCLLCDKKIEHYHHIVPRSMNGSNTIGNIAGLCMECHNKVHKRAAYQKKLNDVKKGLDKKYGALSALNQAVPFICKRLEAEFGKEHVSYCTGRDTAKMRSSFGFQKTKDNQMHETDAWCIGILALNRIPDVVPNFGQTYCIRQFRRQDRSFVYAQTERVYKLDGVIVAKNRKKRTEQKTDSLEDWYNRQVVLYGKKKADFMRSRLTAVKSKRRYNDLTRVMPGAIFMYNGERYVLSGRLSKGLLFRAVGDAKTNYPASKCKIIRHNEGLVFVC

SEQ ID NO: 5586 - protein, 473 aa, Calothrix sp.; identical to SEQ ID NO: 3997

SEQ ID NO: 5587 - protein, 423 aa, Arthrospira sp.; identical to SEQ ID NO: 3202

SEQ ID NO: 5588 - protein, 471 aa, Caldicellulosiruptor sp.; identical to SEQ ID NO: 3375

SEQ ID NO: 5589 - protein, 267 aa, unidentified
LTHQFKKRVPVMVYVLDKNGQPLMPTDRHRKVRLMLQSGQAKVIKRCPFTIQLNYDSGHQTQEISLGIDAGSKHIGVSTTTKIKVLYEVDVELRNDIVDLLSSRRELRRGRRNRKTRYRQAKFNNRRRGNGWLAPSIRQKIGTHLTVVENICKMLPISRIMVETASFDIQKIKNPDIQGAEYQQGDQLEFWNVREYVLFRDGHTCQYCKGKSKDKILNVHHIESRKTGGNAPNNLITLCETCHTGYHKGTVQLPKAIKRGMRFKDAA

SEQ ID NO: 5590 - protein, 413 aa, unidentified; identical to SEQ ID NO: 2605

SEQ ID NO: 5591 - protein, 408 aa, unidentified
MVYVQDIDGKPMMPTTRHGKVRQLLKDKKAVVINTCPFTIKLMYKTSDYKQEIVLGVDAGTKHVGLSATTKSKELYSSEVILRSDIVDLLSTRRELRRTRRNRLRYRKPRFDNRIKSKRTGWVAPSVRHRIDAHIRVIDNVCSILPISRIIVEVAQFDTQKIKNPNISGNEYQEGNQLGFWNVREYVLTRDGHKCQHCKGKSKDPILNVHHIESRKTGGDSPSNLITLCETCHKEYHKGKIDLRVKRGKSLRDAAVMGIMKWKLYEELRSRYDNVSMTFGYITKYNRIKYGIEKSHISDAFVISKNFNALMLEYHYKVRLIRRHNRQIHKQKVLKGGVKKPNQSSFEVFGFRLFDRVMFEGNYYFIFGRRKSGSFNIRDIDGGNQRDITYKKLKLLRCKRFMIQKETN

SEQ ID NO: 5592 - protein, 438 aa, Ktedonobacter sp.; identical to SEQ ID NO: 2377

SEQ ID NO: 5593 - protein, 545 aa, unidentified
VQFAWWLCHPKPSDNIEDVNHETALMLLQIKAGTETFGTAPCGSGPKAEGVSPERKAMNTVAVVTNTNKPLMPTSPYRARKLLSSGKAKIVKHRPFTILLVNRSDGNVQEIEYKSDTGYLHVGISVCSEKREFVREQRDLLPDEKEKHNDRRKYRRTRRNRKRYRKARFDNRIGKIRKKEKNEHVWLPPSLEHKVDDQVQLFLRLYQVMPIKRAVFEMGQFDPALMKALEKGESAPQGIDYQIGERYQIATRRAAVFTRDRYACVFCGRSIKDHAILHVHHIGFWKQDRSNRLDNLATCCEQCHTSENHRPGGILYGVEPKLESLASATYMNVVRFELLQRLKEAAPDVEFHISYGAKTSVIRKQRSISKSHTNDAYCLGQYFPKLRAEEIGFQKIRRNDRILQKFYDAEYLDSRDGTTKKGKELTNGRISRNHMKDHKNLHQYRGKKLSKGRVTIRRGRSSLKPGGLVRFDGEVLTVHGTHRSRRKNKAGHIKVSVNVEFERPSKTGRKSAALSKCQIISQSYNTGWKKIQLRKEEQGKIAAVV

SEQ ID NO: 5594 - protein, 512 aa, unidentified; identical to SEQ ID NO: 3680

SEQ ID NO: 5595 - protein, 431 aa, Escherichia sp.; identical to SEQ ID NO: 3801

SEQ ID NO: 5596 - protein, 419 aa, Flavobacterium thermophilum
LFVYIINKHGKPLMPCSPRKARLLLKQKKAKVVRRTPFTIQLLYGSSGYKQPVSLGVDMGTRHVGISATTKKDVLFEAEAQLRTDIVELLAIRRQFRRSRRNRKTRYREARFLNRRKPEGWLPPSIQHKINSHIKLIDLVHNILPVTSVTIEVAAFDTQKLKNLNIRGVEYQQGEQMGFWNVREYVLYRDNHTCQYCKGKKKDPVLQVHHIESRKTGGDSPDNLITLCKTCHHEIHEKGLEHIFQRKRPPMRDASQMTAMRWAMFSRIREKYSHANITYGYITKCIRIANGLSKSHMVDARCISGNPLAKPSGTVYLLKFVRKNNRQLHKATILKGGKRKSNKAPRFVKRFQLFDKVVYERKECFIFGRRSSGYFDLRLLDGTKVHASASWKKLKRVEHASTLLIERRKGDSSPTFALA

SEQ ID NO: 5597 - protein, 451 aa, unidentified
MSNVFVLDSKKRPLEPIHPGRARRLLKEEKAAVYRRYPFTLILKRQVEAPAPAPLRLKVDPGAKTTGLALVNDATGDVVWAAELTHRGAAIKLALDKRRSVRRGRRQRQTRYRAPRFANRRRRAGWLPPSLLSRVENILAWLRRLSGLCTISALSQELVRFDIQKVENPEITGLQYQQGTLFGFEVREYLLEKWGRVCTYCGVQGVPLQVEHILSRAKGGTDRIANLALACEPCNLKKGTQDVRNFLAHDPERLARILTQAREPLKDATAVNATRWHLFERLKANGLPVETGSGGLTKYNRAQRALPKTHWLDAAAVGASTPLHLCTANVFPLLIKATGRGHRRLCNPNEIGLPVSHRKRHKRYFGYQTGDLVRAVVPETLACRGTHVGRVAVRAKGTFNITTKRGKVTDVPHRFCTPIARTTGYSYQTGERHAAPLPTSPSIRSSHSSPA

SEQ ID NO: 5598 - protein, 471 aa, Caldicellulosiruptor sp.; identical to SEQ ID NO: 3268

SEQ ID NO: 5599 - protein, 451 aa, unidentified; identical to SEQ ID NO: 3581

SEQ ID NO: 5600 - protein, 442 aa, unidentified; identical to SEQ ID NO: 2903

SEQ ID NO: 5601 - protein, 471 aa, Caldicellulosiruptor sp.; identical to SEQ ID NO: 4560

SEQ ID NO: 5602 - protein, 425 aa, unidentified
MPNYQNYVFVVDTLGQPLSPTHRARARKLLKQGLAAVFRTYPFTIILKKTVENPVNEPLRLKLDPGASVTGIALVNQSRDTVIWGAELTHTGDRIRAKLTAHRVVRRHRRCRKTRYRQARFNNRKRADGWLAPSLKHRVETTLTWVNRLISSCPITDISMKLVRFDTQKLQNPEISGVEYQQGVLLGYELREYLLTKWQHQCAYCGGQNIPLEIEHIQPKSQGGSDRVSNLAIACHKCHQKKGSQALEQFLEKKPEILKRLLVQAKAPLKNAAAVNSTRWALFNSLKLTGLPIEIGTGGLTKYNRTVQGLPKTHWLDDADCVGKSTPTRLKIKTHQPLLITCFGRGGRQKAAPNKRLPIRHNPLKPIKGWLTGDIAKHKTHGIGRITLRSRGSFVLTKPDKTQFSVKPIDLKPVFRRDGYLYKFS

SEQ ID NO: 5603 - protein, 426 aa, unidentified
MVYVQNQLGQPLMPTKNHRKVRLLLDSGAAVVVKRTPFTIRLTTRSKTYVQPIILGVDAGSKTIGLSASTEAEELFAAEVTPRNDVVDNLSTRREFRRARRNRKTRHREPRFNNRVRSKHKGWLAPSVEVKIQEHITYIKRVCALLPVGKVVVETAEFNLQLLKAVETGLPVPQEEDYQKGEMLGYYNVRQFILWRDNYTCRCCGAHGKGVKFHVHHLESRKTGGNAPNNLVTLCDGCHKKFHKGIITPDILKKRKRRSTRDAAFMGIMRRTLMERLWAELAIQVVETKGYITKYTRVELLKLEKTHTNDALAIAQGRRGFGVKELTVIPQSDYIYHIRPVRHHNRQLHKATILPGGIRKSNQAPRYVRGFRLFDKVSYLGEDCFIWGRRSSGSFLLKLLDGTKVKDGVSCKHISILERSTNYLIS

SEQ ID NO: 5604 - protein, 414 aa, unidentified; identical to SEQ ID NO: 4524

SEQ ID NO: 5605 - protein, 444 aa, Ktedonobacter sp.
VSKVFVLDTQKQPLNPVHPGRARMLLSSGKAAVFKRYPFTLILKGRGEQPQVAPLRIKIDPGSKTTGIAIVNDTSGEVVFAAELSHRGQEIKKRLERRRGVRRSRRQRHTRYRKPRFENRHNKQRGWIAPSLESRVCNVVTWVQRLMRVCPIVAMSQELVKFDMQAMEQAEIKGIEYQQGTLQGYETREYLLEKWNRMCAYCSAKDIPLQIEHIHPRAKGGSDRLSNVTLACEACNSKKGTQDVRAFLATKPDVLRRILAQAQAPLKDAAAVNTTRWALYERLKALGIPLECGTGGRTKYNRVTRGIEKAHWCDAACVGASTPEHLHLSGVVPLLITADGHGSRQMCLMDKHGFPRTGPKQAKHVQGFQTGDMVRAIVTRGTKIGTYVGRVAVRATGSFNITTKQGTIQGISHRYCTALHTCDGYSYGQGEPLHPSPEKECLFP

SEQ ID NO: 5606 - protein, 427 aa, unidentified
MFVYVLDKNGQPLMPTSRFGKVRRLLRDKKAKVVRSCPFTIRLLYEPETKIVQDIILGVDTGSKHVGVACVGNDKVLYQSQVELRDDIKRKMDSRRKLRRNRRNRKTRYRKARFLNRGNSIKKDRYCPTIVSKYYGHEREIEFCKKILPVKDLVLETGKFDTQLMEKPWLQEHKWAYQKGVNYGYANAREHALVRDKYTCQCCGKRNCRVEAHHVIFRSNGGSDSLDNLITLCEDCHKAVHLGEVDLKLKGKRRNNLRYGTQMSIIRSMLLKKYPEAIETFGFVTKANRENLGIKKDHYLDACVVASGGLEFNQSNVLYQKKCVPTQDRQLCKGIRGEQKLPTGKIHGFKKFDKVKYLGETCFIKGRRSSGAFVLMDIDNNPIDFRDRGGKQNPSYKCIKRVSTRRSVLCVSKEWRGKVHSYTKFLT

SEQ ID NO: 5607 - protein, 509 aa, unidentified
VYVLNKDGKPLMPTTRCGHVRYLLKEKKARVVKTKPFTIQLLYETNDVVQPLYLGIDPGRTNIGVAVVKADGTAVFTAHLETRNKEIPKLMKKRKDSRCARRTNGRRFRRQRRAKANGTISKKCVKQATAQNGSASKRAKEIGVIKRHLPGCEKEVLCIGIKNKEAKFNNRTRPAGWLTPTANQLLQTHINLIKKIQKLLPISDVVLEINKFAFMQLDNPNIQKWQYQQGPLYQKANLEEAVSEMQEHHCLFCKKKIDHYHHVVPQHKNGSNTIDNIVGLCTKHHDLVHKDTAWHEKLTKKKTGLNKKYGALSVLNQIIPALTKELSSIFPKHFFVTTGKSTYDYRAAHGVSKDHWLDAYCIACSVLPNDVCDSSINNRVPYELKQFRRHDRRALHKENMSRVYTLNGKKVATNRHKATEQTADSLEEFRQNHPDDVCKLKVKENHSEYRNPKRNFPGCVFLVGKRTHVMQGTSGSHNGKADGYYDTNGNSYSSGKCKFVAKNEGIIFA

SEQ ID NO: 5608 - protein, 420 aa, unidentified; identical to SEQ ID NO: 3884

SEQ ID NO: 5609 - protein, 480 aa, unidentified; identical to SEQ ID NO: 2726

SEQ ID NO: 5610 - protein, 470 aa, unidentified; identical to SEQ ID NO: 2825

SEQ ID NO: 5611 - protein, 443 aa, Caldicellulosiruptor sp.; identical to SEQ ID NO: 2385

SEQ ID NO: 5612 - protein, 465 aa, unidentified
MSTCVCVLSNNGERLMPTIRLGRVRHLLKDGKAKIIKHHPFTIQLLYDSKTNTQPIEICEDVGYNYIGISVKSQSHEYVSAQYDTLQDEKACHDSCRKLRRTRRNRLRYRKPRFDNRKRGEGWLAPSLKHKKELNVNVVKMYCTVMPITHATVEVGSFDTMLVKAIQEGKVIPEGADYQKGPRYNLATLREAVFYRDNYVCKICGRKATEGAILHMHHMFYWKGRHGNSPDELLTVCEKCHTPANHQKSGKLYGFGGDVKFTDLSGAAFMNTVRWQIVNELYAAFGKPFVTITYGAMTKEKRIALQLEKSHNNDAYAMGEFHPNHRCTFEHYEKVRRNNRILEKFYDSRYIDIRTGEITTGKALFNGRINRNHKKDSENLHKYRGKRTYAGHRALLRKKVNLNPGDFVSLNGETLVVHSTHTKKNGAVNVEFETPAKSGQKSASLKKLKIVKAANSIHPAWKKIS

SEQ ID NO: 5613 - protein, 424 aa, Spirulina sp.; identical to SEQ ID NO: 3799

SEQ ID NO: 5614 - protein, 396 aa, unidentified; identical to SEQ ID NO: 4508

SEQ ID NO: 5615 - protein, 447 aa, Pseudomonas sp.
MAVYVLDKTGKPLMPCSEKRARLLLERGRARVHRLAPLVIRLVDRRLADSAVQPLTLKLDPGSRFTGMALVRERRKRVSVLSLLELVHRGAAIRKALEQRAGFRRRRRSQNLRHRAPRFNNRTRPAGWLAPSLRHRLDTTLSWVARIRRWAPITALAVERVKFDLQAMQSPEISGLEYQQGELAGYTVREYLLEKWSRRCAYCAAENVPLEIEHIIPRSNGGSDRVSNLTLACHPCNQRKGNRPIEAFLKGQPELLARITARAKTPLHDAAAVNATRNALFVALLKTGLPVATGSGAQTKYNRRRLGIPKTHALDAVCVGEVEAVSGWQRPTLSIKATGRGEYQRTRLTAHGFPRGYLTRQKRHFGFQTGDQVKASVPGGKKAGVHQGRVAVRQSGSFNIQTPAGVVQGIAHRLCILIQRADGYAYAQNPTFDRAQPQQEAARTGAR

SEQ ID NO: 5616 - protein, 415 aa, unidentified
MSNFVFLIDANKTPMNPIHPAQAKKLLNSGKAAVFRRFPFVLIMNRVVENIVTCPIDLKIDPGSKFTGISLVNNRDEVIWGMELQHRGAVIKGELETRRGIRRSRRNRHTRYRKPRFLNRTRTRSWLAPSLKHRVLTTNTWVKRLIKYAPIAAITQELVRFDLQQLENPEISGIEYQQGELQGYEVREYLLEKWERKCSYCDAKDIPLQIEHIQPKAKEGSNRISNLCLSCEKCNQKKGTQDIEKFLAKKPELLTKIKFQSKRPLKDAAAVNSTRWDLFHTLKETGLPITTASGGRTKFNRRKLNLPKEHWIDAACVGVVENLNILTTNILKVKSTGQGTRRLCRINKFGFPCSNPRQKYEHKWNTGDIACCQGVSGRVVVQSATRLEIRVDGKRIGGKLTDFKKLHSKDAYSYF

SEQ ID NO: 5617 - protein, 461 aa, unidentified; identical to SEQ ID NO: 4375

SEQ ID NO: 5618 - protein, 322 aa, Lactobacillus sp.
VQHRLDFTIKEIKRLYTFLPITNLVIEVTPFDNQKLVNPNIKSWEYTHGKMHDFKTIKDYLLARDNYRDALDGKQYPASQLRVHHLVQRKDGGTNQPDNLVLLSDINHSQANHNNGSLAKLRENRQKTIDYRGAYFMSILATRLSDYFDNYTTTQDYLTANLRQKYQIEKSHLNDAFIIVGGTDTTLRTNNVYSRQKLRNNNRMLQKFYDAKYIDSRDGKQKPGKELSSGRTRRSRELNYDNLRQFRKEKIKKGRISIRRNHYQLRPHDVVLNTRTNKIETVTGVQNSGTVIKFQTGKTCSIKTVVSLYHVNGMLAKKIGDI

SEQ ID NO: 5619 - protein, 413 aa, unidentified; identical to SEQ ID NO: 2605

SEQ ID NO: 5620 - protein, 444 aa, unidentified
MSKDTKQASYEAPRGEIMVFVLDKHKKPLMPCCEKRARQLLERKRAVVHKTEPFTIRLKDRTVEKGKLQPLRLKLDPGSKETGVAVINEESGYGKVIFLGEIHHKKGIKSKLYSRRALRRGRRNRKTRYRKARFLNRKRKKGWLPPSLQARVNQTINTVNKLQKLLPLTAISTEHVKFDTQLMQNPEISGIEYQQGTLFGYEIKEYLLEKWNRKCAYCGAENIPLEIEHIIPKSRGGSNRISNLTLSCHDCNQKKDKLTAEEFGYPEIQMKAKKPLKDAVMMNATRWRLFNELKKTDLPVECGTGARTKKQRIEHDLPKTHYYDACCVGASTPEKLIIFPQYISIWTATGRGTRQMCNTDKYGFPKSHRKSQKLHFGFQTGDIAKADIPKGKYQGQYTGRIAVRLSGYFDIKDGQGKRICQGVNYKYCHIIQRNNGWQYEKKLA

SEQ ID NO: 5621 - protein, 512 aa, unidentified
MSTVYVLNKDGKPLMPTTRGGHVRHLLKEQKARVVRAKPFTIQLLYETNDVVQPLYLGIDPGRTNIGVAVVKANGTAVFTAHLETRNKEVPKLMQDRKKARRARRTNGRRCRRQRRAKANGTISKKCVKQDTAQSKNPSKRAKEIGIIKRRLPGYKKDVLCIGIKNKEAKYTNRTRPEGWLTPTANQLLQTHINLVRKIQKFLPISDVVLEVNKFAFMRLDNPDIQKWQYQQGPLYQKGSLENAVSEMQEHHCLFCDKPIDHYHHVVPQSENGSNTIANIVGLCAEHHNLVHKDAAWQKKLAEEKVGLNKKYGALSVLNQIIPALTNKLSVLFPKHFFVTAGKSTHDYRATHGVSKDHWLDAYCIACSVLPSDVCDSNINNHMPYVLKQFRRHDRRVLNNENMNRVYTLNNKAVAINRHKAKDQKTVSLEEFRKEHPDDVCKLKVKEHHPTYRNMNRNFPGSVFLVGKQIHVMQGIASSKDGKATTYKDSNANSITASKCKFVAKNSGILFV

SEQ ID NO: 5622 - protein, 557 aa, unidentified; identical to SEQ ID NO: 5269

SEQ ID NO: 5623 - protein, 442 aa, Lactobacillus sp.; identical to SEQ ID NO: 3826

SEQ ID NO: 5624 - protein, 428 aa, unidentified
LKVFVLNMRGQPLMPCSPAKARHLLKAGKAAVRRRTPFTIQLRIATGETKQSVTLGVDAGAKHVGLSAATEKEEVFASEVELRQDITGLLAARLLLRRERRQRKTRYRAPRFLNRVRSKHKGWLAPSVENRIQAHMSRIDAICGLLPVTKIVIETASFDIQKIKHPDVEGTDYQQGDQLGFWNVREYVLFRDGHVCQHCHGHAKDKILNVHHLESRQTGGDAPNNLITLCETCHKACHAGKIKLKVKRGQSFRAEAFMGIMRWTLLDRVRKAHPGLPVENTYGYLTKNTRITLGLPKAHCVDAYCIAGNLKAVRRGVYLHQRQVRKHNRQIHKCTVLSKTLKDGTKIGYRKLNQTPHLVKNFRLFDKVRCLGQTGFIFGRRSSGYFDVRRLDGVKISSCISYRKLTLLEKRSTCLTELRKEDGASSPV

SEQ ID NO: 5625 - protein, 451 aa, unidentified; identical to SEQ ID NO: 3581

SEQ ID NO: 5626 - protein, 512 aa, unidentified
MSTVYVLNKDGKPLMPTTRGGHVRHLLKEQKARVVRAKPFTIQLLYETNDVVQPLYLGIDPGRTNIGVAVVKANGTAVFTAHLETRNKEVPKLMQDRKKARRARRTNGRRCRRQRRAKANGTISKKCVKQDTAQSKNPSKRAKEIGVIKRHLPGCKKDVLCVGIKNKEAKYTNRARLEGWLTPTANQLLQTHINLVKKIQKFLPISDAVLEVNKFAFMRLDNPNIQKWQYQQGPLYQKGSLENAVSEMQEHHCLFCEKPIEHYHHVVPKSENGSNTIANIVGLCAEHHNLVHKDVAWQEKLVEEKTGLNKKYGALSVLNQIIPALTKELSFLFPKHSFMTNGKSTYDYRAAHGISKDHWLDAYCIACSVLPIDVCDSTINNCVPYELKQFRRHDRRALNNENMNRVYTLNDKVVATNRHKATEQEAASLEEFRKEHPNDVCKLKVKEHHPTYRNMNRNYPGSVFLVGKQIHVMQGIASSKDGKATKYNDTRATTIAAGKCKFVAKNSGILFV

SEQ ID NO: 5627 - protein, 389 aa, unidentified
GKANVVKKCPFTIRLTYPSGDQTQEISLGIDSGSKYIGISATTQKKVLYEAEVELRNDISKLLAARRQNRRSRRSRKTRYRKPRFDNRKRKEGWLAPSVQQKVDCHLKVVEDVCKLLPVTRIIAEVASFDIQKIKDPKIHGTDYQQGDQLGFWNVREYVLFRDGHTCQCCKGKSKDKILNVHHIESRQTGGNAPNNLITLCETCHKGYHKGQVKLPKKIKRGMTFKDAAFMGIMRWAFYDRLKEIYLPLGIDVSLTYGYLTKNTRIAHQLPKTHYLDARCISGHPDAISDGIYYHQKKIRCHNRQLHKANTLKGGIRKRNQAEYLVHGFRLFDKVRYQGKDYFIFGRRKSGYFDIRDLNGEKVNKGSISYKKLRLVETRRSYLTERRLA

SEQ ID NO: 5628 - protein, 431 aa, unidentified
MPNKVYVINKHGRPLMPCSPAKARHLLDAGKAKVKKRTPFTIQLVYGSSGYTQEVILGVDAGSKTIGMSASTTKEELLSAEVKPRNDVVDLLSTRREFRRARRNRKTRYRKPRFDNRVRSKHKGWLAPSVEVKIQEHITSIKRVCRILPVSKVVIETAEFDLQLLKAIADGKPVPQGEDYQKGEMYGHYNVRQYVLWRDDYTCQCCGAHATKKKEVRLHVHHLESRKVGGDAPDNQVTLCESCHEKLHKGLIAEKDFKKRKRKSTRDATFMGIMRKTLMQRLCSELPIPVVKTRGYITKATREKLLVLPKSHTNDALAIAQGKRGFNVGYLPEIAQIDKIYTIRPVRHHNRQLHKATILKGGIRKSNQTEKYVFGYCLFDKVQFNGQDCFIWGRRTTGIFTIKTINGKMIKDGISFKKLKLLEKSTSYLIA

SEQ ID NO: 5629 - protein, 425 aa, unidentified
MENTLKVFVLNMRGQPLMPCSPPKARKLLRAGKAVPVRRTPFVIQLTVPTGETKQPITLGVDAGYKHVGLSATTAKEELLASEVELRQDVTGLLSNRLALRRARRNRKMRYRAPRFDNRVRSKHKGWLAPSVENRIQAHISRIEAVCRVLPITKIVIETASFDIQKIKNPEVEGTDYQQGEQLGFWNVREYVLFRDGHVCQACKGRSKDLILNVHHIESRKTGGDAPGNLITLCEACHKAYHAGKLKQFSPRRGASFRAETFMGIMRWTVLNRLRERHPELPVTNTYGYLTKHKRIVAGLPKTHCADAFCIAGVLDAKRRGEYLFQKQTRRHNRQIHKLTILKGGVRKRHQAPYLVHGFRLFDKVLCKGEVGFIFGRRSSGAFDVRRLDGTKISAGISYKKLSLLEKRKMFLTELRKEGRDSSRV

SEQ ID NO: 5630 - protein, 427 aa, Enterococcus sp.
MQVFVRNIQGKPLMPCSNRKARLLLKEGKAKIYQYNPFTIQLCYPCREYVQECHIGIDTGSKHIGVAVTSEDKVLFKGEVELRQDVKSNLDTRRSYRRDRRNRKTRYRKARFLNRKKSKKKDVWLPPSIENRMNHTFKWIDTFLSLVPNPQLHIEVGKFDIAKMINPEIQGIDYQQGQTYGFYDVRYFVFARDNYTCQCCGKSKGKILQTHHIIYRSNGGSNRADNLITVCTDCHTYENHQKGGVLYQWQENHKKTKQYKEPPFMNILRKRIFAKYSNAVITYGSETTPKRKELGLEKTHYNDAIVISGISTIKENPDEWLLIKQFRKKKRSLHEATARKGRKEPNCLQKRNAKNKPCYKGFYLNDKVEVFGRIGHITGFASGGVYIKNSENEYITLPNKSYKKVGVSKLKLLHHNNNWQYINKRIA

SEQ ID NO: 5631 - protein, 431 aa, unidentified
MPNKVYVINKHGRPLMPCSPAKARHLLDEGKAKVKKRTPFTIQLIYGSSGYTQEVILGVDAGSKTIGMSVSTTKEELLSAEVKPRNDVVDLLSTRREFRRARRNRKTRYRKPRFDNRVRSKHKGWLAPSVEVKIQEHITSIKRVCRILPVSKVVIETAEFDLQLLKAIADGKPVPQGEDYQKGEMYGHYNVRQYVLWRDGYTCQCCGAHTTKKKEVRLHVHHLESRKVGGDAPDNQVTLCESCHEKLHKGLIAEKDFKKRKRKSTRDATFMGIMRKTLMQMLCSELPIPVVKTRGYITKATREKLLVLPKSHTNDALAIAQGKQGFNVGYLPGIVQINKIYTIRPVRHHNRQLHKAAILTGGIRKSNQTEKYVFGYRLFDKVQFNGQDCFIWGRRTTGIFTIKTINGKMIKDGISFKKLKPVEKSTGYLIA

SEQ ID NO: 5632 - protein, 428 aa, unidentified
MFVYVLDKNGQPLMPTQRFGKVRRMLRDRKAKVVKRCPFTIRLLYEPKTKIVQDVVLGVDTGSKHVGVACVGNDKVLYQSQVELRDDIKRKMDSRRMYRRSRRNRKTRYRKARFLNRGNSIKKGRHCPTIVSKYYGHEREIEFCKKIIPVKDTVLETGKFDTQLMEKPWLQQYKWAYQRGVNYGYANAREHALVRDKYTCQCCGKKNCRVEAHHIVFRSKNGSNDLENYITLCEDCHKAVHLGEIELKLNGKRKSDLRHATQMSIIRSMLLKKYHDAIETYGFVTKANRENLNIDKEHYLDACVIASCGLAFEPLDVLYGKRCVPTQNRCLSQGIRAEKKIPTGKVHGFKRYDKVKYLGVICFVSARRTRGDFVLMGIDNNTIDFRDIGGVQNPSYKFIKRLNARRSVLCMLQRIEKKGGVVRNVKVS

SEQ ID NO: 5633 - protein, 443 aa, Caldicellulosiruptor sp.; identical to SEQ ID NO: 2385

SEQ ID NO: 5634 - protein, 421 aa, unidentified; identical to SEQ ID NO: 5147

SEQ ID NO: 5635 - protein, 454 aa, Calothrix sp.; identical to SEQ ID NO: 4352

SEQ ID NO: 5636 - protein, 462 aa, unidentified
MSVLVIGRNGKALMPTNPRKARLLLKKKTASVVCRHPFTIQLLYKTGCATQEGCIGIDTGSQHIGVGITCGDRVILKDEHALRSSMEKRSLLATRAVMRRGRRYRKVRYRKPKWRHHTKRMYFEKANRRGQHWRKVKTTTQSPRLKGWLPPSLQSKCDHHFRIIDRYLKYLPDPITRNLVIEAGRFDMARMNDPTIHGEMYQRGPMYDAENLRAYIFARDNYQCACCKAKAGTTRKADGTTVKLVAHHILFRSRGATDNPKYIISVCDHCHTTKAHQPGGILYSWMENTKKVARGLRDATFMNILRKRLFARYPQSAFTYGNITAADRKLLRLPKSHANDAVAISLFGKEASTVKNICQTMHYKQIRKSKRSLHEAIPRKGRKNPNTKAVRNKKNTTQVNGFKLWDSVLADGKKLFICSFTGTSAYLIDKNGCYISQPGKTYKQWPLSKLKRLHPNGNWLMA

SEQ ID NO: 5637 - protein, 470 aa, unidentified; identical to SEQ ID NO: 2825

SEQ ID NO: 5638 - protein, 403 aa, unidentified
MPTTPCKARKLLKQGKAKVVKREPFTIQLLYATGETKQDITLGVDAGSKIIGLSATTDKQELFSAEVELRNDIVDLLSTRREFRRTRRNRLRYRKPRFLNRVYSKNKGWLAPSVENKIQTHLKIISKIHEILPISKIIIEVASFDIQKIKNPDIEGEQYQQGEQLGFWNVREYVLWRDGYKCQGKKGCKNKILNVHHIESRKTGGNSPSNLITLCESCHKDYHAGKLKLNLKRGQSFKDAAFMGIMRWTFYNRLKEIYSNVKITYGYITKNTRIQNNLPKEHRIDALCISGNPNVKRLDYWYYIKQVRRHNRQIHKANILKGGKKKLNQAPYLVKGFRLFDKVKYKGEECFIFGRRSSGYFDLRKLDGTVIHRSANCKDLKLISKAKTLLWERGIDVAVSSHD

SEQ ID NO: 5639 - protein, 430 aa, Desulfobacter sp.
LSVFVLDTNKKPQNPVHPAKARLLLKEGKAAVFRQFPFTIILKETVLDVASNPLRIKIDPGSRETGIAVIKDDTGEIVFAMELRHRGQQIKNNLESRRAIRRSRRNRKTRYRKPRFDNRTRAEGWLPPSLKSRVHNIETWVNRLCRFCNIQAISMELVRFDMQKIQNPEISGVAYQQGELMGYEVREYLLEKWDRTCAYCGKTDIPLEIEHIVPKSKGGSNRVSNLTLACTACNRKKGNKSLEQFLSRKPRVLKRIQKQSKMPLKDAGAVNATRWDLFRTLKKNGLPVETGSGGLTKFNRTTRGLHKTHWLDAACVGKSTPEKMFQIDKAVLIVKADGHGSRQMCRVNKFGFPRTTAKSTEKKVKGFQTGDIVKAVVTSGKKVGTYTGRVAVRKSGSFNIKTVDKTVQGISWKYCRLLHASDGYSYNMMC

SEQ ID NO: 5640 - protein, 423 aa, unidentified; identical to SEQ ID NO: 3951

SEQ ID NO: 5641 - protein, 424 aa, unidentified
MQNYVFVVDTNKQPLNPISPARARELLTKQKAAVFRMYPFTIILKHAVLNPAPKPLTIKLDPGSKVTGLAILEGENVIWVAELEQRGGIIKNALSARRSLRRSRRNRKTRYRPARFDNRKRKEGWLPPSLMHRVLTTETWVKRLCRYAPIAQVVMELVKFDTQKMQNPEIDGVEYQQGELVGYEVREYLLEKWGRKCAYCDTSGVPLQIEHIHPRAKGGSNRVSNLCLSCQRCNIKKGVKLIEEFLKKDNSRLEKIKQLARKPLKDAAAVSATRWSLFHTLKNLLPTTYCSGGQTKYNRTRLELNKQHWIDAACVGDVETIRLLTEQSLRIKCTGWGTRQMCGTDKYGFPIRHRERKQVHFGCRTGDIVKAIVTSGKKAGEYVGRLSCRKSGSFDITTTSSRVAGISHRFCTPIHKKDGYSYGF

SEQ ID NO: 5642 - protein, 449 aa, Allochromatium sp.
MAVFVLDRQKTPLMPCTEKRARLLLERGRAVVVRLAPFTIRLKDRIGGAIQPLRLKLDPGSRVTGLALVRESEARDPETGLVERLEHGLWFGELAHRGQVIREALTLRCQYRRARRARKTRYRAPRFLNRTRRAGWLPPSLQHRLDTTLNWVQRLRRLAPITALSQELVRFDTQALQSPEISGVEYQHGELAGYEVREYLLEKWHRTCAYCGATHVPLEIEHIVPRARGGSDRVSNLTLACRPCNERKSHRPIEDFLQRQPALLHQIQAQAQAPLKDAAAVNATRWALLNALKTTGLPVETGSGGRTKFNRTRLNLPKTHALDAACVGAVDQVRDWNRPVLAIRATGRGAYSRTRTFNNGFPRGYLIRHKRVHGFQTGDWVRAEVPKGKKAGVHVGRVAVRRTGSFNIQAQAGTVQGISYRHCRLLQRADGYGYSFQLKPEMEAARRAA

SEQ ID NO: 5643 - protein, 413 aa, unidentified
MTSYAFVLDANGKQLAPTKEQKAWFLIRKKRAALVSKYPMVIQLKKEIQENEICKDEIRCGIDDGGLHVGIALVQKCKTKNKVVFKGTIEQRNDVKHLMEVRRGYRRYHRYHKRYRQARFNNRKSSKREGRIAPSILQKRQATIRVIHWLNKWINITNYWLEDVSIDIRVLTDGYKSYRWQYQKSNRLDENIRKATILRDGGKCMECGKSNCRLEVHHIKPKRRNGSNTLDNLITLCESCHQKTEGQEELYMDRYFSLLKSSDNKNLNYAQHVMIGKMWLRKQLSGLGVLYLTSGGDTANKRIDWNIEKSHANDAVCITDLRPDTCDVKEWTMKPMRRQSKAKTDHVLGIHHRDLVEYTFKNGETHRGYVTALYPEQKAINFQSPTKHCKKVNARKCKLLWKYSKIYWFENAS

SEQ ID NO: 5644 - protein, 421 aa, unidentified; identical to SEQ ID NO: 2738

SEQ ID NO: 5645 - protein, 392 aa, unidentified
LPQMKGENMVIALDRNKRPLGFMGERRCRILLERKRAVLYRYFPTIVILKDVDARKLSGLSSYRIKIDPGAKYTGIAIVRDDTNEFMYAMQIEHRGEQIKKNLDTRRNARGDRRSRETGYRRPKWGNQCTAKEQRQSYDSRRDENWLPPSVKSTADNIISWVRRLSRWINITNCSFESVRFDTQLMENPEIEGVEYQQGTLYGYEVKEYLLEKYGHTCQYCGGKSSDPILEWEHMIPRSRGGSDRLKNATLACHNCNQDKGNHTLEEWQTILQDRLPKERGKQKELDQMRQKYVQQVMEGKAPLKGLRYAAWVNSSRRYSQRHLYLRFPELECSSGGRTKYNRNALGYPKEHHYDALCVGKIPEDGFVDWTHGYYLYAKATGRGTRLRGQLN

SEQ ID NO: 5646 - protein, 414 aa, unidentified
MVYVINKQGQALMPTERFGKVRRLLKNSLAHVVCRIPFTIQLDYDTTDYTQPVSLGIDAGSKHIGISATTSEKELYAADVELRNDIVDKLSTRRELRRTRRSRLRYRKARFNNRVSSKRKGWLAPSVENKIQTHLTVVEKIHKFLPITNIVVETASFDIQKINNPSISGSEYQQGEQLDFFNVREYVLFRDNHTCQHCKGKSKDKVLNVHHIESRKTGGDSPNNLITLCETCHKAYHRGDFELNVKRGKSFRDAAFMGIMRWSFYDRLKNIYPNVSMTFGYITKNTRITNNLPKEHYVDARCISGNPTAKPLGYYFYQKKVRCQNRQIHKANFLKGGRKKLNQAPFLVKGFRLFDLVEYQKELYYIFGRRSNGSFDIRKLDGTKVNKGSINCKYLRLIATRKSILTEKRMQVNL

SEQ ID NO: 5647 - protein, 471 aa, Caldicellulosiruptor sp.; identical to SEQ ID NO: 3375

SEQ ID NO: 5648 - protein, 443 aa, Caldicellulosiruptor sp.; identical to SEQ ID NO: 2385

SEQ ID NO: 5649 - protein, 471 aa, Caldicellulosiruptor sp.; identical to SEQ ID NO: 3375

SEQ ID NO: 5650 - protein, 477 aa, Acidithiobacillus sp.
MFVFVMDQYGRPGHPTRRMDWVRKQLKRKRGKIVGGGISRKPAVLVLREQSFDRRKTVKRRFFVTLDTGFRNIGYAVTELLADSTLRVLLKGTLTARTPELRGLMDERKMYRRSRRYHRRANVKKKGQTPKHRPPRYESRGKRDSVTLQHGLETHRNLYARLARLVPLPDHQVTRGFESVSFDLRALAHGRPRTGSGYQVSPVGKATGEKTHAFVVRRDDGCVVCGSKEHLHTHHLRKRSNAGSNRAGNQVTLCEDCHADVHAGLIELPITDGAQWRDASMVNAVCGKLRKLSAEAGLVPVPVENSVAARRRLGLEKTHALDAVSVAAALTGAGTVDQRNTLDMDLEQYRRHRRAHIHAQRDRLYYLPDKKEPVAHNRHKRCDQGDVDSLAEFRRTYPKDVGMLQVKRAVRLYTPHRAKAPAVGGDVWNIGGLRVVAKGVHSKTNLYVPSLKPITGKVYASPKEGVRLFRNSGMVVA

SEQ ID NO: 5651 - protein, 512 aa, unidentified
MSTVYVLNKDSKPLMPTTRGGHVRHLLKEQKARVVRTNPFTIQLLYETDNLVQPLYLGIDPGRTNIGVAVVKTDGTAVFTAHLETRNKEIPKLMQGRKKARRARRTNGRRCRRQRRAKANGTISKKCVKQATAQNGSVSKRANEIGVIKRHHPGCEKEVLCIGIKNKEAKFSNRTRPEGWLTPTANQLLQTHINLVKKIQKFLPISDVVLEINKFAFMRLDNPNVQKWQYQQGPLYQKASLEEAVSEMQEHHCLFCKNTIDHYHHVVPQHKNGINTIGNIVGLCAKHHDLVHKDTSWQEKLAKKKTGLNKRYGALSVLNQIIPALTKELSSLFPKHFFATNGKSTYDYRAAHGVSKDHWLDAYCIAGSVLPNDVCDNNINNHVPYELKQFRRHDRRALHKENMGRVYTLNGKSVATNRHKAIKQTTDSLEEFRQRQPNDVCKLKVKEHHPEYRNPKRSFPGCVFLVGKHTHVMQGTSGSHNGKADEYYDTNGNSYSSGKCKFVVKNEGIVFT

SEQ ID NO: 5652 - protein, 516 aa, unidentified
MATVYVLNKDSKPLMPTTRCGHVRHLLKEKKARVVRTNPFTIKLLYETNDVVQPLYLGIDPGRTNIGVAVVKGDGAAVFTAHLETRNKEIPKLMAKRKEYRQGRRHYRRCKRQRRAASHGTLSKKCKKQSTAQGCNISKRAQKIGVFERNLPGCEKPVLCIGIKNKEARFNNRARPAGWLTPTANHLLLTHINLVKKICKFLPINDVVLEINKFAFMALDNPNIQKWQYQQGPLYQKDSLESAVSEQQDHHCLFCKKTIEHYHHVIPRSENGSNTITNIVGLCTKHHDLVHKDDKLKEELAKKKQGLNKKYGALSVLNQIIPALTKELGSLFQGHFYVKTGKSTYDYREAHGVSKDHWLDAYCIVCSVLPSGCFDNTINSRVPYELKQFRRHDRQVCQQQNAKKKYYLDEKLVATNRHKAIKQETDSLEEYRNNGGVTDKLVVKEHKPTNKRLNRILPGALMTANGKLNIMVASRGLHNGIPDYYVFADDSKARPTKCTLINKNNGIVFVSNSVPQ

SEQ ID NO: 5653 - protein, 427 aa, unidentified; identical to SEQ ID NO: 5062

SEQ ID NO: 5654 - protein, 536 aa, unidentified
VLRPRYQYPTRWYPSREQGSGNGCLSGEENTDLEQEVSGTLSKGDHSHPGEQDFCVPAITIQGGPAMSVFVVGLNGCRLMPTSERKARLLLKHGKASVYRKVPFTIKLNYKTGSTTQSGYLGIDTGSQHIGVSVVREDGAVLHKEEIGLRDSMSKRKLMQSRASSRRGRRHRKTRYRHPKWRPKAKRVYCEIPDRKGRHWKKKEITFASKRAKGWLPPSLQSKTDHHIRWIKKLQDLLPEGYRLSIELGRFDPARLKDPEIHGELYQKGPQYDYENVRAYVLNRDRYTCQVCGKKGGKLHVHHILYRSYGATDDPQYMATVCSDCHNTENHQQGGILYQWMQKQKKFTRGLRDATFMNILRKRLIEAFPGATFTYGNITKADRERLRLPKSHGNDATAIAIVKTGIMTVKDKEPVIYIQQVRRKKRSLHEETPRKGRKEPNRKASRYDKNTKAVTVTKRKNKKKITITGCLFDRVELNGKKGWISGFTDKSCYVKDENDQYIRTSPKYKQVSLSKLKILHHCGNWAIGARQSLGKG

SEQ ID NO: 5655 - protein, 456 aa, unidentified
MAYTYVLDMNKNPLMPCHNGGFIRTLLKEKKAKVVRNKPFTVQLLFEVRNKYKQDMTLGIDAGYKHIGFSVSTSKAEVFSAELEQECGMVERNKERRMYRRQRRSRLRYRKPRFNNRIASKQKGWIAPSLKRKRDTHLRFIMMLKNIMPITKITVEIGLFDPALMKAIAEGRTLEDEDYQHGEAEGFENMKSYIRYRDGYTCQNPDCKCHKMSVSDREKLRLAVHHIGYYRNDRSNRPGNLITLCELSHTPENHQPGHLLYGWKPKVKSLKETAFMNIIRKEIVDTLKVIYPTTEIRYTYGYRTNMTRNEWHIEKSHHDDAFCIAGNYSKNRCNTLYFHQKRRNNRSLEIFYDAKYIDGRDRKRKSGKELFCGRTTRNKNYAGENLHKYRIKKISKGKRSIRRQHYFYQPKDIILFEGIKHVIKGSHCNGSRLILDTGKSVSVKKVRIHKFSGGVY

SEQ ID NO: 5656 - protein, 457 aa, unidentified
MTANIYLIDMNGNPLMPCRSSAFIRCRLKSKEARVVRRKPFTVQLLYPVRNCHMQDITLGVDAGYRYVGFSASTEKAELFSAELEQDCGMVERNKERRMYRRQRRSGLRYRKARFDNRVSKKKAGWTAPSLQRKRDTHLRFIMMLKSIMPVTKTVIEIGLFDPALMKATAEDREIEGADYQHGEAEGFENMKSYIRYRDSYTCQNPDCRCHKMNPKGREKLRLFVHHIGYWKKDRSNRPANLITLCELSHTAENHQEDGLLYGWKPKVKSLRETAFMNIVRKEIVERLKTIYPDMDVRYTYGYRTNMTRKEWCIVKTHHGDAFCIAGNYSLKRAETLYFTQHRRNNRSLEKFYDAKYLDSRDGKRKSGKELFNGRTARNKNFCSENLHQYRSQKLSKGRRSIRKHHYMYQPNNMVWYERRKYRVKGTHCNGTKVILDSGKSVSVKNISIAAYNQGVS

SEQ ID NO: 5657 - protein, 421 aa, unidentified
MIYVRSKDGKALMPSERGGRIGYLLRHGKAHVVSRVPFVVQLDYESTIYTQEVSLGIDAGSKHIGVSASSEKKELLAAQVELRSDVVNLLSTRKELRRTRRNRKTRYRKVRFDNRKKKDGWLAPSVEQKVESHLKVIRLVRKLLPITKTTIEVAPFDAQKIKNPDIKGDEYQQGEQMGFWNVREYVLARDGHKCVHCKGKSRDPILNVHHLESRKTGGNSPSNLVTLCETCHKAYHRGEFDLKIKRGTTLRDAAVMNIMRWSVYERAKAEFGNVYLTYGYITKHTRIENDIEKTHAADAFCIAKNVHARRSRTFFMCRCVPRHTRALHVANPKKGGIRRSCIASHKIGKSRFQRFDMVWWKGKECFIFGSTHGRPILRDVEGKQIAGQPSVNIKTIKFLKRLRNNILVEERTSESWIENES

SEQ ID NO: 5658 - protein, 411 aa, unidentified
MVYVQDIDGKPMMPTTRHGKVRRLLKDNKAVVVNTCPFTIKLTYKTSDYKQEIVLGVDSGTKHVGLSATTKSKELYASEVILRSDVVDLLSTRRGLRRTRRSRLRYRKQRFNNRVKSKKDGWIAPSVRHKIDSHIRIISFVYSILPVSKLIVEVAQFDTQKIKNPEISGKEYQEGEQLGFWNVREYVLARDGHKCQHCKGKSKDPILNIHHIESRKIGGDSPSNLITLCETCHKEFHKGNIKLKVSRGKSLRDAAVMGIMKWKLYEELKSKYDNVSMTFGYITKYNRINHGIEKSHVSDAFVISRNFNSCRLGYYYKRKLVRRHNRKIHKMKILKGGIRKRNQAPFKVFGFRLFDKVMFQGEEHFIYARRLSGQFNIRDINGENKKDVSCKKLKYVSHGLVSVKTNLFLSQ

SEQ ID NO: 5659 - protein, 434 aa, unidentified
MVYVLNKDGKPLMPTNRCAKVRILLKEKKARVVKSKPFTIQLLYETKNYTQPITLGIDSGYLNIGFSAVTNNKELISGEVALLQGMSERLKEKRMYRKQRRSRLRHREPRFNNRKHKEGWLAPSIQHKLDSHVRFIEGLKSILPITNTIIEVANFDIQKIKDPSIVGKDYQNGEQKDFYNTREYIFYRDHYTCQICKRTDIPLQVHHIGYWKGNRSNRPENLATLCVKCHTPKNHEKGHILYNWKPKLNGYKDATFMSIVRWRLVDILNCQYTYGYITKSQRIKLNLPKTHYNDAFCIAGGKTQERIEPIFYKQVRRNNRSLEKFYDAKYIDIRTNEKVKSQELFSGRRTRNKNNNTENLHKYRREKVSAGRKTIRKKRYFYQPNDLVKYNNKICVVKGTFNKGAWVMLKLGKGKSVKTGDLKPYKFSKGFALV

SEQ ID NO: 5660 - protein, 269 aa, unidentified
IMVYVVANDGQPLMPTERHGKVCRMLRSGMAKVIKKCPFTIQLQYESERNVQPVSLGVDAGSKHIGISATTKTKVLYESDVELRDDIVKLLATRRQLRRSRRSRKTRYRPARFDNRKRKEGWLAPSIQQKIGSHLTVVANVCKILPINQIIVETASFDIQKIKNPEIQGIEYQQGEQMDFWNVREYVFFRDGHTCQCCKGRSKDKILNVHHIESRKIGGNAPNNLITLCETCHKGYHNGTVILPKNIKRGMQFKDAAFMGIMRWAFTMH

SEQ ID NO: 5661 - protein, 427 aa, unidentified; identical to SEQ ID NO: 2799

SEQ ID NO: 5662 - protein, 420 aa, unidentified
MQYVYVLNKHGEPLMPCSPRKARLLLKQKKACVIKRTPFTIKLLYGSTGYKQPVTLGVDAGSKHIGISATTEKHELYREEATPRNDVVDLLSARRAFRRSRRNRKTRYRAPRFDNRVHSKHKGWLAPSVEVKIQEHITLIEHVCRILPVTLVRVETAEFDTQRLKAMLEGKPLPVGTDYQLGEMYDEYNVRQYVLKRDNYTCQCCGAHSTKTKGVKLHVHHIETRRTGGNAPNNLITLCKACHKALHAEKVTLDGKKRGKPLKDAAFMGIMRKTLMERLRKELKIPVQGTYGYITKYLREKNGIPKSHTNDARCISKNPLAIPCDTCYYTKAVRHHNRQLHKATILKGGIRKANQAPYIVKGYRLWDKVAYNGTECFITGRRTSGYFALKKLDGTVASNSISYKKLRLLEAATNYIIERK

SEQ ID NO: 5663 - protein, 453 aa, Lactobacillus sp.; identical to SEQ ID NO: 4050

SEQ ID NO: 5664 - protein, 424 aa, unidentified; identical to SEQ ID NO: 3351

SEQ ID NO: 5665 - protein, 431 aa, unidentified
MPNKVYVINKHGRPLMPCSPAKARHLLDAGKAKVKKRTPFTIQLVYGSSGYTQEVILGVDAGSKTIGMSASTTKEELLSAEVKPRNDVVDLLSTRREFRRVRRNRKTRYRKPRFDNRVRSKHKEWLAPSVEVKIQEHITSIKRVCRILPVSKVVIETAEFDLQLLKAIADGKSVPQGEDYQKGEMYGHYNVRQYVLWRDNYTCQCCGAHATKKKEVRLHVHHLESRKVGGDAPSNLITLCDSCHEKFHKGIITAANLKKRKRRSMRDATFMGIMRKTLIQRLRAELTIPVAETRGYITKTTREKLLVLPKSHTNDALAIALGKHGFNVGYLPEIAQIDKIYTIRPVRHHNRQLHKVTILKGGIRKSNQTGKYVFGYRLFDKVQFNGQDCFIWGRRTTGIFTIKTINGKMIKDGISFKKLKPVEKSTSYLIA

SEQ ID NO: 5666 - protein, 424 aa, Moorena sp.; identical to SEQ ID NO: 2614

SEQ ID NO: 5667 - protein, 471 aa, Caldicellulosiruptor sp.; identical to SEQ ID NO: 3375

SEQ ID NO: 5668 - protein, 425 aa, Anaerostipes sp.
MLVYVVTKDKRPLMPCTPVIARLLLKQEKAKVKRRDPFTIQLLYETTEYRQDLELGVDTGSGKFATAVRTEQNEIVYLSEVAVRNDITSKMTERRTKRRSRRHRKTRYRKPRFDNRRNSKRKDRFSPTMQSKIHSHVKEIEYIQSILPITRIILETGQFDPHRMKNPALADPNVRHWGYQKGPNYGYENTRAMVLDRDNHQCQCCHGKRKDRHLEVHHIVFRSQGGSDDAKNLITLCHTCHQALHKGKIHLDLEGMEKGTLKYATQMNSIRKQLLRRYPEAIETYGYITKANRLAMDLPKEHYIDACVIVTEGRPFTINSLLYRKKCVSAGDFQQYHGERSEIRQTTGKIMGFRKYDKVRYFGKYYFIKGRMSTGYAVLMDVNGDTVKFSDMPWGFKTPKLERMERIQARSTWMVMGEKVTPNIV

SEQ ID NO: 5669 - protein, 413 aa, unidentified; identical to SEQ ID NO: 3023

SEQ ID NO: 5670 - protein, 502 aa, unidentified; identical to SEQ ID NO: 2616

SEQ ID NO: 5671 - protein, 406 aa, unidentified
MVYVQDIDGKPMMPTTRHGKVRRLLKDSKAVVVNTCPFTIKLMYKTSDYKQEIVLGVDAGTKHIGLSATTKSKELYSGEVILRSDIVDLLSTRRELRRTRRNRLRYRKPRFDNRIKSKRTGWVAPSVRHRIDAHIRVIDNVCSILPVSRVIVEVAQFDTQKIKNPDISGDEYQEGDQLGFWNVREYILARDGHKCQHCKGKSKDHILNVHHIESRKTGGDSPSNLITLCETCHKEYHKGNIDLKVKRGRSLRDAAVMGIMKWKLYEELKSRYPNVSMTFGYITKYNRIKYGIEKSHTSDAFVISRNFNAKRIERQYLKRLIRRHNRQIHKMKILKGGKKKNNQAPFEIFRFRLFDKVLYNNEILFVYGRRKSGNFNIRDFNGENPKDVSHKKLKLIRGKRHLIILK

SEQ ID NO: 5672 - protein, 489 aa, unidentified
MTMVYVQNKDGKPLMPTTRYCYVRLLLKEKKARVVSRTPFTIRLNYDTPDVTQDLILGVDPGRTNIGVAVVKEDGQCVFSAHLETRNKDVPLLMKKRAAFRRNHRTLDRRRKRQRRAKAAGTTIAEGSVERLLPGYEKPIVCNHIRNKEARFNNRSRPAGWLTPTANHLLQTHINLIAKVAKFLPITKVVIELNRFAFMAMDNPNIRRWEYQQGPLYGLGSVEDAVYAQQDGHCLFCEKPIDHYHHVVPRHKGGSETLANRCGLCARHHDLVHTDKSWAEKLVTRKGGMNKKYHALSVLNQIIPHLIEHLGSETPYEAYATDGKSTKGFRIAKNVPKEHYTDAYCIACSILDTDIEVSAPTSPFELKQFRRHDRQACIRQMVDRKYLLDGKVVATNRHKAIEQKSDSLQEFREAYGSAAVSQLTVKPHPPQYKDMTRIMPGAVMDFNGTIGVMQSSIVGRFYKSTKGYKAAPRRCVLLAQNAGMVFLPA

SEQ ID NO: 5673 - protein, 413 aa, unidentified
MTSYSFVLDANGKQLAPTKEQKAWFFIRKKRASLVSKYPIVIQLMKEIPEKEICQDEIRCGIDDGGLHVGIALVQKCKTKNKVVFKGTIEQRNDVKHLMEVRRNYRRYHRYHKRYRQARFDNRKSSKRKGRIAPSILQKRQATIRVINRLNKWINITNYWLEDVSVDIRALTDGYQSYRWQYQKSNRLDENIRKAAILRDGGKCMECGKSNCRLEVHHIKPKRRNGSNTLDNLITLCESCHQKTEGQEELYMDRYFSLLKSSDNKNLNYAQHVMIGKMWLRKQLSGLGVLYLTSGGDTANKRIDWNIEKSHTNDAVCITDLQPDTCDIKEWAIKPMRRQSKAKTDHVLGIHHRDLVEYTFKNGETHRGYVTALYPDQKAINFQSQTKHCKKVNARKCKLLWKYSKIYWFENAS

SEQ ID NO: 5674 - protein, 434 aa, Anoxybacillus sp.
MVFVLDTNKCPLAPCHEAVARKLLKQGKAAIYKRFPFTIILKKSVDESENETTYRLKIDYGSRHTGLAILRGQEVVWLGQLDHRTDIKERIDKRRAFRRARRNRKTRYRKPRFLNRKRKEGWLPPSLESRVQNIQTWVSRLKKLCPIGHISYENAKFDTQLMRNPKISGIEYQQGTLQGYEVREYLLEKFGRKCCYCGKENVPLEVEHIIPKSRGGTDRIDNLCLACRDCNQRKGNQTAEEFGCPHIQKQVKESLKDTSIINATRWKVYEVLKQARLDVECGTGARTKMNRIRLGLPKTHYFDACCVGESTPNHLYFKTKEVLFINAKGRGSRSRTNLDRYGFPRGYLARQKFFFGFQTGDMVKAIVPRGKYKGVWFGEVACRKTGNFDIKGKDGKRIAQGISYKYIQVIQRFDGYTYRKEEAELAQGAIPPRA

SEQ ID NO: 5675 - protein, 494 aa, unidentified
MTMVYVQNKDGKPLMPTTRYCYVRLLLKEKKARVVCTTPFTIRLNYDTPNITQDLILGIDPGRTNIGVAVVKEDGSCVFSAHLETRNKEVPLLMKKRAAFRRQHRTQDRRRKRQRRAIAAGTTVESNTIERLLPGYEKPIVCHHIRNKEARFNNRSRPAGWLTPTANHLLQAHINLIAKAAKFLPITKVVVELNRFAFMAMDNPNIRRWEYQQGPLYGLGSVKDAVYAQQDGHCLFCKKPIDHYHHVVPRHKGGSETLANRCGLCEKHHALVHKDKAWAEKLVTRKGGMNKKYHALSVLNQIIPHLMEYLGSETPYDVYATDGKSTKGFRIAKNVPKEHYTDAYCIACSILDADTKVSAPAEPFKLKQFRRHDRQSCIRQMVDRKYLLDGKVVATNRHKSIEQKSDSLEEFREAYGDAAVSQLTVRPHSPQYKDMARIMPGTVMDFDGIVGVFKGSSGRNNGTPNYYNSTKGARVLTKRCALLAKNAGMVFIPA

SEQ ID NO: 5676 - protein, 451 aa, Verrucomicrobium sp.; identical to SEQ ID NO: 4513

SEQ ID NO: 5677 - protein, 419 aa, unidentified
MIYIRSKDGKALMPSERGGRIGYFLRHGKAHVVSRVPFTVQLDYESTTYTQEVSLGVDAGSKHIGVSAGSEKKELLAAQVELRNDVVNLLSTRREQRRTRRNRKTRYRKIRFDNRKKKDDWLAPSVEQKVESHLKVIRLAHKLLPITKTTIEVAQFDVQKIKSPDIKGEEYQQGEQMGFWNVREYVFARDGHRCVHCKGKSKDPILNVHHLESRKTGGNSPSNLVTLCETCHKAYHRGEFTLKIKRGSSLRDAAVMNIMRWAVYERARLEFGKVHLTYGYVTKLTRIENGITKTHAADAFCIAKNVHAKRLRTFFQCRCVPRHTRALHVANPKRGGIRRSTIASHKIGKSHFQRFDMVRWKSKECFIFGSTNGRPVLRDIEGIKMHENVSVNIMTIKFLKRLRNNILVEEKDFRKLSII

SEQ ID NO: 5678 - protein, 372 aa, Aphanizomenon sp.
MNRVVENIVTYPINLKIDPGSKFTGISLVNNKEEVIWGMELQHRGAVIKGELETRSWVRRSRRNRHTRYRKPRFLNRKRPKSWLAPSLKHRVLTTNTWVKRLIKYAPIIAITQELVRFDLQQLENPEISGIEYQQGELKGYEVREYLLEKWERKCSYCDGKDIPLQIEHIQPKAKGGSNRISNLCLSCEKCNQKKGTQEIEKFLAKKPELLKRIKSQSKRPLKDATAVNSTRWDLFQTLKETGLPIATASGGRTKFNRRKLNLTKEHWIDAACVGVVENLNILTTNILKVKSTGQGTRRLCRINKFGFPCSHPRQKYEHKWNTGDIAYCKGVSGRVVVQSATRLEIRVDGKRIGGKLTDFKKLHSKDAYSYL

SEQ ID NO: 5679 - protein, 421 aa, unidentified; identical to SEQ ID NO: 4235

SEQ ID NO: 5680 - protein, 413 aa, unidentified; identical to SEQ ID NO: 2605

SEQ ID NO: 5681 - protein, 445 aa, Ktedonobacter sp.
  VARIANT 445: note = X can be any naturally occurring amino acid
VSKVFVLDTQKQPLNPVHPGRARMLLSSGKAAVFKRYPFTLILKGRGEQPQVAPLRIKIDPGSKTTGIAIVNDTSGEVVFAAELSHRGQEIKKRLERRRGVRRSRRQRHTRYRKPRFENRHNKQRGWIAPSLESRVCNVVTWVQRLMRVCPIVAMSQELVKFDMQAMEQAEIKGIEYQQGTLQGYETREYLLEKWNRMCAYCSAKDIPLQIEHIHPRAKGGSDRLSNVTLACEACNSKKGTQDVRAFLATKPDVLRRILAQAQAPLKDAAAVNTTRWALYERLKALGIPLECGTGGRTKYNRVTRGIEKAHWCDAACVGASTPEHLHLSGVVPLLITADGHGSRQMCLMDKHGFPRTGPKQAKHVQGFQTGDMVRAIVTRGTKIGTYVGRVAVRATGSFNITTKQGTIQGISHRYCTALHTCDGYSYGQGEPLHPSPEKECLFPX

SEQ ID NO: 5682 - protein, 418 aa, unidentified
MLNNQKEYSFVLDAEGKKLDPTIVQNAWRLVRQKKATLIAKRPMTIQLKKVIDSPNDDEIRMGIDDGAKHVGLALVQKCKTKNKVIFVATMEHRNDVHKKMEQRRGYRQRRRYWKRYRKERFNNRVSVRRKGRIAPSILQKRQAVVRITDSLSKYIRIDSIYLEDVAIDVRVLTDEKRLYSWQYQQSNRLDENLRKATILRDNCKCQLCGKRNCRLEVHHITPRRMNGANTIGNLITLCSECHSNVTGREMEFAEQLYSKIGKKKNNVSLQYASHVMVGKTWLREELSKRVSVLLTTGGDTANKRIDWNLEKSHEIDAICITNLEPESVGVKPWNVKPLRHQRKTMKVKEILGFRHRDIVCYTFKNGEYHEGYVTALYPSEGKQKEGLNFLSPTKHCKRVNPKKCQRLDRPDKFLWLV

SEQ ID NO: 5683 - protein, 430 aa, unidentified
LSWSNYSNIQEVIETLVYVLNKQGNPLMPCKEAKARKLLKQNKAIIVKYEPFTIQLTFECENQTQEISLGIDAGSKYIGISATTEKQVLYEADVELRNDIVDKLSSRREARRTRRNRLRYRPTRFNNRVHSKHKGWLAPSIEQKINSHIQAIKRLHQILPISKIIVETAQFDIQKIQNPDIEGEQYQQGDQMGVWNVREYVLFRDDHKCQYCKGKSKDNRLNIHHIESRKTGGNSPNNLITLCESCHNNYHQGKIQLNIKRGKSFRDATFMGIMRKTLLLRLRQIYPNVQEIFGYITKNTRIENRLPKEHYVDARCIGGNPLAKPLEYYLYQKCVRRQNRKMTKDKFIKSGIKKSNQLVGDIFGFGLFDTVEYQKKKYFVFGKRKSGFLDIRTLDGEKVNNGSISYKKLKLIQKNNNILTERSLSIPTQP

SEQ ID NO: 5684 - protein, 471 aa, Caldicellulosiruptor sp.; identical to SEQ ID NO: 3268

SEQ ID NO: 5685 - protein, 406 aa, unidentified
MVYVQDINGKPMMPTTRHGKVRRLLKSNKAVVVNLCPFTIRLTYISDSYKQEIVLGVDAGTKHVGLSATTKSKELYSSEVILRNDIVDLLSTRRELRKARRNRLRYRKPRFNNRVKNKRPGWIAPSVRYKVDAHIRVIDNVCSILPISRIVIEVAQFDTQKINNPNISGKEYQEGNKLGFWNVREYVLARDGHKCQYCKGKSKSKILNVHHIESRKTGGDSPSNLITLCETCHKEYHKGNIDLKIKRGSSLRDAAVMGIMKWRLYEELKSRYDRVFMTFGYITKHNRIKYGIEKSHTSDAFVISMNINAKRIERQYLKRLIRRHNRQIHKMKILKGGKKKNNQAPFEVFGFRLFDKVLYNNEIFFVYGRRKSGSFNIRDFNGENSKDVSRKKFKLIRGKRHPIILK

SEQ ID NO: 5686 - protein, 426 aa, unidentified
MQVYVLNKHGQPLMPCSPAKARRLLEAGKAKVIKRTPFTIQLLYGSTGYKQTIIHGVDAGSKTIGMSASTKSAELFAEEVSPRNDVVKNLSTRREFRRNRRNRKTRYRKPRFNNRVHSKHKGWLAPSVEVKIQEHITAIQKVCSILPISKVVVETAEFDLQLLKAVADGKLVPEGEDYQKGEMLGQYNVRQYVLWRDGYTCQCCGAHGDGVKLHVHHKESRKVGGNAPDNLVTLCDKCHKGFHEGTISLTKLVRHGRKSTRDAAFMGIMRKTLMERLSAALPIPVVETKGYITKGTRAELLKLPKSHINDALAIAQGKHGFGITEPTAITRADRQYTVKPIRHHNRQLHKATVLKGGIRKSNQAAKYVKGFRLFDKVFYQAQECFIWGRRTSGSFLLQTLDGVKIKDGAGWKHLTLLERSSNYLIA

SEQ ID NO: 5687 - protein, 442 aa, unidentified
MSKVLLLDMTKEPLDPVHPGRARLLLKEGKAAVYRRYPFTLILKTKVDAPVVSALRLKLDPGAKTSGLALVDDASGEVVWAAELGHRGASIKKRIDARRGVRRKRRSRFTRYRKPRFHNRKSSRRKGRLPPSLESRVANILTWVGRLRRLCPIEMISMELVKFDMQAMQNPEITGAQYQQGERMGYETREYLLAKWGRRCAYCGVEDVPLEIEHILCRARGGTHRVSNLTLACEPCNVKKGTQLIEDFLNKKPDVLARILAQAKTPLKAAAAVNATRWHLFERLKATGLPLETSSGGLTKYNRAKRHLPKTHWLDAACVGQSTPKPLETSQVVPLLIEATGHGNRQMCGVDEHGFPIRHRQRKKVHFGYQTGDLVRAVVPTGARAGTHVGRVLARASGSFDLRTKAGRQAGISYRYCRPIHRNDGYRYQKGARHAVPATQST

SEQ ID NO: 5688 - protein, 471 aa, Caldicellulosiruptor sp.; identical to SEQ ID NO: 3375

SEQ ID NO: 5689 - protein, 421 aa, unidentified; identical to SEQ ID NO: 4195

SEQ ID NO: 5690 - protein, 428 aa, Enterococcus sp.; identical to SEQ ID NO: 4335

SEQ ID NO: 5691 - protein, 536 aa, unidentified; identical to SEQ ID NO: 4526

SEQ ID NO: 5692 - protein, 419 aa, Aneurinibacillus sp.; identical to SEQ ID NO: 4563

SEQ ID NO: 5693 - protein, 480 aa, unidentified; identical to SEQ ID NO: 2726

SEQ ID NO: 5694 - protein, 408 aa, unidentified
MVYVQDIDGKPMMPTTRHGKVRRLLKDSKAVVVNTCPFTIKLMYKTSDYKQEIVLGVDAGTKHVGLSATTKSKELYASEVILRSDVVELLSTRRELRRTRRNRLRYRKPRFDNRVKNKYHGWVAPSVRYRIDAHIRIIDSICSILPISRIIVEVAQFDTQKIKNPDIYGNEYQEGDQLGFWNVREYVLARDGHKCQHCKGKSKDPILNVHHIESRKTGGDSPSNLITLCETCHKEYHKGNIDLKVKRGKSLRDAAVMGIMKWKLYDELKSRCDNVSMTFGYITKYNRIKYGIEKSHISDAFVISKNFNALMLEYHYKVKLVRRHNRQIHKQKVLKGGVKKPNQSPFEVFGFRLFDRVMFEGNCYFIFGRRKSGSFNIRDIDGGNQRDVTYKKLKLLRCKRFMIQKETN

SEQ ID NO: 5695 - protein, 413 aa, unidentified; identical to SEQ ID NO: 3220

SEQ ID NO: 5696 - protein, 418 aa, Anoxybacillus sp.
KRPLAPCHEAVARKLLKQGKAAIYRRFPFTIILKKSVDESEIKATYRLKIDYGSRHTGLAILRGQEVVWLGQLDHRTDIKERIDKRRAFRRARRNRKTRYRKPRFLNRKRKEGWLPSSLESRVQNIQTWVNRLKKLCPIGYISYENAKFDTQLMRNPEINGVEYQQGTLQGYEVREYLLEKFGRKCCYCGKENVPLEVEHIIPKSRGGTDRVDNLCLACHDCNQRKGSKTAEEFGYSHIQEMVKKTLKDASVVNATRWKVYEVLKQTGLDVECGTGARTKMNRIRLDLPKTHYFDACCVGESTTNHLYFKTKEVLFIKAKGRGSRSRTNLDRYGFPRGYLARQKFFFGFQTGDMVKAVVPRGKYQGVWFGEVACRKTGSFDIKGKDGKRIAQGINYRYVQVIQRFDGYAYGKGVAELA

SEQ ID NO: 5697 - protein, 471 aa, Caldicellulosiruptor sp.; identical to SEQ ID NO: 3268

SEQ ID NO: 5698 - protein, 473 aa, unidentified; identical to SEQ ID NO: 3562
  source 1..473: note = uncultured beta proteobacterium

SEQ ID NO: 5699 - protein, 471 aa, Caldicellulosiruptor sp.; identical to SEQ ID NO: 3268

SEQ ID NO: 5700 - protein, 431 aa, unidentified
MPNKVYVINKHGRPLMPCSPAKARHLLDAGKAKVKKRTPFTIQLVYGSSGYTQEVILGVDAGSKTIGVSASTKKEELFAANVIPRNDVVDLLSTRREFRRVRRNRKTRYRKPHFDNRVHSKHKGWLAPSVEVKIQEHITSIKRVCRILPVSKVVIETAEFDLQLLKAIEEGKPVPQGEDYQQGEMYGHYNVRQYVLWRDDYTCQCCGAHATKKKEVRLHVHHLESRKVGGDAPDNQVTLCESCHEKLHKGLITEKDFKKRKRRSTRDATFMGIMRKTLMQRLCSELPIPVVETRGYITKATREKLLVLPKSHTNDALAIAQGKRGFNVGYLPGIIQTDKIYTIRPVRHHNRQLHKAAILKGGIRKSNQAGKYVFGYRLFDKVQFNGQDCFIWGRRTTGIFTIKTINGKMIKDGISFKKLKLLEKSTSYLIA

SEQ ID NO: 5701 - protein, 414 aa, unidentified
MPCSPAKARLLLKEKKAIVKRRTPFTIQLTIATGETKQPVSLGVDAGYEHVGLSASTEKAELYASEVELRQDITDLLSARRALRQSRRNRKTRYRAPRFDNRIRTKRKGWLAPSVENRINAHLSRIEAVLRLLPVTKITVETASFDMQLLKNPDIAGKEYQEGEQLGFWNVREYVLFRDRHVCQHCYGRSKDPVLNVHHLESRRTGGDSPGNLITLCETCHKALHRGEITLKAKRGQSFRAEAFMGIMRWEVLNRLKASHSELEVNNTYGYRTKHARIANGIDKSHCADAFCIAGNLGAERLGEFFFQKQTRRNNRQIHKLSILKGGIRKRNQAPFEIKGFRLFDKVACQGEEGFIFGRRSSGSFDVRKLDGTRISAGISCKKLRLLEKRRTYLTEIRKEEALPPLPEGRGLRA

SEQ ID NO: 5702 - protein, 421 aa, unidentified; identical to SEQ ID NO: 4259

SEQ ID NO: 5703 - protein, 471 aa, Caldicellulosiruptor sp.; identical to SEQ ID NO: 3268

SEQ ID NO: 5704 - protein, 452 aa, unidentified
LPQMKGENMVIALDRNKRPLGFMGERRCRILLERKRAVLYRYFPTIVILKDVDARKLSGLSSYRIKIDPGAKYTGIAIVRDDTNEFMYAMQIEHRGEQIKKNLDTRRNARGDRRSRETGYRRPKWGNQCTAKEQRQSYDSRRDENWLPPSVKSTADNIISWVRRLSRWINITNCSFESVRFDTQLMENPEIEGVEYQQGTLYGYEVKEYLLEKYGHTCQYCGGKSSDPILEWEHMIPRSRGGSDRLKNATLACHNCNQDKGNHTLEEWQTILQDRLPKERGKQKELDQMRQKYVQQVMEGKAPLKGLRYAAWVNSSRRYSQRHLYLRFPELECSSGGRTKYNRNALGYPKEHHYDALCVGKIPEDGFVDWTHGYYLYAKATGRGTRLRGQLNGCGVIISKWKNRSKTAFGFQTGDLVVANVPKDTKYKYKGRFVGRVMIRKSGSFDIRTLSG

SEQ ID NO: 5705 - protein, 413 aa, unidentified
MVYVLNENGQPLMPTKNHAKVRVLLRQGKAKVVNNCPFTIQLLYSSTNYTQPVTLGVDAGSKHIGLSATTEDKELYAADVELRNDIARLLAARRESRRSRRSRKARYRKPRFNNRKRDKDWLAPSIREKIGTHLKVVDDTCKLLPVSKIIVETASFDIQKIKNPDVKSTDYQQGEQLGFWNVREYVLFRDGHKCQCCKGKSKDKILNVHHIESRQTGGNAPNNLITLCETCHTGYHKGTVKLPAKIKRGMKFKDAAFMGIMRWAFYGELKKRYPDVSLTYGYITKNTRIENGLPKEHYVDARCISGHPLAKPLGTVFYIKKVRCHNRQIHKFNLLKKGVRKRNQAEYEVYGFRLYDKVSWKGRTCFVFSRKSTGYITLRLLDGTRVKASASYKKIKLLRMRSGYLIELRSAIG

SEQ ID NO: 5706 - protein, 384 aa, unidentified
LRVFVLNKRGKPLMPCSPAKARLLLKEKKAIVKRRTPFTIQLTIATGETKQPGSLGVDAGYEHVGLSASTEKAELYASEVELRQDITDLLSARRALRQSRRNRKTRYRAPRFDNRISTKRKGWLAPSVENRINAHLSRIEAVLRLLPVTKITVETASFDLQLLKNPDISGKEYQEGEQLGFWNIREYVLCRDGHVCQHCYGRSKDPVLNVHHLESRRTGGDSPGNLITLCETCHKALHRGEITLKTKRGQSFRAETFMGIMRWEVLNRLKASHSELKVHNTYGYLTKHARIENGIAKSHGADAFCIAGNLGAERLGEFFFQKQTRRNNRQIHKLSILKGALRKRNQAPFEVKGFRLFDKVACQGEEGFIFGRRSSGFFDVRKLD

SEQ ID NO: 5707 - protein, 441 aa, Acidithiobacillus sp.; identical to SEQ ID NO: 5206

SEQ ID NO: 5708 - protein, 433 aa, Fervidobacterium sp.
MVFVISKDGKPLMPTKRLGKVRRLLKQGLAKVVNREPFTIQLLYETTNYTQPVTVGIDTGSKVVGVSAVTDKEEIFSAEVQLRQDIKKLLLERRQHRRFRRYRKTRYRKPRFLNRRKEDGWLPPSLQWKVDAHVRIVNKLSKIIPITKVVVEVAPFDIQKVQNPDIEAKDYQNGPQKGFSDVRDYCLWRAGYKSELSGKTGILEIHHIIPRSEGGTDAPNNLIVLTTQEHKMLHEGKIKIPKSRLEQIKVFKHVAHVSTIGWHIVNKLRQNYHVEITYGSITKEKRILYGLEKSHRDDALVIAGGNIQERASEWYFGKFFRRQNRSLHKANPIKGGKRPINTVKQVRGFRRFDKVECEGEKGIITGLRSSGYFSISSLSGEKISDSVKYTKLRLIERAKTLMFERRERATCSWLKPRVSVARFHEHTNDIASS

SEQ ID NO: 5709 - protein, 465 aa, unidentified
MSTCVCVLSNNGERLMPTIRLGKVRHLLKDGKAKIIKHHPFTIQLLYDSKTNTQPIEICEDVGYNYIGISVKSESHEYVSAQYDTLQDEKEHHDDCRKYRRTRRNRLRYRKPRFDNRKRDDGWLAPSLEHKKELNVNVIKMYCEVMPITHAIVEVGSFDTMLVKAIEEGKATPESADYQKGPRYKLATLREAVFYRDNYTCQVCGRKANEGAILHVHHMFYWKGRHGNSLSELITVCEKCHTPANHQKGGKLYGFGEDIKFANLSGAAFMNTVRWQIVNVLNAAFGKPFVTFTYGAMTKEKRIALHLEKSHNNDAYAMGSFHPVNRCAFEHYEKVKRNNRILEKFYDSQYIDIRTGEIATGKELFNGRISRSHKKDSENLHKYRGKRICKGHRALRRKKVALNPGDLVSLNGEILVVHGTHTKKNGSVNVEFKTPSRGGKKSASLKKLKIVKTSNLMHSAWTKVA

SEQ ID NO: 5710 - protein, 438 aa, Methanohalobium sp.
MVFVLNKNKKPLTPCHPAKARILLKAGKATIHKKYPFTIRLKELKSDDVKDDFRLKIDYGSRYTGLAILKNNKDVIWLDQVHHRTDIKKKLDDRRNFRRRRRSQNLRYRKPRFDNRKKPEGWLPPSLQSRVDNIQTWITRLRELVPINCLSYENVNFDTQLMQNPEIKGVEYQQGTLQGYNVREYLLEKFQRTCAYCGKQDVQLEIEHIVPRSRGGSNRVSNLTIACHDCNQRKSNLTAEEFGHPEVYEKAKKPMKDAAVINATKDKVLDVLKNTGLPIECGTGALTKMNRIKLNLPKDHHFDACCVGESTPDELRFKTNSVLHIHAKGRGSYKRCKLDKYGFPRKPAPRIKYIFGFQSGDIIKAIVEKGKYKGTWKGAVACRSNGYFDIKNGTKKIAQGINHKYFKLVQRFDGYTYQLDRLNLNKNTNTDGRNSSHC

SEQ ID NO: 5711 - protein, 420 aa, unidentified
MQYVYVLNRHGEPMMPCSPGKARLLLKQQKACVVKRTPFTIKLLYGSAGYKQPITLGVDAGSRHVGLSASTEKRELYREEFSPRNDVVKLLSTRKQNRCSRRYRKTRYRPPKFDNRVHSKHKGWLAPSVEVKIQEHITVIKHICKILPISLVRVETAEFDTQRLKAMLAGKPLPVGTDYQLGEMYDEYNVRQYVLKRDHYTCQCCGAHNTAKKVVKLHVHHLESRKTGGNAPSNLVTLCTTCHKNLHKGRVTLDGKERGKPLRDAAFMGIMRKTLTARLKEELPIPVQGAYGYITKMSREQNDIKKSHVNDARCISKHPLAEPCSVCYRTKAIRHHNRQTHKANFSKKGIRKRSQMPYLVEGFRLWDKVLYKGQECFVSGRRSSGSFALKKLDGTSISKGVTFKKLRLLEPATNYLIERM

SEQ ID NO: 5712 - protein, 427 aa, unidentified
MRVFVLDKNRKPLDPCHPAKARKLLKSGRAKVLRRYPFTIIIQDLEVENCVTHDHQLKIDPGAKTTGLAIVQGERVIWGAELTHRGFQIREALTSRRQLRRSRRNRKTRYRQPRFLNRKKPKGWLAPSLMSRVHNILTWVNKLIKFCPVTGISQELVRFDTQKMLNPEISGIEYQQGTLYGYELREYLMEKWDRTCAYCGAKNTRLEIEHIKPKSKGGSDRVSNLAIACHDCNQAKGNQEIEQFLSKKPSILKRILSQAKKPLADAAAVNATRWKLHDELKLIGLPVEVGSGGLTKYNRCRQNLPKTHWLDAANVGKVDTLYIEDYQTLLIAAKGHGKRQICGTNKYGFPIRHNSRKKIHKSFQTGDIVKAVVTKGKKIGTYVGRIATRKTGSFDITTAKGKVSGISYKYCEAIHRKDGYSYQFHGE

SEQ ID NO: 5713 - protein, 427 aa, unidentified
MRVFVLDKNRKPLDPCHPAKARKLLKSGRAKVLRRYPFTIIIKDLEAENCSTHDHQLKIDPGAKTTGLAIVQGDRVIWGAELTHRGEHIREVLTSRRQLRRSRRNRKTRYRKPRFLNRTRPKGWLPPSLMSRVHNILTWVKKLIKLCPVTGISQELVRFDTQKMLNPEISGIEYQQGTLYGYELREYLLEKWNRTCAYCGAKNTRLEIEHIKPRSKGGSNRVSNLTIACHDCNQAKGNLEIEEFLSSKPNILKRILSQAKKPLADAAAVNVTRWKLHDELKLIGLPVEVGSGGLTKYNRCRQNLPKTHCLDAANVGKVETLYIEDYQPLLIAAKGHGKRQICGTNKYGFPIRHNSRKKIHKGFQTGDIVKAVVTKGKKIGTYIGRVATRKTGSFDITTAKGRVSGISYKYCQAIHRKDGYSYQFHGG

SEQ ID NO: 5714 - protein, 480 aa, unidentified; identical to SEQ ID NO: 2726

SEQ ID NO: 5715 - protein, 443 aa, Ktedonobacter sp.
MEQSIIYVLAISGKPLMPTRRRNKVWYWLRCGLAKVVSREPFTIQLRFETTEYRQPVTVGVDTGSKTVGMAATTNGAVVYQAEVHLRTDITDKLTQRRQYRRTRRSRNTRYRAARFANRRKPAGWLPPSLRSKAEATVKAVHFVARVLPVCQVNVEVGSFDTQKMQRPEISGLEYQQGELQGYLLREYLLEKWQRHCAYCGAKEVPLEVEHIVPRSRGGSNRVSNLTLACKPCNVRKEKLTAAEFGYPKIQAQARVPLKDAAHVSTLKTAVVQRLQAIFGTDQVDVTYGYETKYKRIQVLGLPKSHTNDAVAIACVMGEVVEPCAVAHQLRCVPRGNYQLFNGKHSEHKVWAPRKVKGWKLHEQVAAKGQVGYIGGRRLKGSFVLKDLITGKTILEVVPSKLRRIARCTHGWIAATMQFTEQEGGASSPGSSRGVPAPQNSWK

SEQ ID NO: 5716 - protein, 456 aa, unidentified
MSTCVCVLSNSGERLMPTIRLGKVRQLLKDGKAKIVKHHPFTIQLLYDSKTNTQPIEICEDVGYNYIGISVKSESREYVSAQYDTLQDEKEHHDDCRKYRRTRRNRLRYRKPRFDNRKCSEGWLAPSLEHKKQLNIRLIERYVSVIPITHATVEVGSFDTMLLQAIQKGKSKPEGVDYQKGPRYNLATLREAVFYRDNYTCQVCGRKIADGAILHMHHMFYWKGRHGYQLDELVTACEKCHTPANHQKGGKLFGFGEDKEFANLSGAAFMNAVRWQIVDALYATYGKEFVTITYGAMTKEKRIALQLEKTHSNDAYAMGNCHPAHRCEFGHYQKRCRNNRVLEKFYDATYIDTRTGNKAKGKELFNGRISRNHKKDSEDLHKYRSKKMSKGCRSIRRQRYAIQPYDTVRLEGKTYITSGCHNKGTRLLIPANGKSKSVAISKVQVVCHAGAWIQII

SEQ ID NO: 5717 - protein, 456 aa, unidentified
MNTCVCVLSNNGERLMPTFRLGKVRRLLKDGKAKIVKHHPFTIQLLYDSKTNKQPIEICEDVGYNYIGISVKSESHEYVSAQYDTLQDEKEHHDDCRKMRRARRNRLRYRKPRFDNRKRSEGWLAPSLKHKKELNVNIVKMYCAVMPITHATVEVGSFDTMLVKAIQEGKAIPEGADYQKGPRYNLATLREAVFYRDNYVCKVCGRKATEGAILHMHHMFYWKGRHGYKLDELVTACEKCHTPANHQKGGKLFGFGEDKEFADLSGAAFMNAVRWQIVNALHTTYSKEFVTITYGAMTKEKRIALQLEKSHNNDAYAMGDFHPVHRCGFRHYQKRRRNNRVLEKFYDATYIDTRTGNKAKGKELFNGRISRNHKKDSENLHKYRSKKVSKGRRSIRRRRYAIQPYDTVRLEGKTYITSGCHNKGTRLLIPVNGKSKSVAISKVQVVCHAGPWIQII

SEQ ID NO: 5718 - protein, 413 aa, unidentified; identical to SEQ ID NO: 2605

SEQ ID NO: 5719 - protein, 423 aa, Oscillatoria sp.
MSNFVFVLDTQKRPLNPIRPGMARKLLTNGSSAVFRRYPFTIILKVEVITTPERIALKIDPGSKTTGIALVQGEKVIFGAELTHRGQAIKASLESRRLLRRARRNRNTRYRQARFLNRTRPKGWLAPSLQHRVETTLTWVNRLIRLAPIGSVAQELVRFDLQQLENPEISGVQYQQGTLFGYEVREYLLSKWDRKCAYCGVENVPLQIEHIHPKAKGGTNRISNLCLACEKCNIKKGTQDIEQFLAKKPEILKRILSQAKRPLKDAAAVNSTRWALFNRLKETGLPSSTGSGGLTKFNRTRLNLPKTHWLDAACVGQVESLEVLTTKPLLIQANGHGTRQMCRTDKFGFPSRYVPRVKFVKGFQTGDMVKAVVTSGKKVGKYVGRVAVRSTGSFNISASELVSGISYKYCSIIHRKDGYSYAA

SEQ ID NO: 5720 - protein, 417 aa, unidentified
MIYVRSKEGSVLMPTERCGKIGYLLRHGKAHVVSRVPFVVQLDYDSTTYTQDVSLGIDAGSKHIGVSASSEKKEMLAAQVELRSDIVKLLSTRRELRRNRRNRKTRYRKARFDNRKKKDGWLAPSVEQKIESHLKVIRLVHKLLPVTKTTIEVAQFDAQKIKNPDIKGDEYQQGEQMGFWNVREYVLARDGHKCVHCKGKSKDPILNVHHLESRKTGGNSPSNLVTLCETCHKAYHRGEFDLKIKRGSSLSDAAVMNIMRWAVYERAKLEFLNVHLTYGYVTKRTRIENGIAKTHAADAFCIAKNVHAMRLSSFFMCRCVPRHTRALHVANPKKGGIRRNTIASHKIGKSNFQRFDMVRWKGMDCFIFGSTNGRPVLRDIDGLQVANQPSVNIKTIKFLKRLKNNILIEEKNFRKLN

SEQ ID NO: 5721 - protein, 443 aa, Caldicellulosiruptor sp.; identical to SEQ ID NO: 2385

SEQ ID NO: 5722 - protein, 443 aa, unidentified
MSVFVVGLNGCRLMPTSERKARLLLKQGKAFVEQKVPFTIRLNYKTGSTTQLGYLGIDTGSQHIGVSVVREDGTVLHKEEIGLRDSMSKRKLLEAKASLRRGRRYRKTRYRHPKWRPKTKRVYCEVPDRKGRHWQKKKITFTSKRPKGWLPPSLQSKTDHHIRWIKKLQDLLPEGYRLSIELARFDPARMKNPEIHGDLYQKGPQYDYENVRAYVLDRDRYTCQICKKKGGKLHVHHILYRSHGATDDPQYMVTVCSDCHSAQNHLPGGILYQWMQEQKRFSRGLRDATFMNILRKRLIRAFPEAVFTYGNVTKVDREKLKLPKSHGNDATAIALVKTGITAVKDKESVICIQQVRRKKRSLHEETPRKGRKEPNRTAARNNKNTKAVTVTKRQNKKKVSMTGCLFDRVELNGKKGWISGFTGKSCYVKDADDQYLSTSPKYK

SEQ ID NO: 5723 - protein, 431 aa, unidentified
MPDKVYVISRLGHPLMPCSPANARHLLDDKKAKVVKRMPFTIRLLYGSTKYIQPIILGVDAGSKTIGLSASTAKEEVFAAEVMPRNDVVENLSTRREFRRARRNRTTRYRKPRSDNRVRSNHERWLAPSVKVKIQEHITSIKRVYTILPISKVVIETAEFDLQLLKAIQEGKPIPEGEDYQKGEMYGSYNVCQYVLWRDNYTCICCGVRGTPKNPVRLHVHHFESRKYGGNAPDNHGTLCDDCHKKFHLGIITDVKLKTRRRQSTRDAAFMGIMRKTLMWRLRTELFIPVAETKGYITKATREKLLVLPKSHTRDALAIAQGRHGFGIKEYAYVEPANHIYTVRPVRHHNRQLHKASILKGGIRKRNQASKYVFGFRLYDKVLYQGKACFVWGRRTSGTFLLRTIDGIKVKDGVSYRNLTLLERSSNYLIA

SEQ ID NO: 5724 - protein, 418 aa, unidentified
MVYVLGQDGHPLMPTCRHGKVRRMLKSGMAKVVQRCPFTIQLQYESTTHTKNINLGIDAGSKTIGVSVTTDTKVLYESEVVLRNDIVELLSGRRALRRSRRNRKTRYRKPRFDNRKKHDGWLAPSIRQKIEIHVTVVENVMKILPVTKIIVETASFDIQKIKNPEIEGEEYQHGEKLDFWNVREYVLFRDGHICQCCKGKSKDNILNVHHIESRKTGGNAPNNLITLCETCHQAYHKGIITLPKEIHRGMRFRDASFMGIMRWAFYDRLKELYTPLDVEVVNTYGYITKNTRIEHGLPKVHYVDARCISDNPASKPMDHYYFQKKVRCHNRQIHKNTILKGGIRKRNQAAYLVNGFRLFDKVKYQNQEYFIFGRRSSGFFDIRTLDGTKVNKGSISCKKFQLVEKSKHYLTEQRKVTA

SEQ ID NO: 5725 - protein, 458 aa, Halomonas sp.
MAVFVLDKQKQPLMPCSEKRARLLLERGRAVVHKRYPFCIRLKDRVGGETQPLRLGLDPGSKTTGLALMRESDGEQRHVLCLFDLVHRGFQIKKALAQRAAFRRRRRSKNLRYRAPRFDNRKRKAGWLPPSLQHRVDTVMAWVERLSRLAPITGISQELVRFDTQKLENPEISGVEYQQGTLLGYEVSEYLLEKWGRACAYCGTAETALEIEHVVPRSRGGSNRVSNLTLSCHACNQAKDSLPLADFFARDKGLKKRFKANGLLADARLERVQRELKRPLRDASAVNATRWALFTALNATGLPVAVGTGGRTKYNRQRLDIPKTHALDAACVGVFETLHDWAVPTLAIQCAGRGSYQRTRLTKHGFPRGHLMHQKQVHGFQTGDMVRAVVPTGKKAGTHTGRVAVRKTGSFNIQTDQGAVQGISHRHCTLIQRGDGYGYYVTPTIHQPTKGEAGQAVA

SEQ ID NO: 5726 - protein, 416 aa, unidentified
MVYVLDKNGQPLMPTDRHRKVRLMLQSGQAKVIKRCPFTIQLTYNTGHQAQEISLGIDAGSKHIGVSTTTKIKVLYEVDVELRNDIVDLLSSRRELRRGRRNRKTRYRPARFDNRRREDGWLAPSIRQKIGTHLTVVENICKMLPISRIMVETASFDIQKIKNPDIQGAEYQQGDQLEFWNVREYVLFRDGHTCQCCKGKSKDKILNVHHIESRKTGGNAPNNLITLCEICHTGYHKGAVQLPKTVKRGMRFKNAAFMGIMRWAFYEALKQQYEPVGTPVHNTYGYITKHTRIAYNLPKEHYVDARCISGNPEASSNGEYYYQKKVRCHNRQIHKLTVLKGGIRKQNQATYLVKGYRLFDKVSYQGKGYFVFGRRQSGFFDIRTLSGEKVNKGSLSCKKLKFIATRTYYLTERRAV

SEQ ID NO: 5727 - protein, 406 aa, unidentified; identical to SEQ ID NO: 4082

SEQ ID NO: 5728 - protein, 454 aa, unidentified
MNTCVCVLSNNGERLMPTFRLGKVRRLLQDGKAKIVKHHPFTIQLLYDSKTNKQPIEICEDVGYNYIGISVKSESHEYVSAQYDTLQDEKEHHDDCRKMRRARRNRLRYRKPRFDNRKRSEGWLAPSLKHKKELNVNIVKMYCAVMPITHATVEVGSFDTMLVKAIQEGKAIPEGADYQKGPRYNLATLREAVFYRDNYVCKVCGRKATEGAILHMHHMFYWKGRHGYKLDELVTACEKCHTPANHQKGGKLFGFGEDKEFADLSGAAFMNAVRWQIVNALHTTYSKEFVTITYGAMTKEKRIALQLEKSHNNDAYAMGDFHPVHRCGFRHYQKRRRNNRVLEKFYDATYIDTRTGNKAKGKELFNGRISRNHKKDSENLHKYRSKKVSKGRRSIRRRRYAIQPYDTVRLEGKTYITSGCHNKGTRLLIPVNGKSKSVAISKVQVVCHAGAWIQ

SEQ ID NO: 5729 - protein, 416 aa, unidentified
LVYVLSKNGNPLMPTNRHGKVKHLLKDGKAKVVRRTPFTIQLLYDSPEYTQPITLGVDAGSKVVGLSATTEKKELFVSEVTLRDDIPELLSTRRQNRRTRRNHLRYRMARFLNRTASKKEGWLAPSVKHKVDSHLKVIENVHRILPVSRIVIETASFDIQKIRNPEISGREYQQGEQLGFWNTREYVLWRDNHECQHCHGKSKDRVLNVHHKESRKTGGDSPGNLVTLCETCHKSHHAGRIKLNLTPNKSYRDASFMGIMRWYVYNSLKELYPEVSMTFGYITKNNRINNNIEKAHSADAYCISGNMNAKRIDEIYNQAFKRKHNRQIHKGNFLKGGKKKLNQSAYEVKGFRLFDHVRYRDKECFIFGRRTSGYFDLRKLDGSVVHRSASFKELTLLKRQNTILIERKGRNGVLLS

SEQ ID NO: 5730 - protein, 418 aa, unidentified; identical to SEQ ID NO: 5294

SEQ ID NO: 5731 - protein, 423 aa, Oscillatoria sp.; identical to SEQ ID NO: 5009

SEQ ID NO: 5732 - protein, 443 aa, Caldicellulosiruptor sp.; identical to SEQ ID NO: 2385

SEQ ID NO: 5733 - protein, 438 aa, unidentified; identical to SEQ ID NO: 4848

SEQ ID NO: 5734 - protein, 423 aa, unidentified
VWNKRRKPLMPCSPAKARLLLKEKKAIVKRRTPFTIQLTIATGESKQPVSLGVDAGYKHVGFSASTEKAELYASEVELRQDVSDLLSARRALRQSRRNRKTRYRAPRFDNRIRTKRKSWLAPSVENRINAHLSRIEAVLRLLPVTKITVETASFDMQLLKNPDISGKEYQEGEQLGFWNVREYVLFRDGHVCQHCHGRSKDPVLNVHHLESRRTGGDSPGNLITLCETCHKALHRSEITLKTKRGQSFRAEAYMGLMRWEVLNRLKTSHPGLEVHNTYGYRTKYTRIVNGIDKSHCADAFCIAGNLGAERLGEFFFQKQTRRNNRQIHKLSILKGDIRKRNQAPFEVNGFRLFDKVACKGEEGFIFGRRSSGFFDVRKLDGTCISAGISYKKLHLLEKRRTYLTEIRKEEALPPLPEGSGLRA

SEQ ID NO: 5735 - protein, 431 aa, unidentified
MPNKVYVINKHGRPLMPCSPAKARHLLDEGKAKVKKRTPFTIQLVYGSSGYTQEVILGVDAGSKTIGMSASTTKEELLSAEVKPRNDVVDLLSTRREFRRARRNRKTRYRKPRFDNRVRSKHKGWLAPSVEVKIQEHITAIRRVCGILPVSKVVIETAEFDLQLLKAIEEGKPVPQGEDYQQGEMYGHYNVRQYVLWRDGYTCQCCGAHATKKKEVRLHVHHLESRKVGGDAPDNQVTLCESCHEKLHKGLIAEKDFKKRKRKSTRDATFMGIMRKTLMQRLCSELPIPVIETRGYITKATREKLLVLPKSHTNDALAIAQGKQGFNVGYLPGIVQINKIYTIRPVRHHNRQLHKATILKGGIRKSNQTEKYVFGYCLFDKVQFNGQDCFIWGRRTTGIFTIKTINGKMIKDGISFKKLKLAEKSTSYLIA

SEQ ID NO: 5736 - protein, 462 aa, unidentified
LIQNTLQDPKARPAQNRVLVLDKNKQPLMPCHPARARELLRKGRAAVYRRFPFTIIIKDREGGATQPTVLKFDPGSKKTGIAVVADFQRGKRCIFAAELEHRGEQIKKALEKRRNIRRSRRSRKTRYRKARFENRRKPKGWLAPSLQSRVDNIESWTRKFRALIPVSSLSVENVRFDTHKLVNPEVQGVEYQQGTLFGYQVREYLLEKWGRKCAYCGKQNVPLQVEHMTPKSRGGSNRVDNLTLACEMCNQKKGSKTAGGFGFPGLCKKADRPLRAVAVVNSTRPAILEVLKSTGLSVETGSGGQTKFNRSQQGYAKEHWIDAMCVGDSGRHVFVEKCHEVLEIKAMGRGTRQMCRVDRFGFPRTGAKKKEKRVDGFQTGDIVKAIVTKGKKKGTYVGRVAVRSSGNFNIKEGKKTTQGIAAKYCKMVQKIDGYNYNNRMGVSSPLLRRGSPRLGKMEAFDR

SEQ ID NO: 5737 - protein, 418 aa, unidentified
VVYVLSKTGQPLMPTENNAKVRVLLKQQKAKIVHRCPFTIQLLYDSTDYTQPVSLGIDAGSRHIGVSATTETKVLYEADVTLRNDIVDLLSTRREARRTRRSRKTRYRKPRFNNRTRKDDWLAPSVKQKMDTHLTTLRKVTEILPVNSITVETASFNIQKIKNPNIASTGYQHGEQLDFWNVREYVLFRDGHKCQCCKGKSKDPVLNVHHIESRKTGGNAPNNLITLCETCHKGYHNGTVSLPKNIRRGMKFNDAAFIGAMRWAFFNRVKETYEPLGIMVNMTYGYITKNTRIEHNLPKDHFIDARCISGHPDATSDGTVFYQKKVRCHNRQIHKQKILKGGIRKRNQAPYLVKGFRLFEKVKYHGKQYFIFGRRSSGFFDLRTLDGTKVNKGSVSYKKIRSLDMPRSYLTEERKAIV

SEQ ID NO: 5738 - protein, 453 aa, unidentified
MLMAVAVVSRTGVPLMPTSPYRARKLLASGKAEKYGYDPFTIRLTERETGDTQPVELCMDTGYIHIGVSVKSEKHEYLALQIDTLTDEKKKHEKCREKRRNRRSRKRYRKPRFDNRKRDKGWLAPSLEHKKEIHVRAAERICRVVPVTDITMEMGNFDTQVLKSREEGRPLPQGTDYQQGERYGTATLREAVFSRDNYTCLCCGRTMKDGAYFHVHHIRYRSQGGTDRMANLATVCEKCHTPANHQPGGKLYNWKPEIKSFKGATFMTAVRWQMYREIKEKIPDVSVHLTYGAATKERRRALDIEKSHVNDAFVMGRFHPGHRARPELYIKKRRNNRVLESFYDAKYIDSRDGKRKPGKELFNGRISRNHKKDSENLHKYRLRKVSKGKRSIRKKHYPIQPHDILVYCGRKYETAGCHNLGTGAILLPERKSIAVSKLKIYRYSGGYYKAEFN

SEQ ID NO: 5739 - protein, 414 aa, unidentified
MPCSPAKARLLLKEKKAIVVRRTPFTIQLTIATGETKQPVSLGVDAGYKHVGLSASTEKAELYASEVELRQDITDLLSARRALRQSRRNRKTRYRAPRFDNRIRTKRKGWLAPSVENRIDAHLSRIEAVLRLLPVTKITVETASFDLQLLKNPDISGKEYQEGEQLGFWNIREYVLCRDGHVCQHCYGRSKDPVLNVHHLESRRTGGDSPGNLITLCETCHKALHRGEITLKAKRGQSFRAEAFMGIMRWEVLNRLKASHPELEVNNTYGYRTKHARIANDIAKSHCADAFCIAGNLGAERLGEFFFQKQTRRNNRQIHKLSILKGGIRKRNQAPFEVNGFRLFDKVACQGEEGFIFGRRSSGFFDVRKLDGTRISAGISYKKLHLLEKRRTYLTEIRKEEVLPPLPEGRGLRA

SEQ ID NO: 5740 - protein, 415 aa, Bacillus sp.
MRVFVKNLRGELLMPCSPRKARLLLKQGKAKIVGYTPFTIQLQYATGETVQPVTIGVDSGAKYVGIAITTEERVLTKGTIALRQDVKENLTLRATLRRSRRQRKTRYRKARFLNRKKKEGWLPPSIQSRIDNVIHWIEKFKSLLPSPKVIVEVGKFDAQKLKNPDIQGIEYQQGDAFGFWNIRYYVFARDQYTCQICKKKGGILHTHHIIERHKGGSDMADNLVTVHEECHQKFHKGKIKHSFKKPKQYKETAFMNILRLQIMKRLDCEITYGSYTTPIRKELRLPKTHVNDAIAITNPKRLQEYDQSGEFRIKQFRKKKRSLHEATARKGRKTKNTKANRNKKNTSHVDGIYLGNKVKGFGQIGFVTGFTGKMVYIQDIDGHYIQNPSKSYKQVKISDIECIHHNNNWLFLQVS

SEQ ID NO: 5741 - protein, 465 aa, unidentified
MVIALDRHKKPLGFVIERRCRKLLEVRRAVFYRHYPAVIILNDVDARNIYKLPSYRIKIDPGAVHTGIAIVCNETNEVMYFLQIEHRGSEVKKALITRKQTRRNRRSRETRYRRCKFKNGGDFDSSRKNGWLPPSVKSTADNVIHWVEKLCRYINITECSFEAVRFDSQLMDNPEIGGEEYQQGTLSGYELREYLMEHFRHTCQYCGGESGDPVLEWEHKIPRSRGGSDSVKNASLACSCCNRDKGNRTLEEYLEDSKHISPKGKSEKALNEARISHISGILEKGTIYGSNRYSAWVNSTRRYIEKYLFLMFDDVECCSGGRTKYNRIKLKLPKDHHYDALCVGSVPKEGYTDRTNSYVLYVKATGRGTRFRGQCNSCGVITVKYKNNSKRKFGFQTGDIVQLNKPKGKDTGQYTGKVAVRSSGSFDLIRKGCKRITANYKYFRMMQYSDGYEYLGPLRPIPHSA

SEQ ID NO: 5742 - protein, 419 aa, unidentified
MYVYVLNKHGEPLMPCSSRKARTLLDNKKACVAKRTPFTIKLLHGSAGYKQPITLGVDAGSKHVGLSASTETHELYREEFTPRNDVVDLLSTRREFRRARRNRKTRYRAPRFNNRVHSKHKGWLAPSVEVKIQEHITVIKHVCQIMPVSLVRVETAEFDTQRLKAMLEGKPLPVGTDYQLGEMYDEYNVRQYVLKRDDYTCQCCGAHATKTKQVKLHVHHLESRKTGGNAPSNLITLCSTCHKAIHEGKKTLDTKKRGKPLRDAAFMGIVRKTLLMRLRKKLSIPVQQTYGYITKMLREKNNLPKSHMNDALCIAKHPKAAPCENCYRSKAVRHHNRQIHKATILKGGIRKNNQAPYTVKGFRLWDKVLCNGQECFISGRRATGYFALKKLDGTVVTNSVSYQKLRLLETAKNYLRERM

SEQ ID NO: 5743 - protein, 429 aa, Ktedonobacter sp.
LSNVFVIDSDYKPLNPVHPARARCLLTQGKASVYRRYPFTIILKRVVDQPEVHPLRLKLDPGSTTTGIAIVNDQTGNVVFAAELSHRGYAVKGDMERRRARRCGRRNRKTRYRKPRFHNRRRKQGWLPPSLESRLANILTWVARLCRYAPITALSQELVRFDMQAMEHPDIAGIEYQQGTLAGYEVREYLLEKWKRTCAYCGKENIPLQIEHIQARAKLGTNRISNLCLACEPCNKAKGTQDIRVFLAKQPEVLTRILAQAKKPLQDAAAVNTTRWALWERLQAFGLPVECGSGGLTKYNRTTRTLPKSHWLDAACVGKSTPETLKVKGVVPLLMTATGHGSRQMCVPDPYGFPEKHKKRVKSFLGYRTGDMVKAVTPKGTFEGRIAIRHRPSFHLGKRDIHPKYMRCVQRADGYEYTQKGVRHAPPHI

SEQ ID NO: 5744 - protein, 475 aa, unidentified
MVAVVTSTGKPLMPTSAYRARKLLKKGRAVIFKYRPYFTIQLVDRADGEVQEVEYKSDTGSVHVGISVCTEKKELLSEQRDLLENEPEHHNDRKKNRRTRRNRKRYRKPRFDNRKKKPQEGHEKWLPPTLLHKMEVQVRLFREFCRVVPVTSACFEMGKFDTQALKAVSKGEPVPEGEGYQKGERYGTDTLRAAVFLRDGHTCRFCGRSVKDGAILHVHHVGYWKGDRTNRPANLASACEQCHTPANHGKNGILYGKEPEFKTLKDASYMTSVRWIMLDEIKKAAPGVQVSVTYGVTTKRKRQELHLPKSHVNDAFSMASFHPKKRSDTEYWKKIPRHDRVLQKFYDAVYLDTRDGSEKKGSELSNGRISRNHKKDSENLHQYRGHKVSKGHNSIRRGASSLKPGSIVMYKGEKMTVHGTHTRYVKGKDGKTAKKVNVQFTCPASDGKKSASLEKCTPVSRVYNTGWKRYWPDKK

SEQ ID NO: 5745 - protein, 459 aa, unidentified
LYTKPLDNIGEGSLPPSGEINLKGMTFMVYVKSIDGKALMPTSNAKARKLLKQKKAKVVSLRPFVVKLTYKTKTEYIQKLNLGVDSGYSNIGFSVIDAKQEYIAGEVKLLEGMKKRLLEKASYRRIRRSRLRYRKARWNNRVKSKKKGWLAPSLKHKLDTHIKFIDYLKNILPIGKITVEVANFDIQKMKDDLISGIDYQNGDMFGFWNMREFVLHRDGHKCQNPNCKHKDKKEQILKVHHIRYRSEGGSDRPENLITLCSKCHTPVNHKKGKFLYDWCVNGKKVRGFKDATFMSMIRWYLVNELKSKHNNVSITYGYITKNHRIQNGIEKSHLNDAFAIAKGTNQARTKDRFLVIQDRLKNRSLEKFYDSKIIDIRTEKKVSGGDLSCGRSTRNKNLNTENLRKYRGAKISKGQRRIRKQKYFYKPNDLVKYDGKVYTVKGTQNEGKYIALKEIKKSS

SEQ ID NO: 5746 - protein, 442 aa, unidentified; identical to SEQ ID NO: 2903

SEQ ID NO: 5747 - protein, 431 aa, unidentified
MPNKVYVINKHGRPLMPCSPAKARHLLDDGKAKVKKRTPFTIQLVYGSSGYTQEVILGVDAGSKTIGMSVSTTKEELLSAEVKPRNDVVDLQSTRREFRRARRNRKTRYRKPRFDNRVRSKRKGWLAPSVEVKIQEHITAIRRVCGILPVSKVVVETAEFDLQLLKAIEEGKPVPQGEDYQKGEMYGYYNVRQYVLWRDNYTCQCCGAHATKKKEVRLHVHHLESRKSGGDAPGNLVTLCDSCHEKLHKGLITEDDFKKRKRKSTRDATFMGIMRKTLIQRLRAELTIPVAETRGYITKATREKLLVLPKSHTNDAQAIAQGKQGFNVGYLPGIVQINKIYTICPVRHHNRQLHKATILKGGIRKSNQAGKYVFGYRLFDKVQFNGQDCFIWGRRTTGIFTIKTINGKMIKDGISFKKLKPVEKSTSYLIA

SEQ ID NO: 5748 - protein, 443 aa, Oligella sp.; identical to SEQ ID NO: 5205

SEQ ID NO: 5749 - protein, 446 aa, unidentified
LRVFVKNMRGEALSPCEQRKARILLKEKKAKIIIYQPFTIQMTVPTGETTQSTLLGVDLGAKHLGMAVVSEGNVLAKGEIELRQGIKGDLETRSTYRGSRRNRKTRYRKSKFEHKTKRIYSIKKKKWIKEKKSFISPRPEGWLPPSIRSRIDNTFFWIDTFASLIPNCKIHIEVGKFDVAKMIHPSIQGKEYQEGPAAGYHDVRYFVFARDSYTCQLCKKKNKILQTHHIVYRSHEGTDRASNLITLCTDCHTSENHKEGQILWKWMQEKRKTKSYKEGPFMNSFRRKVFVKYPEAHITYGSITTPKRKELELEKTHYNDAIAIANPSVINRNVEVIFVMKQFRKKKRSLHEATARKGRKEKNRTQKRNEKNTRMVKGFHLNDQVCVFGQIGFITGFSGSSTAYVKDIHDEYLTVPGKTYKQVNLSSLRLIRHNNNWQYFIQKESV

SEQ ID NO: 5750 - protein, 424 aa, unidentified
MRVFVLNMRGEPLMPCSQRKARILLKESRAVIYKYNPFTIRLAYATGEAKQDCHIGIDTGSKHVGIAVTSGNKIFFKGEIELRQDVKRNIDMKRAYRRDRRNRKTRYRQPRFLNRKRTDRWLPPSLQNRVNHTFHWIDTLSSLVPNPLLHIEVGKFDTAKMINPEINGVDYQRGQTYGFFDERYFVFARDNYTCQCCGKSKDKILQTHHIIYRSNGGTDRADNLITVCTDCHTSKNHQKGGILYEWQKQHKEVKQYKEPPFMNTLRRKMFVRYPNAVITYGSETTPKRKEMGLAKTHYNDAVIISGIDEINEDCSEWLNIKQFRKKKRSLHEATARRGRKTPNCNQIRNSKNTPYYKGFYLNDKVSILGKTGYITGFTSGGAYIKDNNEDYIKLPCKTYMQVSICKLRLICHNNNWQYIVKDTV

SEQ ID NO: 5751 - protein, 469 aa, unidentified
LAVCVLDRSGKALMPCSEKRARLLLARGRARIHRVVPFIIRLVDRQAHASRFQPLRIKLDPGSRTTGLALVRDTEHVDASSGEIQRGAAVLNLFELVHRGRQISAALSARRAMRRRRRGNLRYRAPRFLNRTRPAGWLAPSLEHRVVTTMAWVNRLMNWAPVTAVSSELVRFDMQALENPEIAGVEYQQGTLAGYEVREYLLAKWGRRCAYCDQEHVPLQIEHILARASGGTHRISNLTLACARCNAKKAARPIEAFLAREPKRLALILAQAKRPLKDAAAVNATRWALANALRATGLPVELTSGGRTKFNRTQLGLPKTHALDAVCVGKVAGVSVWCRPTLVVKCTGRGSYQRTRLDRYGFPRGYLTRSRRMHGFQTGDLVRADVPTGKKAGRHTGRVAVRATGSFNIQVAGDVVQGIAHRHCRLIQRSDGYGYSRIALLKGDASDGTASLSALSLPAVNDGVSRATG

SEQ ID NO: 5752 - protein, 416 aa, unidentified
MVYVLDKNGQPLMPTDRHRKVRLMLQSGQAKVIKRCPFTIQLNYDSGHQTQEISLGIDAGSKHIGVSATTKIKVLYEADVELRNDIVDLLSSRRELRRGRRNRKTRYRQAKFNNRRRGNGWLAPSIRQKIGTHLTVVENICKILPISRIMVETASFDIQKIKNTDIQGAEYQQGDQLGFWNIREYVLFRDNHTCQCCKGKSKDKILNVHHIESRKTGGNAPNNLITLCEICHTGYHKGAVQLPKTVKRGMRFKDAAFMGIMRWAFYEALKQQYEPVGTPVHDTYGYITKHTRIAYNLPKEHYVDARCISGNPEASSNGEYYYQKKVRCHNRQIHKLTVLKGGIRKQNQATYLVKGYRLFDKVSYQGKGYFVFGRRQSGFFDIRTLSGEKVNKGSLSCKKLKFIATRTYYLTERRAV

SEQ ID NO: 5753 - protein, 442 aa, unidentified; identical to SEQ ID NO: 2903

SEQ ID NO: 5754 - protein, 463 aa, unidentified
LAGKIQHKGGQLMSVAVISKTGERLMPSSEYRARKLLKSGKAVKYSYHPFTIQLTKRKTGYAQPIELCMDTGYIHIGISVKSEKHEYLAEQIDTLTDEKTKHGACRMYRTLRRGRKRYRQPRFNNRKRDKDWIAPSLEHKKDIHVQAISRINKVMPLTDITMEMGNFDTQVLKAKEEGKPLPQGADYQHGERYGIATLREAVFSRDGYKCQCCGRTISDGAILHVHHIKYRSQGGTNSMTNLATVCDKCHTPKNHKPGGKLYNWKPKLPDFKGATFMTTIRWQLYNEVKSLFPDINVHITYGAATKEQRRELNIDKSHVNDAFAMGKFHPKHRTNAALYKKKRRNNRCLEKFYDAKYIDSRDGSKRTGQELFNGRINRNHKKDSENLHRYRLQKITAGKRTVRKRHYNIQPHDIVMYENRKRETSGCQSNGTRVILLSDKKSVAVKKVKIYKYAGGYFKSAFN

SEQ ID NO: 5755 - protein, 464 aa, unidentified
MYVFVIGLDGTRLMPCKPRKARKLIEAHKAEIYKKQPFTIRLLYKTGCASQPITLGIDTGSQHIGIAVTSENKVLYQAEIELRSTMDKRSLMETRYSYRRSRRYRKTRYRSPKFRFHTKRTYSETLVKRKTTGIMTHWVKHTNSISTNRPDGWLAPSMQSKVDHHIRWINRFLDVLPPDTKLRLEIARFDMARMKNPEVHNELYQYGPQYDYENLKAYVFDRDHYKCVVCKRKLGSKQPDGHSLKGMMHHITFRSKGATDNPDQLVTVCEYCHIPQAHKEGGVLWNLKEKHKPVQRGLRDATQMNIIRTRLVKAFPDAELTYGNITAADRKKMHLPKSHAGDAVAIAMKGEDVNICEPTVYIKQIRKKKRSLHEATPRKGRKRPNTQAVRNPKNTKSIGIYHIYDTVRFQNETGFISGFTGKSAYVQDFDGNYITMPGKSYKQINLSSLELVKHNNNWIQKTRN

SEQ ID NO: 5756 - protein, 443 aa, Caldicellulosiruptor sp.; identical to SEQ ID NO: 2385

SEQ ID NO: 5757 - protein, 471 aa, Caldicellulosiruptor sp.; identical to SEQ ID NO: 3268

SEQ ID NO: 5758 - protein, 465 aa, unidentified
MSTCVCVLSNSGERLMPTFRLGKVRRLLKDGKAKIVKHHPFTIQLLYDSKTNTQPIEICEDVGYNYIGISVKSKSCEYVSAQYDTLQDVKEHHDDCRKMRRTRRNRLRYRKPRFDNRKRGEGWLAPSLRHKKELNVNVIKMYCAVMPITHATVEVGSFDTMLVKAIQEGKAIPEGVDYQKGPRYNLATLREAVFYRDNYACQVCGRKATEGAILHMHHMFYWKGRHGNSLDELLTVCEKCHTPANHQKSGKLYGFGEDVKFADLSGAAFMNTVRWQIVNELYAAFGKPFLTITYGAMTKEKRIALRLEKSHNNDAYAMGEFHPNCRCAFEHYEKVRRNNRILEKFYDSRYIDIRTGEIATGKELFNGRINRNHKKDSENLHKYRGKRIRKGYRALTRKKVNLNPGDLVSLNGEVLIVHGTHTKKNGAVNVEFKTPAKSGQKSTSLKKLKIVKAADSIHPAWEKVS

SEQ ID NO: 5759 - protein, 421 aa, unidentified
MFVYVLDKNGQPLMPTQRFGKVRRLLRDKKAKVVKRCPFTIRLLYEPETKIVHDIVLGVDTGSKYVGVSCVGNNKVLYQAQVELRDDIKKKMDSRRVYRRSRRNRKTRYRKPRFLNRGNSIKKDRYCPTIVSKFYGHEREIEFCKKILPIKDIVLEAGKFDTQLMEKPWLQEHKWAYQKGVNYGYANAREHALVRDSYTCQCCGKKNCRLEVHHIKFRSEGGSDTLENLITLCEDCHKAVHLGKITLKLKGKHKSNLRHATQMSIIRSMLLKKYSDAIETFGFVTKANRENLSLKKDHYLDACVIASGGLEFELSDVLYRKRCVPVQNRVLTRGIRSERKIPTGKVHGFKRYDKVEYLGKVCFVKARRTKGDFVLMDIGNNSIDFRVIGGCQNPSHKKIKRLNTRRGVICIIQKVQNREER

SEQ ID NO: 5760 - protein, 422 aa, unidentified; identical to SEQ ID NO: 4055

SEQ ID NO: 5761 - protein, 422 aa, Turicibacter sp.
LRVFVLNKRGKPLMPCSPAKARLLLKEKKAIVVRRTPFTIQLTIATGESKQPVSLDVDAGYKHVGLSASTEKAELYASEVELRQDVSDLLSARRTLRRARRNRKTRYRAPRFDNRIRTKRKGWLAPSVENRINAHLSRIETVLRLLPVTKITVETPSFDMQLLKNSDISGKKYQEGEQLGFWNVREYVLFRDGHVCQHCHGRSKDPVLNVHHLESRRTGGDSPGNLITLCETCHKALHRGEITLKAKRGQSFRAETFMGIMRWEVLDRLKASHSKLEVQNTYGYRTKHARISNGIAKSHCADAFCIAGNLGAERLGEFFFQKQTRRNNRQIHKLSILKGGIRKRNQAPYEIKGFRLFDKVACQGEEGFIFGRRSSGYFDVRKLNGTHISAGISCKKLRLLEKRQTYLTEIRKEEALPPLPEG

SEQ ID NO: 5762 - protein, 427 aa, unidentified
MSNFVFLIDSNKTPMNPIHPAHAKKLLNSNKAAVFRYYPFTLIMNRVVENIVTYPITLKIDPGSKVTGIALVNNRDEVIWGMELHHRGLAINDCLETRKGVRRGRRTRHTRYRQARFLNRKRPDGRLNAPSLRHRVLTVETWVKRLCKFAPITAIVQELVRFDLQQLENPEISGIEYQQGELQGYEVREYLLNKWERKCAYCGAENVPLQVEHIKPKAKGGTNRISNLCLACQKCNQKKETQDIEKFLAKKPEVIKTILAQAKRPLKDAAAVNSTRWGLLNTLKKLELPVTTGSGGKTKFNRTRLQLPKSHWIDAACVGIVEKLQVLTSKVLEVKATGHGCRRFCRIDKYGFPCTLPKQTFNHVSTGDFVKVLITKDRKNVPSGIYTGRVKTPTGKGCEVVINGFRIGFSNMTNVKTIHRNDGFSYT

SEQ ID NO: 5763 - protein, 471 aa, Caldicellulosiruptor sp.; identical to SEQ ID NO: 3268

SEQ ID NO: 5764 - protein, 427 aa, unidentified
MRVFVLDKNRKPLDPTHPAKARKLLKLGRAKVLRRYPFTIIIKDLEVENCLTHDHQLKIDPGAKTTGLAIVEGERVVWGAELTHRGFQIREALTSRRQLRRSRRNRKTRYRKPRFLNRTRPKGWLPPSLMSRVHNVLTWVNKLIRFCPVTGISQELVRFDTQKMLNPEVSGIEYQQGTLYGYELREYLLEKWDRTCAYCGAKNTRLEIEHIKPRSKGGSNRVSNLTIACHDCNQAKGNQEIEQFLSRKPSILKRILSQAKKPLADAAAVNATRWKLHNQLKLIGLPVEVGSGGLTKYNRCRQNLPKTHWMDAANVGKVETLYIEDYQPLLIAAKGHGKRQICGTNKYGFPIRHNSRKKIHKGFQTGDIVRAVVTKGKKIGTYMGRIATRKTGSFDIATAQGKVSGISYKYCQAIHRKDGYSYQFHGG

SEQ ID NO: 5765 - protein, 442 aa, unidentified; identical to SEQ ID NO: 3161

SEQ ID NO: 5766 - protein, 518 aa, unidentified
LANLKLIDKLLEKTEYIYVIGIDGKPQMPTNRKVRVRKLFKLGMAKIVDTVPFTMQLLYKNEPVLQPITIAEDQGRTNIGAAVLTQLGNLVFSAVVETRNKSIKKLMADRKAHRQASRRGERKARQRLAKRHGSMIKAGMIMRKLPQYAADKFVTCKIIKNTEARFCNRKRIPDWLTPTVNHLVQTHINLIKKIEKYLPITDVAIEVNRFAFMQMENPNISGLDFQNGPLKGFDDVKTAIREQQHGKCLMCKNDIEHFHHIIPRSKGGSNTIQNQAGLCKKCHAKVHTDAEFQAKFKDKKDGLIKKYGALSALNQAVPFICKELIKTYGLEHVHFCTGKDTSLIRSSLGYEKTKNNQMHEVDAYCIGLAAIGADKAKHPGFNNVFKIKQFRRQDRQRIHYQKERTYYLDGKKIATNRKPRFEQKGDALSEWYQEQIKTYGLREAEKMRSRLTVKKSKRSYNTAKRLMPGCIFYYDGQRHVMTGQSSYGRYLRAYNCGTKDFPALKCQIIQFNTGLVFV

SEQ ID NO: 5767 - protein, 413 aa, unidentified; identical to SEQ ID NO: 2636

SEQ ID NO: 5768 - protein, 402 aa, unidentified
MPKVYVLNRHGRPLMPCTPAKARHLLDAGKAKVRHRTPFTIQLLYGSTGYTQEVILGVDAGSKTIGLSAATETEELFSAEVKPRNDVVELMSARRQFRRARRNRTTRYRKPRFDNRVRSKHKGWLAPSVEVKIQEHMTAIRRACAILPVSKVVVETAEFDLQLLKAVAEGKPVPQGEDYQKGEMYGHYNVRQYVLWRDSYTCCICGVRGSVRKGVPLHVHHLESRRVGGDAPDNLVTLCTACHDKLHKGIIMAADIKKRKRRSTRDATFMGIMRMTLLRRLREQLPVPVVETRGYITKATRENLLVLPKSHTNDALAIAHGPQGFRAEYLPNIRQADRLYTICPVRHHNRQLHKATILKGGVRKANQAEKYICGFRLYDKVLYNGIECFVWGRRTSGSFLLR

SEQ ID NO: 5769 - protein, 411 aa, unidentified; identical to SEQ ID NO: 3917

SEQ ID NO: 5770 - protein, 297 aa, unidentified
GSEMCIRDRIDTLSSLVPNPILHIEVGKFDVAKMINPEIHGVDYQHGQTYGFFDERYFVFARDNYTCQCCGKSKNKILNTHHIIYRSNGGTNRVDNLITVCTDCHTSQNHRKGGIFYQWQEQHKKVKQYKEPPFMNTLRKRIFVAYPDAEITYGSETTPKRKAMKLDKTHYNDAIVISGINEIKENPEEWLLIKQFRKKKRSLHEATARKGRKKPNRNQTRNSKNTPYYKGFYLNDKVSVFGKSGYITGFTSNAAYIKDENNDYITLPNKTYKQVSINKMKLECHNNNWQYIIKNAV

SEQ ID NO: 5771 - protein, 557 aa, unidentified
MIYNLVSIRERSFMKQKKQKVMVYILNKKGKPLMPTTRCGHVRKLLDSKKAVVVSSNPFTIRLKYDTPNGVQDVFAGIDSGRENIGSGASNEDGDCLYLGELKTSNKSIKMKITERAGFRKERRRRDRQNKQRKARKDHTEIQNGNADICRTTISCKSVQISYPAAEKSVTHKIIRGKEGKFANRHRDEGWITPSARQLVQMHMNDLKSMCKILPISHVTLERVAFDFQKLENENIKAWEYGKGKLYGYDSPEEYIHDVQGGKCIICGKPHIDYLHHIIPRSKGGSNKVSNLAGLCYDCHYGPMGVHNCQDTQDRLPELKNEANKQYKVSLLNSVMPVLIEEMDKFCKANSIIFSICEGHDTAKVRDIYDLQKDHCVDGFAISLVGRNVKSVDVMPDRIHQKQRYKKKSKNIIKKRNCREYYDGKKLVAVNRHKGTDQKADSLEEYMNTYAETHTADECKKHFESLTVKPARRTYTFHKEGRICPFHIGDKVRYEKKNKIKGNTKVETFICEGIRFPKDENKAKVEHNKTKSKKMKFCRVLEPGCTPYIDYRKLVLI

SEQ ID NO: 5772 - protein, 408 aa, unidentified
MVYVQDIDGKPMMPTTRHGKVRRLLKDNKAVVVNTCPFTIKLTYKTSDYKQEIVLGVDSGTKHVGLSATTKSKELYASEVILRSDVVELLSTRRELRRTRRNRLRYRKPRFDNRVKNKYHGWVAPSVRYRIDAHIRIIDSICSILPISRIIVEVAQFDTQKIKNPDIYGNEYQEGDRLGFWNVREYVLARDGHKCQHCKGKSKDPILNVHHIESRKTGGDSPSNLITLCETCHKEYHKGNIDLKVKRGKSLRDAAVMGIMKWKLYDELKSRCDNVSMTFGYITKYNRIKYGIEKSHISDAFVISKNFNALMLEYHYKVKLVRRHNRQIHKQKVLKGGVKKPNQSPFEVFGFRLFDRVMFEGNCYFIFGRRKSGSFNIRDIDGGNQRDVTYKKLKLLRCKRFMIQKETN

SEQ ID NO: 5773 - protein, 421 aa, unidentified
MNVVYVLSPDREPLMPCSCAIARLLLKDGKAKVVRRTPFTIKLYAQPEDAHMQPLTLGVDTGSATIGSAVSDECGNVLYLSEVEIRNDIAKTMKERATSRRNRRNRKTRYRLARWLNRKNSIKTGRFSPTMRSKIEAHLREIRFVKSLLPITSVVVETGTFDPHALKNPDVLQNKKLYQKGINYGYANTKAYVLTRDGYACQHCQGKSKDNRLEVHHIIFRREQGSDEETNLLTLCKTCHDGLHAGTITLKRTGKRKGNLLHATQMNSIRVQLFKCIEAEETFGFITKEHRLLAGLPKEHVFDATMIATRGITPIFRTSMVLSKRCVADGDYQQTKGVRSEQRINTGKIRGFRKFDKVHYEGQDYFIKGRMSTGYAILMDVSGNKVDLKPIPKFDKMKRVSARSSWIMTHKTMASFSSSTT

SEQ ID NO: 5774 - protein, 576 aa, unidentified
MDFVLIVDKNNKPCIPIKNGKAGYLLREHKAEIINHEPLVIKRTDDYNSDLENRDIFELKVDSGYLNIGFSVSDNDHEYIAGQVKMLNGMSNRLLERKSMRSSRRNRLRYRKNKNIDYKTVHNPTYKNGNEDGWFAPSIVHKMETHIRIIEQLKQWVPIDKVIVEVANFDIAAMDAYLKDGTILNGKDYQNGEMKGYENVVSYVRARDNYSCYFCNKKKKKDGTLKEKPKRIEVHHKIPRSWGGTNNPGNLICVCQGCHQKIHSNNNNNKYFKELLEQALQENTFKDSTYMNIVRWELLNRLTEKYPELDIEAEYGYNTKINRKEAGLRKFHYNDAVCVKEFKNTTLSKKVFIVEQKRCNDRKMENFADAKYIDSRDGKKKSGNDLKVIRHSTKSKRSTNKEHIDNERVFRKEKVSKGKIQFECHSYCVKPGDLIYIKEGKHKGKIAEVSTIQIVGGKIPNPIIDINEINNKKIDFNRELKKRKTISNMTDYQKSFAKYQIRFTYKESDADGPSITLTQKEYEKLKENKSDRVKIIRTRRGLVWREYDRLTYEAENMDQEEKKLEVKNKKQELKAA

SEQ ID NO: 5775 - protein, 493 aa, unidentified
MAVVYVISASGKPLMPTTRCGHVRGLLNEGKARVVEREPFTIQLKYETPDVTQPLYLGIDPGRTNVGSAVVREDGECVFTAQLTTRNKDVPKLMKARKQFRMAHRRLKRRCKRQRRAKAAGTLSQKGEFQRLLPGYEKPILCKGIRNKEARFNNRQRPVGWLTPTANHLLLTHLNMVKKLQKLLPITDVVLEVNRFAFMAMENPSIRRWQYQRGPLYGKDCVEDAVYAQQDGHCLFCGRPIAHYHHVVPQHKNGSDTLENRVGLCNEHHDLVHKDRAWEAKMKETKAGLNKKYHALSVLNQIIPALTEQLTAMFPQHAFVTTGKDTADFREDYGIAKEHHLDAYCIACSVLAEPTKVAAPTGKPHRLMQFRRHDRQVCHKENIKRVYLSEGKAVATNRHKAIEQKDDSLEEFRKTHTQQEVSALTVKDHQPVYKDMRRFMPGGVFLFNGKVHTLQRSHGRYKGMPFYYIDTDGSKNHAKGCIFLQQNCGLRWV

SEQ ID NO: 5776 - protein, 518 aa, Actinomadura sp.
VTLLATFRAGRKTHPCVPPQQMALEFGSADNPGNRDETGTEHRSRAVSGAGHVREETTAVSPDGGGVTPNPSRVGEKPRERHPAVFVLDKHGTPLQPCHAARARELLNKGRAVVHRHTPFVIRLKDRAAATSQVEGVEVGIDPGSKHTGIAVFTARGGQRRGRYSIQLNHRGALIGKKMAQRAAYRRGRRSRNLRYRAPRFDNRARPQGWLAPSLKHRVDTTVSWMDRLARWAPVQAVHVERVAFDTHLLSAGRPLEGVEYQQGTLHGYEAREYLLAKWRRACAYCGAQNVPLNIDHIHPRSNGGSDRVSNLTLACIPCNQAKSNRPVAEFLAAKPKVLARVLAQAKAPLRDAAAVNTTRWVLWRALDQRLPTHTTSGGRTKWNRTLAGLPKSHTLDALCVGKLDTIGQVVGRVLVAGCAGRGTHARTRTDTHGFPRLRMPRTKTFFGYQTGDLVRAVVPMGKNKGTHTGRVAVRATGKFDITTGHGTAQGIHHRHLRLLQRADGYAYTTHTERTPTP

SEQ ID NO: 5777 - protein, 431 aa, unidentified
MPNKVYVINKHGRPLMPCSPAKARHLLDEGKAKIKKRTPFTIQLLFGSTGYTQEVILGVDAGSKTIGLSASAETEELLSAEVKPRNDVVDLLSTHREFRRARRNRKTRYRKPRFDNRVRSKHKGWLAPSVEVKIQEHITSIKRVCRILPVSKVVVETAEFDLQLLKAIADGKPVPQGEDYQKGEMYGHYNVRQYVLWRDDYTCQCCGAHATKKKEVRLHVHHLESRKVGGDAPDNQVTLCESCHEKLHKGLIAEKDFKKRKRRSTRDATFMGIMRKTLMQRLCSELPIPVVKTRGYITKATREKLLVLPKSHTNDALAIAQGKRGFNVGYLPEIAQIDKIYTIRPVRHHNRQLHKATILKGGIRKSNQTEKYVFGYRLFDKVQFNGQDCFIWGRRTTGIFTIKTINGKMIKDGISFKKLKLVEKSTSYLIA

SEQ ID NO: 5778 - protein, 413 aa, unidentified
  source 1..413: note = Candidatus Helarchaeota archaeon
MVFVINNDGKPLMPCSNVIARLLLKQNKARVERVTPFIIKLLYQLKIVYLQKLNLGLDSGSRIIGSAVSDIDGNIQYISQIEVRNDITNRMNRRRNYRQLRRNRKCRYRKCRFLNRKNSRRKLRFSPTINSKINTHLREIKFAEKILPINDLIIENGTFDLHAIRNPSVLNNPILYQKGLKYGFNNTKAFVLHRDNYRCQYCKGKSKDRKLHCHHIIFREQGGSDNPENLIVLCKTCHLALHEGKITLKKSGSRKRGLMHATQMNIIIKQLFKRTNAKETFGFITKTHRQAFNLPKYHFIDAAVISTKGKQPDFKTDKILYKKCIPRGDYQQTRGKRSQQHITTMKICGFRKYDKVRYNGKNYFIKGRMAIGYAILMDIEGRSQQLKPIPKFIKMKRIIARKSWIMTENLILI

SEQ ID NO: 5779 - protein, 375 aa, unidentified
MVKSSERQERCCRLETPSNIGEGSQPGERPRRQNLRVVVLNKRGKPLMPCSPAKARLLPKERNAIVVRRTPFTVQLTIATGETKQPVSLGVDAGYKHVGLSASTEKAELYASEIELRQDITDLLSARRELRRARRNRKTRYRGPRFDNRIRTKRKEWFAPSVENRINAHLSRIEKVLRLLPVTTITVETASFDTQLLKNPDISGKEYQEGEQLGFWNIREYVLCRDGHVCQHCYGRSKDPVLNVHHLESRRTGGDSPGNLITLCETCHKALHRGEITLKAKRGQSFRAEAFMGIMRWEVLDRLKASHPELEVQNTYGYRTKHVRIANGIAKSHCADAFCIGGNLGAERLGEFFFQKQTRRNNRQIHKLSILKGAL

SEQ ID NO: 5780 - protein, 434 aa, Escherichia sp.
LAVFVLDHHKKPLMPCSEKRARLLLERGRARVHRRVPFVIRLVDRKQPDCALQPLRLKIDAGSKVTGMALVQDKENSTVSAINLFELAHRGHAIRDALTARRAMRRRRRGNLRYRSPRFLNRKKDNGWLAPSLRHRIDTTMSWVNRFRRWTPLAAISSELVRFDMQSMTDSDIQGAEYQQGTLFGYEVREYLLEKWQRKCAYCDAVNTPLNIDHMEPRSRGGSNRVSNLVLSCIPCNQNKGVQSVTEFVKDKARLTRILAQIKRPLQDAAAVNATRWALANALKATGLPVELASGAKTKYNRTRLGLPKTHALDASCVGQVGYITRWERPVLRIKCTGRGSYQRTRLDKFGFPRGYLLRQKQVNGFQTGDMVRATVPESSKKAGCYTRRVAVRASGSFNIQTGDSVIQGISHKYCQLLQRADGFGYQLTKIAIN

SEQ ID NO: 5781 - protein, 461 aa, unidentified
MVKSSERQERCCRLETPSNIGEGSQPVERPRRQNLRVVVLNKRGKPLMPCSPAKARLLLKEKKAIVVRRTPFTIQLTIATGEAKQPVSLGVDAGYKHVGLSASTEKAELYASEVELRQDVSDLLSARHALRQSRRNRKTRYRAPRFDNRIRTKRKGWLAPSVENRINAHLSRIEAVLRLLPVTKITVETASFDMQLLKNPDIAEKEYQEGEQLGFWNVREYVLFRDGHVCQYCHGRSKDPVLNVHHLESRRTGGDSPGNLITLCETCHKALHRGDITLKAKRGKSFRAEAFMGIMRWEVLNRLKASHPELEVHNTYGYRTKHARIVNGIAKSHCADAFCIAGNLGAERLGEFFFQKQTRRNHRQIHKLSILKGGIRKRNQAPFEVKGFRLFDKVACKGEEGFIFGRRSSGFFDVRKLDGTCISAGISYKKLHLREKRRTYLTEIRKEEALPPLPEGRDLRA

SEQ ID NO: 5782 - protein, 431 aa, unidentified
MPNKVYVINKHGRPLMPCSPAKARHLLDAGKAKVKKRTPFTIQLVYGSSGYTQEVILGVDAGSKTIGMSASTTKEELLSAEVKPRNDVVDLLSTRREFRRARRNRKTRYRKPRFDNRVRSKHKGWLAPSVEVKIQEHITSIKRVCRILPVSKVVVETAEFDLQLLKAIADGKPVPQGEDYQQGEMYGHYNVRQYVLWRDGYTCKCCGAHTTKKKEVRLHVHHLESRKVGGDAPDNQVTLCESCHEKLHKGLIAEKDFKKRKRKSTRDATFMGIMRKTLMQRLCSELPIPVIETRGYITKATREKLLVLPKSHTNDALAIAQGKRGFNVGYLPEIAQIDKIYTIRPVRHHNRQLHKATILKGGIRKSNQTEKYVFGYRLFDKVQFNGQDCFIWGRRTTGIFTIKTINGKMIKDGISFKKLKPVEKSTGYLIA

SEQ ID NO: 5783 - protein, 471 aa, Caldicellulosiruptor sp.; identical to SEQ ID NO: 3268

SEQ ID NO: 5784 - protein, 442 aa, unidentified
MGEGLQPTERSRSQNLRVFVLNKRGQPLMPCSPAKARLLLKEKKAVVRHRTPFTIQLTQATGETVQPVTLGVDAGSKFIGLSASTEKAEHYASEAELRTEVVDLLSSRREMRRARRNRKTRYRAPRFDNRIHSKNKGWLTPSVENKINTHLSCVDNVRKCLPVTKIVVETAAFDIQKIKNPDIEGTDYQQGDQLGFWNVREYVLCRDGHQCCHCHGKSKDPILNVHHLESRKTGGNAPNNLITLCETCHKAYHDGKITLKQKRGQVFRDAAFMGIMRWTFFNRLKAQCPEIEVRNTYGYLTKNTRIRHGLEKSHHTDAFCIAGNLEAKRLGVYFFQKQTRKHNRQIHKMSILKGGVRKLQQAPYEVKGFRLFDKVRYDGREAFIFGRRSSGYFDIRLLTGEKVSAGVSYKKLVLLEKRKTFLTQLIKENAIPPATEVAGFLA

SEQ ID NO: 5785 - protein, 448 aa, unidentified
MSTGLRAVQAEPAGIRKGDALKVFVLNMRGRPLMPCSPAKARHLLKAGKAVVRRRTPFTIQLRIATGETKQSVTLGVDAGAKHVGLSAATEKEEVFASEVELRQDITGLLAARLSLRRDRRHRKTRYRPPRFLNRVRSKHKGWLAPSVENRIQAHMSRIDAVCRLLPVTRIVIETASFDVQKIRNPEVEGTGYQQGDQLGFWNVREYVLFRDGHVCQHCHGYSKDKILNVHHLESRQTGGDAPNNLITLCETCHKACHAGKIKLKVKRAQSFRAEAFMGIMRWTLLDRMRKAHSGLPVENTYGYLTKNTRITLGLPKTHCVDAYCIAGNLKAVRRGVCLHQRQVRKHNRQIHKCTVLSKTLKDGTKIGYRKLNQTPHLVKSFRLFDKVRCLGQTGFIFGRRSSGYFDVRRLDGVKISSCINYRKLTLLEKRGTCLTELRKEDGASSPV

SEQ ID NO: 5786 - protein, 392 aa, unidentified
FTIQLVYGSSGYTQEVILGVDAGSKTIGVSASTKKEELFAANVIPRNDVVDLLSTRREFRRARRNRKTRYRKPRFDNRVRSKHKGWLAPSVEVKIQDHITAIRRVCGILPVSKVVVETAEFDLQLLKAVAEGKPVPQGEDYQHGEMYGHYNVRQYVLWRDGYTCQCCGAHATQKKEVRLHVHHLESRKVGGDAPDNQVTLCESCHKKLHKGLIEAKDFKKRKRRPTRDATFMGIMRATLLQRLRSELPIPVIETRGYITKATREKLLVLPKSHTNDALAITQGKHGFNVGYLPGIVQSDKTYTIRPVRHHNRQLHKATILTGGIRKANQAEKYVCGFRLYDKVLYNGIECFVWGRRTSGSFLLRALDGTKVKDGAGHRILTLLERSSNYLIA

SEQ ID NO: 5787 - protein, 420 aa, unidentified; identical to SEQ ID NO: 3504

SEQ ID NO: 5788 - protein, 402 aa, unidentified
  source 1..402: note = Deferribacterales bacterium UBA4806
MVYVINKNGNPLMPCKEAKARKLLRDGKAKVIRKNPFTIKLLWDCEENVQEVVAGMDTGSKKIGCSAIANGKVVYQSEIEIRQDVSKKMKQRKMYRRNRRYMKTRYRKPRWQNRASMKKEDRLAPSIKSKLDSHLREKKFVESILPVTRWKVETGNFDIYKITNPDVKGKEYQEGNQKGFYNLKAYILHRDGYQCQKCKTKGKKLHVHHIIFKSKGGTNTPDNLTTLCETCHDKLHNGEFSIKGVKSKTKHATETNIIKSQLKKRFGEFEETFGYETKFKREQILGLPKSHYNDAIAICCEEGEFVKPDNVVYYKKHVSKGDYKQTFGSHSEKKIPTGKLFGLRKFDLIKTIKGTGFVKGKSSEGYFTLMDIEGNTTISQVNIKKYCIRLQARSTTLIERKM

SEQ ID NO: 5789 - protein, 493 aa, unidentified; identical to SEQ ID NO: 2644

SEQ ID NO: 5790 - protein, 443 aa, Caldicellulosiruptor sp.; identical to SEQ ID NO: 2385

SEQ ID NO: 5791 - protein, 504 aa, unidentified; identical to SEQ ID NO: 3854

SEQ ID NO: 5792 - protein, 406 aa, unidentified; identical to SEQ ID NO: 2967

SEQ ID NO: 5793 - protein, 404 aa, unidentified
LLKEKKAIVKRRTPFTIQLTIATGETKQPVSLGVDAGYKHVGLSASTEKAELYASEVELRQDITDLLSARRALRQSRRNRKTRYRAPRFDNRIRTKRKGWLAPSVENRINAHLSRIEAVLRLLPVTKITVETASFDLQLLKNPDISGKEYQEGEQLGFWNIREYVLCRDGHVCQHCYGRSKDPVLNVHHLESRRTGGDSPGNLITLCETCHKALHRGEITLKAKRGQSFRAEAFMGIMRSEVLNRLKASHPELEVNNTYGYRTKHARIANDIAKSHCADAFCIAGNLGAERLGEFFFQKQTRRNNRQIHKLSILKGGIRKRNQAPFEVNGFRLFDKVACKGEEGFIFGRRSSGFFDVRKLDGTRISAGISCKKLHLLEKRRTYLTEIRKEEALPALPEGRGPRA

SEQ ID NO: 5794 - protein, 408 aa, unidentified; identical to SEQ ID NO: 4079

SEQ ID NO: 5795 - protein, 455 aa, Halomonas sp.
MAVFVLDKQKRPLMPCSEKRARLLLARGRAVVHKRYPFTIRLKDRVAGDTQPLRLGIDPGSKTAGLALVREDAEDRHILCLFDLVHRGFQIKKALVQRASFRRRRRSANLRYRAPRFDNRTRPNGWLAPSLKHRVDTVTAWVNRLTRLAPTTAISQELVRFDTQKLENPEISGVEYQQGSLLGYEVREYLLEKWGRECAYCGDQDTPLEVEHVVPRAHGGSHRVSNLTLACHACNQGKGNGTLDAFFTTDKGLKKRLKANSLSADARLARVQRELKRPLRDASAVNATRWALFNALKDTGLPVTAGSGGRTRYNRQRLGIPKTHALDAACVGPFGRLHGENCPTLVIKGTGRGSYERTRLTRHGFPRGYLMRQKQVRGFQTGDMVRAIITTGKKAGTHTGRVAVRKTGSFNIQTEQGVVQGISHKHCLLIQRGDGYGYHLTSSIQPKGGAGQAVV

SEQ ID NO: 5796 - protein, 480 aa, unidentified
LYTKPLDNIGEGSLPPSGEINLKGMTFMVYVKSIDGKALMPTSNAKARKLLKQKKAKVVSLRPFVVKLTYKTKTEYIQKLNLGVDSGYSNIGFSVIDAKQEYIAGEVKLLEGMKKRLLEKASYRRIRRSRLRYRKARWNNRVKSKKKGWLVPSLKHKLDTHIKFIDYLKNILPIEKITIEVANFDIQKMKDDLISGIDYQNGDMFGFWNVREFVLHRDGHKCQNPNCKHKDKKEQILKVHHIRYRSEGGSDRPENLITLCSKCHTPANHKKGKFLYDWCVNGKKVRGFRDATFMSMIRWYLVNELKSKHNNVSITYGYITKNHRIQNGIEKSHLNDAFAIAKGTNQARTKDRFLVIQDRLKNRSLEKFYDSKIIDIRTEKKVSGGDLNCGRSTRNKNLNTEDLRKYRGVKISKGQRRIRKQKYFYQPNDLVKYDGKVYTVKGTQNEGKYIALKEIKKVPKVELLIPYVFKKGLNWSYGLC

SEQ ID NO: 5797 - protein, 413 aa, unidentified
MRGQPLMPCSPAKARHLLKANKAIVKRRTPFTIQLSIATGETKQNVTLGVDAGAKHVGLSAITDKAEVFASEVELRQDISGLLADRLAFRRGRRHRKTRYRASRFLNRVHSKRKGWLAPSVENRIQAHISRIDVVCKLLPVNKIVIETASFDIQKIKNPDVEGKGYQQGDQLGFWNVREYVLFRDGHVCQYCRGRSKDKVLNVHHLESRKTGGDAPNNLITLCETCHKAYHAGKIKLKVKRGQSFKAETFMGIMRWTLLEIVRQTHPHLLVENTFGYLTKHKRIALGLPKTHCTDAFCIAGNLKAQRSGVYLYQKQTRKHNRQIHKCSILKGGVRKLNQSPYLVKGFRLFDKVKCLEQVGFIFGRRALGYFDVRTLRGKKLSPAIHVKKLMLLEKRKTFLTELRMENCASSPV

SEQ ID NO: 5798 - protein, 512 aa, unidentified
MSTIYVLNKDGKPLMPTTRGGHVRHLLKEQKARVARTKPFTIQLLYETDDAVQPLYLGIDPGRTNIGIAVVKADGTAAFTAHLETRNKEIPKLMQDRKKARRARRTNGRRCRRQRRAKANGTISKKCVKQTTAQNGSVSKRAKDIGVIKRRLPGCEKDVLCIGIKNKETKFTNRTRPEGWLTPTANQLLQTHINLVKKIQKFLPISDVVLEVNKFAFMRLDNPNIQKWQYQQGPLYKKESLESAVSEIQEHHCLFCKKPIDHYHHVVPQHKNGSSTIGNIVGLCAKHHDLVHKDSAWEKKLAKKSTGLYKKYGALGVLNQIIPTLTNELSSLFPKHSFVTNGKSTYDYRAAHGVSKDHWLDAYCIACSVLPSNVCDSNINNHMPYELKQFRRHDRRVLNNENMNRVYTLDNKAVAINRHKAKDQKTVSLEEFRKEHPDDVCKLKVKEHHPTYRNMNRNFPGSVFLVGKQIHVMQGIASSKGGKATKYNDTSATAIAAGKCKFVAKNTGILFV

SEQ ID NO: 5799 - protein, 419 aa, Moorella sp.; identical to SEQ ID NO: 4784

SEQ ID NO: 5800 - protein, 424 aa, unidentified
MSNYVFVIDPDKQPCNPVHPAKAQLLLNQKKAAVFRRYPFTIILNEKQKDVEANPLTLKIDLGSQTTGIAILNGENVVWGAELAHRGQQIKSDLESRRAIRRNRRNRKTRYRPARFLNRKREKGWLAPSLQHRVDTTLTWIKKLIRYCPVTNIVQELVRFDLQKMENPEISGIEYQQGELQGYEVREYLLEKWNRQCAYCGAKNIPLQIEHIHPKSKGGTNRISNLCITCEPCNLAKGTQDIKDFLSGKPSILKRVLSQAKSPLKDAAAVNSTRWALLNALKSIGLPISTGSGGQTKFNRTRLNLPKTHWIDAACVGTIESLRIITKQPLLIKATGHGCRQMCRTDKFGFPSRYVPRLKFIKGFQTGDIVKAIVTSGKKIGTYVGRVAVRCSGSFNISTPQLIQGIGHKYCRAIHRKDGYSYSF

SEQ ID NO: 5801 - protein, 431 aa, Acidithiobacillus sp.; identical to SEQ ID NO: 4478

SEQ ID NO: 5802 - protein, 411 aa, unidentified; identical to SEQ ID NO: 3917

SEQ ID NO: 5803 - protein, 456 aa, Halomonas sp.
MAVFVWDKHKQPLMPCSEKRARLLLDRGRAVVHKRYPFTIRLKDRVGGETQPLRLGLDPGSKTTGLALMRESAGEQRHVLCLFDLVHRGYQIKKALQQRAAFRRRRRTANLRYRAPRFDNRTRKAGWLPPSLQHRVDTVMAWVQRLSKLAPITGISQELVRFDTQQLDNPEISGVEYQQGTLLGYEVREYLLEKWGRECAYCGTADTPLEMEHVVPRSRGGCNRVSNLTIACHDCNQAKDSLPLATFFATDKGLKKRLKANGLSAGARLERVQRQLKQPLRDANAVNATRWALFNALNATGLPVAVTSGGRTKYNRQRLDIPKTHALDAACVGAFDLLHDWTVPTLTIKCTGRGSYQRTRLTKHGFPRGYLMRQKQVHGFQTGDMVKAIVPTGKKAGTHAGRVAVRKTGSFNIQTEQGAVQGISHKYCTVIQRGDGYGYHLTPPVNHKGGAGKAVA

SEQ ID NO: 5804 - protein, 427 aa, Enterococcus sp.
MVYVLSIDNEPLMPCSNVIARLLLKQGKAKVKYREPFTIKLTYETTTYTQPLTLGVDTGSQTFATAVADEKGNILYTSEVTLREDKNNSIKKKMDQRRMYRRNRRSCKTRYRKARFNNRKNSKRKERFSPTMTSKLHSHQKEIEFIKSILPIAKLIFETGTFDPHLMKNPSLANPKVKPWGYQQGPNYGFENTKARVLVRDNHTCQICNKKPKNERLEVHHIVFRSQGGSDEENNLVTLCHSCHVELHKGLIHPNFEGSLKSALKYATQMNSIRIQLLKLYSDAIETFGYVTKANRLNLGLPKEHYVDAAVIATAGNQVKFACNLMIKRCIPKGDFQRTKGVRSEKTIPKGKIDGFKKYDKVRYFGNEYFIKGRRTSGYFTLMDIYGQTISFNHMSKGQKTPKAKNCHRISARKSWIVTTKKLENIA

SEQ ID NO: 5805 - protein, 416 aa, unidentified
MVYVLDKNGQPLMPTDRHRKVRLMLQSGQAKVIKRCPFTIQLNYDSGHQTQEISLGIDAGSKHIGVSTTTKIKVLYEVDVELRNDIVDLLSSRRELRRGRRNRKTRYRQAKFNNRRRGNGWLAPSIRQKIGTHLTVVENICKMLPISRIMVETASFDIQKIKNTDIQGAEYQQGDQLGFWNNREYVLFRDNHTCQCCKGKSKDKILNVHHIESRKTGGNAPNNLITLCEICHTGYHKGAIQLPKTVKRGMRFKDAAFMGIMRWAFYEALKQQYEPVGTPVHNTYGYITKHTRIAYNLPKEHYVDARCISGNPEASSNGEYYYQKKVRCHNRQIHKLTVLKGGIRKQNQATYLVKGYRLFDKVSYQGKGYFVFGRRQSGFFDIRTLSGEKVNKGSLSCKKLKFIATRTYYLTERRAV

SEQ ID NO: 5806 - protein, 431 aa, unidentified
MPNKVYVINKHGRPLMPCSPAKARHLLDAGKAKVKKRTPFTIQLVYGSSGYTQEVILGVDAGSKTIGVSASTKKEELFAANVIPRNDVVDLLSTRRESRRARRNRKTRYRKPRFDNRVRSKHKGWLAPSVEVKIQEHITSIKRACRILPVSKVVVETAEFDLQLLKAIADGKPVPQGEDYQKGEMYGHYNVRQYVLWRDDYTCQCCGAHATKKKEVRLHVHHLESRKTGGDAPGNLVTLCDSCHEKLHKGLITAKDLKKRKRRSTRDATFMGIMRKTLMQRLCSELPIPVIETRGYITKATREKLLVLPKSHTNDALAIAQGKQGFNVGYLPEILQIDKIYTIRPVRHHNRQLHKAAILKGGIRKSNQAGKYVFGYRLFDKVQFNGQDCFVWRRRTTGIFTIKTINGKMIKDGISFKKLKLVEKSTGYLIA

SEQ ID NO: 5807 - protein, 478 aa, Geobacillus sp.
LFVYIINKHGKPLMPCSPRKARLLLKQKKAKVVRRTPFTIQLLYGSSGYKQPVSLGVDMGTRHVGISATTKKDVLFEAEAQLRTDIVELLAIRRQFRRSRRNRKTRYREARFLNRRKPEGWLPPSIQHKINSHIKLIDLVHNILPVTSVTIEVAAFDTQKLKNLNIRGVEYQQGEQMGFWNVREYVLYRDNHTCQYCKGKKKDPVLQVHHIESRKTGGDSPDNLITLCKTCHHEIHEKGLEHIFQRKRPPMRDASQMTAMRWAMFSRIREKYSHANITYGYITKCIRIANGLSKSHMVDARCISGDPLAKPSGTVYLLKFVRKNNRQLHKATILKGGKRKSNKAPRFVKGFQLFDKVVYERKECFIFGRRSSGYFDLRLLDGTKVHASASWKKLKRVEHASTLLIERSIPVRSFSGDLIKKSPLGMMQGCQTHHSPYQGGLQMNCTQNYKIDQVTEQTLVVGIDIAKRTHYACFVDDR

SEQ ID NO: 5808 - protein, 419 aa, Flavobacterium thermophilum; identical to SEQ ID NO: 5596

SEQ ID NO: 5809 - protein, 420 aa, unidentified
MVYILNKHNEPLMPCSERKARLLLKQGRAVIYRKDVFTIKLINGSYGYKQHITMGIDCGSKHIGISATTNKKELFSANAELRNDIVKLLSDRKSLRRNRRYRKARYRKPRFDNRRIKEGWLAPSIRQKIDSHVRIVSLIHKLLPVKQVNVEVAAFDIQKIKNTDIKSSEYQMGEQLDSYNVREYVLFRDNHICQHCKGKSKDDVLQVHHIESRKTGGNAPNNLVTLCKTCHEKYHSGEITLNVNRGKSFRDASAMSTMRWLLYEELKSRFSNVNITYGYITKYKRIKLGLSKEHYNDAYCIAGNLNTSRLCNHHLIRFIPRHSRILHMQKFSKGGVRRSASASYWLNCGKPSKSGAMFTMFDKVKFNGIVCFISGSSNGYAALRDINWNKVHGCKTTVTVNKLALVSRRRGSMLFGELCG

SEQ ID NO: 5810 - protein, 451 aa, unidentified
VTTILKTCFAAFNLAKVVVLMDAWDIIVVLNKRGKPLMPCSPAKARLLLKEKKAIVKRRTPFTIQLTIATGESKQPVTLGVDAGYKHVGLSASTEKAELYASEVELRQDVSDLLSARRALRQSRRNRKTRYRAPRFDNRIRTKRKGWLAPSVENRINAHLSRIEAVLRLLPITKITVETASFDTQLLKNSDIAGKEYQEGEQLGFWNVREYVLFRDGHVCQHCHGRSKDPVLNVHHLESRRTGGNSPGNLITLCETCHKALHRGEIKLKAKRGHSFRAQAFMGIMRWEVLNRLKASHPELEVNNTYGYRTKHVRIRNGIAKSHCADAFCIAGNLGAERLGEFFFQKQTRRNNRQIHKLSILKGALRKRNQAPFEVKGFRLFDKVACQGEEGFIFGRRSSGFFDVRKLDGTRISAGISYKKLHLLEKRQTYLMEIRKEEAFPPLPEGRGLRA

SEQ ID NO: 5811 - protein, 512 aa, unidentified
MSTVYVLNKDGKPLMPTTRCGHVRYLLKEKKARVVASKPFTIQLLYETDDVVQPLYLGIDPGRSNIGVAVVKTDGMAVFTAHLETRNKEIPKLMKKRKDSRRARRTNGRRCRRQRRAKANGTISKKCVKQTTAQNGSVSKRAKEIGVIKRHLPGCEKDVLCIGIKNKEAKFNNRTRPTGWLTPTANQLLQTHINLVKKIQKFLPISDVVLEVNKFAFMQLDNPNIQKWQYQKGPLYQKESLKSAVSEMQEHHCLFCKKKIDHYHHVVPQHKNGSNTIDNIVGLCTQHHDLVHKDATWQKRLAKKKTGLNKKYGALSVLNQIIPALTKELSSLFPKHFFVTNGKSTYDYRAAHGVSKDHWLDAYCIACSVLPNDTCDKTINSRVPYELKQFRRHDRRALNNENMSRVYTFNGKMVATNRHKATEQTTDSLEEFRQRQPNDVCNLKVKEHHPTYRNMSRNYPGSIFLVEKQVHIMQGIAGSKDGKATTYKDTNANSIAAGKCKFVAKNSGILFV

SEQ ID NO: 5812 - protein, 431 aa, unidentified
MSKVFVLDTEKRPLDPINPAQARQLLRNKKAAIFRQFPFTIILKKSCPDSPVSSLRLKIDPGAKFTGMALINDSTGEVVFAAELKHRGFAIRDALTSRSQLRRSRRARKTRYRQPRFLNRTRPERWLAPSLQSRVENIKTWVERLRKLAPIRAISQELVRFDMQLMANPDIQGKEYQQGTLAGYESREYLLEKWGRQCAYCGVKDVPFQVEHIHPRAKGGSKSITNLTLSCEKCNTKKGTKDIKDFLKKDRSKLEKILEQAKRPLADAAAVNTTRLALLFVVKATGLPVETGSGGLTKFNRSQQNLEKTHWIDAACVGQSTPILNIKGVKPLLITANGHGTRQSCRTDKYGFPSRYVPRFKFVNGFQTGDIVKAVVTKGKKIGAYIGRVAVRTSGSFNISTTSGLIQGISYKCCKSIHKKDGYEYGKSKIC

SEQ ID NO: 5813 - protein, 428 aa, unidentified; identical to SEQ ID NO: 3528
  VARIANT 29..30: note = X can be any naturally occurring amino acid

SEQ ID NO: 5814 - protein, 424 aa, unidentified; identical to SEQ ID NO: 3351

SEQ ID NO: 5815 - protein, 443 aa, Oligella sp.; identical to SEQ ID NO: 3678

SEQ ID NO: 5816 - protein, 279 aa, unidentified
VVVETAEFDLQLLKAIADGKPVPQGEDYQQGEMYGHYNVRQYVLWRDGYTCQCCGAHATKKKEVRLHVHHLESRKVGGDAPDNQVTLCESCHEKLHKGLIAEKDFKKRKRKSTRDATFMGIMRKTLMQRLCSELPIPVVKTRGYITKATREKLLVLPKSHTNDALAIAQGKQGFNVGYLPGIVQINKIYTIRPVRHHNRQLHKATILKGGIRKSNQTEKYVFGYCLFDKVQFNGQDCFIWGRRTTGIFTIKTINGKMIKDGISFKKLKLAEKSTSYLIA

SEQ ID NO: 5817 - protein, 395 aa, unidentified
MVTVQQSTHHLPFGRVFIRRNLFMVYVISQDGKPLMPCSDPIARLLLKQGKAKVKKREPFTIKLTYETTNYTQGLTLGVDTGSGTIGTAVSKDNGDIVYMSEVVVRNDITDKMTQRAKYRRNRRNRKTRYRKARWLNRASSIKKDRFSPTMQSKLHSHVREIEYIQSILPVTEMVFETGQFDMQLMKNPSLANPKVRPWGYQKGANYGFENTKAMVLNRDNYTCQCCKGKHKDSKLEVHHIVFRSQGGSDEESNLLTLCHTCHKDLHSGKINPKLSGKLKGNLKYATQMNSIRKQLFRFYPNAIETFGYVTKANRLHLGVDKEHYYDACTIATQGNAFNVKSNLYKKKCVSDGDFQKTKGIRSEQPIVTDKICGFRKFDKVRYFGNDYFIKGRVK

SEQ ID NO: 5818 - protein, 443 aa, Anoxybacillus sp.
MVEENMTCFMQRKGENSMVFVLDTNKRPLAPCHEAVARKLLKQGRAAIYRRFPFTIILKKSVDESEIKATYRLKIDYGSRHTGLAILRGQEVVWLGQLDHRTDIKERMDKRRAFRRARRNRKTRYRKPRFLNRRRKDGWLPPSLESRVQNIQTWVNRLKKLCPIGYISYENAKFDTQLMRNPEINGVEYQQGTLQGYEVREYLLEKFGRKCCYCGKENVPLEVEHIIPKSRGGTDRVDNLCLACHDCNQRKGSKTAEEFGYPHIQKQVKESLKDTSAINSTRWKAYEVLKQTGLDVECGTGARTKMNRICLDLPKTHYFDACCVGESTTNHLYFKTKEVLFIKAKGRGSRSRTNLDRYGFPRGYLARQKFFFGFQTGDMVKAVVPRGKYQGVWFGEVACRKTGSFDIKGKDGKRIAQGINYRYVQVIQRFDGYAYGKGVAELA

SEQ ID NO: 5819 - protein, 427 aa, Enterococcus sp.; identical to SEQ ID NO: 5630

SEQ ID NO: 5820 - protein, 442 aa, unidentified; identical to SEQ ID NO: 2834

SEQ ID NO: 5821 - protein, 415 aa, unidentified
MENKIEYCFVVDKNNRPLAPTKVNKGWYLIRKGRAKLKSKYPMVIQLKKEVESDDEDKSHMVCGIDDGSSHVGIAIVQKCPSKNKVVFKGTIEQRQDVKHLMDVRRGYRRYRRYHKRYRKPRFNNRASSKRTNRLAPSIKQKKDSILRVLYQLNKWINIKEYYLEDVAIDIRAMTDGYKPYNWQYQKSSRLDENLRKATILRDDCKCQECGKTNTVLEVHHIRAKRFGGANTIGNLITLCSSCHQKTEGKEQEFEERYFTKIKNKPKRFDYAMHVMQGKNYLRENIKQLGILHLTTGGDTANKRIEWNIEKSHSNDAICITNCFPNTCNIKEWIIKPMRGKSKAKTNDVLGIKHRDLVEYTYRNGETHKGYVTALYPHLNALNFQSPTKHCKKVNARKCRLLWKYNKIYWIDSVT

SEQ ID NO: 5822 - protein, 446 aa, unidentified
LQFYRKEHSIMQYAYVLNKRGEPLMPCSPRKARLLLKQKKACVVKRTPFTIKLLYGSTGYKQPITLGVDAGSKHIGISATTEKYELYREEATPRNDVVDLLSARRAFRRNRRNRKTRYRAPRFNNRVHSKHKGWLAPSVEVKIQEHITLIKRVCRILPVTLVRVETAEFDTQRLKAMLEGKPLPVGTDYQLGEMYDEYNVRQYVLKRDNYTCQCCGAHPTKTKAVKLHVHHIETRKAGGNAPNNLITLCTACHKTLHAGKVTLDGRKRGKPLKDAAFMGIMRKTLMERLLKELKIPVQGTYGYITKYLREKHSIPKSHTNDARCISKNPLAIPCDTCYYTKAIRHHNRQLHKATILKGGIRKANQALYTVKGYRLWDKVSYNGSECFITGRRTSGYFALKKLDGTVVSNSASYKKMRLLEVATNYITERPANESQVGISRFQVRKK

SEQ ID NO: 5823 - protein, 458 aa, Lactobacillus sp.
LKGVGMMSEIKKVDYIYIVDSNGTPLMPTSRLGMVRRWLKTGQAKWFGNSRNTIQFVRPVTTNTQELTLGVDAGFHLGLSVVGNNREYYVSESLRKSEKDRITSRRELRRTRRNRLRYRKARFNNRRRKDGWLAPSIQHRLDFTIKEIKRLYKFLPITNLVVEVTPFDNQKLLNPDIQGWQYQKGKMYGFKTIKDYLLARDNYRDALDGKQYPASQLRVHHLVQRKDGGSNQPDNLVLLSDINHNQSNHNNGILAKLRENRQKTLDYRGAYFMSILATRLSNYFEHYTITQGYLTANLRQKYEIKKSHLNDAFIIAGGTDTTLRTNNVYSRQKLRNNNRVLQKFYDAKYIDSRDGKKKTGKELSSGRTRRSRELNYTNLRQFRKEKVKKGRVSIRRGHYQLRPHDVVLNTRTNRIETVKGVQNSGTVIKFQTGKTCSIKSVVSLYHVNGILEKKMKNI

SEQ ID NO: 5824 - protein, 512 aa, unidentified
MSTVYVLNKDGKPLMPTTRGGHVRHLLKEQKARVVRTNPFTIQLLYETDNLVQPLYLGIDPGRTNIGVAVVKTDGTAVFTAHLETRNKEIPKLMQGRKKARRARRTNGRRCRRQRRAKANGTISKKCVKQATAQNGSVSKRANEIGVIKRHLPGCEKEVLCIGIKNKEAKFSNRTRPEGWLTPTANQLLQTHINLVKKIQKFLPISDVVLEINKFAFMRLDNPNVQKWQYQQGPLYQKASLEEAVSEMQEHHCLFCKNTIDHYHHVVPQHKNGSNTIGNIVGLCAKHHDLVHKDTSWQEKLAKKKTGLNKRYGALSVLNQIIPALTKELSSLFPKHFFATNGKSTYDYRAAHGVSKDHWLDAYCIAGSVLPNDACDNNINNRVPYELKQFRRHDRRALHKENMSRVYTLNGKKVATNRHKAVEQATDSLEEFCQNHPDDVCKLKVKEHHPEYRNPKRNFPGCVFLVGKHTHVMQGTSGSHNGKADGYYDTNGNSYSSGKCKFVVKNEGIVFT

SEQ ID NO: 5825 - protein, 423 aa, Arthrospira sp.
  VARIANT 22: note = X can be any naturally occurring amino acid
  VARIANT 29: note = X can be any naturally occurring amino acid
  VARIANT 151: note = X can be any naturally occurring amino acid
  VARIANT 153: note = X can be any naturally occurring amino acid
  VARIANT 178: note = X can be any naturally occurring amino acid
  VARIANT 210: note = X can be any naturally occurring amino acid
MSNHVFVLDTNRKPLRPCKPGXARSLLKXGKASVFRRYPFTIILNKEVDANPEPLELKLDPGSKVTGIALKQGNHIIFAAELQHRGQQIKEALLSRRQLRRSRRNRKTRYRPARFLNRTRSKGWLAPSWQHRVDTLMTWVHRFRRLAPVGXIXQELVRFDLQLMENPEISGVEYQQGXLQGYEVREYLLEKWGRTCAYCGAQNVPLEVEXIQPRSKGGSDRVSNLTMACHSCNQAKGNGDIRDFLSGQPDVLSRLLRQAKSPLKDAAAVNSTRWALFKALKATGLPVTTGTGGQTKFNRLRLNLPKAHWLDAACVGPVESLEVLTSKPLLILAKGHGTRQMCGTNKYGFPTRHRSRRQIHKGFQTGDMVTALVTAGKKIGSYLGRVLCRASGSFDITTASVRVAGISHKYCQPIHRKDGYAYA

SEQ ID NO: 5826 - protein, 540 aa, unidentified
NHAKASSSQGKHNLLLRQERFIVKEVANMSTVYVLNKDGKPLMPTTRGGHVRHLLKEQKARVARTKPFTIQLLYETDDAVQPLYLGIDPGRTNIGIAVVKADGTAVFTAHLETRNKEVPKLMQDRKKARRARRTNGRRCRRQRRAKANGTISKKCVKQTTAQNGSVSKRAKDIGVIKRRLPGCEKDVLCIGIKNKEAKFNNRTRPEGWLTPTANQLLQSHINLVKKIQKFLPISDVVLEINKFAFMRLDNPNIQKWQYQQGPLYQKANLEEAVSEMQEHHCLFCKKPIEHYHHVVPQHKNGSNTIDNIVGLCTKHHDLVHKETAWQEKLAKKKTGLNKKYGALSVLNQIIPALTKELSSLFPKHFFATNGKSTYDYRAAHGVSKDHWLDAYCIACSVLPSNVCDSNINNHMPYELKQFRRHDRRVLNNENMNRVYTLNNKAVAINRHKAKDQKTVSLEEFRKEHPDDVCKLKVKEHHPTYRNMNRNFPGSVFLVGKQIHIMQGIASSKDGKATKYNDTSATAIAAGKCKFVAKNTGILFV

SEQ ID NO: 5827 - protein, 470 aa, unidentified
MSVFVVGLNGCRLMPVSERKARLLLKGGKASVYRKVPFTIKLNYKTGSTVQPGYLGIDTGSQHIGVSVVQKDGTVLHKEEIGLRDSMSKRKLLESRASSRRGRRYRKTRYRHPKWKPKTKRIYNEKADRKGRHWKKQKNTFTSKRQAGWLPPSLQSKTDHHIQWIRKLLDLLPEGYRLSIELGRFDPARMKDPGIHGELYQKGPQYDYENVRAYVLARDGYTCRVCKKNGGKLHVHHILYRSRGASDDPKYMAAVCSNCHTTENHLPGGILYQWMQDQKKFTRGLRDATFMNILKKRLRKAFPDAVFTYGNITKADREKLELPKSHGNDATAIALVKTEVPSVKDEEPVIHIQQVRRKKRSLHEEPPRKGRKEPNRTASRIDKNTKSVTVTKGSGEKKAFMTACLFDRVELDGKKGWITGFTGTSCYVKDKEDSYICTSPKYKQVSISRLRILHHCGNWAIGAEKPLGKG

SEQ ID NO: 5828 - protein, 451 aa, unidentified
MWTYHYFVVSYYSLRRVNVVFVISKEGKPLMPTKNHAKVRILLKHKKAKVIRRKPFTIQLLYETTTYTQPITLGIDSGYSYIGFSAITEKEELICGEVKLLQGISERLKERAMYRRQRRSRLRYRKPRFDNRKKCSDWLPPSIQHKFNSHIRFINFLKKILPVTDVVIEVANFDTHKLKNLDVEGIGYQQGEQEGFYNLREYILYRDNYKCQLCGREDLPLEVHHIGFWKQDRTDRPSNLITLCIKCHTPKNHQENGKLWGLEPIQKPFKEATFMSTVRWELVNTLGCKHTYGYITKSKRISLNLEKTHYNDAFCIAGGINQARTKPIIFEQIRRNNRSLEKFYDAKYIDIRTGKVATGQELFCGRRTRNKNYNTENLRKYRGQKISKGQRRIRTQRYFYQPKDIVIYNGKKYVVKGVQNKGNYIKLEKLNKPVKLSLVKPYEFRKGFCVV

SEQ ID NO: 5829 - protein, 451 aa, unidentified
MPVAVISKTGERLMPTSEYRARKLLKSGKAIKYSYRPFTIQLTERETGDIQPIELCMDTGYIHIGISVKSEKHEYLADQIDTLTDEKARHDACRMYRRQRRSRKRYRQPRFNNRKRNDRWIAPSLEHKKSIHIQAILRICKVMPVTDITLEMGNFDTQVLKAREEGKSLPQGVDYQHGERYGITTLREAVFSRDGYTCQCCGRTIKDGAILHVHHIVYRSQGGTNRMSNLITVCDKCHTPANHKQGGKLYNWKPKIASFKGATYMTTIRWKLYNEVKALFPDIDIHVTYGAETKERRRALDIDKSHVNDAFVMGQFHPKHRSKPICYKKKRRNNRCLEKFYDAKYIDSRDGKKRSGQELFNGRISRNHKKDSENLHQYRLQKVTPGRRAIRRQHYPIQPHDIIVYNGNKIEVSGCQHKGTRVVFSKTKKSVQISKIKLFKYAGGYSKSVFN

SEQ ID NO: 5830 - protein, 471 aa, Caldicellulosiruptor sp.; identical to SEQ ID NO: 3268

SEQ ID NO: 5831 - protein, 438 aa, unidentified
LEKEVAVFVLDKTGKALMPCTEKRARLLLVRGRARVHRVVPFVIRLKDRQAVSSQFQPIKIKLDPGSRITGIAVVRETGNNGVAVLNLFELVHRGRRISEALTARRAMRRRRRGNLRYRAPRFLNRSKPQGWLAPSLQHRVNTTMSWVARLRKWVPATSVAQELVRFDMQKITNPEISGAEYQQGTLAGYEVREYLLEKWGRKCAYCGAEHTPLNLDHIHPKAKGGSNRVSNLTLACVPCNTRKGAQPVEAFLVKQPDRLKRIQAQAKRPLKDAAAVNSTRWALFNSLKTTGLPAEVASGGQTKWNRSRLGIPKTHALDAACVGQVESVTNWQKPTLTIKATGRGSYQRTRLDAFGFPRGYLMRQKSIHGFQTGDMVGADVPKGKRKGFYVGRVQVRANGNFNIQGVVKDISHRYCKIIQRADGYGYSRVLQRSCVVR

SEQ ID NO: 5832 - protein, 512 aa, Selenomonas sp.
MAIQLHDVFHEALSLKGDLEMYVVYVLNKDGSPLMPTKRFGHVRRMLKSGQAKAVSTKPFVIQLLYDSTEYTQPLYGGTDPGRINIGEAVINEKGEVVYEAHIITRNKRIPRLMAKRKAYRQASRRGERLRRKRRARKCGTTTMFPEGRKLPGYKDGVLAVKDIINTEAKFNNRKRPAGWLTPTARQCVQTHINGVRQICKILPVKYWTLEYNRFAFKRMDDGSIRGIDYQNNKTKQFDNVNDYIDYLQEGRCILCGCNSIKHHHHIIPKHKGGSDGPENIVGLCDDCHTKVHTNKAELDRVGKRKKYVGASIVNIAMPHIYDGLKNIFGNNLCVCKGRNTAKLRSEYGIGKEHGFDAVCVASIGGRIPLINVNDSSAFTIIQFRNHDRAIIKTQYERTYKLDGVVIAKNRKPRFEQDKKTPALSDWYKKLCDTIGESEARGVLSKLKVAKSRRGYNDTKRIMDGAIFLYEGKRYVLKAYKSKRKYLEAYGQEKLFPAKDCVFVQRKSLVYV

SEQ ID NO: 5833 - protein, 457 aa, unidentified; identical to SEQ ID NO: 3236

SEQ ID NO: 5834 - protein, 471 aa, Caldicellulosiruptor sp.; identical to SEQ ID NO: 3375

SEQ ID NO: 5835 - protein, 442 aa, unidentified; identical to SEQ ID NO: 2892

SEQ ID NO: 5836 - protein, 240 aa, unidentified
MVYVVANDGQPLMPTERHGKVCRMLKSGMAKVVKKCPFTIQLQYESERNVQPVSLGVDAGSKHIGISATTKTKVLYESDVELRDDIVKLLATRRQLRRSRRSRKTRYRPVRFDNRKRKEGWLAPSIRQKIGSHLTVVANACKILPINQIIVETASFDIQKIKDPEIQGIEYQQGEQMDFWNIREYVLFRDGHICQCCKGRSKDKILNVHHIESRKTGGNAPNNLITLCETCHKGYHNGTV

SEQ ID NO: 5837 - protein, 442 aa, unidentified; identical to SEQ ID NO: 2903

SEQ ID NO: 5838 - protein, 465 aa, Burkholderia sp.
LAVFVLDRLGKPLMPCSEKRARLLLARRRARVHRLMPFAIRLVDRELLSSAAQPLRIKLDPGSKATGLALVRDIEQVDASTGEIHRGAVVLNLFELVHRGRQISEALTARRAMRRRRRGALRYRAPRFLNRTRPTRWLAPSLQHRVDTTLAWVKRLQRWAPITAASTELVRFDMQVPDNPEVTGIEYQQGTLFGYELREYLLEKWTRKCCYCDVQNVPLNIEHLVSRARGGSNRVSNLAIACVPCNIRKAAQPLDVFVKDKARLTAQVRRPLKDASAVNATRWALVNALRATGLPVETASGGRTKYNRSQLGIPKTHALDAVCVGEVSAVVAWRKPTLRVKCTGRGSYQRTLLDRYGFPRGYLMRARRVRGFGTGDHVRADVPSGRKAGTHRGRVAVRATGSFNIQTHDQVVQGVAHRYCRVLQRADGYGYSRMAIDKGEAGGGAATQPGPSLPGLKAEVSRAEG

SEQ ID NO: 5839 - protein, 407 aa, Fervidobacterium sp.
MHPFTIRLKDRTVQQSELQPLRLKLDQGAKVTGLSVLREDGDVAETVFLCEIHHKTDIKQKLDARCAVRRSRRNRKTRYRKPRFLNRRRPEGWLPPSFKARVNQLINAVRKLTKLLPISAISIEDAKFDTQKLQNPEISGIEYQRGTLFGYEVREYLLEKWGRKCAYCGRSDVPLEIDHIVPRSRGGTDRVSNLTLACRECNQKKGNKTAAEFGYPHVEEQARQTYKQPAFMNSIRSYLSKSLSGFGIPAEYETGALTKANRIRLGFPKEHYFDACCVGESTPSEIRITQSYVQIWRAVGRGTRQMCNTDKFGFPRGHRQRRKKHFGFQTGDIVKAIVPRGKYAGIWVGAVAVRGSGFFDIKDTNGKRICQGISYKYCKLIQIADGWQYSKRKANYSKSHTTEVACL

SEQ ID NO: 5840 - protein, 419 aa, Anoxybacillus sp.
LFVYIINKHGKPLMPCSSRKARLLLKQKKAKVVRRTPFTIQLLYGSSGYKQPVSLGVDMGTRYVGISATTEKDVLFEAEVKLRTDIVDLLAIRRQFRRSRRNRKTRYREARFLNRRKPEGWLPPSIQHKINSHIKLIDLVHNILPVTSVTIEVATFDTQKLKNPNIQGVEYQQGEQMGFWNVREYVLYRDNHTCQYCKGKKKDPVLQVHHIESRKTGGDSPDNLITLCKTCHHEIHEKGLEHILQRKRPPMRDASQMTAIRWAMFSRIREKYSHANITYGYITKCIRIANGLPKSHMVDARCISGNPLAKPSGTVYLLKFVRKNNRQLHKATILKGGKRKSNKAPRFVKGFQLFDKVVYEGKECFIFGRRSSGYFDLRLLDGTKVHASASWKKLKRVEYASTLLIERRKGDSSPTFANA

SEQ ID NO: 5841 - protein, 456 aa, unidentified
MSTCVCVLSNSGERLMPTFRLGKVRRLLKDGKAKIVKHHPFTIQLLYDSKTNKQPIEICEDVGYNYIGISVKSKSCEYVSAQYDTLQDEKEHHDDCRKYRRTRRNRLRYRKPRFDNRKRSEGWLAPSLEHKKQLNISLVERYVSVIPITHATVEVGSFDTMLLQAIQKGETKPEGADYQEGPRYNLATLREAVFYRDNYTCQVCGRKITDGAILHMHHMFYWKGRHGYKLDELVTACEKCHTPANHQKGGKLFGFGEDKEFADLSGAAFMNAVRWQIVNALHTTYSKEFVTITYGAMTKEKRIALQLEKSHNNDAYAMGDFHPVHRCGFRHYQKRRRNNRVLEKFYDATYIDARTGNKAKGKELFNGRISRNHKKDSENLHKYRSEKVSKGRRSIRKRRYAIQPYDTVRLKGKTYITSGCHNKGTRLLIPVNGKSKSVTISKVQVVCHAGPWIQII

SEQ ID NO: 5842 - protein, 544 aa, unidentified
MKQKKQKVIIYILNKKGKPLMPTTRCRHVRILLDNKKAVVVSSNPFTIRLKYDTPNGVQNVFAGIDSGRENIGSGASNEGGDCLYLGELKTSNKSIKMKMTERAGFRRERRRHDRQNKQRKARKDHTEIQNGNIDICRTTISCKSVQISYPTAEESVTHKIIRGKEGKFANRHRDEGWITPSARQLIQMHMNDLKSMCRILPISHVTLERVAFDFQKLENENIKAWEYGKGKLYGYNSPEEYIRDVQDGKCLVCGKPHIDYLHHIIPRSKGGSDKVSNLVGLCYDCHYGPTGVHKCQDTQDRLPELKNKANKQYKVSLLNSVMPVLIEEMDKFCKANSIIFSICEGHDTAKVRDMYDLQKDHCLDGFAISLVGRDVESVDVMPDRIYQKQRYKKKSKNIIQKRNHREYYAGKKLVAVNRHKGTDQKADSLEEYMNTYAESHTADECKKHFESLTVKPARRTYTFHKEGRICPFHTGDKIRYEKKNKIKGNTKVETFICESIYFSKDENKAKVEHNKTKSKKMKFCRVLESGCIPYIDYRKLALI

SEQ ID NO: 5843 - protein, 415 aa, Bacillus sp.
MVSYCFVLDGKGRKLSPTNENRGWVLIRKNKAALINKFPMVIQLFKEVADEKIDQTLIHFNIDDGSKFTGIALVQECQTKNKPVFKGTIEHRTDVKDKMDTRRSYRRYKRSHKKNRPKRFHNRSSSTREGRTPPSIKQKKEATLRLLNKLMKWTRVNHIHLENVMIDIRKLEKGSQPYQWDYQKSNRLDENLRKAALMRDHFTCQDCGNTHCRLEVHHIIPRRLQGSDSIHNFITLCSSCHEQVTGEESDHAERFFKKIRGKKIAFHDAMHVMQGKTYFQQELKKIGPLTLTTGGDTANRRIDWAIGKSHSNDAIVLSQLHVSSKQCHIKDWCIKPMRRRSKKKIDKVNDFHHRDFVRYTKRNGDVYEGYITALYPKKKQCNLTTTEGKVLKRYGINRLKLLWRFNHIYFLNKHE

SEQ ID NO: 5844 - protein, 471 aa, Caldicellulosiruptor sp.; identical to SEQ ID NO: 3268

SEQ ID NO: 5845 - protein, 460 aa, unidentified
MVAVVDLFGKPLMPTNEYRARKLLKQKKAKIFGYRPFTIQLTERKSAEIQPIELCMDTGYIHIGISAKSERHEYLGMQIDTLTDEKLKRDDKRQYRRQRRNRKRYRAPRFDNRRRKEGWIAPSLEHKKEIHIDAIQRICKVMPITDITLEIGNFDTHVLKAVEEGKPLPQGSDYQHGERYGIATLREAVFLRDGYKCQCCEKSVKDGAILHVHHIKYRSQGGTNRMSNLITVCDKCHTPKNHKPGGKLWNWKPKLAEFKGASYMTSIRWTLYNEVTALLPNSSVHITYGAKTKESRRKLDIKKSHVNDAYVMGLFCPKHRTKPVYFKKKRRNNRVLEKFYDAKYIDSRDGKKQSGQELFNGRINRNHRKDSENLHLYRKQKVTKGKRSIRNKHYPIQPHDILLYQKKKYENAGCHNNGSRVILLPEKKSVALKQLTIYQYAGGYYRVPYESNKKEERTGS

SEQ ID NO: 5846 - protein, 552 aa, unidentified
  source 1..552: note = Candidatus Poribacteria bacterium
MSKVAVLDTNKNVLEPCHPAVARRLLKRGEAAVLKRYPFTIILQKAVPADEIVTQAYTLSVDPGSKVTGLAITTEDAEIVYAAELHHRGAQVKKALSDRAGFRRGRRTRNLRYRPARWANRARKVPVLTDAGWTYQRAAKEEGNDASKTQNTFNRVSWSQFRDKRYRWERLPPTKTNRRQKQRWKRVRVEHQKRADNGWVAPSLMSRVFNLETWTRRLCAVYPITRLAIETVKFDLQLMEDPDIHGIQYQQGTLHGREIREYLLELTKRKCAYCGKNKVRLEVEHIIPKARGGSSRPDNLTMACRPCNEKKGNLVGEALAAKCGEDFAKKVEAAKRKSTKRLTDATAVNTIRWKIYETLEATGLDVRPGTGGKTAYHRNLAGLPKTHYYDAASVACIPKHPAQLSVQVIQAIGYGRRDNIGKKFSMKAPGFVLPSEKRAASAGFRKFSHVELTKANGTKWRGVLNCFDKTPKGKPRKVRVKYFAPDVKDPRKSGHTGELRLLQHRDGYSYGNLVANMEFREPKTPAPETAQPCTDTGDAMMGAQLDFLSHLL

SEQ ID NO: 5847 - protein, 470 aa, Blautia sp.; identical to SEQ ID NO: 2925

SEQ ID NO: 5848 - protein, 410 aa, Desulfobacterium sp.
MLVYVINKNGNPLMPCKPAKARKLLKSGKATIVNHTPFTIQLTWNCEEHTQPVTIGIDKGAKRTGFCAVSKDRVLISGIIEHRSDVKDKMSTRAANRRQRRSRLWYRAPRFFNRSASTRSGRLPPSIKTNVEEVLRVVKKLPLPIDHVIVEDVLVDIAKLNDPDLTAKDYQASNRLHENLRLACLLRDGFTCRYCKKKNGKLEAHHIIPRSKGGKDTILNLVTLCSTHHKALHKGKIKMELNGVGNLKDVIAQRTMQGKQSLYKLLSRFGEVKTIFGYQTAEYRKALGLAKDHDVDAFCIANYFSMYDLSYHKENCFRVSFRPRQTRRCYHDLPKPGKGRVRYKVNELLEGFRKGDIVMVKDHFIKQINSIYSNGRLAFKRIKGEPASALPKNCRLLLKQKTIVFDAIKF

SEQ ID NO: 5849 - protein, 414 aa, unidentified; identical to SEQ ID NO: 2588

SEQ ID NO: 5850 - protein, 471 aa, Caldicellulosiruptor sp.; identical to SEQ ID NO: 4560

SEQ ID NO: 5851 - protein, 431 aa, Escherichia sp.; identical to SEQ ID NO: 3801

SEQ ID NO: 5852 - protein, 339 aa, unidentified
LLSARRALRQSRRSRNTRYRAPRFDNRIRTKRKGWLAPTVENRINVHLSRIETVLRLLPVTKITVETASFDTQLLKNPDIAGKEYQEGEQLGFWNVREYVLFRDGHVCQHCHGRSKDPVLNVHHLESRRTGGDSPGNLITLCETCHKALHRGEIKLKAKRGRSFRAETFMGIMRWGVLNRLKASHPKLEVHNTYGYRTKHARIANGIAKSHCADAFCIAGNFGAKRLGEFFFQKQTRRNNRQIHKLSILKGGIRKRNQAPFEVNGFRLFDKVACKGEEGFIFGRRSSGYFDVRKLDGTCISAGISYKKLHLLEKRRTYLTEIRKEEALPPPPEGRGLRA

SEQ ID NO: 5853 - protein, 442 aa, unidentified; identical to SEQ ID NO: 2637

SEQ ID NO: 5854 - protein, 410 aa, Methanobrevibacter sp.
MFVYVLNMHGEPLMPCRPRKARILLKDKKAKVVNRTPFTIQLLHRSSDYRQPVNLGVDAGSKYIGLSATTSKKELFKATVELRQDISKLLESRRSQRRNRRSKLRYRPARFNNRSKKGKLAPSIQHKIECHLTMIKRVCSILPVDNIIVETAEFDTYKLKNPEINGVEYQHGDAEGFYNVKSAVLSRDKYTCQICGKKHTKLEVHHIIFKSQGGSNRMDNLVTLCSDCHSKIHKKQLTFNKKVKTFKHASHMNIMRKRILESLKREFNNVYETFGYLTKYLRENLGIVKSHCNDAFVISHNLEAEQSDVEYLFKKVRRHNRQIHKAKPSKGGQRRKNQSPYIINGFRRYDKVMYKSIECFITGKRSSGYFQLKSFNGTVISQGVSSKKLKLLEPIKGWLIDWRIAIPSST

SEQ ID NO: 5855 - protein, 423 aa, Moorena sp.; identical to SEQ ID NO: 5218

SEQ ID NO: 5856 - protein, 428 aa, Enterococcus sp.; identical to SEQ ID NO: 4335

SEQ ID NO: 5857 - protein, 419 aa, Anoxybacillus sp.; identical to SEQ ID NO: 5840

SEQ ID NO: 5858 - protein, 512 aa, unidentified
MSTVYVLNKDGKPLMPTTRGGHVRHLLKEQKARVVRTKPFTIQLLYETDDVVQLLYLSIDPGRTNIGVAVVKTDGTAVFTAHLETRNKEIPKLMKKRKNSRRARRTNGRRCRRQRRGKANGTISKKCVKQDTAQNGSVSKRAKKIGVIKRHLPGCEKEVLCIGIKNKEAKFSNRVRPEGWLTPTANQLLQTHINLVKKIQKFLPISDVVLEVNKFAFMQLDNPNIQKWQYQQGPLYQKASLEEAVSEMQEHHCLFCKKPIAHYHHVVPQSENGSDTIGNIVGLCTKHHDLVHKDTEWQKKLAKKKTGLNKKYGALSVLNQIIPALTKELSSLFPKHFFATNGKSTYDYRAAHGVSKDHWLDAYCIACSVLADDVCDNNINSHVPYELKQFRRHDRRALHKENMSRVYTLNGKSVATNRHKATEQTTDSLEEFRQCQPDDVCKLKVKEHYPEYRNPKRNFPGCVFLVGKHTHVMQGTSGSHNGKADGYYDTNGNSYSSGECKFVANNEGIVFA

SEQ ID NO: 5859 - protein, 435 aa, unidentified
LGRTTGLRAEQAEPAGIRKGDTLKVFVLNMRGKPLMPCSPAKARHMLKAGKAVVVRRTPFTIKLTIATGETKQDVTLGVDAGARHVGISATTEKEEVFASEVALRQDITGLLADRLAFRRARRNRKTRYRAPRFNNRVRSKHKGWLAPSVENRIQAHISRIEAVCRLLPVTKIVIETASFDIQKIRNPEVEGTGYQQGDQLGFWNVREYVLFRDGHICQHCRGRSKDPILNVHHLESRKTGGDAPNNLITLCETCHKAYHAGKIKLKVKRGHSFRAEAFMGIMRWTLLNRMRKAHPSLPVENTYGYLTKHKRIALGLPKTHCADAFCIAGNLKALRRGDFLFQQQTRKHNRQIHKCSILKGGVRKLNQAPFLVKGFRLFDKVRIGGQIGFVFGRRVRGIFNIRRLDKTVIGTDINCKKLSLLETRKTFLTELRKE

SEQ ID NO: 5860 - protein, 465 aa, unidentified
MSTCVCVLSNSGKRLMPTIRLGKVRHLLKDGKAKIVKHHPFTIQLLYDSKTNTQPIEICEDVGYNYIGISVKSQSHEYVSAQYDTLQDEKACHDSCRKLRRSRRNRLRYRKPRFDNRKRSEGWLAPSLEHKKQLNIRLIERYVSVIPITHATVEVGSFDTMLLQAIQKGKSKPEGVDYQKGPRYNLATLREAVFYRDNYTCQVCGRKIADGAILHMHHMFYWKGRHGNSLDELLTVCEKCHTPANHQKSGKLYGFGENVKFADLSGAAFMNTVRWQIVNELYAAFGKDFVTITYGAMTKEKRIALQLEKTHSNDAYAMGEFHPNHRCTFEHYEKVRRNSRTLEKFYDSRYIDIRTGEIATGKELFNGRINRNHKKDSENLHKCRGKRTYAGHRALLRKKVNLNPGDLVSLNGEVLIVHGTHTNKKGAVNVEFKVPAKNGQKSANLKKLKIVKAAGSIHPAWEKVS

SEQ ID NO: 5861 - protein, 447 aa, Marinobacter sp.
MAVFVLDRQKNPLMPCSEKRARLLLTRKRAVVVRVYPFSIRLKDRTGGTVQKVVLKIDPGSKETGLAVSRVSAQGEHVLCLIELIHRGRQIRKALDQRRGCRRRRRSQLRYRAPRFNNRTKPKGWLAPSLQHRVDTTTSVIKRLCALVPVTSISQELVRFDLQQMENPEISGVEYQQGTLLGYEVREYLLEKWGRECAYCTVTDTPLEIEHIVSKANGGSNRISNLTIACHDCNQEKGSQTLADFFQTSKRLKDKQPRLSQVLSQCKRPLRDAAAVNSTRWALFQSLKNTELPVNVGTGGQTKFNRQRLGIPKTHALDAACVGVVEQVFDWQKTTLRIKATGRGSYKRTRLTKHGFPRGYLMREKSVHGFQTGDMVRAIVPTCKKEGTWLGRVAIRKTGSFNIQTSDGAVQGIHHRHCRLMQKADGYGYHLQPTPQKGEGKQESLSC

SEQ ID NO: 5862 - protein, 289 aa, unidentified
LSRIEAVLRLLPVTKITVETASFDLQLLKNPDISGKEYQEGEQLGFWNVREYVLFRDGHVCQHCHGGSKDPVLNVHHLESRRTGGDSPGNLITLCETCHKALHRGEITLKAKRGQSFRAEAFMGIMRWEVHSRLRALHPGIEVSNTYGYRTKHARIANGIAKSHCADAFAGNLGAERLCEFFFQKQTRRNNRQIHKLSILKGGRRKRNQASFEVKGFRLFDKVACKGEEIFIFSRRSSGYFDVRKLDGTRISAGISYKKLRLLEKRRTYLTEIRKEAFPPLPEGRSLRA

SEQ ID NO: 5863 - protein, 245 aa, unidentified
INNPNISGKEYQEGDQLGFWNVREYVLARDGHKCQYCKGKSKSKILNVHHLESRKTGGDSPSNLITLCETCHKEYHKGNIDLKIKRGSSLRDAAVMGIMKWRLYEELKSRYDRVFMTFGYITKHNRIKYGIEKSHTSDAFVISKNINAKRIGCQYLKRLIRRHNRQIHKMKILKGGKKKNNQAPFEVFGFRLFDKVLYNNKICFVYGRRKSGSFNIRDFNGENSKDVSRKKLKLIRGKRHPIILK

SEQ ID NO: 5864 - protein, 499 aa, unidentified; identical to SEQ ID NO: 3843

SEQ ID NO: 5865 - protein, 504 aa, unidentified
MAWEAIQTRRIKPHDIGEGTLRRHAAGTVSFPVLCKNRKETLMSVLVIGRNGRALMPTNPRKARLLLKKKTASVVCRHPFTIQLLYKTGCATQEGCIGIDTGSQHIGVGITCGDRVILKDEHALRSSMEKRSLLATRTVMRRGRRYRKVRYRKPKWRHHTKRMYFEKANRRGQHWRKVKTTTQSPRLKGWLPPSLQSKCDHHFRIIDRYLKYLPDPITRNLVIEAGRFDMARMNDPTIHGEMYQRGPMYDAENLRAYIFARDNYQCACCKAKAGTTRKADGTTVKLVAHHILFRSRGATDNPKYIISVCDHCHTTKAHQPGGILYSWMENNKKVARGLRDATFMNILRKRLFARYPQAAFTYGNITAADRKQLRLPKSHANDAVAISLFGKEASTVKNICQTMHYKQIRKSKRSLHEAIPRKGRKNPNTKAVRNKKNTTQVNGFKLWDSVLADGKKLFICSFTGTSAYLIDKNGCYISQPGKTYKQWPLSKLKRLHPNGNWLMA

SEQ ID NO: 5866 - protein, 420 aa, unidentified
MQYVYVLNKHGEPLMPCSPGKARLLLKQQKACVVRRTPFTIKLLYGSAGYKQPITLGVDAGSKHVGLSASTEKRELYSEEFTPRSDVVKLLSTRKQNRRSRRYRKTRYRAPRFDNRVHSKHKGWLAPSVEVKIQERITVIKRICKILPISLVRVETAEFDTQRLKAMLAGKPLPVGTDYQLGEMYDEYNVRQYVLKRDHYTCQCCGAHNTAKKVVKLHVHHLESRKTGGNAPSNLVTLCTTCHKNLHKGKVTLDGKERGKPLRDAAFMGIMRKTLMARLKEELPIPVQGTYGYITKMCREQNDIKKSHTNDARCISKHPLAEPCSVCYRTKAIRHHNRQTHKANFSKKGIRKRSQMPYLVEGFRLWDKVLYKGQECFVSGRRSSGSFALKKLDGTSISKGVTFKKLRLLEPATNYLIERM

SEQ ID NO: 5867 - protein, 424 aa, unidentified
MVFVLSSTKKKLMPTNEYRARKLLKSGKATIYKHRPFTIILTGRDDGDTQPVEYCCDTGYQHIGISIKSQKHEYVNEERILLKDEVEHHNDQRKYRRTRRNKLRYRKPRWNNRKDNLICKDGFAPSIRNKRDIHINLLKMYYNICPITSATFEMGQFDTQLLKAIEEGNDVPQGKDYQHGEQYGYSTLREAVFARDDYKCICCGKSAIKDNAFLRIHHLGYLIGDRTNRMNNLATVCSNCHTSKNHQKGGKLYDLKPKLKSFKGTTFMTMVRYDMFSKLKELYCMGELHPKQRTDFKCYQKLRRNNRILSKFYDAKYIDIRDGSIKSGKQLSCNKTNRNEKRNSNKNERIYRGKQISKGKIVVRRQHYQYRPYDFVWYENIKYVVKGVQDKGKRIALQNHLPVALSKIKKSIHTNGWRLVASIS

SEQ ID NO: 5868 - protein, 443 aa, Caldicellulosiruptor sp.; identical to SEQ ID NO: 5367

SEQ ID NO: 5869 - protein, 454 aa, unidentified
LDTVAVISASGRKLMPTNSYRARRLLKSKRAVIYRYRPVFTIKLVDRTNGYTQPIEYKCDTGYQNIGISICSDTKEFVNEQRDLLKDEVKRHSDSRKYRRTRRNRLRYRKARWNNRRGMISKDGFAPSIRNKRDVHVRLYEEYYKVFPITKAVFEMGQFDTQVLKAVEAGLPVPAGTDYQRGEQYGYATLREAVFARDSYTCICCGKSAIKDGVKLRIHHIGYLSGDRSNRMANLGSVRESCHTSKNHKPGGKLYNLKPKLKTFKGATFMTTVRYSMVKQLKAATPDVDIRVTYGAATKLARKALSVKKTHSNDAYCMGEFHPKHRSNFKYYRKCRRNSRVLSRFYDAKYRDLRDGSVKTGSQLSCGRTNRKISRHTKLDERIYRAHKISRGHVSIRRQHYSLRPGDKVLYDGKVYFVTGMQNSGTHVKLTNGKVCSLKKVHVLQHCNAWTAVI

SEQ ID NO: 5870 - protein, 470 aa, unidentified; identical to SEQ ID NO: 2925

SEQ ID NO: 5871 - protein, 512 aa, unidentified; identical to SEQ ID NO: 4031

SEQ ID NO: 5872 - protein, 443 aa, unidentified
LTKDENRPSGRTTGLRAEQAEPAGIRKGDTLKVFVLNMRSKPLMPCSPAKARHMLKAGKAVVVRRTPFTIKLTIATGETKQDVTLGVDAGARHVGISATTEKEEVFASEVALRQDITGLLADRLAFRRARRNRKTRYRAPRFNNRVRSKHKGWLAPSVENRIQAHISRIEAVCRLLPVTKIVIETASFDIQKIRNPEVEGTGYQQGDQLGFWNVREYVLFRDGHICQHCRGRSKDPILNVHHLESRKTGGDAPNNLITLCETCHKAYHAGKIKLKVKRGQSFRAEAFMGIMRWTLLDRVRKTHPKLPVENTYGYLTKHKRIALGLPKTHCADAFCIAGNLKALRRGDFLFQQQTRKHNRQIHKCSILKGGVRKLNQAPFLVKGFRLFDKVRIGGQIGFVFGRRVRGTFNIRRLDKTVIGTDINCKKLSLLETRKTFLTELRKE

SEQ ID NO: 5873 - protein, 443 aa, Caldicellulosiruptor sp.; identical to SEQ ID NO: 2385

SEQ ID NO: 5874 - protein, 412 aa, Photobacterium sp.
MFVFVLNKNSEPLMPCKPQKARVLLKHGDAKVVKLTPFTIKLIGGSSGYKQTLVAGMDTGSKTIGCAVVGLGKVIYQSQVALRQDVSKKMEQRAMYRRNRRGRKYRYRPARWANRASMRTKGRVAPSLKSKLESHLRERNFVESILPISEWKVETASFDIHKITNPEVTDVGYQNGAQKDFYNVKAYVLHRDGYKCKSGHKGKHSSQLHVHHIQFRSNGGTDAPSNLITLCESCHADLHAGKFEFKTKKSRTKHATEIGIIKSRLKQVWLFTETFGYETKFKREQILGLSKEHYYDAVAICLEDGELAKQNDFIFFKRHVSKGDYQLTKGSRSEKKVPVGKIFGLRKHDFISTPQGDGFVKGKRSTGYFALETIIGEKVHASANVKKNAVRVSARTTTLIQKMERASNSSSR

SEQ ID NO: 5875 - protein, 451 aa, unidentified
MSVAVMSKTSMRLMPTSEYRARKLLKSKKATVYGYHPFTIQLTERETGDVQPVELCMDTGYLHIGMSVKSEKHEYLGVQIDTLTDEKQKHDACRMYRRQRSSRKRYRQSRFNNRKRSDGWIAPSLEHKKDIHIQTISRICNAMPITNITLEMGNFDTQVLKALEKNRPLPQGTDYQHGERYGIATLREAVFARDKYTCQCCRRTIADGAILHVHHIIYRSRGGTNRMSNLATVCDRCHTPANHKPGGKLYNWKPKLASFKGATFMTAVRWKMYNEVKSKFSDINIHITYGAETKGQRRAFDITKSHVNDAFVMGQFYPKHRSRPVCYKKKRRNNRCLEKFYDAKYIDSRDGKKRSGQELFNGRINRNHKKDSENLHQYRQQKVSAGRRTIRKQHYSIQPHDIVVFNRQQFETSGCHCNGARAILLPQKKSVAIKKLSIHKYAGGYFKSDFT

SEQ ID NO: 5876 - protein, 456 aa, unidentified
MSTCVCVLSNSGERLMPTFRLGKVRHLLKDGKAKIVKHHPFTIQLLYDSKTNTQPIETCEDVGYNYIGISVKSESHEYVSAQYDTLQDEKEHHDDCRKYRRTRRNRLRYRKSRFDNRKRDKGWLAPSLEHKKQLNISLIERYVSVIPITHVTVEVGSFDTMLVKAIQEGKVIPEGADYQKGPRYNLATLREAVFYRDNYVCKVCGRKATEGAILHMHHMFYWKGRHGYQLDELVTVCEKCHTPANHQKGGKLYGFGKDKKFANLSGAAFMNAVRWQIVNALYATYGKEFVTITYGAMTKEKRIALQLEKTHNNDAYAMGDYHPARRCKFRHYQKRRRNNRVLEKFYDATYVDTRTGNKAKGKELFNGRISRNHKKDCENLHKYRSKKVSKGRRSIRRQHYAIQPYDTVRLEGKTYITSGCHNKGTRLLIPVNGKSESVAISKVQVVCHAGAWIQII

SEQ ID NO: 5877 - protein, 525 aa, unidentified
VSLPVKQVNRDKTSTGNSFKAPQRARRRTCRSAGAEQGRNCHLERNFIMIIALDKNKRPLGFLTERRCRILMERKRAVLYRVFPTVVILMDMDVRKLRDLPSYRIKIDPGSKYTGIAIVRNDTDELVYAMQIEHRGDAVRAGLQKRKMARRNRRSRETGYRRAKWGNRCLSDGDKKSYNSSRKDGWLPPSILSVADNVLTWVQRLSRWINITDCSLEAVRFDTQLLENPNIKGEEYQHGTLFGYEIREYLLEKFGHTCQYCGGKSGDSVLEWEHIHPKSRGGSDRVKNAILSCSSCNRDKDNQTLEEWIGQIRSRVSREKGKRKELDSGRIERIQKVIDGKPEGQPMRYATWVSSSRRYLEKHLFQIFRDVECSSGGRTKYNRIRLGYSKEHHYDALCVGTVPEKGYHDRTNGYYLYAKATGRGTRLRGAVNQCGVIITKWTSRKKNFFGFQTGDIVVAEVPHKIPRPYKYEGRFVGRVMVRASGSFDIRTTDGKLATVKAGFCRLLQANSGCAYSMERTIPLDH

SEQ ID NO: 5878 - protein, 429 aa, Parasutterella sp.; identical to SEQ ID NO: 3656

SEQ ID NO: 5879 - protein, 456 aa, Halomonas sp.; identical to SEQ ID NO: 4656

SEQ ID NO: 5880 - protein, 466 aa, unidentified; identical to SEQ ID NO: 2459

SEQ ID NO: 5881 - protein, 421 aa, Lactobacillus sp.
VCTLRQCYRFGNSRNTIQFVRPVTTNTQELTLGVDAGFHLGLSVVGNNREYYVSESLRKSEKDRITSRRELRRTRRNRLRYRKARFNNRRRKDGWLAPSIQHRLDFTIKEIKRLYKFLPITNLVVEVTPFDNQKLLNPDIQGWQYQKGKMYGFKTIKDYLLARDNYRDALDGKQYPASQLRVHHLVQRKDGGSNQPDNLVLLSDINHNQANHNNGILAKLRENRQKTLDYRGAYFMSILATRLSNYFEHYTTTQGYLTANLRQKYEIEKSHLNDAFVIAGGTDTTLRTNNVYSRQKLRNNNRVLQKFYDAKYIDSRDGKQKAGKELSSGRTRRSQELNYDNLRQLRKEKVKKGRVSIRRGHYQLRPHDVVLNTRTNRIETVKGVQNSGTVIKFQTGKTCSIKSVVSLYHVNGILEKKMKNI

SEQ ID NO: 5882 - protein, 413 aa, unidentified; identical to SEQ ID NO: 2636

SEQ ID NO: 5883 - protein, 418 aa, unidentified
MLNNQKEYAFVLDAEGKKLDPTIIQNAWRLVRQKKATLIAKRPMTIQLKKVIDSPNDDEIRMGIDDGAKHVGLALVQKCKTKNKVIFVATMEHRNDVHKKMEQRKNYRRYRRYWKRYRKARFSNRASARRNGRVAPSILQKRQAVVRIFDRLSKYIRIDSIYLEDVAVDVRVLTDEKKLYSWQYQQSNRLDENLRKAAILRDKCQCQMCGKKNCRLEAHHITPKRMSGTDTIGNLITLCSDCHSKVTGREMEFAEQFYTKIKRKKNNYNLQDATHSMVGKTWLREKLSLRKPVLLTTGGDTANKRIDWNLEKSHEIDAVCITDLRPESINVKHWKVKPLRHQRNKMKVEELCGFRHRDIVCYTFQNGEYHEGYVTALLLADKTHADSLSFMSATKHCCRINPKKCKKLGHANKFLWLL

SEQ ID NO: 5884 - protein, 431 aa, unidentified; identical to SEQ ID NO: 3235

SEQ ID NO: 5885 - protein, 433 aa, Fervidobacterium sp.; identical to SEQ ID NO: 5708

SEQ ID NO: 5886 - protein, 396 aa, unidentified
VVRRTPFTIQLTIATGESKQPVSLGVDAGYKHVGLSASTEKAELYASEVELRKDITDLLSARRALRQSRRNRKTRYRAPRFDNRIRTKRKGWLAPSVENRINAHLSRIEAVLRLLPITKITVETASFDMQRLKNPDISGKEYQEGEQLGFWNVREYVLFRDGHVCRHCHGRSKDPVLNVHHLESRRPGSDSPDNLITLCVTCHKALHRGEITLKAKRGQSFRAQAFMGIMRREVLNRLKASYPELKVHETYGYLTKHARIANGIVKSHGADAFCIAGNLGAERLGEFFFQKQTRRNNRQIHKLSILKGGIRKRNQAPFEAKGFRLFDKVACQGEEGFIFGRRSSGSFDVRKLDGTRISAGISCKKLRLLEKRRTYLTEIRKEEALPPLPEGRGLRA

SEQ ID NO: 5887 - protein, 420 aa, unidentified
MQYVYVLNKHGESLMPCSPGKARILLKQQKACVVKRTPFTIKLLHGSAGYKQPVTLGVDAGSKHVGLSASTETHELYCEEFTPRNDVVNLLSTRRELRRSRRYRKTRYRAPRFNNRVHSKHKGWLAPSVEVKIQEHITVIKRICRILPVTLVRVETAEFDTQRLKAMLTGKPLPVGTDYRLGEMYDEYNVRQYVLKRDNYTCQCCGAHTTAKKVVKLHVHHLESRKVGGNAPNNLITLCTACHDNLHKGRVTLDGKKRGKTLRDAAFMGIMRNTLLIRLRNELNIPVQNTYGYITKLLREQNNIKKSHINDARCISKHPLAEPCSVCYRTKAIRHHNRQIHKAKILKGGIRKANQAPYIVKGFRLWDKVLYNGQECFISGRRSSGYFALRKLDNTTITDSISFKKLRLLEPATNYLIERK

SEQ ID NO: 5888 - protein, 465 aa, unidentified
MNTCVCVLSYNGERLMPTFRLGKVRRLLKDGKAKIVKHHPFTIQLLYDSKTNTQPIEICEDVGYNYIGISVKSESHEYVSAQYDTLQDEKKRHDDCRRMRHSRRNRLRYRKPRFDNRKRSEGWLAPSLKHKKELNVNIVMMYCAVMPITHATVEVGSFDTMLVKAIQEGKVIPEGADYQKGPRYNLATLREAIFYRDNYVCKVCGRKATEGAILHMHHMFYWKGRHGNSLNELLTVCEKCHTPANHQKSGKLYGFGEDVKFADLSGAAFMNTVRWQIVNELYAAFGKLFVTITYGAMTKEKRIALQLEKTHNNDAYAMGGFHPNFRCTFEHYEKVRRNNRILEKFYDSRYIDIRTGEIATGKELFNGRINRNHKKDSESLHKYRGKRTYAGHRALLRKKVNLNPGDLVSLNGEVLIVYGTHTDKKGAINVEFKTPAKNGRKSASLKKLKIVKTAGSIHPAWEKVS

SEQ ID NO: 5889 - protein, 427 aa, Parasutterella sp.; identical to SEQ ID NO: 3787

SEQ ID NO: 5890 - protein, 420 aa, unidentified
MQYVYVLNKHSEPLMPCSPGKARLLLKRQKACVVKRTPFTIKLLHGSAGYKQPITLGVDAGSKHVGLSASTEKRELYSEEFTPRNDVVELLSTRRQNRRSRRNRKTRYRAPRFNNRVHSKHKGWFAPSVEVKIQEHITVIKRICRILPVTLVRVETAEFDTQRLKAMLAGKPLPVGTDYQLGEMYDEYNVRQYVLKRDNYTCQCCGAHTTAKKAVKLHVHHLESRKVGGNAPSNLITLCVTCHNNLHKGKITLDGKKRGKTLRDAAFMGIMRNTLLTRLRNELNIPVQNTYGYITKLLREQNDIKKSHVNDARCISKHPLAEPCSVCYRTKAIRHHNRQIHKAKILKGGIRKANQAPYIVKGFHLWDKVLYNRQECFISGRRSSGYFALRKLDGTAITNSISFKKLWLLEPATNYLIERM

SEQ ID NO: 5891 - protein, 424 aa, Tolypothrix sp.
MSNYVLVIDTNKSPCNPIHPAQARKLLDLKLAAIFRRYPFTIILKSVSTDVVSPIQLKLDPGSKVTGIALVQEDKVIFGAELTHRGSAIKASLESRKSLRRGRRARHTRYRQARFLNRTRLKGWLAPSLQHRVLTINTWVKRLCKFAPITRISQELVRFDLQQLENPEISGIEYQQGQLAGYEVREYLLNKWDRKCTYCEAENIPLQVEHIKPKAKGGTNRISNLCLACDKCNKKKGTQDVEKFLAKKPELLKKILSHAKRPLKDATAVNSTRWALFTSLKQMGLPVSTGSGGLTKFNRTTLKLPKTHWIDAACVGKVETLEILTTKPLNIKATGHGTRQMCGTNKFGFPVRHRTNKQIHYGFQTGDIVKAVVKTGKKIGVYIGRIATRASGSFNISTTNGLVQGISYKHCSTSHKKDGYSYSA

SEQ ID NO: 5892 - protein, 443 aa, Caldicellulosiruptor sp.; identical to SEQ ID NO: 2385

SEQ ID NO: 5893 - protein, 406 aa, unidentified
MVYVQDIDGKPMMPTTRHGKVRRLLKANKATVVNLCPFTIQLTYKSTDHKQPVTLGIDAGAKHIGFSATTEKEELFACETTLRTDIVDLLSTRLQNRRTRRSRLRYRKPRFNNRGSSKKKGWVAPSVKQRIDSHLNEVNEIHKILPITKIVIEVAQFDTQKMKNHDISGADYQNGEQLGFWNVREYVLFRDGHKCSHCKGKSKDPVLNVHHLESRKTGGDSPSNLVTLCESCHKAFHKGEIELKKKRGKSLRDAAVMGIMKWKLYEELKSRYDNVSMTFGYITKHNRIKYGIEKNHTSDAFVISRNFNAKRIERQYLKRLVRRHNRQIHKMKILKGGKKKNNQAPFEVFGFRLFDKVLYNNEIFFVYGRRKSGNFNIRDFNGENPKDVSHKKFKLIRGKRHPIILK

SEQ ID NO: 5894 - protein, 227 aa, unidentified
MPCSPAKARHLLDAGKAKVKKRTPFTIQLVYGSSGYIQEVILGVDAGSKTIGISASTKKEEVFAADVTPRNDVVDLLSTRREFRRARRNRKTRYRKPRFNNRVRSKHKGWLAPSVEVKIQEHITSIKMVCRILPVSKVVVETAEFDLQLLKAIEEGKPVPQGEDYQQGEMYGHYNVRQYVLWRDNYTCQCCGAHPTKKKEVRLHVHHLESRKVGGNAPGNLVTLWRC

SEQ ID NO: 5895 - protein, 466 aa, Tolypothrix sp.; identical to SEQ ID NO: 2968

SEQ ID NO: 5896 - protein, 297 aa, unidentified
WLAPSVEVKIQEHITVIKRICRILPITLVRVETAEFDTQRLKAMLAGKPLPVGTDYQLGEMYDEYNARQYVLKRDHYTCQCCGAHTTTMKSVKLHVHHLESRKVGGNAPSNLITLCTTCHDNLHKRKVTLDGKKRGKTLRDAAFMGIMRKALMARLKEELSIPVQETYGYITKMRREQNDIKKSHVNDARCISKHPLAEPCSVCYRTKAIRHHNRQIHKANFSKGGYRKRSQMSYIVEGYRLWDKVLYKGQECFISGRRASGRFALKKLDGTSISKSVTFKKLRLLEPATNYLIERM

SEQ ID NO: 5897 - protein, 494 aa, unidentified
MTMVYVQNKDGKPLMPTTRYCYVRLLLKEKKARVVCTTPFTIQLNYDTPDITQDLILGIDPGRTNIGVAVVKEDGQCVFSAHLETRNKDVPLLMKKRAAFRRNHRTLDRRRKRQRRAKAAGTTIADGSAERLLPGYEKPIVCHYIRNKKARFNNRCRPAGWLTPTANHLLQTHINLIAKVAKFLPITKVVVELNRFAFMAMDNPNIRRWEYQQGPLYGLGSVEDAVYAQQDGHCLFCEKPIDHYHHVVPRHKGGSETLANRCGLCVKHHDLVHKDKAWADKLVTRKEGMNKKYHALSVLNQIIPFLMKYLGDETLYDVYATDGRSTKGFRIAKNVPKEHYTDAYCIACSILDTDIKVSAPVEPFELKQFRRHDRQACIRQMVDRKYLLDGKVVATNRNKAFEQESDSLQEFREVYGDAAVSQLTVKPHPPQYKDMTRIMPGAVMDFNGVVDVFQRSEGFHNGKPDYYKSTKGARVLTKRCVLLTQNAGTVFIPA

SEQ ID NO: 5898 - protein, 445 aa, Acetohalobium sp.
MVFVLNKDKTPLNPCHNGKAKWLLDNNYAVVHKIQPFTIRLKKKVTNPNLKDYTLKIDPGSKTTGLAINNGSQVAFLANLHHRADTIKQNLQTRREHRRFRRSQLKYREKRFDNRKRGDNWLPPSVDSIVNNIKTWVQRLKKLCPISKVVVEMVRFDTQKMQNPEIEGIEYQQGTLQGYNVREYLLYKHNHTCQYCGGESGDPVLEVEHKIPSSRGGTDSIKNLTLSCKTCNQDKDNRTLKEWLQDLKEQDFRKKLPKVRYKNVKQILESKVDISLKDAGRVNSYRYKLLDQLKSICSNIETSTGAKTKYNRNQVAELEKTHYFDALCVGTAKQEYSFQKGFKVLSIKATGRGTRQRTLLDKYGFPRAYRSRNKYVDNFKTGDLVKAVIPKGKNKGVYFARVSTRKSGYFRLDCFNGSKVDGVNSKYLNLLQRGAGYSYSFEDIA

SEQ ID NO: 5899 - protein, 424 aa, unidentified
LSGLIFSRTQRKEASTYAKGLCSQPARASADALHTGEGPSSSGCGQGKSETQNTVYHPAGVSASTKKEELFAANVIPRNDVVDLLSTRREFRRARRNRKTRYRKPRFDNRVRSKHKGWLAPSVEVKIQEHITAIKTVCRILPVSKVVVETAEFDLQLLKAIANGKPVPQGEDYQHGEMYGHYNVRQYVLWRDGYTCQYCGAHSTKKKEIRLHVHHLESRKTGGDAPGNQINLCESCHKKFHKGLILDGTLKKRKRKPNRDAAFMGIMRKTLIVRLRAELPIPIIETRGYITKAAREKLLVLPKSQTNDALAIAQGKHGFNVGYLPGIVQTDRIYTIRPVRHHNRQLHKATILKGGVRKANQAEKYICGFRLYDKVLYNGIECFVWGRRTSGSFLLRQLNGEKVKDGVSYKHLKLLERSQSYLVA

SEQ ID NO: 5900 - protein, 440 aa, Lactobacillus sp.
MKGVQAMQNRVFVINKHGKALMPCKPRKARILLRDGKAKVLKKEPFTIQLLYGSTGYKQDISIGIDSGQRHIGLAVTSQDKVLFQGEVELRQDVKKLIDTRRIYRRSRRNRKTRYRKARFLNRIAKKKDNWLPPSVASKVNHNINWIKRLLSVLPKADLHIEVGKFDIQKMKNPAINGESYQQGDLYGYQTVKQFVLARDNYTCQVCKKKGDKLKIHHIIYRSLGGTNTIDNLITVCSNCHTTKNHQTGILAKWCKDKKKVNKSYKGATFMNILRRRLFLAFPQAKFQYGAWTTLQRADLELTKSHYNDAVAISGIRKIKAKPTSIMMFKQFRKKKRSLHEATARKGRKTPNVTSKRNAKNTKYAKGFWLNDYVKIKDSNKKGYISGFMSKGTNVRLRDIFGEYVSNSDKSYTSTKNISLINHSNNWQRQVITEKQYIMG

SEQ ID NO: 5901 - protein, 425 aa, Caldicellulosiruptor sp.; identical to SEQ ID NO: 5366

SEQ ID NO: 5902 - protein, 427 aa, unidentified
MRVFVLDKNRKPLDPCHPAKARKLLKLGRARVLRRYPFTIIIKDLEVENCVTHDHQLKIDPGAKTTGLAIVQGDRVIWGAELTHRGEHIREALTSRRQLRRSRRNRKTRYRKPRFLNRTRPKGWLPPSLMSRVHNILTWVKKLIKLCPVTGISQELVRFDTQKMLNPEISGIEYQQGTLYGYELREYLLEKWKRTCAYCGAKNTRLEIEHIKPRSKGGSNRVSNLTIACHDCNQAKGNLEIEEFLSSKPNILKRILSQAKKPLADAAAVNVTRWKLQDELKLIGLPVEVGSGGLTKYNRCRQNLPKTHWLDAANVGKVETLYIEDYQPLLITAKGHGTRQICRTDKFGFPRLHCSPKKIHKGFQTGDIVRAVVTKGKKIGTYMGRIATRKTGSFDITTAKGRVSGISYKYCQAIHRKDGYNYQFYGG

SEQ ID NO: 5903 - protein, 509 aa, unidentified; identical to SEQ ID NO: 5057

SEQ ID NO: 5904 - protein, 442 aa, Lactobacillus sp.; identical to SEQ ID NO: 5193

SEQ ID NO: 5905 - protein, 512 aa, unidentified; identical to SEQ ID NO: 3493

SEQ ID NO: 5906 - protein, 410 aa, Bacillus sp.
MTHCFVLDAQGRRLSPTKEKRAWYLIRKQKAILKNKFPMVIQLKKEIPVDKIDSTPVHLGIDDGSKSVGIALVQECKGKNKPLFKGTIELRTDVKDKMTVRRGYRRYRRYHKKYRPARFNNRSSSKKEGRLAPSIRQKKDSILRVVNKLHKWIRINHISLEDVLIDIRALEKGHKAYKWEYQQSNRLDENIRKAVVLRDHNYCQDCGMTNTRMEVHHIIPRRLNGGNSIHNLITLCSTCHGNVTGDELNHSGRFLKKIKGRNIHYNDAMHVMQGKSYLQNELKKIAPLSLTTGGDTANKRIDWGIDKSHANDGIVICYLKVEPDQCELKNWTIKTMRKRSSKKVESVNGFHHRDFVKYTKRNGETYLGYITAFYLKKNQCNMTTIEGKILKRYGISRLSLIWRFSKIYWL

SEQ ID NO: 5907 - protein, 424 aa, unidentified
MRVFVFNMRGRPLMPCSQRKARLLLRENKAKIYKYHPFTIQLTYTTGETKQDCHIGIDTGSKYIGAAVRSEDKVFWKGEIELRQDIRSNLDTKRIYRRSRRNRKTRYRKPRFLNRKRRDEWLPPSLQSRINHTFHWIDTLSSLVPNPILHIEVGKFDVAKMINPEIHGVDYQHGQTYGFFDGRYFVFARDNYTCQCCGKSKNKILNTHHIIYRSNGGTNRVDNLITVCTDCLTSQNHRKGGIFYQWQEQHKKVKQYKEPPFMNTLRKRIFVAYPDAEITYGSETTPKRKAMKLDKTHYNDAIVISGINEIKENPEEWLLIKQFRKKKRSLHEATARKGRKKPNRNQTRNSKNTPYYKGFYLNDKVSVFGKSGYITGFTSNAAYIKDENNDYITLPNKTYKQVSINKMKLECHNNNWQYIIKNAV

SEQ ID NO: 5908 - protein, 424 aa, unidentified
MVYVLSKEGTPLMPTNRHGRVRHLLDAGEAKAVKRCPFTIQLLYQSTTYTQEITLGVDAGSKTIGLSASTEKKELYASETRLRMDITDLLSVRRQFRRTRRNRKTRYRKARFNNRVHAKHKGWLAPGIEAKIGTHFRAVRDVCRILPVTEIIVETASFNLQKIKALEKGEPVPEGTDYQKGDQLGFWNVREYVLWRDGYKCRCCNGKSKDQVLNVHHIESRKTGGDAPNNLATLCGYCHKQYHKGTILLPKSVRRGNSFRDAAFMGIMRRTFYNRLKEQYPRVAMTCGYITKNTRIRNSLPKTHYADARCIAGHPQAEPLEVYYFQKKVRCHNRQIHKSNILKGGKKKRNQAEYLVKGYRLYDRVRYQNREYYVFGRRASGFFDIRTLGGNKGNKGSVSCKKLRFLEPRKTMLIERRMQEREAV

SEQ ID NO: 5909 - protein, 443 aa, Anoxybacillus sp.
MVEENMTCFMQRKGENPMVFVLDTNKRPLAPCHEAVARKLLKQGKAAIYRRFPFTIILKKSVDESEIKATYRLKIDYGSRHTGLAILRGQEVVWLGQLDHRTDIKERIDKRRAFRRARRNRKTRYRKPRFLNRKRKEGWLPSSLESRVQNIQTWVNRLKKLCPIGYISYENAKFDTQLMRNPEINGVEYQQGTLQGYEVREYLLEKFGRKCCYCGKENVPLEVEHIIPKSRGGTDRVDNLCLACHDCNQRKGSKTAEEFGYPHIQKQVKESLKDASAINSTRWKAYEVLKQTGLDVECGTGARTKMNRIRLDLPKTHYFDACCVGESTTNHLYFKTKEVLFIKAKGRGSRSRTNLDRYGFPRGYLARQKFFFGFQTGDMVKAVVPRGKYQGVWFGEVACRKTGSFDIKGKDGKRIAQGINYRYVQVIQRFDGYAYGKGVAELA

SEQ ID NO: 5910 - protein, 416 aa, unidentified
MVYVLDKNGQPLMPTDRHRKVRLMLQSGQAKVIKRCPFTIQLNYDSGHQTQEISLGIDAGSKHIGVSTTTKIKVLYEVDVELRNDIVDLLSSRRELRRGRRNRKTRYRQAKFNNRRRGNGWLAPSIRQKIGTHLTVVENICKMLPISRIMVETASFDIQKIKNPDIQGAEYQQGDQLGFWNIREYVLFRDNHTCQCCKGKSKDKILNVHHIESRKTGGNAPNNLITLCETCHTGYHKGTVQLPKAIKRGMRFKDAAFMGIMRWAFYEALKQQYEPVGTPVHNTYGYITKHTRIEHNLPKEHYVDARCISGNPDAFPSGEYYYQKKVRCHNRQIHKLTVLKGGIRKQNQATYLVKGYRLFDKVSYQGKGYFVFGRRQSGFFDIRTLSGEKVNKGSLNCKKLKFIATRTYYLTERRAV

SEQ ID NO: 5911 - protein, 453 aa, Anaerotruncus sp.; identical to SEQ ID NO: 4664

SEQ ID NO: 5912 - protein, 458 aa, Lactobacillus sp.
LKGVGMMSEIKKVDYIYVVDSNGTPLMPTSRLGMVRRWLKTGQAKWFGNSRKTIQFVRPVTTNTQELTLGVDAGFHLGLSVVGNNREYYAAESLRKSEKDRITSRRELRRTRRNRLRYRKARFDNRRRKDSWLAPSIQHRLDFTIKEIKRLYMFLPITNLVVEVTPFDNQKLLNPDIQGWQYQKGKMYGFKTIKDYLLARDNYRDALDGKQYPASQLRVHHLVQRKDGGSNQPDNLVLLSDINHNQANHNNGILAKLRENRQKTLDYRGAYFMSILATRLSNYFDNYTITQGYLTANLRQKYEIEKSHLNDAFVIAGGTDITLRTNNVYSRQKLRNNNRVLQKFYDAKYIDSRDGKQKAGKELSSGRTRRSQELNYDNLRQFRKEKVKKGRVSIRKGHYQLRPHDVVLNTRTNRIETVKGVQNSGTVIKFQTGKTCSIKSVISLYHVNGILEKKMESI

SEQ ID NO: 5913 - protein, 420 aa, unidentified
MQYVYVLNRHGEPMMPCSPGKARLLLKQQKACVVKRTPFTIKLLYGSAGYKQPITLGVDAGSKHVGLSASTEKRELYREEFSPRNDVVKLLSTRKQNRRSRRYRKTRYRPPRFDNRVHSKHKGRLAPSVEVKIQEHITVIKHICKNLPITLVRVETAEFDTQRLKAMLAGKPLPVGTDYQLGEMYDEYNVRQYVLKRDHYTCQCCGAQNTAEKVVKLHVHHLESRKTGGNTPGNLITLCTTCHENLHKGKVTLDGKERGKPLRDAAFMGVMRKTLMARLKEELPIPVQGTYGYITKMRREKNDIKKSHTNDARCISKHPLAEPCSVCYRTKAIRHHNRQTHKANFSKKGIRKRSQIPYLVEGFRLWDKVLYKGQECFVSGRRSSGSFALKKLDGTSISKGVTFKKLRLLEPATNYLIERM

SEQ ID NO: 5914 - protein, 465 aa, unidentified
MSTCVCVLSNSGERLMPTFRLGKVRHLLKDGKAKIVKHHPFTIQLLYDSKTNTQPIEICEDVGYNYIGISVKSQSHEYVSAQYDTLQDEKACHDSCRKLRRTRRNRLRYRKPRFDNRKRGEGWLAPSLRHKKELNVNVVKMYCAVMPITHATVEVGSFDTMLVKAIQEGKAIPEGADYQKGPRYNLATSREAVFYRDNYTCQVCGRKVADGAILHMHHMFYWKGRHGDSLNELLTVCEKCHTPANHQKGGKLYGFGENVKFADLSGAAFMNTVRWQIVNELYAAFGKDFVTVTYGAMTKEKRIALRLEKSHNNDAYAMGEFHPNCRCTFEHYEKVRRNNRILEKFYDSRYIDIRTGEIATGKELFNGRINRNHKKDSENLHRYRGKRTYAGHRALLRKKVNLNPGDLVSLNGEVLVVHSTHTNKKGAVNVEFKTPGKSGQKSASLKKLKIVKAADSMHSAWEKIS

SEQ ID NO: 5915 - protein, 413 aa, unidentified; identical to SEQ ID NO: 3587

SEQ ID NO: 5916 - protein, 236 aa, unidentified
MSTIYVLSKDGKPLMPNFVHKETAWQEKLAKKKTGLNKRYGALSVLNQIIPALTKELSSLFLVTTGKSTYDYRAAHGVSKDHWLDAYCIAGSILPNDVCDNNINNRVPYELKQFRRHDRRALHKENMSRVYTLNGKKVATNRHKAIEQTTDSLEEFRQNHPDDVCKLKVKEHHQEYRNPGRNFPGCVFLVGKHTHVMQGTSGSHNGKADGYYDTNGNSYSSGKCKFVAKNEGIVFT

SEQ ID NO: 5917 - protein, 494 aa, unidentified; identical to SEQ ID NO: 5675

SEQ ID NO: 5918 - protein, 420 aa, unidentified
MIYVRSKDGKALMPSERGGRIGYLLRHGKAHVVSRVPFVVQLDYESTTYTQEVSLGIDAGSKHIGVSASSEKKELLAAQVELRSDVVNLLSARMELRRTRRNRKTRYRKSRFDNRKRMDGWLAPSVKQKVESHLKVIRLVHKLLPITKTTIEVAQFDAQKIKNPDIKCDKYQQGEQMGFWNVREYVLARDGHRCVHCKGKSKDPILNVHHLESRKVGGNSPSNLVVLCETCHKAYHRGEFDLKIKRGTTLRDAAVMNIMRWSVYERAKAEFGNVYLTYGYITKHTRIENGIAKTHAADAFCIAKNVNAMRLSFFFMCRCIPRHTRVLHVANPKKDGIRRSTIASHKIGKSRFQRFDMVRWRGKECFIFGSTKGRPVLRDIKGIKMHENNSVNIKTISFLKRLRNDILVEEKTSESFHNYK

SEQ ID NO: 5919 - protein, 431 aa, Escherichia sp.; identical to SEQ ID NO: 3801

SEQ ID NO: 5920 - protein, 418 aa, unidentified; identical to SEQ ID NO: 4950

SEQ ID NO: 5921 - protein, 420 aa, unidentified; identical to SEQ ID NO: 3089

SEQ ID NO: 5922 - protein, 427 aa, unidentified
VSKILVIDQNKRPLDLIHPAQARQLLRNKKAAIYRQFPFTLILKEPRPKSPVSPLRLKIDPGAKTTGIALVNDTTGEVVFAAELKHRGFAIRDALISRRQLRRSRRSRKTRYRKPWFLNRTRPSGWLPPSLQSRIENIKTWVEKLCRFAPITAISQELVCFDMQLVRKPDIQGKEYQQGTLAGYETRQYLLEKWNRQCSYCGIKDVPLQIEHIHPRAKGGSNSITNLTLSCEKCNTKKGTKDIKEFIKKDPSKLEKILKQAKKPLADAAAVNTTRFALLEVLKTSGLPVETGSGGLTKFNRSQQKLEKTHWLDAACVGKSTPTLNTQGVKPLLITANGHGSRQSCRTDKFGFPNRHVPREKIHFGFQTGDIVRAVVTTGKKIGNYLGKVAIRSSGSFNISTKNGLVQGISHKFCKRIHAKDGYSYAY

SEQ ID NO: 5923 - protein, 515 aa, unidentified; identical to SEQ ID NO: 5111

SEQ ID NO: 5924 - protein, 416 aa, unidentified
MVYVLDKNGQPLMPTDRHRKVRLMLQSGQAKVIKRCPFTIQLNYDSGHQTQEISLGIDAGSKHIGVSTTTKIKVLYEVDVELRNDIVDLLSSRRELRRGRRNRKTRYRPARFDNRRREDGWLAPSIRQKIGTHLTVVENICKMLPISRIMVETASFDIQKIKNPDIQGAEYQQGDQLEFWNVREYVLFRDGHTCQCCKGKSKDKILNVHHIESRKTGGNAPNNLITLCETCHTGYHKGTVQLPKAIKRGMRFKDAAFMGIMRWAFYEALKQQYEPVGTPVHNTYGYITKHTRIAYNLPKEHYVDARCISGNPEASSNGEYYYQKKVRCHNRQIHKLTVLKGGIRKQNQATYLVKGYRLFDKVSYQGKGYFVFGRRQSGFFDIRTLSGEKVNKGSLSCKKLKFIATRTYYLTERRAV

SEQ ID NO: 5925 - protein, 456 aa, unidentified
MSTCVCVLSNNGERLMPTIRLGKVRHLLKDGKAKIIKHHPFTIQLLYDSETNIQPIEICEDVGYNYIGISVKSQSHEYVSAQYDTLQDEKSCHDACRRMRRTRRNRLRYRQKRFDNRKRDKGWLAPSLKHKKELNVNVIKMYCEVVPITHATVEVGSFDTMLVKAIEEGKATPEGADYQKGPRYNLATLREAVFYRDNYTCQVCGREASEGAILHVHHMFYWKGRHDNSLSELITVCEKCHTPANHQKGGKLYGFGENVKFADLSGAAFMNTVRWQIVNELYAAFGKDFVTVTYGAMTKEKRIALHLEKSHNNDAYAMGNCHPAHRCEFGHYQKRCRNNRVLEKFYDATYIDTRTGDKAKGKELFNGRISRNHKKDSEDLHKYRSKKVSKGRRSIRRQRYAIQPYDTVRLESKSYITSGCHNKGTRLLIPANGKSKSVAISKVQVVCHAGAWIQII

SEQ ID NO: 5926 - protein, 471 aa, Caldicellulosiruptor sp.; identical to SEQ ID NO: 4560

SEQ ID NO: 5927 - protein, 415 aa, Bacillus sp.; identical to SEQ ID NO: 2431

SEQ ID NO: 5928 - protein, 431 aa, Petrotoga sp.
MEKRSVQRVFVLDKNKQPLMPCHPARARELLKKGKAAVFRYHPFTIILKDREGGDTQPIQVKIDPGSKYTGVALVADFKRGKKVIWASVIYHRGHVIKKNLDTRRGVRRSRRNRKTRYRKPRFLNRKRKEGWLPPSLISRAENILTWVKRIRRFSPVTSISMELVRFDTQKLQNPEIKGVEYQRGTLYGYEVKEYLLEKWGRKCVYCGKENVPLEIEHIVPKSKGGSDRISNLTLACHECNQKKNNQSIDEFLANNPKKLNQIKARAKGPLKDVASVNATRWYLFNQLKKEGLPIEVGTGGQTKYNREMQNYSKKHWIDAACVGESGYNVQLEPDMQVLEITAMGHGMRRICFVDKYGFPKSYRPKERTYMGYKTGDIVLANVPKGKNKGIHIGRIAIRHRPSFLLNGVGDVHPKYLTLLQKNDGYGYQIF

SEQ ID NO: 5929 - protein, 473 aa, Calothrix sp.; identical to SEQ ID NO: 3997

SEQ ID NO: 5930 - protein, 413 aa, unidentified; identical to SEQ ID NO: 2636

SEQ ID NO: 5931 - protein, 417 aa, unidentified
MPCSPAKARLLLKEKKAIVKRRTPFTIQLTIATGEARQPVTLGVDSGYKHIGLSATTEKDELYASQVELRQDITDLLSARLALRRSRRSRKTRYRAPRFDNRVASKRKGWLAPSVENRIAAHMSRVEAVMRVLPVTAITVETAAFDTQLLKNPDIAGEAYQQGEQLGFWNVREYVLFRDGHVCQHCRGKSKDPILNVHHIESRRTGGDAPNNLITLCETCHKAFQRGEIKLKVKRGKSFKAETFMGIMRWTLFERLKKAHPELRVRNTYGYLTKHKRISHGIAKSHCADAYCIADNLGAKRLEGFFFQKQTRKHNRQIHKLSILKGGLRKKNQAPYEVKGFRLFDKVICKGEEAFIFGRRTSGSFDVRRLDGTRISAGISCKKLRLLEPRTTYLTEFRKEAALPPLHKCRSFRAEFL

SEQ ID NO: 5932 - protein, 419 aa, Anoxybacillus sp.; identical to SEQ ID NO: 5328

SEQ ID NO: 5933 - protein, 221 aa, unidentified
YTCQCCGAHTTAKKLVKLHVHHLESRKTGGNAPSNLITLCTTCHKNLHKGKVTLDGKERGKPLRDAAFMGIMRKTLMARLKKELPIPVQGTYGYITKMRREQNDIKKSHTNDARCISKHPLAEPCSVCYRTKAIRHHNRQTHKANFSKKGIRKRSQMPYLVEGYRLWDKVLYKEQECFVSGRRSSGSFTLKKLDGTSVSKGVTFKKLRLLEPATNYLIERM

SEQ ID NO: 5934 - protein, 432 aa, Calothrix sp.
MEGHMSKIFVIDTNKKPLNPIHPAQARQFLKNGKAAIFRRFPFTIILKSAATPETTVKPLRIKIDPGAKQTGISIINDTTGEVTFASELKHRGFAIRDALTSRKQLRRSRRNRKTRYRKPRFLNRKRSKGLLAPSLQSRIDNIITWVERYRKFAPIQAISLELVRFDMQLMRNPDIEGKEYQQGTLAGYETREYLLEKWNRQCAYCGAKDIPLQIEHIKPRAKGGSNSITNLTLSCEKCNIKKGTKDIKEFLKKKPDVLAKILKQVKQPLADAAAVNTTRFALLEALKKTGLPVETGSGGLTKFNRNQQQLEKTHWLDAACVGVSTPKLIIKGIKPLIITATGHGSRQACGTDKYGFPSRYVPRFKFVKGFQTGDIVKAEVKTGKKVGIYTGRIAVRSTGSFNISTAKGLVQGINFKFCKAIHKKDGYGYSY

SEQ ID NO: 5935 - protein, 504 aa, unidentified
MGGNSELVILTYLIKTLYNIGDGNHPQMWRNLVCCTIYLVHCSIQKEDVNHFIRKEATIMVAVLSSIGTKLMPTSNYRARKLLKKERAKIYKYRPFTIQLLDREEGDTQPIEYKCDTGYQHIGISICSQKHEYVNLQVDMLKDETERHNDQRKYRRTRRNRLRHRAPRFKNRVSSKKKGWLAPSVRHKKEIHIQWFKKYYEVMPITDATFEVGEFDTQLLKALQTGSPIPTGNMYQQGPRYKISTLRNAIFTRDNYTCCICGNGIPQNTILCVHHIGYWCGDRTDRLDNLLTVCTKCHVPANHQPGGILYGLKPKLKNFKGATFMTIIRWQLLDELKTNFPDIDFHATYGSETKERRRILKVKKSHSNDAYVMGDFHPKHRTDFVLLTKKRCNNRILEKFYDAKYIDSRDGSKKSGKDLSSGRTRRGIYSTNLRCYRQQKVSKGRRSIRRNHYLLQPHDVVIWNNQKYTVKGVHNNGTRVILKKNNKSVKISDIKIIRHCNGYY

SEQ ID NO: 5936 - protein, 468 aa, unidentified
MQKLDVELKNAPIDAPQVYSTATYPLNRVEKLSVGNGKLASNNLDVDQPQHREGQNLRVSAIVYVLNQRGSPLMPTSPRKAKQLLKTGKAKVIKRFPFVIQLNYSTGETKQAVKCGVDTGYQHVGISVVSNKKELFSAELVLDGKTSDRLTERRMYRRNRRNKLWYRKPRFINRVKKSSWLSPSVQRRLDAQVNLICKVHSILPISELTIEVANFDIQKLNNPDIKGKEYQQGSLHEYENVKFYLLSREHGKCQLCGKDFEVGNGSHVHHIIPRSKGGTDKPDNLSILHKKCHDKLHKNKLFDKLKKNKQYKPSTFMSTIQHRFGEIFEGCKITFGYETKIKRNRLNIEKSHINDAFVISDGTDEIRCKPFGIIQKHRNNRGVQLNRNGFKPSIRKQRYAIQPNDLLTVDNKIYISNGTHKYGKAVVCHNQQGEKFDFHIKKVQKCFHFGSLVWNIQQSKEERERKCG

SEQ ID NO: 5937 - protein, 447 aa, unidentified
LKGLSRTCGSLRFKEKTLKVFVINKRGKPLMPCKPAKARHLLRDGKARVVRRTPFTIQLTIATGENVQPIHLGVDAGSKHIGLSATTEKEELFSSEVELRKDITDLLSSRREMRRARRNRKTRYRAPRFDNRVHAKNKGWLAPTLENKISAHLSRIKAIRAILPVSRITIEVASFDIQKIKNPEIEGEQYQQGEQLGFWNVREYVLFRDGHKCCHCHGKSKDPILNVHHIESRKTGGDAPNNLITLCETCHKAYHAGKIQLTSKRGKKFTDATHMGIMRWELLKRAKEANLGIPVKATFGYITKARRIQFGIAKTHCADAFCIAGNLNAKRLGEYLYQKQTRKHNRQIHKMAILKGGYRKRNQAPFEVFNFRLFDKVRFGGNVGFVFGRRTSGSFAVRTLFGEKLSEGVSYKKLSLLERRTTFLTQLVKEGAIPPVSKDTGFLARFL

SEQ ID NO: 5938 - protein, 468 aa, unidentified
  REGION 1..468: note = Ga0373625_0035836
MRGQFLALSLPIMSAGVRHEGWWPSKLLSPSEANLYPRKGGFRLVFVLSADRQPLDPCTHRRATILLNKRRAAVLRRYPFTIILKDRILAESVTQGHRIKIDPGSKTTGIALLQEATNRVVWAAELAHRGQAIRGALLVRRQIRRSRRNRKTRYREIRFLNRQRPKGWLPPSLESRIANILTWVRRLTTFCPVESLSMELVKFDTQVMQTPEISGVEYQQGTLAGYEVRDYLLEKWGRKCAYCGDTGPLQIEHIILKARGGSNRVSNLALACDSCNRAKGNKTAAEFGHPEVEAQATKPLKDAAAVNASRWALYGRLQQTGLPIEVGTGGRTKFNRTRLGLPKAHWTDAACVGESTPDNLRVDGVSSLTIKATGHGRRQRCGTDKYGFPIRHAPRAKSFMGFRTGDMVKATIPAGKYQGIHVGRIVIRFRPSFRLNGFDVHPKRLKMLCHCDGYDYKMKGEIGHSSPD

SEQ ID NO: 5939 - protein, 456 aa, unidentified
MSTCVCVLSNSGERLMPTFRLGKVRRLLKDGKAKIVKHHPFTIQLLYDSKTNTQPIEICEDVGYNYIGISVKSQSHEYVSAQYDTLQDEKACHDSCRKLRRSRRNRLRYRQKRFNNRKHDKGWLAPSLEHKKELNVNVIKMYCEVMPITHATVEVGSFDTMLLQAIQKGKSKPEGVDYQKGPRYNLATLREAVFYRDNYTCQVCGRKIADGAILHMHHMFYWKGRHGYQLDELVTACEKCHTPANHQKGGKLFGFGEDKEFANLSGAAFMNAVRWQIVDALHATYGKEFVTITYGAMTKEKRIILGIEKTHNNDAYAMGDYHPVHRCVFRHYQKRCRNNRVLEKFYDATYIDTRTGNKAKGKELFNGRISRNHKKDSENFHKYRSKKVSKGRRSIRRQRYAIQPYDTVRLESKTYITSGCHNKGTRLLIPANGKSKSVAVSKVQVVCHAGAWIQII

SEQ ID NO: 5940 - protein, 384 aa, Halomonas sp.
MAVFVLDKGKQPLMPCREKRARLLLERGRAVVHKQRRAFRRRRRSKNLRYRAPRFDNRTRKAGWLPPSLQHRVDTAMAWLERLSKLAPITATSQELVRFDTQQLDNPEISGVEYQQGTLLGYEVREHLLEKWGRECAYCGTGDTPLEIEHVVPRSRGGSNRVSNLTLSCHDCNQAKDALLLADFFATDKGLKKRLKANGLSASARLERVQHELKHPLRDASAVNATRWALLTALKATGLPVTVGTGGRTKYNRQRLDIPKTHALDAACVGVFGSLHTWAVPTLTIKATGRGSYQRTRLTKHGFPRGVLMRQKQVHGFQTGDMVCACVPTGKKAGTHTGRVAVRKTGSFNIQTEQGAVQGISHQHCTLIQRGDGYGYHLTASINL

SEQ ID NO: 5941 - protein, 540 aa, unidentified
MVPKKRKEASRMSDYIYVLGMDENPQMPTRRKRHVEKLLQTGRARIFRHVPYTIQLTYENDPVLQPITLAEDPGRSNIGMAVVSLSGELLSAAVVQTRNKEIVKLMEKRKQHRRASRNGERKARQRLAKKCHTMLKVGSLMRKLPMYGKDKRVKCLVIRNTKARFCNRKRKDGWLTPSAEHLVRTHINLIHKMQKFLPITDVAIEINRFAFLSLEDPSVSGVDFQKGPLKGYDNLNAAVEDLQDGHCLMCDRPIEHRHHIVPRSMQGSNTIENIAGLCCKCHEKVHKNAAFEKRLKKKKAGLDKRYTAVSVLNQAIPFICKRLEQEFGKEHVHYCSGKDTAMVRRSFGYHKTKEEQLHEVDAWCIAVLSLQQIQEKAPEFDHVYKIMQFRRQDRSRIKAQTSRTYYYEGKKVAKNRKKAEGQKEDSLQEWRECQVTLYGENQARKMVCHLKVRKSIRRYNRLDRLMPGAVFYYKGSRYVMRGQHCEGRYLQAAGMGTKDFPVKDCKIVAHNQGLVFVYRGNERINETFNKDHARKRVNEK

SEQ ID NO: 5942 - protein, 493 aa, unidentified
MAAVYVISASGKTLMPTTRCGHIRGLLNAGKARVVEREPFTIQLKYETPDVTQPLYLGIDPGRTNVGSAVVREDGECVFTAQLTTRNKDVPKLMKARKQFRMAHRRLKRRCKRQRRAKAAETLSQKGEFQRLLPGYEEPILCKGIRNKEARFNNRQRPAGWLTPTANHLLLTHLNMVKKLQKLLPITDVVLEVNRFAFMAMENPSIRRWQYQQGPLYGKGSVEDAVYAQQDGHCLFCGKPIAHYHHVVPQHKNGSETLENRVGLCNEHHDLVHKDRAWDAKMKETKAGLNKKYHALSVLNQIIPALTEQLTAMFPQHAFVTTGKDTADFREDYGIAKEHHLDAYCIACSVLAEPTKVAAPTGKPHRLMQFRRHDRQVCHKENIKRVYLSEGKAVATNRHKAIEQKDDSLEEFRKTHTQQEVSALTVKDHQPVYKDMRRFMPGGVFLFNGKVHTLQRSHGRYKGMPFYYIDTDGSKNHAKGCIFLQQNCGLRWV

SEQ ID NO: 5943 - protein, 488 aa, unidentified
  source 1..488: note = Euryarchaeota archaeon
MQKLLVEFENTSGDAPQVPCSVSEALNREETLSVPYKVLANNSSAQDQHSGKSGQVLSVPVINMHGKPLMPTTPRKARVLLQQGKSRVVQRSPFTIQLCYLTGKYTQNIKLGIDAGYSTIGFSVISDKSELLSGELTLRKRISKLIEQKSNYRKTRRSRLWHRKPRFNNRSISTGWFAPSIQHKLETHLRLIEKLKKILPITKMTVEVASFDQQKLHNPEIKGIEYQQGELQGYEVREYLLEKWKHKCAYCGKKNIPLEIEHIIPKIRGGTDRVSNLTIACHKCNQKKGNKTAAEFGHPEIQNKAKRALKSTAFMNIVRWRLVNTLKCDRTSDCVKTLYFVNFLPPFVISWTYITYFSCKHEFSHNLTYGYITKHDRIKLDIEKSHVNDAFVIAGGTTQNRAKSYELTQTRRNNRSIQTNRKGFKPAIRRQRYKLQPNDLVKYIKSLYKVKGVHSYGKYAIVVDKISKLFDINIKKIELVKYGKGIQF

SEQ ID NO: 5944 - protein, 428 aa, unidentified
LKVFVLNMRGRPLMPCSPARARHLLKAGKAVVRRRTPFTIQLRIATGETKQSVTLGVDAGAKHVGLSAATEKEEVFASEVELRQDITGLLAARLSLRRDRRHRKTRYRAPRFLNRVRSKHKGWLAPSVENRIQAHMSRIDAVCRLLPVTKIVIETASFDIQKIKDPSVEGTDYQQGDQLGFWNVREYVLFRDGHVCQHCHGYSKDKILNVHHLESRQTGGDAPNNLITLCERCHKACHAGKIKLKVKRGQSFREEAFIGIMRWTLLDRVRKAHPGLPVENTYGYLTKNTRITLGLPKAHCVDAYCIAGNLKAVRRGVYLHQRQVRKHNRQIHKCTVLSKTLKDGTKIGYRKLNQTPHLVKNFRLFDKVRCLGQTGFIFGRRSSGYFDVRRLDGVKLSSGISYRKLTLLEKRSTYLTELRKEDGASSPV

SEQ ID NO: 5945 - protein, 426 aa, unidentified
MPKVYVLNRHGRPLMPCTPAKARHLLDAGKAKVRHRTPFTIQLLYGSTGYTQEVILGVDAGSKTIGLSAATETEELFSAEVKPRNDVVELMSARRQFRRARRNRTTRYRKPRFDNRVRSKHKGWLAPSVEVKIQEHMTAIRRACAILPVSKVVVETAEFDLQLLKAVAEGKPVPQGEDYQKGEMYGHYNVRQYVLWRDSYTCCICGVHGSVRKGVPLHVHHLESRRVGGDAPDNLVTLCTACHDKLHKGIIMAADIKKRKRRSTRDATFMGIMRMTLLRRLREQLPVPVVETRGYITKATRENLLVLPKSHANDALAIAHGPQGFRAEHLPNIRQADRLYTIRPVRHHNRQLHKATILKGGVRKTNQAEKYICGFRLYDKVLYNGIECFVWGRRTSGSFLLRQLNGEKVKDGVSYKHLKLLERSQS

SEQ ID NO: 5946 - protein, 406 aa, unidentified; identical to SEQ ID NO: 2752

SEQ ID NO: 5947 - protein, 512 aa, unidentified
MSTVYVLNKDGKPLMPTTRCGHVRYLLKEKKARVVASKPFTIQLLYETDDVVQPLYLGIDPGRSNIGVAVVKTDGMAVFTAHLETRNKEIPKLMKKRKDSRRARRTNGRRCRRQRRAKANGTISKKCVKQTTAQNGSVSKRAKEIGVIKRHLPGCEKDILCIGIKNKEAKFNNRTRPTGWLTPTANQLLQTHINLVKKIQKFLPISDVVLEVNKFAFMQLDNPNIQKWQYQKGPLYQKESLKSAVSEMQEHHCLFCKKKIDHYHHVVPQHKNGSNTIDNIVGLCTQHHDLVHKDATWQKRLAKKKTGLNKKYGALSVLNQIIPALTKELSSLFPKHFFVTNGKSTYDYRAAHGVSKDHWLDAYCIACSVLPNDTCDKTINSRVPYELKQFRRHDRRALNNENMSRVYTFNGKIVATNRHKATEQTTDSLEEFRQRQPNDVCNLKVKEHHPTYRNMSRNYPGSIFLVEKQVHIMQGIAGSKDGKATTYKDTNANSIAAGKCKFVAKNSGILFV

SEQ ID NO: 5948 - protein, 416 aa, unidentified
MVYVLSQHGQPLMPTENHAKVRALLKHGKAKVIQRCPFTIQLLYESTTHTQKINLGIDAGSKTIGVSATTDSKVLYESEVVLRNDIVELLSGRRALRNSRRSRKTRYRKPRFDNRKKPDGWLAPSIRQKIETHVTVVGNVMKILPVTKIIVETASFDIQKIKNPEIEGEGYQHGEQLDFWNVREYVLFRDGHTCQCCKGKSKDNILNVHHIESRKTGGNAPNNLITLCETCHKAYHKGIITLPNEIHRGMRFRDAAFMGIMRWAFYDRLKELYNPLGAEVINTYGYITKNTRIEHGLPKEHYVDARCISDNPAAKPLDHYYFQKKVRCHNRQIHKNTILKGGIRKRNQASYEVKGFRLYDQVLWKGQKCFIFGRRSTGRMDLRLLDETHINASVGHKNLKLLSMRKNYLIEQRKAG

SEQ ID NO: 5949 - protein, 431 aa, unidentified; identical to SEQ ID NO: 3801

SEQ ID NO: 5950 - protein, 349 aa, Akkermansia sp.
  VARIANT 349: note = X can be any naturally occurring amino acid
MPCSPAKARLLLKEKKAIVVRRTPFTIQLTIATGESKQPVSLGVDAGYKHVGLSASTEKAELYESEVELRQDVSDLLSARRALRQSRRNRKTRYRAPRFDNRIRTKRKGWLAPSVENRINAHLSRIETVLRLLPVTKITVETASFDMQLLKDPDISGKEYQEGEQLGFWNVREYVLFRDGHVCQHCHGRLKDPVLNVHHLKSRRTGGDSPGNLITLCETCHKALHRGEITLKAKRGQSFRAETFMGIMRREVLDRLKASHPKLEVQNTYGYRTKHARISNGIAKSHCADAFCIAGNLGAKRLGEFLFQKQTRRNNRQIHKLSILKGSLRKRNQAPFEVKGFRLFDKVAX

SEQ ID NO: 5951 - protein, 431 aa, unidentified
MDAWDIIVILNKRGKPLMPCSPAKARLLLKEKKAIVKRRTPFTIQLTIATGEAKQPVSLGIDAGYKHVGLPASTEKAELYASEVELRQDITDLLSARRALRQSRRNRKTRYRAPRFDNRISTKRKGWLAPSVENRINAHLSRIEAVLRLLPVTKITVETASFDLQLLKNPDISGKEYQEGEQLGFGNIREYVLCRDGHVCQHCYGGSKDPVLNVHHLESRRTGGDSPDNLLTLCETCHKALHRGEITLKTKRGQSFRAETFMGIMRWEVLNRLKASHSELKVHNTYGYLTKHARIENGIAKSHGADAFCIAGNLGAERLGEFFFQKQTRRNNRQIHKLSILKGALRKRNQAPFEVKGFRLFDKVACQGEEGFIFGRRSSGFFDVRKLDGTRISAGISYKKLHLLEKRQTYLIEIRKEEAFPPLPEGRGLRA

SEQ ID NO: 5952 - protein, 427 aa, Enterococcus sp.; identical to SEQ ID NO: 5630

SEQ ID NO: 5953 - protein, 420 aa, unidentified
MQYVYVLNKHDEPLMPCSPRKARLLLKQKKAHVVKRTPFTIKLLYGSAGYKQPITLGVDAGSKHVGLSASTEKRELYREEFTPRNDVVELLSTRKKYRHSRRYRKTRYRAPRFDNRVHSKHKGWLAPSVEVKIQEHITVIKRICRILPIALVRVETAEFDTQRLKAMLEGKPLPVGTDYQLGEMYDEYNVRQYVLKRDYYTCQCCGAHTTTKKTVKLHEHHLESRKVGGNAPSNLITLCTTCHDALHKGKVSLDSKKRGKPMRDAAFMGIMRKTLMARLRDELPIPVQGTYGYITKMRREQNGIKKSHVNDARCISKHPLAEPCSVCYRTKAIRHHNRQTHKANFSKGGTRQRSQMPYVVEGYRLWDKVLYKGQECFVSGRRASGSFTLKKLDGTRISKGVTFKKLRLLEPATNYLIERM

SEQ ID NO: 5954 - protein, 427 aa, Enterococcus sp.; identical to SEQ ID NO: 2410

SEQ ID NO: 5955 - protein, 429 aa, Moorena sp.
MCNYVFVLDANHKPLNPCRPVTARKLLTAGKAAVYRRYPFTIILKKQVEAEPKPMSLKIDPGSKMTGLAIVYGNQVVWSAEIEHRGSKIKSALDSRRAVRRSRRNRKCRYRKPRFNNRKRPEGWLAPSLQHRVATTMTWVLRLIKLTPIGSISQELVRFDTQKLQNPEISGIEYQQGELMGYEVREYLYQKWDRQCVYCGAHSVKLEIEHIVPKSKGGTNRVSNLTLACHRCNQAKGNLNAQDFLLGKPDVLKRILARAKQPLLDAAAVNSTRWKLYQSLKKTGLSVEVGTGGRTKYNRIKLGLPKSHWIDAACVGEVATLEIVTRQPLLIKAMGHGCRQVIQMDKYGFPRKGYKPKHPVKGWKTGDIVNVVAGKNAGLKGVRIKTVRAKGNFDLIGADQDSSNKVLSASRNYIQCVHRQDGYYYSFAK

SEQ ID NO: 5956 - protein, 456 aa, unidentified
MSTCVCVLSNSGERLMPTFRLGKVRHLLKDGKAKIVKHHPFTIQLLYDSKTNTQPIETCEDVGYNYIGISVKSESHEYVSAQYDTLQDEKEHHDDCRKYRRTRRNRLRYRKSRFDNRKRDKGWLAPSLEHKKQLNISLIERYVSVIPITHVTVEVGSFDTMLVKAIQEGKVIPEGADYQKGPRYNLATLREAVFYRDNYVCKVCGRKATEGAILHMHHMFYWKGRHGYQLDELVTVCEKCHTPANHQKGGKLYGFGKDKKFANLSGAAFMNAVRWQIVNALYATYGKEFVTITYGAMAKEKRIALQLEKTHNNDAYAMGDYHPARRCKFRHYQKRRRNNRVLEKFYDATYVDTRTGNKAKGKELFNGRISRNHKKDCENLHKYRSKKVSKGRRSIRRQHYAIQPYDTVRLEGKTYITSGCHNKGTRLLIPVNGKSKSVAISKVQVVCHAGAWIQII

SEQ ID NO: 5957 - protein, 442 aa, unidentified
MVTVQQSTHHLPFGRVFIRRNLFMVYVISQDGKPLMPCSDPIARLLLKQGKAKVKKREPFTIKLTYETTNYTQGLTLGVDTGSGTIGTAVSKDNGDIVYMSEVVVRNDITDKMTQRAKYRRNRRNRKTRYRKARWLNRASSIKKDRFSPTMQSKLHSHVREIEYIQSILPVTEMVFETGQFDMHLMKNPSLANPKVRPWGYQKGANYGFENTKAMVLNRDNYTCQCCKGKHKDSKLEVHHIVFRSQGGSDEESNLLTLCHTCHKDLHSGKINPKLSGKVKGNLKYATQMNSTRKQLFRFYPNAIETFGYVTKVNRLHLGVAKEHYYDACTIATQGNAFNVKSNLYKKKCVSDGDFQKTKGIRSEQPIVTDKICGFRKFDKVRYFGNDYFIKGRMSTGYAILMDIDGNKIDFSTMPRGYKTPKLSNCKRITARSTVMTQVKVV

SEQ ID NO: 5958 - protein, 267 aa, unidentified
VDGCDAGKPVPQGEDYQKGEMYGHYNVRQYVLWRDDYTCQCCGAHATKKKEVRLHVHHLESRKVGGDAPDNQVTLCESCHEKLHKGLIAEKDFKKRKRRSTRDATFMGIMRKTLMQRLYSELPIPVVKTRGYITKATREKLLVLPKSHTNDALAIAQGKRGFNVGYLPEIAQIDKICTIRPVRHHNRQLHKAAILKGGIRKSNQAEKYVFGYRLFDKVQFNGQDCFIWGRRTTGIFTIKTINGKMIKDGISFKKLKPVEKSTSYLIA

SEQ ID NO: 5959 - protein, 528 aa, Caldicellulosiruptor sp.
VGDAVAVPDVPGQHSPFRETAVKSRSPTQGATARLRETYHLYKRCPDHRAPFTGGRKMLLFTIDRNGKPGHPTRRFDMVRKLVKRRRAKIIGGGASGKPPVVMFLDREFDYSKTVSRKLIIVLDPGYHCIGFVVCELKGGKLIVYCTGILVSRIPEIKELITERKAHRRNRRYYSRCKKKRLSARQNRVLLKFKVPRTVRDRDRLNATLRHGIETHLNLYKKLLKFFPFPAEQVVFVMEDNIFDVRTMTWGKTDGTGYQKSPRVPAEKKCIICGSKEKLQKHHLIQRKYGGTDIRENVVYLCRDCHEDVHAGRVYIPVEGVRQWRALGTVNAIIGRLREIPWLKFVPASDVAQMRKRLGLEKGHANDALATAAVFCNCTETDRTHMIELTLVKFRRHNRARIHAVRDRLYKVNGKIVAKNRRKRTDQKEPSFADISPLSPEIQRKLKVYPGTKILNPLRKETPTIAGDVWIYEPTGKRFVATGVVSQKYLYSPQLEKIVGKTYVKPEECKRVLRNEGIVVMYNSLYHN

SEQ ID NO: 5960 - protein, 412 aa, unidentified; identical to SEQ ID NO: 3155

SEQ ID NO: 5961 - protein, 473 aa, unidentified
  REGION 1..473: note = IscB polypeptide
MAVLVLDRRKKPLMPCTEKRARLLLERGRARVHRMVPFTIRLVDRAMEQSAMQPLHLKLDPGSKVTGIALVRDCENMDAKTGEVRKAAHALVLIELTHRGHAIRDALTARRAFRRRRRGANLRHRAPRFDNRKRPAGWLAPSLQHRVDTTMTWVRRLQRWAPVTAISQELVRFDTQALQNPEISGVEYQQGTLAGYEVREYLLEKWHRTCAYCQVTNVPLQVEHIVPRAKGGGNRISNLTLSCGPCNAAKGAQDVREFLAHDPQRLARILAQAEAPLKDAAAVNSTRWALFEALKATGLPVETGTGGRTKFNRTRFDLPKTHAIDAACVGEVERVTGWQVPTLAVKATGRGSYQRTRLTKHGFARGFLTRRKRHFGFQTGDLVRAEVPTGQKAGTYTGRVAVRASGSFNVQTASGVVQGIGHRHCRRMQRGDGYGYHHQPTVAQPSKGEREQGRASHAALSIPGVNAEVSRAN

SEQ ID NO: 5962 - protein, 443 aa, unidentified
VVKANGTAVFTAHLETRNKEIPKLMQDRKKARRARRTNGRRCRRQRRAKANGTISKKCVKQTTAQNGSVSKRAKDIGVIKRRLPGCEKDVLCIGIKNKETKFTNRTRPEGWLTPTANQLLQTHINLVKKIQKFLPISDVVLEVNKFAFMRLDNPNIQKWQYQQGPLYKKESLESAVSEIQEHHCLFCKKPIDHYHHVVPQHKNGSNTIGNIVGLCAKHHDLVHKDSAWEKKLAQKSTGLNKKYGALGVLNQIIPTLTNELSSLFPKHSFVTNGKSTYDYRAAHGVSKDHWLDAYCIACSVLPSNVCDSNINNHMPYVLKQFRRHDRRVLNNENMTRVYTLNNKAVAINRHKAKDQKTVSLEEFRKEHPDDVCKLKVKEHHPTYRNMNRNFPGSVFLVGKQIHVMQGIASSKDGKATKYNDTSATAIAAGKCKFVAKNTGILFV

SEQ ID NO: 5963 - protein, 414 aa, unidentified
MPCSPAKARLLLKEKKAIVKRRTPFTIQLTIATGETKQPVSLGVDAGYEHVGLSASTEKAELYASEVELRQDITDLLSARRALRQSRRNRKTRYRAPRFNNRLCTKRKGWLAPSVENRINAHLSRIKAVLRLLPVTKITVETASFDLQLLKNPDISGKEYQEGEQLGFWNIREYVLCRDGHVCQHCYGRSKDPVLNVHHLESRRTGGDSPGNLITLCETCHKALHRGEITLKAKRGQSFRAEAFMGIMRWEVLNRLKASHPELEVNNTYGYRTKHARISNGIAKSHCADAFCIAGNLGAERLGEFFFQKQTRRNNRQIHKLSILKGGIRKRNQAPFEIKGFRLFDKVACKGEEGFIFGRRSSGFFDVRKLDGTRISAGISCKKLHLLEKRRTYLTEIRKEEALPPLPEGRGLRA

SEQ ID NO: 5964 - protein, 427 aa, Scytonema sp.; identical to SEQ ID NO: 3717

SEQ ID NO: 5965 - protein, 413 aa, unidentified
MTSYVFVLDANGKKLAPTKKQKAWFLIRKKRATLVSKYPMVIQLKKKIPDKEICKDEIRCGIDDGSLHVGIALVQKYQTRNKVVFKGIIEQRNDVKHLMDVRRGYRRYHRYHKRYRPARFNNRFSSKREGRIAPSILQKRQAIIRVINRLNKWINITNYWLEDVAIDIRALTDGYKSYSWQYQRSNRLDENIRKAVILRDNCRCKECGKSNCRLEVHHIKPRRLNGPNTLDNLITLCENCHQKTEGKEELYMSRYFGLLKSSDSKRLNYAQHAMIGKKWLREELSNLGMLYLTNGGNTANKRIDWSIEKSHSNDAICITDLQPDTCNIKEWTIKPMRRQSKAKTDNVLGIKHRDLVEYTFRNGETYKGYVTALYPEQKAINFQSSTKHCKKVNARKCKLLWKYSKIYWLENAG

SEQ ID NO: 5966 - protein, 429 aa, unidentified
MVFVKSINNTSLMPCSARKARLLLSSNKAIIIDYKNFTIKLNYNTTNFCQTTTIAVDTGAKFLGIILRNGNNILLARQVKLRTDISSLLTTRRILRRARRNKLRYRQPRFLNRTKSKKAGWLPPSILSRINNTINIIDNLIEKLHSYELILEVGNFDVQKMKNPAIKGKEYQQGEMAGFNEVKEFVLARDNYKCQHKLCKSKNKKLHVHHIIFRSQGGTNLPNNLITLCETCHQDLHKGLIDSKFKKVAIYKEPPFMNTLKLRLQNYYTDATFCYGYNTKEKRQEMQLPKSHINDAIAISFYNCDKITNLKYPEVNEYVIQVRIKKRSLHEQTSRKGIKEKNITQKRNCKNVFQVNQFKIGTKVSFVNQVGFISGFTGKSAYIKDINDNYITEDNKSYKQISLIKLNLICYNNGWIKFYDNLSHQLVKP

SEQ ID NO: 5967 - protein, 453 aa, unidentified
MLMAVAVVSRTGVPLMPTSPYRARKLLASGKAEKYGYDPFTIRLTERETGDTQPVELCMDTGYIHIGVSVKSEKHEYLALQIDTLTDEKKKHEKCREKRRNRRSRKRYRKPRFDNRKRDKGWLAPSLEHKKEIHVRAAERICRVVPVTDITMEMGNFDTQVLKAREEGRPLPQGTDYQQGERYGTATLREAVFSRDNYTCLCCGRTMKDGAYFHVHHIRYRSQGGTDRMANLATVCEKCHTPANHQPGGKLYNWKPEIKSFKGATFMTAVRWQMYREIKEKIPDVSIHLTYGAATKERRRALDIEKSHVNDAFVMGRFHPGHRARPELYLKKRRNNRVLESFYDARYIDSRDGKRKSGKELFNGRISRNHKKDSENLHKYRLRKVSKGKRSIRKKHYPIQPHDILVYCGRKYETAGCHNLGTGAILLPERKSIAVSKLKIYRYSGGYYKAEFN

SEQ ID NO: 5968 - protein, 512 aa, unidentified; identical to SEQ ID NO: 4031

SEQ ID NO: 5969 - protein, 431 aa, unidentified
MPNKVYVINKHGRPLMPCSPAKARHLLDEGKAKVKKRTPFTIQLVYGSSGYTQEVILGVDAGSKTIGMSASTTKEELLSAEVKPRNDVVDLLSTRREFRRARRNRKTRYRKPRFDNRVRSKHKGWLAPSVEVKIQEHITAIRRVCGILPVSKVVVETAEFDLQLLKAIADGKPVPQGEDYQQGEMYGHYNVRQYVLWRDGYTCQCCGAHATKKKEVRLHVHHLESRKVGGDAPDNQVTLCESCHEKLHKGLIAEKDFKKRKRRSTRDATFMGIMRKTLMQRLCSELPIPVIETRGYITKATREKLLVLPKSHTNDALAIAQGKHGFNVGYLPGILQIDKIYTIRPVRHHNRQLHKATILKGGIRKSNQAEKYVFGYRLFDKVQFNGQDCFIWGRRTTGIFTIKTINGKMIKDGISFKKLKPVEKSTSYLIA

SEQ ID NO: 5970 - protein, 306 aa, unidentified
LAPSVEVKIQEHITSIKRVCRILPVSKVVIETAEFDLQLLKAIEEGKPVPQGEDYQQGEMYGHYNVRQYVLWRDDYTCQCCGAHATKKKEVRLHVHHLESRKTGGDAPRNLITLCDSCHKKHHDGLITEDDFKKRKRRSTRDATFMGIMRKTLIQRLRAELTIPVAETRGYITKATREKLLVLPKSHTNDALAIAQGKQGFNVGYLPGILQIDKIYTIRPVRHHNRQLHKATILKGGIRKSNQAEKYVFGYRLFDKVQFNGQDCFIWGRRTSGYFVVKTIDGKVIHNSASFKKLRLVERASNYLIA

SEQ ID NO: 5971 - protein, 424 aa, unidentified
MLVYVLKQNGQPFMPTERFGKVRRLLKEGKAKVVRREPFTIRLLYEPETDVVQECYCGVDTGSRHIGVAVVGNDRVLYQSQTELRSDIKKKMDARRQLRKFRRSRKTRYRKHRFLNRHGSIREDRLPPSVKHKVQAHIDEIEFCKKILPVSDLILEVSQFNTALMKSPCLMNEKIKHWGYQKGFNYGYASRRSAILHRDNYTCQCCGKKNCRLEVHHIKFRRDGGTDDEENLITLCEECHKGVHAGIVVLNKKPKKSKNLKHATHMSIIRSRLLKVYPDAVETFGFVTSENRNHLNLPKDHYIDACVIASGGLEFKPSDIIYYKCRVSKGDYQVTRGVRGEQKIPTGKICGFRRYDKVEYFGKEYFIKGRMSSGFALLMDIFGKKADFSSMPNGLKTPKLSNCKRTSARRSYLCIRKIERSRVI

SEQ ID NO: 5972 - protein, 553 aa, Streptomyces sp.
MTTFPAGEQTHQVVLPQQPALESVGADNPGSRDETAHGHPATVRGTGREHGRGETGGQGTRARRRHAKSAATVAQAAENGSSDAPPQSNPSYEGGVGASRVFVLSKEGNPLMPCHPARARELLGKGRAVVTRQVPFTIRLKDRTLAESEVDGVQLRIDPGSKGTGFVLTDEKKEANEHGTTVTIRRGLVSVELQHRADQIRLCMQQRAGYRNRRRSANCRYRAPRSRNRGHPAGWLPPSLRHRVDTTFSVAKRLCRYAPVTEIHVELVAFDTHSMSAGRPLKGAEYQQGPLVGTSARAYLHAKWDNACAYCDATGVPLNIDYLQPRSRGGSNRITNLVLACVPCNQAKGNSPVEVFLAHRPDRLAKILQQVRTPLHDAAAMNATRWQLMDALSSLGKPLHTWPGAQTRENRSAMGLAKTHTLDALSVGSLDHEGGDAIVRFPAQVLVAKATGRGSYARTTPDRFGFPRLRRSRSKQHFGYVTGDLVRANVPSGQWTGTWTGRISVRARGQHSLRTPMGRFNVSHWNLRILQRGDGYGYSTQPESAPSTSRKIA

SEQ ID NO: 5973 - protein, 471 aa, Caldicellulosiruptor sp.; identical to SEQ ID NO: 3268

SEQ ID NO: 5974 - protein, 431 aa, unidentified
MPNKVYVINKHGRPLMPCSPAKARHLLDDGKAKVKKRTPFTIQLVYGSSGYTQEVILGVDAGSKTIGMSASTTKEELLSAEVKPRNDVVDLLSTRREFRRARRNRKTRYRKPRFDNRVRSKHKGWLAPSVEVKIQEHITSIKRVCRILPVSKVVIETAEFDLQLLKAIEEGKPVPQGEDYQQGEMYGHYNVRQYVLWRDDYTCQCCGAHATKKKEVRLHVHHLESRKVGGDAPDNQVTLCESCHEKLHKGLIAEKDFKKRKRRSTRDATFMGIMRKTLMQRLCSELPIPVVKTRGYITKATREKLLVLPKSHTNDALAIAQGKQGFNVGYLPGILQIDKIYTIRPVRHHNRQLHKATILKGGIRKSNQAEKYVFGYRLFDKVQFNGQDCFIWGRRTTGIFTIKTINGKMIKDGISFKKLKLVEKSTSYLIA

SEQ ID NO: 5975 - protein, 456 aa, unidentified
MAVFVLDKKKQPLMPCSEKRARLLLARGRAVVHKRYPFTIRLKNRVGGEAQPLRLGIDPGSKTTGLALMHEPDSQQRHVLCLFELIHRGYQIKKALQQRAAFRRRRRSANLRYRAPRFNNRIKPKGWLAPSLQHRVDTVMAWVNRLSKSAPITGISQELVRFDTQKLESPEISGVEYQQGTLLGYEVREYLLEKWGRECAYCGTADTPLEIEHVVPRSRGGSNRVSNLTLSCHPCNAEKDSQTLTDFFATNKGLKKRLKANGLSADAQLERVQRQLKQPMRDASAVNATRWALFSALKTTDLPVAVSSGGRTKYNRQRLNIPKTHALDAACVGAFEKLHDWTVPTLTIKAMGRGSYQRTRLTKHGFPRGYLMRQKQVHGFQTGDMVRAIVPTGKKAGTHTGRVAIRKTGSFNIQAEYGAVQGISHKYCTLIQRGDGYGYHFTLFSNLTGGAGQAVA

SEQ ID NO: 5976 - protein, 381 aa, unidentified
FTIQLDYSSEEVVQEVSLGVDADSKHIGVSATTEERELLAMQVEERDDIVELIAIRRETRRTRRSRKLRYRASRFDNRRRKDGWMTPSTEYRISAHLRMIRLVCSILPITKTTIEVAQFDSQKIKNDKITGVEYQQGEQLGFWNVREYVLARDGHVCQHCKGKSKDKILNVHHIESRKTGGNAPNNLITLCETCHKAYHDGEITLKLRRGTSLRDAAAMSIMRWEVYNRAKQEFKNVHLTYGYVTKHARIHNNIAKTHCADALCISGNVGAERLSWFYGVRLTRRHNRSLHLFKPKKGGVRPGNLASHWIGKSRLQQYDYVEWNGQRAFVSGSSNGRPYLKNFDDKYIMTPKASINAKTVKFIRRKRGSMIIEQLHKSINQ

SEQ ID NO: 5977 - protein, 518 aa, unidentified
MTPKKRKEASRMSEYIYVLGIDGNPQMPTKRKRHVEQLLQTGRARIFRQVPFTIQLTYKNEPVLQPVTIAEDPGRSNIGMAVVSRSGELLSAAVVQTRNKEIVKLMEKRKQHRRASRNGERKARQRLAKKCHTMIKTGFLMRKLPMYGKDKRVRCNVIKNTEAKFCNRKREDGWLTPSAEHLVRTHINLIHKMQKFLPITDVAIEINRFAFLSLEDPSISGVDFQNGPLKGYDDLNVAIEDLQDGHCLMCNSPIEHRHHIVPRSMQGSNTIGNIAGLCCKCHERVHKDARFEDRLKKKKAGLNKRYAAVSVLNQAIPFICKRLEQEFGKEHVHYCSGRDTSMVRRSLGYHKTKEEQLHEVDAWCIAVLALQHVPEKAPEFDHVHEILQFRRQDRSRIKAQTSRAYYHEGKKIAKNRKKAEGQKDDSLQGWRKRQVERYGEEQTRKMISQLKVKKSIRRYNRLDRLMPGAVFYYQGVRYVMRGQHSNGQYLQAVGMRDKDFPAKKCKIVVHNQGLVFVS

SEQ ID NO: 5978 - protein, 477 aa, Acidithiobacillus sp.; identical to SEQ ID NO: 5650

SEQ ID NO: 5979 - protein, 412 aa, unidentified; identical to SEQ ID NO: 4051

SEQ ID NO: 5980 - protein, 412 aa, unidentified
MENNIEYCFVIDEDNQPLVPTKVNRGWYLIRKGRAKLKSKYPMVIQLNKKVEPNENDKSYIVCGIDDGSAHVGLAVVQKCPTKNKVVFKGTIEQRQDVKHLIDVRRGYRRYHRYHKRYRPERFNNRSSSKRIGRLAPSIKQKKDAILRILYQLNKWVGIQEYYLEDVCIDIRAMTDGYKPYKWQYQKSNRLDENLRKATLIRDNYRCQECGKTDCRLEAHHIQARKCSGADTIGNLITLCSKCHQKTEGKEQDFEDKYFKIINSKPKRFDYAMYVMQGKNYLRNKISELGLLHLTSGGETANKRIEWNIEKSHSNDAICITDSIPDSCNIKEWIIKPMRRKSKAKTDNVLGFKHRDLVSYTYKNGETYKGYVTSLCQKRLALSFQSRDKRCDKVNARKCRLLWRFNKIYWLE

SEQ ID NO: 5981 - protein, 420 aa, unidentified
MQYVYVLNKHGEPLMPCSPCKARLLLKQKKACVVKRTPFTIKLLYGSTGYKQPITLGVDAGSKHIGISATTEKCELYRVEATPRNDAVDLLSARRAFRRNRRNRKIRYRAPRFNNRVHSKHKGWLAPSVEVKIQEHITLIKRVCRILPVTLVRVETAEFDTQRLKAMLEGKPLPVGTDYQHGEMYDEYNVRQYVLKRDNYTCQCCGAHPTKTKAVKLHVHHIETRRTGGNAPNNLITLCTACHKALHAGKATLNGKKRGKPLKDAAFMGIMRKTLMERLLKELKIPVQETYGYITKYLREKHSIPKSHTNDARCISKNPLAIPCDTCYYTKAIRHHNRQLHKATILKGGIRKANQAPYTVKGYRLWDKVFYHGSECFITGRRTSGYFALKKMDGTVVSNSASYKKLRLLEVATNYIAERR

SEQ ID NO: 5982 - protein, 470 aa, unidentified; identical to SEQ ID NO: 2825

SEQ ID NO: 5983 - protein, 447 aa, Exiguobacterium sp.; identical to SEQ ID NO: 5458

SEQ ID NO: 5984 - protein, 544 aa, Streptomyces sp.
MTTFPAGEQTHQAVLCQQPALESVGADTPGSRDETAHGHPAIARGTGREHGRGETDGPGTEARRRHAKAENGSGDAPAQDESYTGGVGASRVFVLSKDGQPLMPCHPARARELLGKGRAVVARQVPFTIRLKDRTFAESEVDGVQLRIDPGSKGTGLALTDEKKEVDGQGAVITVRRGLISVELQHRGDQIHLCMQQRAGYRHRRRSANCRYRAPRSNNRTRPTGWLPPSLRHRVDTTASWTARLCRYAPIAEIHLESVAFDTHAMSAGRALTAVEYQQGTLAGTETRAYLHAKWNSACAYCGATGVPLNIDHVRPRSRGGSNRISNLVLACVPCNKVKGNTPVEAFLAHQPDRLTKILQQAKTPLHDAAAMNATRWQLTEALSGLGRPVHTWSGGRTKWNRSAMGLAKTHTLDALSVGRLDHESGDTIVRFPAQILLAKAAGRGSYSRTTPDRFGFPRLRRARVKQHFGYVTGDLVRATMPTGKWAGTWTGRISVRARGQHSLTTPEGRINVSYWNLRLLQRGDGYGYSVRAEGTPSTSRKIG

SEQ ID NO: 5985 - protein, 430 aa, unidentified
LRVFVLNKRGKPLMPCSPAKARILLKEKKAVVTRRMPFTIRLTIATGETKQPVTLGVDAGYKHVGLSACAEKAELYASEVELRQDITELLSARLALRRARRNRQTRYRAPRFDNRVRSKHKGWLAPSVENRINAHLSRIDAVLRILPISKIVIETAAFDTQLLKDTNIEGATYQQGEQFGFWNVREYVLFRDGHVCQHCHGKSKDPVLNVHHLESRRTGGDAPNNLITLCETCHKALHQGKLTLKVKRGFTYKAETFMGIMRWTVQDRLKTAYPDIEIRNTYGYLTKHSRISHGIAKSHCADAYCIAGHLKAKRLAGYYFQKQTRRHNRQIHKLTILKGGLRKRNQAAYEIKGFRLFDKVKVLGEEGFIFGRRASGYFDVRKLDGTRISAGISSKKLTLLEKRKTYLTEYRKEAALPPLNEFRGFLADVL

SEQ ID NO: 5986 - protein, 408 aa, unidentified; identical to SEQ ID NO: 4142

SEQ ID NO: 5987 - protein, 443 aa, Caldicellulosiruptor sp.; identical to SEQ ID NO: 2385

SEQ ID NO: 5988 - protein, 420 aa, unidentified
MQYVYVLNKHGEPLMPCSPGKARILLKQQKACVVKRTPFTIKLLYGSAGYKQPITLGVDAGSKHVGLSASTEKRELYSEEFTPRNDVVELLSTRRQNRRSRRNRKTRYRAPRFNNRIHSKHKGWLAPSVEVKIQEHITVIKRICRILPITLVRVETAEFDTQRLKAMLSGKPLPVGTDYQLGEMYDEYNARQYVLRRDNYTCQCCGAHTTKKKTVKLHVHHLESRKTGGNAPSNLITLCVDCHKAFHAGKVKLDGKKRGKSLKDAAFMGAMRNTLLTRLRNELNIPVQNTYGYITKLLREQNDIKKSHVNDARCISKHPLAEPCSVCYRTKAIRHHNRQTHKANFSKKGIRKRSQMPYLVEGFRLWDKVLYKGQECFVSGRRSSGSFALKKLDGTSISKGVTFKKLRLLEPATNYLIERM

SEQ ID NO: 5989 - protein, 457 aa, unidentified
MDAVAVISASGKPLMPTNPMRARKLIKKGKAVIYKYRPLFTIRLTERTDGDIQTIEYCCDTGYQHIGLSIKSRKHEYVNEQRDLLPNETERHNDSRKYRKARRRRKLRHRACRRDNRHDNQICKDGYAPSIRNKRDQHISLYRSYTEILPVERAVFEMGQFDTQVLKAIEKGEPLPQGKDYQHGERYGYATLREAVFARDDYTCICCGKNSFKDKRILCVHHLGFRIGDRTNRLANLATVCTKCHTPKNHQPKGKLYNLKPELKDFKGATFMTMVRWDMLDKLKVVSKDIQVDVTYGAATKEARRDLKIKKSHANDAYCMGSFHPSHRTDLKRYEKCRRNNRVLSKFYDATYIDIRDGKKKKANALGCNRTKRRESRRSEKNERIYRGKKVSKGRIVLRTKRAVIRPGDIVYVGKKKYIVASSKNLGAQLKLADGSLLTTSKVTKIIHCGGWKTVTM

SEQ ID NO: 5990 - protein, 421 aa, unidentified; identical to SEQ ID NO: 4195

SEQ ID NO: 5991 - protein, 423 aa, Arthrospira sp.
MSNHIFVLDTNRKPLTPCKPGVARSLLKAGKASVFRRYPFTIILNKEVDANPEPLELKLDPGSKVTGIALKQGNHIIFAAELQHRGQQIKEALLSRRQLRRSRRNRKTRYRPARFLNRTRPEGWLAPSWQHRVDTLMTWVHRFRRLAPVGRITQELVRFDLQLMENPEISGVEYQQGELQGYEVREYLLFKWGRTCAYCGAQNVPLEVEQIQPRSKGGSDRVSNLTMACHSCNQAKGNGDIRDFLSGQPDVLSRLLRQAKSPLKDAAAVNSTRWALFKALKATGLPVTTGTGGQTKFNRLRLNLPKAHWLDAACVGPVESLEVLTSKPLLILAKGHGTRQMCGTNKYGFPTRHRSRRQIHKGFQTGDMVTVLVTAGKKIGSYLGRVLCRASGSFDITTASVRVAGISHKYCQPIHSTDGYAYA

SEQ ID NO: 5992 - protein, 439 aa, unidentified
MNYVYVLDKKGKPLMPTTRYGKVRRMLKSGQAKPVQNLPFTIQLTYIPKTTVCQPVIVGFDPGRTNIGISAVREDGTCLNLTHCETRNREIPKLMQKRKEHRQTSRRGERLVRKRLAKRHGTVSSKPLERILPGCEKPLKVKDIINTESRFNNRLRSEGWLTPTATQLLRTHVNLLKRMCQILPATDVVMEVNRFAFMQLDQPNVKKCGIDFQHGPLFGTDGIKEAVSIQQDGRCLLCEKRTIEHYHHIVPRAYRGSDTAENIAGLCAGCHKLVHTSREASNKLKHKKDGINKKYGGISVLNQVIPFLFMEFEQMFPGHTYATNGWNTKQFREKYRLAKDHSVDAYCIAASILPEPKVELPEDTHEIVQYRRHDRARIKRQTERTYCLGKKGVCKNRHKRFEQKTDSLEEYVEKYPNFLSNLTVKKSQRSYNDLKRVLP

SEQ ID NO: 5993 - protein, 419 aa, unidentified; identical to SEQ ID NO: 4877

SEQ ID NO: 5994 - protein, 412 aa, unidentified; identical to SEQ ID NO: 4932

SEQ ID NO: 5995 - protein, 442 aa, Lactobacillus sp.; identical to SEQ ID NO: 3826

SEQ ID NO: 5996 - protein, 468 aa, unidentified
LAVFVLDRSGKPLMPCSEKRARLLLARGRARIHRLMPFAIRLVDRELHSSAAQPLRIKLDPGSKATGLALVRDTEHVDASTGEIRRGAVALNLFELVHRGRQISEALTARRAMRRRRRGTLRYRAPRFLNRTRPAGWLAPSLQHRVDTTLAWVKRLQRWAPITAASTEFVRFDMQALDNPEVSGIEYQHGTLFGYELREYLLEKWKRKCCYCDVHNVPLNIEHLVPRARGGSNRVSNLAIACVPCNIRKAAQPLNVFVKDKARLGRITAQVRRPLKDASAVNATRWALVNALRATGLPVETASGGRTKYNRSKLCIPKTHALDAVCVGEVSAVVAWRKPTVQVKCTGRGSYQRTRQDRYGFPRGYLMRAKRVHGFGTGDHVQADVPWGRKAGTHNGRVAVRATGSFNIQTHGQVVQGVAHRYCRVLQRADGYGYSRMATDKGEAGVGAATQPGLSLPGPKAEVSRAEG

SEQ ID NO: 5997 - protein, 421 aa, Aphanothece sp.
VLVIDSNKQPLNPCHPSVARKLLKSKNAAIFRQYPFTIVLKKEILDVVIEPIEIKIDPGSQTTGIALVQGDKVIFGAELSHRGSTIKDSLESRRSLRRGRRSRKTRYRQARFLNRKKPSCWLAPSLQHRVDTTLTWIKKLIKFAPIVGISQELVRFDLQQLENPEISGVEYQQGELVGYEVREYLLNKWDRKCSYCSIENVPLQVEHIHPKAKGGTNRISNLCLACESCNLKKGTKDINVFLAKKPDVLKRILSQAKRPLKDAAAVNSTRWTLFNALKNTGLPITTGSGGKTKFNRTRLNLPKQHWIDAACVGIVDTLKVLTNKPLLIKATGHGTRQSCRTDKYGFPSRYVPRFKFIKGFQTGDIVKAVVTKGKKIGTYVGRVAVRSIGSFNISSPNGLIQGISYKNCTHIHKKDGYSYAT

SEQ ID NO: 5998 - protein, 445 aa, Burkholderia sp.; identical to SEQ ID NO: 4102

SEQ ID NO: 5999 - protein, 470 aa, unidentified; identical to SEQ ID NO: 2825

SEQ ID NO: 6000 - protein, 421 aa, unidentified
MRGRPLMPCSPAKARHLLKAGKAVVRRRTPFTIQLRIATGETKQSVTLGVDAGAKHVGLSAATEKEEVFASEVELRQDITGLLAARLSLRRERRQRKTRYRAPRFLNRVRSKHKGWLAPSVENRIQAHMSRIDAICGLLPVTKIVIETVSFDIQKIKHPDVEGTDYQQGDQLGFWNVREYVLFRDGHVCQHCHGHAKDKILNVHHLESRQTGGDAPNNLITLCETCHKAYHAGKIKLKVKRAQSFRAEAFMGIMRWTLLDRMRKAHSGLPVENTYGYLTKNTRITLGLPKTHCVDAYCIAGNLKAVRRGVCLHQRQVRKHNRQIHKCTVLSKTLKDGTKIGYRKLNQTPHLVKNFRLFDKVRCLGQTGFIFGRRSSGYFDVRRLDGVKISSCISYKKLTLLEKRSTCLTELRKEDGASSPV

SEQ ID NO: 6001 - protein, 420 aa, unidentified
MQYVYVLSKHGEPMMPCSPGKARLLLKQQKACVVRRTPFTIKLLYGSAGYKQPITLGVDAGSKHVGLSASTEKRELYREEFTPRNDVVELLSTRRQNRRSRRNRKTRYRAPRFDNRVHSKHKGWLAPSVEVKIQEHITIIKRICKILPISLVRVETAEFDTQRLKAMLAGKPLPVGTDYQLGEMYDEYNVRQYVLKRDNYTCQCCGAHTTAKKLVKLHVHHLESRKTGGNAPSNLVTLCTTCHKNLHKGRVTLDGKERGKPLRDAAFMGIMRKTLMARLKEELPIPVQGTYGYITKMRREQNDIKKGHTNDARCISKHPLAEPCSVCYRTKAIRHHNRQTHKANFSKKGIRKRSQMPYLVEGYRLWDKVLYKEQECFVSGRRSSGSFTLKKLDGTSVSKGVTFKKLRLLEPATNYLIERM

SEQ ID NO: 6002 - protein, 408 aa, Bacillus sp.
MFVYTINQHGEPLMPCSPRKARILLKEKKAKVVKQTPFTIQLLYGSSGYKQPISLGVDAGTKHIGISATTEANVLLEGEVQLRTDIQELLATRLQFRRSRRSRTTRYRKPRFLNRKRDKGWLAPSVQNKVDSHIKMVHQLHSILPITAITVEVAQFDTQLLQNPLIEGEGYQHGVQMGFWNVREYVLYRDNHTCQRCKGKKKDPILNVHHIESRKTGGDSPSNLITLCETCHDEIHGKGLEHTITPLRKSLRDASHMTVMRWFIYEALKKIYPHIHLTYGYITKNTRIGNGLVKSHGVDARCISGNPLATPTDSIYLWKFVRKNNRQLHKATISKGGKRKSNKAVRLVKGYKLFDKVTYKGQDCFVFGRRSSGYFDLRLLDGTKIHASASYKKLTLKECASTLLCERR

SEQ ID NO: 6003 - protein, 420 aa, unidentified
MQYVYVLNKHGEPLMPCSPRKARLLLKQKKACVVKRTSFTIKLLYGSTGYKQPITLGVDAGSKHIGISATTEKHELYREEATPRNDVVDLLSARRAFRRSRRNRKTRYRAPRFNNRVHSKHKGWLAPSVEVKIQEHITLIKRVCRILPVTLVRVETAEFDTQRLKAMLEGKPLPVGTDYQLGEMYDEYNVRQYVLKRDNYTCQCCGAHSTKTKDVKLHVHHIETRRTGGNAPNNLITLCTACHKALHAGKVTLDGKKRGKPLKDAAFMGVMRKTLMERLLKELKIPVQGTYGYITKYLREKHSIPKSHTNDARCISKNPLAIPCDTCYYTKAVRHHNRQLHKATILKGGIRKANQAPYIVKGYRLWDKVSCNGTECFITGRRTSGYFALKKLDGTVISNSISYKKLRLLEVATNYITERR

SEQ ID NO: 6004 - protein, 415 aa, unidentified; identical to SEQ ID NO: 3582

SEQ ID NO: 6005 - protein, 442 aa, unidentified; identical to SEQ ID NO: 4418

SEQ ID NO: 6006 - protein, 406 aa, unidentified
MRGKPLMPCSPAKARHMLKAGKAVVVRRTPFTIKLTIATGETKQDVTLGVDAGARHVGISATTEKEEVFASEVALRQDITGLLADRLAFRRARRNRKTRYRSPRFNNRVRSKHKGWLASSVENRIQAHMSRIDAVCRLLPVTKIVIEAASFDVQKIKNPTIEGTDYQQGDQLGFWNVREYVLFRDGHICQHCRGRSKDPILNVHHLESRKTGGDAPNNLITLCETCHKAYHAGKIKLKVKRGQSFRAEAFMGIMRWTLLDRVRKTHPKLPVENTYGYLTKHKRIALGLPKTHCADAFCIAGNLKALRRGDFLFQQQTRKHNRQIHKCSILKGGVRTLNQAPFLVKGFRLFDKVRIGGQIGFVFGRRVRGTFNIRRLDKTVIGTDINCKKLSLLETRKTFLTELRKE

SEQ ID NO: 6007 - protein, 471 aa, Caldicellulosiruptor sp.; identical to SEQ ID NO: 3268

SEQ ID NO: 6008 - protein, 480 aa, unidentified
LYTKPLDNIGEGSLPPSGEINLKGMTFMVYVKSIDGKALMPTSNAKARKLLKQKKAKVVSLRPFVVKLTYKTKTEYTQKLNLGVDSGYSNIGFSVIDAKQEYIAGEVKLLEGMKKRLLEKASYRRIRRSRLRYRKARWNNRVKSKKKGWLAPSLKHKLDTHIKFIDYLKNILPIEKITIEVANFDIQKMKDDLISGIDYQNGDMFGFWNVREFVLHRDGHKCQNPNCKHKDKKEQILKVHHIRYRSEGGSDRPENLITLCSKCHTPANHKKGKFLYDWCVNGKKVRGFKDATFMSMIRWYLVNELKSKHNNVSITYGYITKNHRIQNGIEKSHLNDAFAIAKGTNQARTKDRFLVIQDRLKNRSLEKFYDSKIIDIRTEKKVSGGDLNCGRSTRNKNLNTENLRKYRGVKISKGQRRIRKQKYFYQPNDLVKYDGKVYTVKGTQNEGKYIALKEIKKVPKVELLIPYVFKKGLNWSYGLC

SEQ ID NO: 6009 - protein, 465 aa, unidentified
MSTCVCVLSNSGERLMPTFCLGKVRHLLKDGKAKIVKHHPFTIQLLYSSKTNIQPIEICEDVGYNYIGISVKGESHEYVSAQYDTLQDEKEHHDDCRKMRRTRRNKLRYRKPRFDNRKRNKGWLAPSLEHKKQLNISLIERYVSVIPITHATVEVGSFDTMLLQAIQKGEAKPEGADYQEGPRYNLATLREAVFYRDNYTCHVCGHKITNGAVLHMHHMFYWKGRHGYQLDELVTVCEKCHTPANHQKNGKLYGFGENVKFADLSGAAFMNTVRWQIVNELYAAFGKPFVTITYGAMTKEKRIALRLEKSHNNDAYAMGEFHPNLRCTFEHYEKVRRNNRILEKFYDSRYIDIRTGEIATGKALFNGRINRNHKKDSENLHKYRGKRTYAGHRALLRKKVNLNPGDLVSLNGETLIVHSTHTNKKGAVNVEFKTPAKNGRKSASLKKLKIVKAASSMHSAWEKVS

SEQ ID NO: 6010 - protein, 427 aa, Enterococcus sp.; identical to SEQ ID NO: 5630

SEQ ID NO: 6011 - protein, 432 aa, unidentified
MKGVQTMQSRVFVINKHGKALMPCKPRKARILLRDGKAKVLKKEPFTIQLLYGSTGYKQDVSLGIDSGQRHIGLAVTSQDKVLFQSEVELRQDVKKLLDARRTYRRSRRNRKTRYRKARFLNRIAKKKDNWLPPSVLSKVNHNINWIKRLLSVLPKADLHIEVGKFDLQKMKNPAINGEGYQTVKQFVLARDNYTCQVCKKKGGKLKIHHIIYRSLGGTNTVDNLITVCSNCHTTKNHQTGILAKWCKDKKKVNKSYKGAAFMNILRRRLFTAFPQAKFQYGAWTTLQRADLDLTKSHYNDAVAISGIRKIKEKPTSIMMFKQFRKKKRSLHEATARKGRKTPNITSKRNAKNTKYAKGFWLNDYVKIKDSNKKGYISGFMSKGTNVRLRDIFGEYVSNNDKSYTSTKNISLINHSNNWQKQAIAEKQYIMG

SEQ ID NO: 6012 - protein, 377 aa, unidentified
MQALELKLDPGSKVTGVALVLHGAKTTKAVWCANLHHRGSTIRDALLSRRGIRRGRRTRHTRYRAPRFLNRTRPAGWLAPSLQSRVDNVDNWTRKLNFLAPISRIASEDVRFDMQKLKNPEIDGAEYQRGTLFSYELKEYLLLKWKHQCAYCDAKDMPLEIEHIVPKSKGGSNSVTNLAIACRPCNEKKSNKSLSEFLKSKPEKITKINKQLKSPLKDAAINTIRKAIAECLKGYSLPIIFGTGGQTKYNRTTQSYERDHWIDAVCVGHNGEQVLIPQGIKPLIIKATSRGSRQMCRVNKFGFPRTKAKASKVVRGFATGDLVKAVVASGKKVGNYVGKVAVRTSGSFNITTKEEVIQGINWKYCTLIQFRDGYAYN

SEQ ID NO: 6013 - protein, 442 aa, unidentified; identical to SEQ ID NO: 4418

SEQ ID NO: 6014 - protein, 408 aa, unidentified; identical to SEQ ID NO: 3064

SEQ ID NO: 6015 - protein, 381 aa, Moorena sp.
MQNYVFVIDTNKQPLNPISPKKARRLLDKGKAAVFRMYPFTIILKTAIRQSRRCANANPTISPCQIKIDPGSKVTGFALVQDDQVIWGMELEHRGGLIKKKLESRSAVRRGRRNRNTRYRKPRFLNRKRPEGWIAPSLEHRVLTIETWVKRLIKFCPINEISVERVKFDTQKMQNPEINGIEYQQGDLAGYEVREYLLEKWGRECAYCGKQNIPLQIEHIHPKSKGGSDSAKPTLRERVNNLCLACEKCNQRKGNRPIEEFLKKKPGLLQKIKNKAKQPLSDAAAVNTTRNRIVKVLKEVKPVVTGTGAQTKYNRTKLGLSKQHWIDAACVGDIKTLVLRTSQPLLVTCKGQGGRQKAALNKYGYPIRHNPLKPIKGWKAW

SEQ ID NO: 6016 - protein, 458 aa, Lactobacillus sp.
LKGVGMMSEIKKVDYIYVVDSNGTPLMPTSRLGMVRRWLKTGQAKWFGNSRNTIQFVRPVTTNTQELTLGVEAGFHLGLSVVGNNREYYVSESLRKSEKDRITSRRELRRTRRNRLRYRKARFNNRRRKDGWLAPSIQHRLDFTIKEIKRLYKFLPITNLVVEVTPFDNQKLLNPDIQGWQYQKGKMYGFKTIKDYLLARDNYRDALDGKQYPASQLRVHHLVQRKDGGSNQPDNLVLLSDINHNQANHNNVILAKLRENRQKTLDYRGAYFMSILATRLSNYFEHYTTTQGYLTANLRQKYEIEKSHLNDAFVIAGGTDTTLRTNNVYSRQKLRNNNRVLQKFYDAKYIDSRDGKQKAGKELSSGRTRRSQELNYDNLRQLRKEKVKKGRVSIRRGHYQLRPHDVVLNTRTNRIETVKGVQNSGTVIKFQTGKTCSIKSVVSLYHVNGILEKKMKNI

SEQ ID NO: 6017 - protein, 420 aa, unidentified
MQYAYVLNKRGEPLMPCSPGKARILLKQQKACVVKRTPFTIKLLHGSAGYKQPITLGVDAGSKHVGLSASTEKRELYSEEFTPRNDVVELLSTRRQNRRSRRNRKTRYRAPRFNNRVHSKHKGWLAPSVEVKIQEHITVIKRICRILPITLVRVETAEFDTQRLKAMLAGKPLPVGTDYQLGEMYDEYNVRQYVLKRDNYTCQCCGAHTTAKKTVKLHVHHLESRKVGGNAPSNLITLCTTCHNNLHKGKITLDGKKRGKTLRDAAFMGIMRNTLLTRLRNELNIPVQNTYGYITKLLREQNDIKKSHVNDARCISKHPLAKPCSVCYRTKAIRHHNRQIHKAKILKGGIRKANQAPYIVKGFRLWDKVLYNEQECFISGRRSSGYFALRKFDGTTITNSISFKKLRLLEPATNYLIERK

SEQ ID NO: 6018 - protein, 418 aa, unidentified
MVYVLGQDGHPLMPTCRHGKVRRMLKSGMAKVVQRCPFTIQLQYESTTHTQKINLGIDAGSKTIGVSATTESKVLYESEVVLRNDIVELLSGRRALRRSRRNRKTRYRKPRLDNRRRPDGWLAPSIRQKIKTHVTVVENVMKILPVTKIIVETASFDIQKIKNPEIEGAEYQYGEQLDFWNVREYVLFRDGHTCQCCKGKSKDNILNVHHIESRKTGGNAPNNLITLCETCHKAYHKGVITLPKEIHRGMRFRDAAFMGIMRWAFYDRLKELYTPFGVEVINTYGYITKNTRIEHGLPKEHYVDARCISGNPAAKPLGHYYFQKKVRCHNRQIHKNTILKGGIKKRNQAAYLVKGYRLFDKVKYQNQEYFIFGRRSSGFFDIRTLDGTKVNKGSISCKKLQLVEKSKHYLTEQRKVTT

SEQ ID NO: 6019 - protein, 429 aa, Parasutterella sp.; identical to SEQ ID NO: 4241

SEQ ID NO: 6020 - protein, 441 aa, unidentified
VGVPQQCEIFLKRIYMVFVLNKSKKPLNMISHAEARILLRKKLAVIHKIYPFTIRLRDNSCGSQNRAYTVKIDPGSRHTGIAIVDNKDQVVMLAEIKHRGHIIKKSLYNRRVVRHNRRNRKTRYREARFLNRTRPEGWLAPSVKSRADNVINFIKKYKKLINISKVMIENVSFDVAQMSSNTKLWGNSYQQGNLYQNKLRSFIFSRSNGKCVYCGAKATEIDHIIPRANSGTNSTYNLAASCRVCNQKKSNKTLKEFGKIMNKDYSHLEPKKLPKDAAIVQSARNYMIKEITKLISNTTTHEAWMTTYNRDELGLPKEHYYDALSVGETPNSFNFLTNKVLTISAKGRGSRQMCRVNKYGFPRASAKASKFVEGFQTGDIVKAVVTKGLKIGEYLGRVAVKSDGYFNIQTKTKTIEGIGHKYCHLIQRGDGYSYNYERRAI

SEQ ID NO: 6021 - protein, 461 aa, Parasutterella sp.; identical to SEQ ID NO: 3646

SEQ ID NO: 6022 - protein, 431 aa, Escherichia coli; identical to SEQ ID NO: 4170

SEQ ID NO: 6023 - protein, 442 aa, unidentified; identical to SEQ ID NO: 2903

SEQ ID NO: 6024 - protein, 430 aa, unidentified
  source 1..430: note = Spirochaetales bacterium UBA772
MVYVFNIHGQPLMPTTRYGKVRRMLKEKQAKVIKRCPFTIQLLYENPNFVQEVSLGVDAGSKTIGISATTPTSELYAAEVKLRTDVVTNLSSRHECRRSRRNRKTRYRQKRFDNRKVNKQNGWLAPSICNKIVTHLTTVDKITKILPVSEIHVEVASFDIQKIKNPDITGIEYQQGEQLDFWNVREYVLFRDQYTCMCCKGRSKDKILNVHHIESRKTGGDAPNNLITLCETCHNDYHNGTIQLPKTIKRGMSFRDATFMGVMRWAFYNKVKEIYEAKGIPVSLTYGYITKNLRIKNNLPKTHYVDARCISGHSNVEPLGYYFLQKKVRCHNRQIHKLKFMKGHYRKRNKADYEILGFKLFDKVLFQNIECFIFGRRSTGRMDLRKLDGTHINASANYKNLKLLENSKHILTERRTGRFLPAAINRVSTS

SEQ ID NO: 6025 - protein, 428 aa, unidentified; identical to SEQ ID NO: 4606

SEQ ID NO: 6026 - protein, 456 aa, unidentified
LGKDSHSLRRGQFCQSLTVTTTRKETTSMYVYVLNQHGEPLMPCSPRKARTMLRDHKATVVRRTPFTIRLLHGCSGYTQRITLGVDAGSKFIGLSACTESKELFAAEVKPRNDVVDLLSTRRELRRSRRNRKTRYRVARFDNRVHSKHKGWLAPSVEVKIQEHITAIKRTCAILPISMVIVETAEFDTQRLKAMLEGKPLPVGTDYQLGEMYDEYNVRQYVLKRDNYTCQCCGVQSTDKAPVKFAVHHKESRHVGGNAPNNLITLCEKCHRLLHAGVITLDEDKRKRGKSFRDAAFMGIMRKTLIQRLRSELSVPAKETYGYITKLLRETHSIQKSHVNDARCIARVPDAKPSDTLYRIRAVRHHNRQLHKTNPIKGGIRKRNQAPYEVFGFHLWDKVLFNGQECFITGRRASGYFALKDFDGKKIHASASYKVLSVVETATSYLIERKTAVSSRD

SEQ ID NO: 6027 - protein, 431 aa, unidentified
MPNKVYVINKHGRPLMPCSPAKARHLLDAGKAKVKKRTPFTIQLVYGSSGYTQEVILGVDAGSKTIGMSASTTKEELLSAEVKPRNDVVDLLSTRREFRRARRNRKTRYRKPRFDNRVRSKHKGWLAPSVEVKIQEHITSIKRVCRILPVSKVVIETAEFDLQLLKAIADGKPVPQGEDYQQGEMYGHYNVRQYVLWRDGYTCQCCGAHTTKKKEVRLHVHHLESRKVGGDAPDNQVTLCESCHEKLHKGLIAEKDFKKRKRKSTRDATFMGIMRKTLMQRLCSELPIPVVKTRGYITKATREKLLVLPKSHTNDALAIAQGKQGFNVGYLPGIVQINKIYTIRPVRHHNRQLHKATILKGGIRKSNQTEKYVFGYCLFDKVQFNGQDCFIWGRRTTGIFTIKTINGKMIKDGISFKKLKPVEKSTGYLIA

SEQ ID NO: 6028 - protein, 406 aa, unidentified
MVYVQDIDGKPMMPTTRHGKVRRLLKAKKATVVNLCPFTIQLTYKSTDHKQPVTLGIDAGAKHIGFSATTEKEELFACETTLRTDIVDLLSMRLQNRRTRRSRLRYRKSRFNNRGSSKKKGWVAPSVKQRIDSHLNEVNEIHKILPITKIVIEVAQFDTQKMKNHDISGADYQNGEQLGFWNVREYVLFRDGHKCSHCKGKSKDPVLNVHHLESRKTGGDSPSNLITLCESCHKAFHKGEIELKKKRGKSLRDAAVMGIMKWKLYEELKSRYDNVSMTFGYITKHNRIKYGIEKNHTSDAFVISRNFNAKRIEYQYLKRLVRRHNRQIHKMKILKGGKKKNNQAPFEVFGFRLFDKVLYNNEIFFVYGRRKSGNFNIRDFNGENPKDVSHKKFKLIRGKRHPIILK

SEQ ID NO: 6029 - protein, 452 aa, unidentified; identical to SEQ ID NO: 3325
  REGION 1..452: note = Ga0315273_10005511

SEQ ID NO: 6030 - protein, 427 aa, Parasutterella sp.
LRVFVLNKRGKPLMPCSPAKARHLLKEKKAIVVRRTPFTIQLTIATGESKQPVSLGVDAGYKYVGLSASTEKAELYASEVELRQGITDLLSARRALRRARRNRKTRYRAPRFDNRIRTKRKGWLAPSVENRINAHLSRIETVLRMLPVTKITVETASFDMQLLKDPDISGKEYQEGEQLGFWNVREYVLFRDGHVCQHCHGRLKDPVLNVHHLKSRRTGGDSPGNLITLCETCHKALHRGEITLKAKRGQSFRAETFMGIMRREVLDRLKASHPKLEVQNTYGYRTKHARISNGIAKSHCADAFCIAGNLGAKRLGEFLFQKQTRRNNRQIHKLSILKGSLRKRNQAPFEVKGFRLFDKVAYQGEEGFIFGRRSSGFFDIRRLDGTRISAGINYKKLRLLEKRRTYLTEIRKEEARRPLPEGRGLRA

SEQ ID NO: 6031 - protein, 406 aa, unidentified
MVYVQDIDGKPMMPTTRHGKVRRLLKANKATVVNLCPFTIQLTYKSTDHKQPVTLGIDAGAKHIGFSATTEKEELFACETILRTDIVDLLSTRSQNRRTRRSRLRYRKPKFNNRVFSKKKGWVAPSVKQRIDSHLNEVNEIHKILPITKIVIEAAQFDTHKMKNPNISGIDYQNGEQLGFWNVREYVLFRDGHKCSYCKGKSKDLILNIHHIESRKTGGDSPSNLITLCETCHKEYHKGNIDLKVRRGKSLCGAAIMGIMKWRLYDELKSRYSNVSMTFGYITKYNRIKYGIEKSHTSDAFVISKNFNAKRIEYQYLKRLVRRHNRQIHKMKILKGGKKKNNQAPFEVFGFRLFDKVLYNNEINFIYRRRKSGNFNIRDFNGENPKDVSYKKLKLIRGKRHPIILK

SEQ ID NO: 6032 - protein, 414 aa, unidentified; identical to SEQ ID NO: 2588

SEQ ID NO: 6033 - protein, 470 aa, unidentified
MSVFVVGQSGYRLMPVSERKARLLLDGGKASVYRKVPFTIKLSYKTGSTTQPGYLGIDTGSQHIGGSVVREDGTVLHKEEISLRDSMTKRKLLEARASLRRGRRYRKTRYRHPKWKPKTRRVYCEVPDKKGRHWKKQKSTFTSGWPEGWLPPSLQSKTDHHIRWIRKLQGLLPEGYRLSIELGRFDPARMKDPGIHGDLYQKGPQYDYENVRAYVLDRDRYTCQVCKKKGGKLHVHHVLYKSHGASDNPQYLVTVCNACHTTANHLPGGILYQWMQEQKKFTRGLRDTTFMNILRKRLMKAFPDAVFTYGNITKVDRERFGLPKSHGNDATAIALVKTGILSVKDKEPVLYIQQVRRKKRSLHEETPRKGRKEPNRKAARNSKNTKAVTVTKRRSGKKVSVTACLFDRVELDGRKGWISGFTGTSCYVKDADDNYITASRKYNQVSLSKLRILHHCGNWVIGAKKSLGKG

SEQ ID NO: 6034 - protein, 442 aa, Lactobacillus sp.
MKHENANRVFLLNKDGKPLMPCCPRKARLLLKSGKAFVVKKYPFTIQLKYGSYGYKQKVSLGVDTGQRHIGFAIVSQNKVLHQSEVELRQDVHKNLYTRKIYRRSKRNRKTRYRQARFLNRVHGKRDGLWLPPSVKSKVSHNIAWIKRYLAVLPNPDLHIEVGKFDMAKMVNPDISGKQYQEGSLKDWKNYEYYVLARDEYTCQLCHKHGEGVKLVVHHIVYRSQGGTDRVDNLITLCTNCHTTKNHQPGGKLYKWMKAKKKVTKQLKGETFMNILRKRIMTTFPEASFQYGSQTYVDRKNLLLPKGHFMDAIAISGIKPVGQMPETVTMISQFRKKKRSLHEATARKGRKQPNMSSKRNEKNTKYACGLWLNDYVRVIGNHVKGYVKGFKSNGYYVYLTDGLGNYVLNNGKNYINGQQCRLIMHNGNWQKAEQKLSLYEFK

SEQ ID NO: 6035 - protein, 457 aa, unidentified
LKGVGMMSEIKKVDYIYVVDSNGTPLMPTSRLGMVRRWLKTGQARWYGNSRHTIQFVRSVTTNTQELTLGVNPFHLGLSVIGNQREYYAAESLRKSEKDRITSRRELRRTRRNRLRYRKARFNNRRHKDGWLAPSIQYRLDFTIKEIKRLYKFLPITNLVIEVTPFDNQKLANPNIQGWQYQKGKMYGFKTIKDYLLARDNYRDALDGKQYPASQLRVHHLVQRKDGGSNQPDNLVLLSDINHNQANHNNGILARLKENRQKTIDYRGAYFMSVLATKLSNYFEHYTTTQGYLTANLRQKYEIEKSHLNDAFVIAGGTDTTLRTNNVYLRQKLRNNNRVLQKFYDAKYIDSRDDKKKTGKELSSGRTRRSRELNYTNLRQFRKEKVKKGRVSIRRGHYQLRPHDVVLNTRTNRIETVKGVQNSGTVIKFQTGKTCSIKSVVSLYHVNGILEKKMENI

SEQ ID NO: 6036 - protein, 417 aa, unidentified
MPCSPAKARLLLKERKAIVKRRTPFTIQLTIATGEAKQPVALGVDSGYKHIGLSATTEKAELYASEVELRQDITDLLSARLALRRSRRSRKTRYRAPRFDNRVASKREGWLAPSVENRIAAHMSRVEAVMRVLPVTAITVETAAFDTQLLKNPDITGAAYQQGEQLGFWNVREYVLFRDGHVCQHCRGKSKDPILNVHHIESRRTGGDAPNNLITLCETCHKAFHRGEIKLKVRRGKSFKAETFMGIMRRTLFERLKKAHPELNVRNTYGYLTKHKRISYGIAKSHCADAYCIADNLGAKRLEGFFFQKQTRKHNRQIHKLLILKGGLKKKNQAPYEVKGFRLFDKVICKGEEAFIFGRRTSGSFDVRRLDGTRISAGINYKKLRLLEPRTTYLTEFRKEAALPPLHKCRGVCAEFL

SEQ ID NO: 6037 - protein, 406 aa, unidentified; identical to SEQ ID NO: 2752

SEQ ID NO: 6038 - protein, 292 aa, Parasutterella sp.
LSRIEAVLRLLPVTKITVETASFDLQLLKNPDISGKEYQEGEQLGFWNIREYVLCRDGHVCQHCYGRSKDPVLNVHHLESRRTGGDSPGNLITLCETCHKALHRGEITLKAKRGQSFRTEAFMGIMRWEVLNRLKASHPELEVNNTYGYRTKHARIANDIAKSHCADAFCIAGNLGAERLGEFFFQKQTRRNNRQIHKLSILKGGIRKRNQAPFEVNGFRLFDKVACQGEEGFIFGRRSSGFFDVRKLDGTRISAGISYKKLHLLEKRRTYLTEIRKEEVLPPLPEGRGLRA

SEQ ID NO: 6039 - protein, 422 aa, unidentified; identical to SEQ ID NO: 5333

SEQ ID NO: 6040 - protein, 424 aa, Mastigocoleus sp.
MQNYVFVVDTNKKPVNPVTPRRARKLLEKGKAAVWRNYPFTIILKHAVTETVLKPLTVKIDPGSRFTGIAVSEGENVIWGAEVEHRGYQIKQTLESRRSLRRSRRNRKTRYRKARFDNRKRSPGWIPPSLMHRVLTTQTWVKRLIIFAPVAEIWIEKVKFDMHKMQNPEISGVEYQQGDLQGYEVREYLLEKWGRECSYCRKKDVPLQIEHIHPRSKGGSNRVSNLCLACEKCNQKKGNKPVEDFLRKKPELLKKIKSNANKPLKDASAVNSTRNKVVEVLFGLLPVKTATGAQTKYNRIRLKLEKQHWIDAACVGDVEKLVLKTNQPLRIKCNGHGTRQMCGTNKFGFPTRHRGRKQIHFGFTTGDIVKAVVTKGKKIGTYFGRLLCRKSGSFDIATKAGRVAGISYKFCTPIHKKDGYSYSF

SEQ ID NO: 6041 - protein, 492 aa, unidentified; identical to SEQ ID NO: 4486

SEQ ID NO: 6042 - protein, 431 aa, unidentified; identical to SEQ ID NO: 2933

SEQ ID NO: 6043 - protein, 433 aa, unidentified
MPCHPARARELLKKGRARVHKVFPFTIRLTDRELENSSVQPMLIKIDPGSKETGIALVREEKNKEHHALYFINLQHRGQQIRNALYKRRCLRRSRRSRNLRYRSPRFLNRRRAEGWLAPSPQHRADSILSWVSRLRKITPVERISQELVKFDTQLTQNSKIEGIEYQQGELAGYELREYLLEKFGRKCIYCGADNVPLNIDHVIPKSKGGSNRASNLVLACVQCNQKKGSRSIEEFLKDKPEVLRQIKNQLKQPLKDAASVNATRWKLFNKLKSTDFPFEVGSGALTKFNRKKFGIPKAHWLDALCVGNVPSVTNWRNLNIKCCGRGAYQRTRTDKYGFPRGICMRQKKVYGFSTGDMVKAIIPKGKKKGVYVGKVAVRKTGSFNLQTSGQTIQGISYRYCRLITHSDGYSYSWKSCPLPPRVETRGILGEVR

SEQ ID NO: 6044 - protein, 415 aa, unidentified
MENKIEYCFVVDKNNRPLAPTKVNKGWYLIRKGRAKLKSKYPMVIQLEKEVEPDDEDESHMVCGIDDGSSHVGIAIVQKCPSKNKVVFKGTIEQRQDVKHLMDVRRGYRQYRRYHKRYRKPRFNNRASSKKTNRLAPSIKQKKDSILRVLYQLNKWINIKEYYLEDVAIDIRAMADGYKPYNWQYQKNNRLDENLRKATILRDSCKCQECGKTNTVLEVHHIRAKRFGGANTIGNLITLCSSCHQKTEGKEREFEERYFTKIKSKPKRFDYAMHVMQGKNYLRENIKQLGILHLTTGGDTANKRIEWNIEKSHSNDAICITNCFPDTCNIKEWMIKPMRRKSKAKTDNVLGIKHRDLVEYTYRNGETHKGYVTALYPHLNALNFQSPTKHCKKVNVRKCRLLWKYNKIYWLDSVI

SEQ ID NO: 6045 - protein, 424 aa, Enterococcus sp.
MRVFVRNMQGKPLMPCSNRKARLLLKEGKAKIYQYNPFTIQLCYASREYVQECHIGIDTGTKHIGMAVTSEDKVLFKGETELRQDVKSNLDTRRSYRRDRRNRKTRYRKARFLNRKKKESWLPPSIENRINHTFKWINKLVALLPNPKLHIEVGKFDVAKMINLDVQGVDYQHGQTYGFYNVRYFVFARDNYTCQCCKKSKNKILQTHHIIYRSNGGSNRADNLITVCTDCHTYENHQKGGILYQWQENRKKTKQYKEPPFMNVLRKRIFTQYPNSIITYGSETTPKRKELGLEKTHYNDAIVISGITKIKENPNEWLLIKQFRKKKRSLHEATARKGRKEPNRLQKRNSKNTPYYKGFYLNDKVRVFNQVGHITGFTSSGAYIKNSENEYITLPNKSYKQIGISNIRLLHHNNNWQYIHKHIA

SEQ ID NO: 6046 - protein, 419 aa, unidentified
MIYIRSKDGKALMPSERGGRIGYLLRHAKAHVVSRVPFTVQLDYESTTYTQEVSLGVDAGSKHIGVSASSEKKELLVAQVELRNDVVNLLSTRRELRRTRRNRKTRYRKARFDNRKKKDDWLAPSVEQKVDSHLKVIRLVHGLLPITNTTIEVAQFDAQKIKRPDIKGEEYQQGEQMCFWNVREYVFARDGHRCVHCKGKSKDPILNVHHLESRKTGGNSPSNLVTLCETCHKAYHRGEFELKIKRGNSLRDAAVMNNMRWAVYKRANEEFGNVHLTYGYVTKHTRIENGIAKTHAADAFCIAKNINAMRLRTFYLCRCVPRHSRALHVANPKKGGIRRSTIASHKIGKSRFLRFDMVRWKGKESFIFGSTNGRPVLRDIEGYKMHENASVNIKTIKFLKRLRNNILVEEKDFRKLNML

SEQ ID NO: 6047 - protein, 417 aa, unidentified
MFVYVISKDGQPLMPTTRFGKVRRLLKNKKAKVIRSCPFTIKLLYEPESLVVQEVVLGQDTGSKHVGTACVANDKVLYQSEVALRNDIKKKMDNRRSSRKNRRQRKTRYRKPRFLNRANSTKKGRLPPSVRNKVQSHVDEIEFCKKILPVSKIVFEVSQFDTHLMKNPELIDKKVKRWGYQQGFNYEYSSRREAALVRDNYTCQCCGKKHVRLEVHHIIFRCMGGSDDERNLITLCEKCHKAVHDGILILTKKLKRMKLKYATQMSIIRSQLLKFYPDAIETFGFVTKENRNNLNLQKGHFIDACVIASGGKKFEQSNWLFKKRRVAKQNRKLCKGVRGEIKLSTGKILGFKRFDKVKYLGEVCFIKSRRNSGFFTLMDIDNNIIDFRDSGGRKEPSYKLLERLNIQRSALCISQII

SEQ ID NO: 6048 - protein, 431 aa, unidentified
MSKVFVLDTKKRPLDPINPAQARQLLRNKKAAIFRQFPFTIILKKSCPDSPVSSLRLKIDPGAKFTGMALVNDSTGEVVFAAELKHRGFAIRDALTSRRQLRGSRRARKTRYRQPRFLNRNLPEGWLAPSLQSRVENIKTWVERLRKLAPIEDISQELVRFDMQLMANPDIQGKEYQQGTLAGYESREYLLEKWGRQCAYCGVKDVPFQVEHIHPRAKGGSNSITNLTLSCEKCNTKKGTKDIKDFLKKDPLKLEKILKQAKRPLADAAAVNATRLVLLFVFKATGLPVETGSGGLTKFNRSQQNLEKTHWIDAACVGQSTPILNIKGVKPLLITANGHGTRQSCRTDKYGFPSRYVPRFKFVNGFQTGDIVKAVVTKGKKIGAYIGRVAVRTSGSFNISTISGLIQGISYKYCKSIHKKDGYEYGKSKIC

SEQ ID NO: 6049 - protein, 502 aa, unidentified
MSIIYVQDRHGKPLAPTTRGGHVRRLLDSKQARVVCGNPFTIRLMYGVDPCTQGFILGIDPGRTNIGVTVAAADGTCVFSAKAETNNKDVPKRMKERKAHRQASRQGERKRRQRRARKNGTCFGERKRILPGCKEPITNHYITNTEARFMNRARTKGWLTPTANQLLQSTISLVRKVCKFLPVTDVVLELNEFAFMAMDDPGIQRWEYQKGPLYGYGSVEAAVYTQQDGHCIFCEQAIAHCHHVIPASKGGSDTLENRAGLCGGHHDLVHKEQSWTDKLAELKAGMNKRYAALSVVNQIIPRLADELGKMFPGHAFATNGWSTKQFRDAHGIPKDHNTDADCIACSILENPTIKLPEKVYELRKFRRHDRAQISRMEDRNYYLPGADPKTGKPKKVLAAKNRHKRTEQKTDSLEEFRAAHPNDVGRLMVARGGPKHKDPNRVLPGAIFQVETRSGNVEQLVLQGSHGRDKNGQPLYLEFVGQGNFRPNRCKYVARGRGWQFV

SEQ ID NO: 6050 - protein, 512 aa, unidentified
  source 1..512: note = Clostridia bacterium
MSTVYVLNKDGKPLMPTTRCGHVRHLLKEQKARVVTSKPFTIQLLYEADDVVQSLYLGIDPGRTNIGVAVVKADGTAVFTAHLETRNKEIPKLMKKRKESRRARRTNGRRCRRQRRAKANGTISKKCVKHDTAQNGSVSKRAKEIGVIKRHLPGCEKDVLCIGIKNKEAKFSNRTRPEGWLTPTANQLLQTHINLVKKIRKFLPISDAVLEINKFAFMQLDNPNIQKWQYQQGPLYQKANLEEAVSEMQEHHCLFCKKPIAHYHHVVPQSENGSDTIGNIVGLCTKHHDLVHKDTAWQKKLAKKKTGLNKKYGALSVLNQIIPALTKELSSLFPKHFFATNGKSTYDYRSAHGVSKDHWLDAYCIACSVLPNDVCDSGINNRVPYELKQFRRHDRRALNNENMSRVYTLNDNVVATNRHKATKQTTDSLEEFRQNHPDDVCKLKVKEHHPTYRNMNRNYPGSVFLVGNQVHVMQGIAGSKDGEATTYKDTNANSIAAGKCKFVAKNSGILFV

SEQ ID NO: 6051 - protein, 440 aa, unidentified
QPVARPRRQILRVFVLNKRGQPLMPCSPAKARLLLKERKAIVKRRTPFTIQLTIATGEAKQPVTLGVDSGYKHIGLSATTEKAELYASQVELRQDITDLLSARLALRRSRRSRKTRYRAPRFDNRVANKREGRLAPSVENRIAAHMSRVEAVMQVLPVTAITVETAAFDTQLLKNPDITGAAYQQGEQLRFWNVREYVLFRDGHVCQHCRGKSKDPILNVHHIESRRTGGDAPNNLITLCETCHKAFHRGEIKLKVRRGKSFKAETFMGIMRRTLFERLKKAHPELNVRNTYGYLTKHKRISYGIAKSHCADAYCIADNLGAKRLEGFFFQKQTRKHNQQIHKLLILKGGLKKKNQAPYEVKGFRLFDKVICKGEEAFIFGRRTSGSFDVRRLDGTRISAGINYKKLRLLEPRTTYLTEFRKEAALPPLHKCRGVCAEFL

SEQ ID NO: 6052 - protein, 424 aa, unidentified; identical to SEQ ID NO: 3434

SEQ ID NO: 6053 - protein, 401 aa, Methanohalobium sp.
MRVFVISKNKKPLMPTRPAKARRLLKSGKAKVVRRTPFTIKLLYETTEYTQPVVAGMDSGSKHIGCAAVVNDEVLYQSEVELRDDVSRKMKDRADYRRNRRSRKTRYRKPRFDNRGNSKKENRIAPSIKNKVQSHDRERRFVESILPVKKWIVETASFDIHKITNPNVSGTGYQNGDLKGYYNIRTYVLHRDNYTCQKCKNRSKDPKLECHHIVFRSNGGTDRPDNLITLCETCHGKLHDGEFTINKKPSNTKHPTEMGIVRSQIRKLNWKFQETFGYITKYKREQKLNLEKTHYNDAVAICCDENNPNIQLSDVVYYKKHVSKGDYQQTKGVRSEKKIPTGKLHGLRKFDFIQTPDISGFVKGKRTSGNFSIMDIFGNTFKKNCRRISARCTTLTQQIQI

SEQ ID NO: 6054 - protein, 468 aa, unidentified; identical to SEQ ID NO: 4274

SEQ ID NO: 6055 - protein, 431 aa, unidentified
MVYVLNKNGQPLMPTNRHGKVRRLLKINKAKVIKRCPFTIQLLYNTTNCIQNITLGVDAGSKHIGLSATTKDKVLFEADVELRNDITKLLEARRKFRHSRRNRKTRYRKRRFNNRVSSKHKGWLTPSIEHKIQTHFAMVEKVHKMLPITKIVVETASFDMQLLKAQMEGEPIPKGMDYQKGELTGWNIREYIFHRDNYTCQWCKGKSKDSILVTHHHAYWKGDHTNKPSSLITLCNTCNDSKYHKKEANRLWGWEPKITNSYKHAAFMNVMRWVFYNRLKEIYANVSMTYGYITKNTRIKNNLPKTHYLDARCISGNPKAKSSGEYFYYKKVRCHNRQLYKANTLKGGIRKRNQAEYTVKGFRLFDRVEYQNYEYFIFGRRASGFFDIRNLNGQKVNKGSVSFKKLKLKETNKTYLIERCTVDTRDDLAPL

SEQ ID NO: 6056 - protein, 433 aa, unidentified
FDMRDKVYVISRLGHPLMPCSPAKARHLLDDGKAKVAKRTPFTIKLLYGSTEYTQPVILGLDAGSKTIGLSASTTKEELFTAEVLPRNDVVENLSTRREFRRARRNRTTRYRKPRFDNRIHSKSKGWLAPSVEVKIQDHITSIKRVCAILPISKIVVETAEFDLQLLKAVQAGKPVPEGEDYQKGEMYGSYNVRQYVLWRDNYTCTCCGVKGTDKKPIKLHVHHFESRKRGGNAPDNYGTLCEGCHKKFHLGIITDISLKTRRRPSTRDAAFMGIMRKTLMQRLKAELSIPVAETKGYITKATRVEFLKLPKTHTNDALAIAQGRHGFGIREQAYVKSTNRIYTVRPVRHHNRQLHRATILKGGIRKLNQASKYIFGFRLYDKVLYQGRECFVWGRRTSGSLLLRSIDGTKVKDGVGYRNLTLLERSTNYLIA

SEQ ID NO: 6057 - protein, 424 aa, Fervidobacterium sp.
VISKDGKPLMPTKRHGKVRRLLKQGLAKVVNREPFTIQLLYETTNYTQPVTVGIDIGSKVVGVCAVTDKEEMFSAEIQLRQDISKLLLERRQHRRFRRYRKTRYRKPRFLNRRKEDGWLPPSLQWKVDAHVRIVNKLSKIIPITKVVVEVAPFDIQKVQNPDIEGEDYQNGPQKGFADVREYCLWRAGYKSELSGKTGVLEVHHIIPRSEGGADTPSNLIVLTTQEHKMLHEGKIKIPKSRLEQVKVLKDAAHVSAIGWYIVNKLKQNYQVAITYGSITKARRATYGLEKSHRDDAFVIAGGNIQERANEWYFGKLLRRQNRSLHKANPIKGGKRPLNTIKQVKGFRRFDRVECEGKIGIVSGLRSSGYFSISSLNGEKISDSVKYTKLRLLERAKTLMFERRERATCSWLKPRVSVARRYEIP

SEQ ID NO: 6058 - protein, 406 aa, unidentified
MVYVQDIDGKPMMPTTRHGKVRRLLKANKATVVNLCPFTIQLTYKSTDHKQPVTLGIDAGAKHIGFSATTEKEELFACETILRTDIVDLLSTRSQNRRTRRSRLRYRKPKFNNRVFSKKKGWVAPSVKQRIDSHLNEVNEIHKILPITKIVIEAAQFDTHKMKNPNISGIDYQNGEQLGFWNVREYVLFRDGHKCSYCKGKSKDLILNIHHIESRKTGGDSPSNLITLCETCHKEYHKGNIGLKVRRGKSLCGAAIMGIMKWRLYDELKSRYSNVSMTFGYITKYNRIKYGIEKSHTSDAFVISKNFNAKRIEYQYLKRLVRRHNRQIHKMKILKGGKKKNNQAPFEVFGFRLFDKVLYNNEINFIYGRRKSGNFNIRDFNGENPKDVSYKKLKLIRGKRHPIILK

SEQ ID NO: 6059 - protein, 429 aa, Ktedonobacter sp.
LSNVFVIDSDCKPLNPVHPGHARRLLKQGKAAVYRRYPFTILLRRVVEQPEVQPLRLKLDPGSKTTGIALVNDANGHVVFAAELEHRGHAMKDSLDSRRASRQGRRQRKTRYRKSRFQNRRRKKGWLPPSLESRLANILTWVARLCRYAPITAISQELVRFDLQLMENPDIAGVEYQQGTLQGYEVREFLLEKWERTCAYCGKQNVPLQVEHIHPRANGGTSRMSNLTLACEPCNTAKGTQEIEVFLKKKPDVLKRLLAQVKKPLKDASAVNSTRCALLERLKALGLPVECGSGGLTKWNRTTRGLPKTHWLDAACVGKSTPDVLSQKGVIPLRIKATGHGRRQMCVPDKYGFPKQHKERKKTFLGYQTGDLVKAITPKGTFEGRIAIRHRPSFRLEKVDIHPKYMRCVQRSDGYEYTQKGVRHAPPHS

SEQ ID NO: 6060 - protein, 428 aa, unidentified; identical to SEQ ID NO: 4440

SEQ ID NO: 6061 - protein, 441 aa, Moorena sp.
MRVFVLDKNKKPLDPCKPARARILLKQGRAKVFRRYPFTIIMRDLEESECVTHNHQIKLDPGSQTTGLAIVQEKVIVWGAELTHRGLQIRDGLTSRRQLRRSRRNRKTRYRQPRFLNRKRPDGWLAPSLMSRVYNIITCGATPVGFPDLGNAHQERVKKLTRFCPITGISQELVRFDTQKMENPEISGTEYQQGTLYGYEVREYLLSKWNRKCAYCGVTDTPLEVEHIKPKSKGGSDRVSNLAIACRKCNQTKGNQEIEQFLSGKPDVIKRILSQAKRPLVDGAAVNSTRWKLYNELKALGLPIETGSGGLTKYNRCRQNLPKTHWLDAANVGKVDTLYIEVYQPLLISAKGHGTRQMCRTNKFGFPTRYVPRLKFVKGFQTGDIAKAVVTKGKKVGTYTGRIATRKTGSFNISTKHGLVQGISHQYCSIVHRKDGYAYSF

SEQ ID NO: 6062 - protein, 415 aa, Methylovulum sp.
MTTNAVFVLDTTKKPLTPCSPARARALLRDGKAAVYRTVPFTLILKVTLPDAVVKPITVKIDPGSKTTGLALVDADGRVLFGAELEHRDQAIKADLASRRALRRGRRGRKTRYRAVRFNNRVRPKGGLPPSLQHRVDACAVERVKFDMQLMKNPEISGVEYQQGTLAGYFVRKYLLEKWQRQCAYCGAKHVPLQIEHVQARANGGTNNNISNLALACKPCNTRKGTRPIQDFLNNKPEALTKILIQLKRLLADAAAVNATRNKLFAELLKTGLPVETGTGAQTQFNRTRLDYPKAHWIDAACVGESGATVTLNPDLKPLHIKATGHGTRQTVRTNKHGFPCAKAKTSKRVLGIKTGDFVRLLQTKGKYKGAFRSRVTAIKNASNFLSISLNGKQTWFSAKLATLIQLADGYSYGY

SEQ ID NO: 6063 - protein, 442 aa, unidentified; identical to SEQ ID NO: 3161

SEQ ID NO: 6064 - protein, 392 aa, unidentified
MRGQPLMPCSPTKARHLLRDKKAVVNRRTPFTIQLTIATGETKQDVTLGVDAGAKHIGLSASTEKEEVFASEVELRQDITKLLSARLAFRRSRRHRKTRYRAPRFLNRVHSKHKGWLAPSVENRIQAHMSRIDAICGLLPVTKIVIETASFDIQKIKNPDIEGTDYQQGDQLGFWNVREYVLFRDSHVCQHCRGRSKDKVLNVHHLESRQTGGDAPNNLITLCETCHKAYHAGKIKLKVKRGQSFRAEAFMGIMRWTLLDRVRKAHPGLPVENTYGYLTKHTRITHGLPKTHCVDAYCIAGNLKAVRRGVYLHQRQMRKHNRQIHKFTVLSKRLEDGTKIGYRKLNQSPYLVHGFRLFDKVREMSWANRLHLRAKIVRLLRCTEAGRRKAFP

SEQ ID NO: 6065 - protein, 431 aa, unidentified
MPNKVYVINKHGRPLMPCSPAKARHLLDAGKAKVKKRTPFTIQLVYGSSGYTQEVILGVDAGSKTIGMSASTTKEELLSAEVKPRNDVVDLLSTRREFRRARRNRKTRYRKPRFDNRVRSKHKGWLAPSVEVKIQEHITSIKMVCRILPVSKVVIETAEFDLQLLKAIADGKPVPQGEDYQKGEMYGHYNVRQYVLWRDDYTCQCCGAHATKKKEVRLHVHHLESRKVGGDAPDNQVTLCESCHEKLHKGLITAKDFKKRKRRSTRDATFMGIMRKTLMQRLCSELPIPVVKTRGYITKATREKLLVLPKSHTNDALAIAQGKQGFNVGYLPGIVQINKIYTIRPVRHHNRQLHKATILKGGIRKSNQTEKYVFGYCLFDKVQFNGQDCFIWGRRTTGIFTIKTINGKMIKDGISFKKLKLVEKSTGYLIA

SEQ ID NO: 6066 - protein, 512 aa, unidentified
MSTVYVLNKDGKPLMPTTRCGHVRHLLKEQKARVVASKPFTIQLLYETDDVVQLLYLGIDPGRTNIGVAVVKADGTAVFTAHLETRNKEIPKLMKKRKDSRRARRTNGRRCRRQRRAKANGTISKKCVKHDTAQNGSVSKHAKEIGVIKRHLPGCEKDVLCICIKNKEAKFSNRTRPEGWLTPTANQLLQTHINLVKKIQKFLPISDVVLEVNKFAFMRLDNPNIQKWQYQQGPLYQKASLEEAVSEMQEHHCLFCKNTIDHYHHVVPQHKNGRNTIDNIVGLCTKHHDLVHKETAWQEKLAKKKTGLNKKYGALSVLNQIIPALTKELSSIFPKHFFVTTGKSTYDYRAAHGVSKDNWLDAYCIACSVLPNDVCNSSINNRVPYELKQFRRHDRRALHKENMSRVYTLNGKKVATNRHKATEQTADSLEEFRQNHPDDVCKLKVKENHSEYRNPKRNFPGCVFLVGKRTHVMQGTSGSHNGKADGYYDTNGNSYSSGKCKFVAKNEGIVFA

SEQ ID NO: 6067 - protein, 420 aa, unidentified
MVYVISKRGKPLMPCTNVIARLLLKQDKAKVKRRCPFMIQLTYDATQYIQDCTLGVDTGSAHIGAAVVDADKRVLYMSETKIRNDITQKMDRRRAYRKVRRYRKARYRKTRWMNRKNSKRENRFSPTMVSKLHSHQKEIEFVKSILPITRLVIETGTFDCHLMKNPMLYNQKYRHWGYQQGPDYGFANTKAKVLNRDSYTCQCCRGKRKDSKLEVHHIVYRSKGGSNEEDNLITLCHTCHSALHHGMMKLKVNGKQKGNLRYATQMNSIRTQLLKLYPEAIETFGYVTKENLQLSGLPKTHCNDAVMIASGGNTVNFKTHSLCRKKCIPKGDYQQTKGIRSEQPLITKKIYGFRKFDKVQYLGKEYFIKGRMSTGYTVLMDIDGNKVDFSYMPKGYKTPKLKKCKRITARNGWMIQEIAI

SEQ ID NO: 6068 - protein, 458 aa, unidentified
VSYTARYVPAYRIKHITKKEVPYMVYVLDIDGQPLMPTSRHRKVRKLLNSHLAKVAKRCPFTIQLLYQSTKETQPVSLGVDAGSRHIGLAATTEQKVVYQEELVPRNDVVKLLSARRALRSSRRSRKTRYRKPRFNNRVHSKHKGWLAPSVEVKIQEHITAIKRICQILPISDIHVETAEFDLQRLKAMEEGRPLPVGTDYQLGEQYDFYNTRQYVLHRDEYTCQCCGTHDNNVKLHVHHIESRQTGGDAPNNLITLCEHCHKLLHAGKTILPKGKKRGKSYRDATFMGIMRKTLLERLRKEVDVPVSWTYGYITKYWRERAGLEKSHINDAICISKYPYAKPLDIYYLTKTVRHHNRQIHKSNFSKGGIRKRNQAPYLVKGFRLFDKVLYQGKSYFIFGRRATGYFDIRTLDGTKINKSSIGYRKLRIQDTAKAYLTETKKEARAIPHMNEFTCVLT

SEQ ID NO: 6069 - protein, 512 aa, unidentified
MSTVYVLNKDGKPLMPTTRGGHVRYLLKEKKARVVTSKPFTIQLLYETDDVVQPLYLGIDPGRTNIGVAVVKTDGTAVFTAHLETRNKEIPKLMQGRKKARRARRTNGRRCRRQRRAKANGTISKKCVKQTTAQNGSVSKRAKKIGVIKRHLPGCEKKVLCIGIKNKEAKFSNRTRPEGWLTPTANQLLQTHINLIKKIRKFLPVNDVVLEINKFAFMQLDNPNIQKWQYQQGPLYQKASLEEAVSEMQEHHCLFCKQSIVHYHHVVPQSENGSNTIGNIVGLCTKHHDLVHKDTAWQKKLAKKKTGLNKKYGALSILNQIIPALTKELSSLFPKHFFATNGKSTHDYRAAHDVSKDHWLDAYCIACSILPNDTCDKNINGRVPYKLKQFRRHDRRALHKENMSRVYTLDGKKVATNRHKAIKQTTDSLEEFRQRQPNDVCKLKVKEHHPEYRNPERNFPGCVFLVGKHTHVMQGTSGSHNGKADGYYDTNGNSYPSGKCKFVAKNKGIVFA

SEQ ID NO: 6070 - protein, 432 aa, unidentified
MLTGLLAEQVDPAGIRKGDTLKVFVLNMRGKPLMPCSPAKARHMLKAGKAVVARRTPFTIKLTIATGETKQDVTLGVDAGAKHVGISATTEKEEVFASEVELRQDITGLLADRLAFRRSRRNRKTRYRAPRFNNRVRSKHKGWLAPSVENRTQAHISRIEAICRVLPITKIVIETASFDIQKIKNPEVEGTDYQQGDQLGFWNVREYVLFRDGHVCQHCRGRSKDPILNVHHLESRKTGGDAPNNLITLCETCHKAYHAGKIKLKTRRGTSFRAEAFMGIMRRTLLDRVRKAHPELSVENTYGYLTKHKRIALGLPKTHCADAFCIAGNLNALRRGDFLYQRQTRKHNRQIHKCSILKGGVRKLHQAPFLVKGFCLFDKVKCTGRIGIIFGRRSTGSFDVRTLDGTRLSAGISSKKLTLLEKRTTFLTQLRK

SEQ ID NO: 6071 - protein, 512 aa, unidentified
MSTVYVLNSDGKPLMPTTRCGHVRYLLKKQKARVVTSNPFTIQLLYETDDVVQPLYLGIDPGRTNIGVAVVKADGTAVFTAHLETRNEEIPKLMQGRKKARRARRTNGRRCRRQRRAKANGTISKKCVKQTTAQNGSVSKRAKEIGVIKRHLPGCEKDVLCIGIKNKEAKFSNRTRPEGWLTPTANQLLKTHINLVKKIRKFLPISDVVLEINKFAFMRLDNPNIQKWQYQQGPLYQKASLEEAVSEMQEHHCLFCKKPIDHYHHVVPQHKNGSDTIGNIVGLCTKHHDFVHKDTAWQKKLAKKKTGLNKKYGALSVLNQIIPALTKELSSLFPKHFFATNGKSTHDYRIAHDVSKDHWLDAYCIACSVLPNDTCDRTINSRVPYELKQFRRHDRRALHKENMSRVYTLNGKSVATNRHKATEQTTDSLKEFRQRQPNDVCKLKVKEHHPTYRNMNRNYPGSVFLIGKQVHVMQGIAGSKNGEATTYKDTNANSIAAGKCKFVAKNSGILFV

SEQ ID NO: 6072 - protein, 406 aa, unidentified
VVYIQDIDGNPLMPTTRHGKVRRLLKSNKAIVINLCPFTIQLTYATSGYKQEVVLGVDAGTKHVGLSATTKSKELYASEIILRSDIVELLSSRRESRRRRRNRLRYRKPRFMNRIKTKKEEWVAPSVRQKIDSHLKIIGFVYSILPISKLIIEVAQFDTQKIKNPEISGKEYQEGEQLGFWNVREYVLARDGHKCQHCRGKSKDPILNVHHIESRKTGGNSPSNLITLCETCHKEFHKGKIKLKVKRSASIRDAAVMGIMKWRLYNKLKSLYPNVKMTFGYITKHDRINHGIEKSHVSDAFVISRNFNSCRLGYYYKRKLVRRHNRKIHKMKILKGGIRKRNQAPFKVFGFRLFDKVMFQGEEYFIYARRLSGQFNIRDINGENKKDVSCKKLRYIIHGLISIETG

SEQ ID NO: 6073 - protein, 414 aa, unidentified; identical to SEQ ID NO: 2588

SEQ ID NO: 6074 - protein, 415 aa, unidentified; identical to SEQ ID NO: 5616

SEQ ID NO: 6075 - protein, 442 aa, Lactobacillus sp.; identical to SEQ ID NO: 2796

SEQ ID NO: 6076 - protein, 405 aa, unidentified
LDANNKQLTPTKEQKAWFLIRKKRATLVSKYPMVIQLKKKIPDKEICKDEVRCGIDDGGLHVGVALVQKCQTRNKVVFKGVIEQRNDVKHLIDVRCGYRRYHRYHKRYRSARFNNRNSSKREERIAPSILQKRQATIRVINQLNKWINITNYWLEDVAIDIRALTDGYKPYRWQYQKSNRLDENIRKAVILRDGCKCMECGKSNCRLEVHHIKSRRLKGSSTLDNLITLCTKCHQKTESVEELYMDRYFALLNSSDNKNLNYAQHVMIGKKWLREQLSNLGMLYLTNGGDTANKRIDWDIAKSHSNDAICITDLRPDTCEIKEWVIKPMRKQSKAKTDNVLGIKHRDLVEYTFRNETHRGYVTALYPEQNAINFRSPTKHCKKVNAKKCKVLWKYSKIYWLDNVG

SEQ ID NO: 6077 - protein, 413 aa, unidentified; identical to SEQ ID NO: 3014

SEQ ID NO: 6078 - protein, 415 aa, unidentified; identical to SEQ ID NO: 2674

SEQ ID NO: 6079 - protein, 406 aa, unidentified
MVYVQDIDGKPMMPTTRHGKVRRLLKDSKAVVVNTCPFTIKLMYKTSGYKQEIVLGVDAGTKHVGLSATTKSKELYSSEVILRSDIVELLSTRRESRRTRRNRLRYRKPRFNNRIKSKRTGWVAPSVRHRIDAHIRVIDNICSILPVSRVIVEVAQFDTQKIKNPDISGDEYQEGDQLGFWNVREYILARDGHKCQHCKGKSKDPILNVHHIESRKTGGDSPSNLITLCETCHKEFHKGNIKLKVSRGKSLRDAAVMGIMKWKLYEELKSRCDNVSMTFGYITKHNRIKYGIEKSHTSDAFVISRNFNAKRIERQYLKRLIRRHNRQIHKMKILKGGKKKNNQAPFEIFRFRLFDKVLYNNEILFVYGRRKSGNFNIRDFNGENPKDVSHKKLKLIRGKRHLIILK

SEQ ID NO: 6080 - protein, 414 aa, unidentified; identical to SEQ ID NO: 2588

SEQ ID NO: 6081 - protein, 341 aa, unidentified
LLSTRRESRRARRNRKTRYRKSRFNNRVRSKHKGWLAPSVEVKIQEHITSIKMVCRILPVSKVVVETAEFDLQLLKAIEEGKPVPQGEDYQQGEMYGHYNVRQYVLWRDNYTCQCCGAHLTKKKEVRLHVHHLESRKVGGNAPGNLVTLCDRCHEKLHKGLITEKDLKKRKHRSTRDATFMGIMRKTLMQRLCSELPIPVAETRGYITKATREKLLVLPKSHTNDALAIAQGKHGFNVGYLPGIEQIDKIYTIRPVRHHNRQLHKAIILKGGIRKSNQAEKYVFGYRLFDKVQFNGQDCFIWGRRTSGYFVVKTIDGKVIHNSASFKKLRLVERASNYLIA

SEQ ID NO: 6082 - protein, 327 aa, unidentified
LRVFVLNKRGKPLMPCSPAKARLLLKEKKAIVKRRTPFTIQLTIATGESKQPVSLGVDAGYKHVGFSASTEKAELYASEVELRQDVSDLLSARRALRQSRRNRKTRYRAPRFDNRIRTKRKGWLAPSVENRINAHLSRIEAVLRLLPVTKITVETASFDMQLLKNPDISGKEYQEGEQLGFWNVREYVLFRDGHVCQHCHGRSKDPVLNVHHLESRRTGGDSPGNLITLCETCHKALHRSEITLKTKRGQSFRAEAYMGLMRWEVLNRLKTSHPGLEVHNTYGYRTKYTRIVNGIDKSHCADAFCIAGNLGAERLGEFFFQKQTRRN

SEQ ID NO: 6083 - protein, 423 aa, Lactobacillus sp.; identical to SEQ ID NO: 5050

SEQ ID NO: 6084 - protein, 420 aa, unidentified; identical to SEQ ID NO: 3089

SEQ ID NO: 6085 - protein, 458 aa, Scytonema sp.
MMITNSIFILSKNGKILKPTTPARARILQSQGKARKLRLFPFTLILDKDVDENVEPYLELRCDPGSKFTGISLVDLNKNEVVWAMELEHRGDRIKMELIKRAGVRRSRRSRRLRYRKKRFDRKKPDGWLAPSLRHRLLTTQTWIKRLLKIAPIKSIAIESVKFDLQKLETPDIEGIEYQQGTLWGYTLREALLEHWGRECVYCGQTDVPLQIEHINARSKGGSDRFSNLTLSCEKCNQKKGNKPIEQFLKNKGEILQKIKSHQKKSLSDAAAVNSTRKAIFYQAQQFGLPVISGDGASTKMIRIQSGLPKAHWIDSACVGTSEIVKLRICQPLRLTCKGHGTRQVQRVNAKGFPAIASIKKNPITGKKEVKLVSKNQKYTHATAGDYVICNLLKDRKHIKAGIYRARVKTPTNRGVEVLISGHRIEIGLQHIKLIHRSDGYEYSFTTIDHDLLRFNAI

SEQ ID NO: 6086 - protein, 419 aa, Moorena sp.
MQNYVFVIDANKQPLNPIHPRKARRLLDKGKAAVFRMYPFTIIIKTAIPNPTISPCQIKIDPGSKTTGFAIVKNDQVIWGMELEHRGGLIKKKLESRRAVRRGRRNRNTRYRKPRFLNRRRPQGWLPPSLEHRILTTQTWVKRLIKFCPVNEIWVERVKFDTQKMQNPEISGVEYQQGELAGYEVREYLLEKWGRECTYCGQPNTPLQIEHIHPRSKGGSNRVSNLCLACEKCNIRKGDKSIEDFLKKKPDLLKKIKSLAKQPLKDAAIVNATRNKLVKVLRTLKPVVTGTGAQTKYNRTKLRLPKQHWIDAACVGGIETLVLRTSQPLLVTCIGQGGRQKAALNKYGYPTRHNPLKPIKGWTTGDLAKHQKLGIGKVTPRSKGSFGFTPLGTKGYKSCKPQDISAIHRKDGYIYSFCQ

SEQ ID NO: 6087 - protein, 414 aa, unidentified; identical to SEQ ID NO: 3441

SEQ ID NO: 6088 - protein, 426 aa, unidentified
  source 1..426: note = Cyanobacteria bacterium UBA11368
MSKSNFVFVLDAGLKPLAPCTSGVARSLLKAKKAAVYRRFPFTIVLFKQVASTPESIELKIDPGSKTTGFALVQNRKVIFGAELTHRGQTIKSSLESRRSLRRGRRTRHTRYRQARFLNRTRPKGWLAPSLQHRVDTTMTWVNKFIQLAPIGAVTQELVRFDLQQLENPEISGIEYQQGELAGYEVREYLLNKWDRKCTYCETENMPLQIEHIQPKAKGGTNRISNLCLACEKCNLKKGTQDLEQFLAKKPDLLRKIKHQAKRPLKDATAVNSTRLTLFNQLKETGLPVSTGSGGLTKFNRTRLGLAKTHWLDAACVGQVETLEILIDQPLLIKATGHGTRQMCRTDKFGFPCRYVPRNKFVQGFQTGDIVRAVVVTGKKAGTYVGRVAVRSTGSFNISTSEGLVQGISHKYCKTVHKKDGYNYAF

SEQ ID NO: 6089 - protein, 465 aa, unidentified; identical to SEQ ID NO: 3909

SEQ ID NO: 6090 - protein, 461 aa, unidentified
  source 1..461: note = Candidatus Anoxychlamydiales bacterium
KLVGRDTYTPTDTPLVRSNCDLSLNREETLSVSDLKTPSNNPEVDNSSIQEAIAAYVYVISFDGKALMPCSKAKARKLLKEGKALIAFHKPFTIKLVFKCENQVQKITLGIDPGYENIGLSAVSEKEELFSAEAKLRNNISKLLAKKKMYRRNRRNKLWYRKPRFLNRKKPKSLPPSLEHKLDSHLRVVKKILSFMPISKIHIEVANFDIQKIKNPQIESSQYQRGDLYGYQNLKAYLVERESAKCQLCSKKSTKGNSFRIHHIIPRKERGTNKANNLSLLHEKCHVKLHSKKLLHILKKNKQFKPETFMSSIRWKLVSELKKLCNDVSLSFGYITKIKRNYLKLEKEHHTDAFVIAKGSYEKRARPSLFLQKRKNNRSLQLTRKGLKLSIRRQRYKIQPKDVVQVKNKKYEVIGIFNKGCWLRVKDRTKIFNFQISRVEKHYYNNGWQFIPSLKERVFLP

SEQ ID NO: 6091 - protein, 423 aa, unidentified
VPIMVYVLNINGQPLMPTNRHGKVKCLLKQGKAKVIRRCPFTIKLLYQSTAYTQNLTLGVDTGSGIIGTAVSKDNGNIVYMSETIVRNDITDKMTQRAKYRRNRRNRKTRYRKTRWLNRKNSIKTDRFSPTMQSKLHSHVKEIEYIKSILPVTTMVLETGQFDTHLMKNPSLANPNVKHWGYQKGANYGFENTKAMVLNRDNYTCQCCKGKHKDSKLEVHHIVFRSQGGSDEESNLITLCHTCHKDLHSGKINPKLKGKVKSTLKYATQMNSIRKQLFRVYPDAIETFGYVTKANRLALGIDKKHYYDACTIATQGNIFIVKSNLYKKKCVSDGDFQKTKGIRSEQSIVTDKICGFRKFDKVKYFGKEYFIKGRMSTGYAILMDIDGHKINFSTMPKGYKIPKLSNCKRVTARTSQMLQAVVI

SEQ ID NO: 6092 - protein, 431 aa, unidentified; identical to SEQ ID NO: 4535

SEQ ID NO: 6093 - protein, 330 aa, unidentified
LRVFVRNKRGKPLMPCSPAKARLLLKEKKAIVKRRTPFTIQLTIATGETKQPVSLGVDAGYKHVGLSASTEKAELYASEVELRQDITDLLSARRALRQSRRNRKTRYRAPRFDNRIRTKRKGWLAPSVENRINAHLSRIEAVLRLLPVTKITVETASFDLQLLKNPDISGKEYQEGEQLGFWNIREYVLCRDGHVCQHCYGRSKDPVLNVHHLESRRTGGDSPGNLITLCETCHKALHRGEITLKAKRGQSFRAEAFMGIMRSEVLNRLKASHPELEVNNTYGYRTKHARIANDIAKSHCADAFCIAGNLGAERLGEFFFQKQTRRNNRQ

SEQ ID NO: 6094 - protein, 367 aa, unidentified
GLAATTEKKVIYQEELIPRNDVVKLLSARRTLRRSRRSRKTRYRKPRFNNRVHSKHKGWLAPSVEVKIQEHITAIKNVCKILPVSEIHVETAEFDLQRLKAMEEGKPLPVGTDYQLGEQYDFYNTRQYVLHRDGYTCQCCDAHDKDVKLHVHHIESRQTGGNAPNNLVTLCEHCHKALHEGKIELPKNKKRGKSHRDAAFMGIMRNTLLERLKKEVDVPATMTYGYITKYWREKAGLEKSHINDAICISKHPYAKPLDAYYLTKAVRHHNRQIHKANFSKGGIRKRNQAPYLVKGFRLFDKVSYQSKEYFIFGRRATGFFDIRTLDGTKVNKGSVSYKKLRIQDTAKAYVKEVRAIPHMNEFTCVLA

SEQ ID NO: 6095 - protein, 411 aa, unidentified
MVYVQDIDGKPMMPTTRHGKVRRLLKDNKAVVVNTCPFTIKLTYKTSDYKQEIVLGVDAGTKHVGLSATTKSKELYSGEVILRNDIVELLSTRRESRRTRRNRLRYRKPRFENRVKSKRLGWVAPSVRHRIDAHIRIINNVCSILPVSRVIVEVAQFDTQKIKNPEISGKEYQEGDQLGFWNVREYVLARDGHKCQHCKGKSKDPILNIHHIESRKTGGDSPSNLITLCETCHKEFHKGNIKLKVKRGKSLRDAAVMGIMKWRLYDKLKSLYPNVRMTFGYITKYNRINHGIEKSHVSDAFVISRNFDSERLGYYYKRKLVRRHNRQIHKMKIPKGGKKRMNQSPFKVFGFKLFDKVMFQGEERFIYARRLSGQFKIKDIDGNNERNISYKKLRYVSHGLISIKTNLFLSQ

SEQ ID NO: 6096 - protein, 465 aa, unidentified; identical to SEQ ID NO: 3306

SEQ ID NO: 6097 - protein, 414 aa, unidentified
MPCSPAKARLLLKEKKAIVVRRTPFTIQLTIATGESKQPVSLGVDAGYKHVGLSASTEKAELYASEVELRPDVSDLLSARRTLRQSRRNRKTRYRAPRFDNRIRTKRKGWLAPSVENRINAHLSRIGAILRLLPVTKITVETASFDTQLLKNPDISGKEYQEGEQLGFWNVREYVLFRDGHACQHCYGRSKDPVLNVHHLESRRTGGDSPGNLITLCETCHKALHRGEITLKAKRGKSFRAEAFMGIMRWEVHNRLRALHPGIEVSNTYGYRTKHARIANGIAKSHCADAFCIAGNLGAERLCEFFFQKQTRRNHRQIHKLSILKGGIRKRNQAPFEVKGFRLFDKVACQGEEGFIFGRRSSGFFDVRKLDGTRISAGISCKKLHLLEKRGTYLTEIRKEEALPPLPEGRGLRA

SEQ ID NO: 6098 - protein, 483 aa, Oscillochloris sp.
MTPFWCVCQPEALSSAITPAWGKGGRSQARQARCALSRRTFSRKGLRSNPSMVFVLSHDRKPLDPTSHRRAGLLLKKGRAAVFRRYPFTIILKDRLAAESVTHPHRLKLDPGSKTTGIAVVAEDFGKLSRGTTGRVVWAGELTHRGQAIRDALLSRRASRRSRRQRKTRYRQPRFLNRRRPEGWLAPSLQHRVDTTLTWVRRLLRVVPVAAISTELVRFDTQLRENAEISGVEYQQGTLAGYEVRQYLLEKWGRRCAYCGAKDTPLQVEHILPRARGGSDRISNLSLACEPCNIKKGTQTAEEFGHPDIQAQARRPLKDAAAVNTTRWAMYQHLVATGLPVEVGTGGRTKFNRTCLGLEKAHWHDAACVGASTPEALDVRGVRPLLITATGHGNRQMAGLNTYGFPIRHRQRVKRHFGFQTGDIARATVTTGTKQGVYSGRVAVRASGAFNITTTSAKIQGLNHRFFRTVHRSDGYTYTAALG

SEQ ID NO: 6099 - protein, 414 aa, unidentified; identical to SEQ ID NO: 5166

SEQ ID NO: 6100 - protein, 512 aa, unidentified
MSTVYVLNKDGKPLMPTTRGGHVRHLLKEQKARVVRAKPFTIQLLYETNDVVQPLYLGIDPGRTNIGVAVVKANGTAVFTAHLETRNKEIPKLMQDRKKARRARRTNGRRCRRQRRAKANGTISKKCVKQTTAQNGSVSKRAKDIGVIKRRLPGCEKDVLCIGIKNKETKFTNRTRPEGWLTPTANQLLQTHINLVKKIQKFLPISDVVLEVNKFAFMRLDNPNIQKWQYQQGPLYKKESLESAVSEIQEHHCLFCKKPIDHYHHVVPQHKNGSNTIANIVGLCAEHHNLVHKDAAWQKKLAEEKVGLNKKYGALSVLNQIIPALTNELSSLFPKHSFVTNGKSTYDYRAAHGVSKDHWLDAYCIACSVLPSNVCDSNINNHMPYVLKQFRRHDRRVLNNENMNRVYTLNNKAVAINRHKAKDQKTVSLEEFRKEHPDDVCKLKVKEHHPTYRNMNRNFPGSVFLVGKQIHVMQGIASSKDGKATKYNDTSATAIAAGKCKFVAKNTGILFV

SEQ ID NO: 6101 - protein, 512 aa, unidentified; identical to SEQ ID NO: 4031

SEQ ID NO: 6102 - protein, 512 aa, unidentified; identical to SEQ ID NO: 4090

SEQ ID NO: 6103 - protein, 442 aa, unidentified; identical to SEQ ID NO: 2903

SEQ ID NO: 6104 - protein, 436 aa, Selenomonas sp.
MNFPLTLARRKILLQGKVTEMSKEYSFVLDANGKRLDPTIMQNAWRLVRQKKAVLVSKYPMTIQLKKVVEDENRDEVRMGIDDGAEHVGIALMQKCQTRNKVLLKATMEHRSDVSKKMTIRREYRRYHRYWKRHRPARFDNRGNSRKAGRLAPSIQQKRQAVLRIADNLLRLIRIDSFYLEDVSIDIRALTDDYQPYRWQYQKSNRLDENLRKAAILRDGGGCRECGKSDCRLEVHHIMPRRENGRNTIGNLITLCSSCHDKTKGREEQFEESYYAMIRSKGNHTGLKYVAHVMAGKTRLRAELSARLPLILTTGGDTANKRMDWGIAKSHSNDAICITGLEPESIDVQEWTLKPIRHQSKAGMEEVLGFRHHDIVAYTFKNGERHEGYVTAMYPADGKRCASLNFRSPTKHCKRANAKKCKLICRPSKIYWLQCA

SEQ ID NO: 6105 - protein, 412 aa, unidentified
  source 1..412: note = Microcoleaceae bacterium UBA10368
MKPPWVHPGTARHLLNSREAAVFRRFPFTIILKAARPQTPVQDLELKLDPGSKVTGIAIKQGNNIIFGAQLQHRGQQIKDALLSRRQLRRGRRNRKTRYRQARFLNRTRPDGWLAPSLQHRVLATMTWVRKFIRLAPITCLAQELVRFDLQLMQNPEISGVEYQQGELKGYEVREYLLEKWNRRCAYCSVENVPLEVEHIQPKSKGGSSRVSNLTIACHGCNQGKGHQDIRDFLSGKPDLLNRILKQAKSSLKDAAAVNSTRWVVFNHLKETGLPVTTGTGGQTKFNRTRLELSKSHWLDAACVGRIDGLEVLTSKPLLILAKGHGTRQMCGTDKHGFPTRHRSRTQIHKGFQTGDIVKATVTAGKKIGSHVGRVLCRASGSFDIATTAARVSGISHKYCKPIHKKDGYSYG

SEQ ID NO: 6106 - protein, 442 aa, Lactobacillus sp.; identical to SEQ ID NO: 3826

SEQ ID NO: 6107 - protein, 415 aa, unidentified; identical to SEQ ID NO: 5047

SEQ ID NO: 6108 - protein, 440 aa, Fervidobacterium sp.; identical to SEQ ID NO: 2395

SEQ ID NO: 6109 - protein, 465 aa, unidentified; identical to SEQ ID NO: 3070

SEQ ID NO: 6110 - protein, 424 aa, Enterococcus sp.; identical to SEQ ID NO: 5552

SEQ ID NO: 6111 - protein, 424 aa, unidentified
MASMQYVYVLNKHGEPLMPCSPGKARLLLKQQKACVVKRTPFTVKLLYGSAGYKQPVALGVDAGSKHVGLSASTEKRELYREEFTPRNDVVELLSTRRQNRRSRRNRKTRYRAPRFDNRVHSKHKGWLAPSVEVKIQEHITVIKRICRILPITLVRVETAEFDTQRLKAMLKGKPLPVGTDYQLGEMYDEYNVRQYVLKRDNYTCQCCGAHPTEKKPIRLHVHHIESRHVGGNAPNNLITLCVACHKALHEGKITLDKGKKRGKPLRDAAFMGIMRNTLLARLKDELNIPVKQTYGYITKLLREKNKIPKSHVNDARCIAKAPNAKPCDTMLYTRALRHHNRQIHKAKILKGGIRKKNQAPYLVKGFRLWDKVRYNGEECFITGRRSSGYFALKKYDGTVISNSASYKKLMLLEAATNYITERS

SEQ ID NO: 6112 - protein, 434 aa, Solobacterium sp.
MKVFVLNKHGNPLMPCNPKKARLLLKQQKAVVAKQMPFTIRLLYGSSGYKQPVSLGVDAGSKHIGIAATTEKEVLFAEELTPRNDVVNLMSVRRQNRRSRRNRKTRYRKVRFDNRVHAKRKGWLAPSVEVKIQEHITAIKHVQQILPITEVHVETAEFDTQRMKAVEEGRPLPVGTDYQLGEMYDSYNVRQYVLKRDNYTCQCCGKHGDGVKFHVHHLESRKTGGNAPGNLITLCEDCHKAIHAGTKTLHARKAKRGTKSLRDAAFMGIMRKTMLERLRAEPGIPVNGTYGYITKLYRDLYRIEKSHINDAIVISKHFTAVPDDVWYFAKAVRRHNRQIHKNKILKGGIRKRNQAPHVVKGCRLFDSVKYARNTYFIFGRRTSGQMDIRTLDGAKVSGGSLSFRKFSVQHCNAGALLERRKAIPPTNESVGFLA

SEQ ID NO: 6113 - protein, 536 aa, unidentified; identical to SEQ ID NO: 2718

SEQ ID NO: 6114 - protein, 420 aa, unidentified; identical to SEQ ID NO: 2812

SEQ ID NO: 6115 - protein, 393 aa, unidentified
MQNSVFVLDTNKKPLNPVHPGQARRLLKEGKAAVFRRYPFTIILKEEVTKSSKNITLKLDPGSKFTGIALVQNNQVIWGAELQHRGQQIKDSLTSRRQLRRGRRGRKTRYRQARFLNRKRPEGWLPPSLQHRVDTTLTWVKRLIRYCPINSISVELVKFDLQKQENPEISGVEYQHGTLYGWEVREYLLAKFNRTCQYCGATDKPFEVDHIHPRSKGGSDRVSNLTLACHDCNQSKGNQDIKDFLKGKTDLVNRILKQAKTPWKDAAAVNSTRWKLFNSLKELGLPVETGSGGLTKFNRKRLKVPKSHWQDAACVGKVPSNLVFKTNQPLLIKATGHGTRQRCRPNKFGFPKSHAPKAKFFQGFQTGDLVSASIPKGKFAGQYVGRIARAISS

SEQ ID NO: 6116 - protein, 535 aa, unidentified
MYRLTTEAGIPLIPERLHDTKKRKEASRMSEYIYVIGVDGDPQMPTKRKRHVEQLLQTGRARVFRQVPFTIQLTYKNEPVLQSVTIAEDPGRSNVGMAVVSLSGELLSAAIVQTRNKEIVKLMEKRKQHRRASRNGERRARQRLAKKYHTMITAGFLMRKLPMYGKDKRVRCNVIKNTESRFCNRKRENGWLTPSAEHLVRTHINLIHKMQKFLPITDVAIEINRFAFLSLEDPSISGVDFQNGPLKGYDDLNAAVEDLQDGHCLMCNSPIEHRHHIVPRSMQGSNTIGNIAGLCCKCHERVHKDTRFEDRLKKKKAGLDKRYAAVSVLNQAIPFICKRLEQEFEKEHVHYCSGRDTGMVRRSFGYHKTREEQLHEVDAWCIAVLALQHVPEKAPEFDHVHEILQFRRQDRSRIKAQTSRAYYHEGKKIAKNRKKAEGQRDDSLQEWRKRQVERYGKEQTRKMISQLEVKESIRRYNRLDRLMPGAVFYYQGVRYVMRGQHSNGQYLQAVGMGSKDFPAKKCKIVANNEGLVFVS

SEQ ID NO: 6117 - protein, 431 aa, unidentified
LNRVFVLSKTGKALMPCHPARARQLLHSKKARVKRLYPFTIQLTQRSEGYIQPIELKFDPGSKQTGIGLVLHGKNRLSAIYAAVLTHRGQEIKSNLDSRRMIRRARRNRKTRYRQARFLNRVRSKHKGWLAPSVQSRVDNIVEWSKRFMRYAPVGFITVESVKLDMQKMENAAVEGIEYQRGTLFDYEVKEYLLEKYHYSCVYCEAKNVPFEKEHVIPRSRGGSNRISNLVLSCRSCNEKKDNLLIEEFLKDNPVLLKKIKAQLKSSLKDAAAVNITRKQIVKELSDLNVPVLTGTGAETKYNRVSQGYKKEHYIDALCAGTTGAKVYISKKLKPLLIKKERRNNRQMCLVDKYGFPRGKAKGPKIVRGFKTGDIVKAVVLKGKKKGTYKGKVAVRSSGSFNIKVKQGVVEGIGWKNCIMLYRFDGYSYAY

SEQ ID NO: 6118 - protein, 413 aa, unidentified
  REGION 1..413: note = Ga0315284_10047810
NSEENHRKHKSGSDLRVLNIVYVLNKRGNALMPTCQSRARRLLKSNKAKVVKIYPFTIQLIITTGETRQDIVLGVDMGSKYIGISAISNKQELFVAEVILRTDIVELLSEKRMYRRGRRNKHHWYRKPRFNNKKKSSGWLAPSIQHKVDSHIRVINKISKLLPISKVILETAKFDIQKINDINISGKEYQNGVQKDFWNIREYVLYRDNHTCQHCKKENLILNVHHIVTRKKGGDRPDNLITLCEKCHNKFHKGKIKLDIKIKNNFKSQTCMSIIRKFIIDKLKKNYVVEETYGYLTKAKRIENKIEKSHINDAFVIANGNKQIRINSYLISQKRKNNRCLQTNRKGFAPSIRRKRYNIQPLDVVKIKDVNYIVKGMFNKGEYVRVVNSNIKVFNFKIGLIEKYFNRGTLIWK

SEQ ID NO: 6119 - protein, 419 aa, unidentified
MLVYVLNKNEKPLMPCKPQKARKLLRDGKAKVIRREPFTIQLLYGSSGYQQHITLGVDAGSKHIGLSATTSKKELFAGEVKLRTDIVNLLSTRRQFRRNRRSRKTRYRKSRFLNRVHSKHKGWLAPSIENKIQCHLSIVAKLHKVLPIDKVIVETASFDIQKIKNPNISGVEYQQGEQLGFWNVREYVLFRDGHKCQCCKGKSRDKVLNVHHIESRKTGGNAPNNLITLCETCHKGYHNGTVKLPKTIKRGMIFRDSSFMGIMRWSFYNRLKEIYPNVSMTFGYITKKVRIEAELPKEHYVDARCISGNALAKPLGMCYFIQKVRRNNRQIHKAKILRGGIRKNNQAPFVVKGFRLFDRVLYNNKPYYIFGRRSSGAFDIRTLDGEKVNKGSINCKYLRLINFRKTWLIERRSVVSSHD

SEQ ID NO: 6120 - protein, 428 aa, Enterococcus sp.; identical to SEQ ID NO: 4335

SEQ ID NO: 6121 - protein, 456 aa, unidentified
LLMVAVVDLFGKPLMPTNEYRARRLLKQKKAKIFGYRPFTIQLTERKSTEIQPIELCMDTGYIHIGISAKSERHEYLGMQIDTLTDEKLKRDDKRQYRRQRRNRKRYRAPRFDNRRRKEGWIAPSLEHKKEIHIDAIQRICKVMPITDITLEMGNFDTHVLKAVEEGKPLPQGSDYQHGERYGIATLREAVFLRDGYKCQCCEKSVKDGAILHVHHIKYRSQGGTNRMSNLITVCDKCHTPKNHKPGGKLWNWKPKLAEFKGASYMTSIRWTLYNEVTALLPNSSVHITYGAKTKESRRKLDIKKSHVNDAYVMGLFCPKHRTKPVYFKKKRRNNRVLEKFYDAKYIDSRDGKKQSGQELFNGRINRNHRKDSENLHLYRKQKVTKGKRSIRNKHYPIQPHDILLYQKKKYENAGCHNNGSRVILLPEKKSVALKQLTIYQYAGGYYRVPYESNKK

SEQ ID NO: 6122 - protein, 417 aa, unidentified
MPCSPAKARLLLKERKAIVKRRTPFTIQLTIATGEAKQPVTLGVDSGYKHIGLSATTEKAELYASEVELRQDITDLLSARLALRLSRRSRKTRYRVPRFDNRVASKRKGWLAPSVENRITAHMSRVEAVMRVLPVTAITVETAAFDTQLLKNPDITGAAYQQGEQLRFWNVREYVLFRDGHVCQHCRGKSKDPILNVHHIESRRTGGDAPNNLITLCETCHKAFHRGEIKLKVRRGKSFKAETFMGIMRRTLFERLKKAHPELNVRNTYGYLTKHKRISYGIAKSHCADAYCIADNLGAKRLEGFFFQKQTRKHNRQIHKLLILKGGLKKKNQAPYEVKGFRLFDKVICKGEEAFIFGRRTSGSFDVRRLDGTRISAGINYKKLRLLEPRTTYLTEFRKEAALPPLHKCRGVCAEFL

SEQ ID NO: 6123 - protein, 525 aa, unidentified
LCPSRSRVQATDVSTEKETLTWCRKYSELCRRATTPVWEGRTFAYLPQSQKEEPAMSVFVVGLNGCRLMPVSERKARLILNDGKASVYRKVPFTIKLNYKTGSTTQPGYLGIDTGSQHIGVSVVREGGTVLHKEEIGLRDSMTKRKLLEAKASLRRGRRCRKTRYRHPKWRPKTKRVYCEVPDKKGRHWQKQKNTFISGRPEEWLPPSLQSKTDHHIRWIKKLQGLLPEWYRLSIELGRFDPARMKDPEIHGNLYQKGPQYDYENVRAYVLDRDRYTCQVCRRKGRKLHVHHILYRSQGASDTPQYMATVCSSCHTTENHLPGGILYQWMQEQKKFTRGLRDATFMNILRKRLMKTFPDAVFTYGNITKVDREKLKLPKSHGNDATAIALVRTGVTSVQDEEPVLYIQQVRRKKRSLHEETPRKGRKEPNRTAARNSKNTKAVTVTKRRDGKKVSVTACLFDRVELNGKKGWITGFTGKACRIVDTEGNYVAATDKYTQVNISSIRILHHTGNWVTGLKWNVGKR

SEQ ID NO: 6124 - protein, 465 aa, unidentified
MSTCACVLSKNGERLMPTIRLGKVRHLLKDGKAKIIKHHPFTIQLLYDSETNIQPIEICEDVGYNYIGISVKSQSHEYVSAQYDTLQDEKACHDSCRKLRRSRRNRLRYRKPRFDNRKRGEGWLAPSLRHKKELNVNVVKMYCAVMPITHATVEVGSFDTMLVKAIEEGKATPESADYQKGPRYNLATLREAVFYRDNYVCKVCGRKATEGAILHMHHMFYWKGRHGNSLSELITVCEKCHTPANHQKSGKLYGFGENVKFADLSGAAFMNTVRWQIVNELYAAFGKDFVTVTYGAMTKEKRIALRLEKSHNNDAYAMGEFHPNCRCAFEHYEKVRRNNRILERFYDSRYIDIRTGEIATGKELFNGRINRNHKKDSENLHKYRGKRTYAGHRALLRKKVNLNPGDLVSLNGEVLIVYGTHTDKKGAVNVEFKTPAKNGRKSASLKKLKIVKATSSIHPAWEKVS

SEQ ID NO: 6125 - protein, 473 aa, unidentified; identical to SEQ ID NO: 3562
  source 1..473: note = uncultured beta proteobacterium

SEQ ID NO: 6126 - protein, 457 aa, unidentified
LKGVGMMSEIKKVDYIYVVDSNGTPLMPTSRLGMVRRWLKTGQAKWFGNSRNTIQFVRLVTTNTELTLGVDAGFHLGLSVVGNNREYYVSESLRKSEKDRITSRRELRRTRRNRLRYRKARFNNRRRKDGWLAPSIQHRLDFTIKEIKRLYKFLPITNLVVEVTPFDNQKLLNPDIQGWQYQEGKMYGFKTIKDYLLARDNYRDALDGKQYPASQLRVHHLVQRKDGGSNQPDNLVLLSDINHNQANHNNGILAKLKENRQKTLDYRGAYFMSILATRLSNYFDNYTITQGYLTANLRQKYEIKKSHLNDAFIIAGGTDTTLRTNNVYSRQKLRNNNRVLQKFYDAKYIDSRDGKKKTGKELSSGRTRRSQELNYDNLRQFRKEKVKKGRVSIRRGHYQLRPHDVVLNTRTNRIETVKGVQNSGTVIKFQTGKTCSIKSVVSLYHVNGILEKKMKNI

SEQ ID NO: 6127 - protein, 450 aa, unidentified
VGDFGRGAAPQTTACSCLHYLLSQIKNTIERIAYQMVYVLNVNGVPLMPTDRHGKVRRLLKSKQARVVKRTPFTIQLLYDTPTCVQPLTLGVDAGSKHIGLSVSSENKEVYAGQIEPRQDVSKKLDERRQYRRSRRNRLRYRKPRFNNRTASKPKGWIAPSIACKIESHVAVIGQLHQILPITEIVVEVADFDTQKILNPDIQGKEYQTGPLSNSNLRQYTFARDGYTCQWCKGKSKNKILHVHHWNYWRGDHTDKPSSVITLCDVCNDSKNHKKDGFLYGWEPKITNNLKDAAFMNISRWALYNRLKEIYPNVRLTYGYITKVVRSDHGLEKSHVNDALCIANHPNATRLLYCYLIKKNRVHNRQLHKANKLKGGRLKLNQAPHLVKGYRLNDIVKCNGQNYVITARRRTGYFQLKNFITGEKLPSVSYKKLELLEKAKNYTTERIARN

SEQ ID NO: 6128 - protein, 420 aa, unidentified
MQYVYVLNKHGEPLMPCSPGKARLLLKQQKACVVKRTPFTIKLLFGSAGYKQPITLGVDAGSKHVGLSASTEKRELYSEEFTPRSDVVELLSTRRQNRRSRRNRKTRYRVPRFDNRVHSKHKGWLAPSVEVKIQEHITVIKHICKILPISLVRVETAEFDTQRLKAMLAGKPLPVGTDYQLGEMYDEYNVRQYVLKRDHYTCQCCGTHNTAKKVVELHVHHLESRKTGGNAPSNLVTLCTTCHKNLHKGRVTLDGKERGKPLRDAAFMGIMRKTLMVRLKEELPIPVQGTYGYITKMRREQNDIKKSHVNDARCISKHPLAEPCSVCYRTKAIRHHNRQTHKANFSKGGIRKRSQMPYVVEGYRLWDKVLYKGQECFVSGRRASGSFTLKKLDGTRISKGVTFKKLRLLEPATNYLIERM

SEQ ID NO: 6129 - protein, 406 aa, unidentified; identical to SEQ ID NO: 5200

SEQ ID NO: 6130 - protein, 421 aa, unidentified; identical to SEQ ID NO: 4195

SEQ ID NO: 6131 - protein, 414 aa, unidentified
MPCSPAKARLLLKEKKAIVVRRTPFTIQLTIATGEAKQPVSLGIDAGYKHVGLSASTEKAELYASEVELRQDITDLLSARRALRQSRRNRKTRYRAPRFDNRIRTKRKGWLAPSVENRINAHLSRIETVIRLLPVTKISVETTSFDMQLLKNSDIAGKEYQESEQLGFWNVREYVLFRDGHVCQHCHGRSKDPVLNVHHLESRRTGGDSPGNLITLCETCHKELHRGEITLKAKRGQSFRAETFMGIMRWEVLDRLKASHPKLEVQNTYGYRTKHARIVNGIAKSHCADAFCIAGNLGAERLGEFLFQKQTRRNNRQIHKLSILKGGIRKRNQVPFEVKGFRLFDKVACKGEEGFVFGRRSSGYFDVRKLDGTRISTGISYKKLRLLEKRQTYLTEIRKEEALPPLPEGRGLRA

SEQ ID NO: 6132 - protein, 414 aa, unidentified; identical to SEQ ID NO: 2588

SEQ ID NO: 6133 - protein, 442 aa, unidentified; identical to SEQ ID NO: 3161

SEQ ID NO: 6134 - protein, 440 aa, Fervidobacterium sp.
MVFVLDKNKKPLMPCSEKRARLLLSRGRAVVHKMHPFTIRLKDRTVQQSELQPLRLKLDQGAKVTGLSVLREDGDVAETVFLCEIHHKTDIKQKLDARRAVRRSRRNRKTRYRKPRFLNRRRPEGWLPPSFNARADQLINAVRKLTKLLPISAISIEDAKFDTQKLQNPEISGIEYQRGTLFGYEVREYLLEKWGRRCAYCGRSDVPLEIDHIVPRSRGGTDRVSNLTLACHECNQKKSNKTAAEFGCPHIEERARQTYKQAAFMNSIRSYLSKSLSSFGIPVEYGTGALTKANRIRLGFPKEHYFDACCVGESTSSEIRITQSYVQIWCAVGRGTRQMCNTDKFGFPRGHRQRCKKHFGFQTGDIVKAIVPRGKYAGIWMGMVAVRGSGFFDIKDKNGKRVCQGIRYKYCKLIQTADGWQYSKTKTNYSISHTTEVACI

SEQ ID NO: 6135 - protein, 416 aa, unidentified
MVYVLDKNGQPLMPTDRHRKVRLMLQSGQAKVIKRCPFTIQLNYDSGHQTQEISLGIDAGSKHIGVSTTTKIKVLYEVDVELRNDIVDLLSSRRELRRGRRNRKTRYRQAKFNNRRRGNGWLAPSIRQKIGTHLTVVENICKMLPISRIMVETASFDIQKIKNPDIQGAEYQQGDQLEFWNVREYVLFRDGHTCQCCKGKSKDKILNVHHIESRKTGGNAPNNLITLCETCHTGYHKGTVQLPKAIKRGMRFKDAAFMGIMRWAFYEALKQQYEPVGTPVHNTYGYITKHTRIAYNLPKEHYVDARCISGNPEASSNGEYYYQKKVRCHNRQIHKLTVLKGGIRKQNQATYLVKGYRLFDKVSYQGKGYFVFGRRQSGFFDIRTLSGEKVNKGSLSCKKLKFIATRTYYLTERRAV

SEQ ID NO: 6136 - protein, 475 aa, unidentified
MVAVVTSTGKPLMPTSAYRARKLLKKGRAVIFKYRPYFTIQLVDRADGEVQEVEYKSDTGSVHVGISVCTEKKELLSEQRDLLENEPEHHNDRKKNRRTRRNRKRYRKPRFDNRKKKPQEGHEKWLPPTLLHKMEVQVRLFREFCRVVPVTSACFEMGKFDTQALKAVSKGEPVPEGEGYQNGERYGTDTLRAAVFLRDGHTCRFCGRSVKDGAILHVHHVGYWKGDRTNRPANLASACEQCHTPANHGKNGILYGKEPEFKTLKDASYMTSVRWIMLDEIKKAAPGVQVSVTYGVTTKRKRQELHLPKSHVNDAFSMASFHPKKRSDTEYWKKIPRHDRVLQKFYDAIYLDTRDGSEKKGSELSNGRISRNHKKDSENLHQYRGHKVSKGHNSIRRGASSLKPGSIVMYKGEKMTVHGTHTRYVKGKDGKTAKKVNVQFTCPASDGKKSASLEKCTPVSRVYNTGWKRYWPDKK

SEQ ID NO: 6137 - protein, 387 aa, Ammonifex sp.
MAPTFVGYPKVFVVDAEGKPLLPCHPARARKLLKSGKAEVLRGSPFTIKLKYPVSNPVGSLRAKVDDGSRYVGIALVNEHTGEVVFRGVLVQRGDVVRLLTLRREYRRGRRYRIVRHRPCRNRARQQVVPFPSVRQKKEAIYRVLADLAKIAPISGVDVELVSAGVKNPALPGKSTREKVLNRDGACVLCGSTRRLQRHHLVPRSKGGTDTPENQVLLCAECHRELHAGEAALDRRGKTFAWVAHAVLGKAYLLALLSRFGEVRVAEGWQTKEWRESLGLPKSHTNDALSLFLPGGPLKVFGPEYLIWPLRRRKWKNNPTKTCEEKNGFRHWDVVRAVRAGKVVFGCVRSLKARAMTLRTAKDDNFEVSYSKARLLHRPRGLAYMPA

SEQ ID NO: 6138 - protein, 456 aa, unidentified
MSTCVCVLSNSGERLMPTFRLGKVRRLLKDGKAKIVKHHPFTIQLLYDSKTNTQPIEICEDVGYNYIGISVKSKSHEYVSAQYDTLQDEKEHHDDCRKYRRTRRNRLRYRKPRFDNRKRSEGWLAPSLEHKKQLNIRLIERYVSVIPITRATVEVGSFDTMLLQAIQKGESKPEGVDYQKGPRYNLATLREAVFYRDNYTCQVCGRKIADGAILHMHHMFYWKGRHGYQLDELVTACEKCHTPANHQKGGKLFGFGEDKEFANLSGAAFMNAVRWQIVNALYATYGKEFVTITYGAMTKEKRIALQLEKTHSNDAYAMGDYYLAHRCVFRHYQKRRRNNRVLEKFYDATYIDARTGNKAKGKELFNGRINRNHKKDSENFHKYRSKKVSKGRRSIRRQRYAIQPYDTVRLEGKTYITSGCHNKGTRLLIPANGKSKSVAISKVQVVCHAGAWIQII

SEQ ID NO: 6139 - protein, 421 aa, unidentified
MRGQPLMPCSPAKARHLLKAGKAVVKRRTPFTIQLRIATGETKQNVTLGVDAGAKHVGLSATTEKEEVFASEVELRQDITGLLAARLSLRRDRRHRKTRYRAPRFLNRVRSKHKGWLAPSVENRIQAHMSRIDAVCRLLPVTKIVIETASFDIQKIKDPSVEGTDYQQGDQLGFWNVREYVLFRDGHVCQHCHDRSKDKILNVHHLESRQTGGDAPNNLITLCETCHKAYHAGKIKLKVKRGQSFRAEAFMGIMRWTLLDRVRKAHPGLPVENTYGYLTKHTRITHGLPKTHCVDAYCIAGNLKAVRRGVYLHQRQMRKHNRQIHKFTVLSKRLEDGTKIGYRKLNQSPYLVHGFRLFDKVRCLGQIGFIFGRRSSGYFDVRRLDGVKLSPSISWRKLTLLEKRSTYLTELRKQDGASSPV

SEQ ID NO: 6140 - protein, 419 aa, unidentified
MVYVISQDGKPLMPCSDPIARLLLKQGKAKVKKRDPFTIKLTYETTNYTQGLTLGVDTGSGTIGTAVSKDNGDIVYMSEVVVRNDITDKMTQRAKYRRNRRNRKTRYRKARWLNRASSIKKDRFSPTMQSKLHSHVREIEYIQSILPITEMVFETGQFDMQLMKNPSLANPKVRPWGYQKGANYGFENTKAMVLNRDNYTCQCCKGKHKDSKLEVHHIVFRSQGGSDEESNLLTLCHTCHKDLHSGKINPKLSGKVKGNLKYATQMNSIRKQLFRFYPNAIETFGYVTKANRLHLGVDKEHYYDACTIATQGNAFNVKSNLYKKKCVSDGDFQKTKGIRSEEPIVTDKICGFRKFDKVRYFGNDYFIKGRMSTGYAILMDIDGNKIDFSTMPRGYKTPKLSNCKRITARSTVMTQVKVV

SEQ ID NO: 6141 - protein, 391 aa, unidentified
VVRRTPFTIQLTIATGESKQPVSLGVDAGYKHVGLSASTEKAELYASEVELRKDITDLLSARRALRQSRRNRKTRYRAPRFDNRIRTKRKGWLAPSVENRINAHLSRIEAVLRLLPITKITVETASFDMQRLKNPDISGKEYQEGEQLGFWNVREYVLFRDGHVCRHCHGRSKDPVLNVHHLESRRTGSDSPDNLVTLCETCHKALHRGEITLKAKRGQSFRAQAFMGIMRREVLNRLKASYPELKVHETYGYLTKHARIANGIVKSHGADAFCIAGNLGAERLGEFFFQKQTRRNNRQIHKLSILKGGIRKRNQAPFEAKGFRLFDKVACQGEEGFIFGRRSSGSFDVRKLDGTRISAGISCKKLRLLEKRRTYLTEIRKEEALPPLPEG

SEQ ID NO: 6142 - protein, 392 aa, unidentified
LQFYRKEHGIMQYVYVLNKHGEPLMPCFPGKARLLLKQQKACVVKRTPFTIKLLYGSAGYKQPITLGVDAGSKHVGLSASTEKRELYREEFTPRSDVAELLSTRKQNRRSRRNRKTRYRAPRFDNRVHSKHKGWLAPSVEVKIQEHITVIKHICRILPISLVRVETAEFDTQRLKAMLAGKPLPVGTDYQLGEMYDEYNVRQYVLKRDHYTCQCCGAHNTAKKVVKLHVHHLESRKTGGNAPGNLITLCATCHENLHKGKVTLDGKERGKPLRDAAFMGIMRKTLTARLKEELPIPVQGTYGYITKMSREQNDIKKSHTNDARCISKHPLAEPCSVCYRTKAIRHHNRQTHKANFSKGGYRKRSQTPYIVEGYRLWDKVLYKGQECFVSGRR

SEQ ID NO: 6143 - protein, 341 aa, Pseudoalteromonas sp.
VALRTDVSKKMQQRAMYRRTRRNRKLRYRPARWLNRASMRKEGRLAPSLKSKLDSHLREKKQVEAILPISHWKVETASFDIHKITNPTVTGAGYQQGAQLGYYNVKAYVLQRDNYKCQSGRKTKHSAKLHVHHKVFRSQGGTDAPSNLITLCETCHNDLHAGKFELKVKRSKTKHATEIGIVKVQLKQCWDFEETFGYVTKFKREQVLGLPKTHYYDAVSICCENGELVQQAKHVLRKRHVASGDYQQTKGVRSEKWIPVGKLFGLKKHDFVQTPQGTGFVKGKRSSGYFALETILGNKVHACANIKKNTVRISARTTTLTQPMEAARILVTKVPSILAVN

SEQ ID NO: 6144 - protein, 457 aa, Tolypothrix sp.; identical to SEQ ID NO: 3020

SEQ ID NO: 6145 - protein, 412 aa, Sharpea sp.
MVYVLNISGQPLMPTDNCAKVRILLKSGKARVVRRCPFTIQLMYDTTSYTQEIALGVDSGSRHIGLSATTKDKVLFESDVEQRNDIVDLLSTRRQNRRARRSRKTRYRKQRFSNRKRKDGWLAPSVQNKVDTHLTAIRRVHEILPVSRIIVEVASFDIQKIKNPDISGTEYQQGEHMGFWNVPEYILFRDGHECQCCHGRSGAKVLNVHHIESRKTGGNAPNNLITLCETCHTGYHNGTVKLPKTIHRGMTFRDAAFMGIMRWVLYDKLRVIYPDVHLTYGYITKSIRIENGLPKDHYIDARCISGNPNAKSDGTMYCQKKVRCHNRRIHKNGILKGGIRKRNQAPYEVMGFRLFDKVKWKGRECFIFGRRSTGRMDLRLLDGTKVNASVGCKNLHLLEMRKNMLIEKRRNR

SEQ ID NO: 6146 - protein, 450 aa, unidentified
VAVFVLERTGKALMPCSEKRARLLLARGRACVHRLVPFVIRLTDRQLDTCTLQPLRIKLDPGSKTTGLALVRDTEHLNTDTGEIQRGVAVLSLIELVHRGRHISEALTARRQMRRRRRGGLRYRAPRFLNRGNKARGWLAPSLQHRINTTTAWVARFRRWSPVTALSAELVRFDMQRLQNPEISGVEYQQGTLAGYEVREYLLAKWSRKCAYCGVENVPLQIDHVHPKAKGGTNRVSNLTLACGPCNARKSAQSVDAFLAKDPKRLTALLAQAKRPLKDAAAVNATRWALVGALKATGLPVETASGGCTKFNRSRLAIPKTHALDAVCVGAVSVVTNWQKPSLTIKCTGRGSYQRTRLDKYGFPRGYLMREKSVKGFKTGDLVRAIVPTGKKAGRHTGRVAIRKSGSFNIQTLAGVVQGIGYRHCRLLQRADGYGYFFNKAACDTAQKRE

SEQ ID NO: 6147 - protein, 408 aa, unidentified
MVYVQDINGKPMMPTTRHGKVRRLLKSNKAVVVNLCPFTIKLMYVTSDYKQEIVLGVDAGTKHVGLSATTKSKELYSSEVILRNDIVDLLSTRRELRRSRRNRLRYRKPRFDNRIKSKRPGWVAPSVKYKVDAHIRVIDNVCSILPISRIVIEVAQFDTQKINNPNISGKEYQEGDQLGFWNVREYVLARDGHKCQHCKGKSKDPVLNVHHIESRKTGGDSPSNLITLCETCHKEYHKGNIDLKIKRGSSLRDAAVMGIMKWRLYEELKSKYDNISMTFGYVTKYNRIKHGIEKSHVSDAFVISKNFDAIRLGYYYKVRLVRRHNRQIHKQKIPKGGIKRPNQSPFEVFGFRLFDRVMFENSYYFIFARRKTGSFNIRDIDGKNQRDITYKKLKLSRCKRFMVQKEMD

SEQ ID NO: 6148 - protein, 512 aa, unidentified; identical to SEQ ID NO: 2906

SEQ ID NO: 6149 - protein, 421 aa, unidentified; identical to SEQ ID NO: 5773

SEQ ID NO: 6150 - protein, 361 aa, Anoxybacillus sp.
  VARIANT 361: note = X can be any naturally occurring amino acid
MVFVLDTNKRPLAPCHEAVARKLLKQGKAAIYKRFPFTIILKKSVDESEIKTTYRLKIDYGSRHTGLAILRGQEVVWLGQLDHRTDIKERIDKRRAFRRARRNRKTRYRKPRFLNRRRKDGWLPPSLESRVQNIQTWVNRLKKLCPIGYISYENTKFDTQLMRNPEINGVEYQQGTLQGYEVREYLLEKFGRKCCYCGKENVPLEVEHIIPKSRGGTDRVDNLCLACHDCNQRKGSKTAEEFGYPHIQKQVKETLKDTSAINSTRWKAYEVLKQTGLDVECGTGARTKMNRIRLDLPKTHYFDACCVGESTTNHLYFKTKEVLFIKAKGRGSRSRTNLDRYGFPRGYLARQKFFFGFQTGX

SEQ ID NO: 6151 - protein, 464 aa, Ktedonobacter sp.
LLDVPPDNIIEATITRAIGGSERSKHMSHVCVVDANKQPLDPVHPGRARLLLSQGKAAVLKRFPFTIILNVAIDAPVVEELRIKIDPGSKTTGIALVNDQSGEVVFAAELHHRGAKIKEALDDRRAVRCSRRRRHTRYRKARWQNRRRREGWLPPSLTSRISNVLTWVKRLRNLCPITAMSIELVKFDMQAMENPDIQGWEYQQGTLAGYELREYLLEKWNRMCAYCGKGNVPLQVEHIVPRANNGTHRVSNLTLACEKCNQAKGTQDIKDFLKKKPAMLKHILAQAKAPLNDAAAVNATRWELFRGVQALGLPIECGSGGLTKYNRTIRELPKTHWIDAACVGQSTPEHLNITGISPLLITATGYGNRQLCGVDKHGFPKRHRQRKKVHHGYQTGDLVRAVVPEGFAAAGRHVGRVLARATGSFDLRTARGRIEGVPVRYCRPLHRNDGYSYHSTRGGNSSPL

SEQ ID NO: 6152 - protein, 431 aa, unidentified; identical to SEQ ID NO: 3235

SEQ ID NO: 6153 - protein, 428 aa, unidentified
LKVFVLNMRGQPLMPCSPAKARHLLRDKKAVVKRRTPFTIQLTIATGETKQDVTLGVDAGAKHIGLSATTEKEEVFASEVELRQDITGLLAGRLAFRRARRHRKTRYRAPRFLNRVHSKHKGWLAPSVENRIQAHMSRIDAICGLLPVTKIVIETASFDIQKIKNPDVKGTDYQQGDQLGFWNVREYVLLRDGHVCQHCRGRSKDKILNVHHIESRKTGGDAPNNLITLCETCHKAYHAGKIKLKVKRGQSFRAEAFMGIMRWTLLDRVRKAHPDLPVENTYGYLTKNTRITLGLSKTHCVDAYCIAGNLNARRRGVFLYQRQMRKHNRQIHKCKVLSKTLKDGTKVGYRKLNQTPYLVKNFRLFDKVRCFGQTGFIFGRRTSGHFDVRTLNRTRISDCVNSKKLTLLEKRRTYLTELRKEDGASSPV

SEQ ID NO: 6154 - protein, 325 aa, unidentified; identical to SEQ ID NO: 2612

SEQ ID NO: 6155 - protein, 427 aa, Enterococcus sp.
MQVFVRNIQGKPLMPCSNRKARLLLKEGKAKIYQYNPFTIQLCYPCREYVQECHIGIDTGSKHIGVAVTSEDKVLFKGEVELRQDVKSNLDTRRSYRRDRRNRKTRYRKARFLNRKKSKKKDVWLPPSIENRMNHTFKWIDTFLSLVPNPQLHIEVGKFDIAKMINPEIQGIDYQQGQTYGFYDVRYFVFARDNYTCQCCGKSKGKILQTHHIIYRSNGGSNRADNLITVCTDCHTYKNHQKGGVLYQWQENHKKTKQYKEPPFMNILRKRIFAKYSNAVITYGSETTPKRKELGLEKTHYNDAIVISGISTIKENPDEWLLIKQFRKKKRSLHEATARKGRKEPNCLQKRNAKNKPCYKGFYLNDKVEVFGRIGHITGFASGGVYIKNSENEYITLPNKSYKKVGVSKLKLLHHNNNWQYINKRIA

SEQ ID NO: 6156 - protein, 494 aa, unidentified
MTMVYVQNKDGKPLMPTTRYCYVRLLLKEKKARVVCTTPFTIQLNYDTPDITQDLILGIDPGRTNIGVAVVKEDGQCVFSAHLETRNKEVPLLMKKRVAFRRNHRTLDRRRKRQRRAKAAGTTIAEGSVERLLPSYEKPVVCHYIRNKEARFNNRSRHQGWLTPTANHLLQTHINLIAKIAKFLPITKMVVELNRFAFMAMDNPNIRRWEYQQGPLYGLGSVEDAVYAQQDGHCLFCKKPIDHYHHVVPRHKGGSETLANRCGLCERHHALVHKDKAWAEKLVTRKGGMNKKYHALSVLNQIIPFLMEYLGEETPYDVYATDGKSTKGFRVAKYVPKEHYTDAYCIACAILGADTKVSAPVEPFELKQFRRHDRQACIRQMVDRKYLLGGEVVATNRRKAIEQKSDSLQEFRDAYGDAAVSQLTVRPHSPQYKDMARIMPGAMMDFDGAVGVFQGSSGRNNGTPNYYNSTKGARVLTKRCALLAKNVGMVFIPA

SEQ ID NO: 6157 - protein, 426 aa, unidentified
MLVYVLKQNGQPFMPTERFGKVRRLLKEKKAKVVRREPFTIKLLYEPDTDVVQACYCGVDTGSKHIGVAVVGNDRVLYQSQIELRTDIKKKMDRRRGFRRLRRSRTTRYRKARFLNRRNSIKKDRLPPSVKHKVQAHIDEIEFCKKILPVSDENVILEVSQFDIALMKNPSLTSEEVKKWGYQQGFDYGYSSRREAIRHRDNYTCQCCGKKNCRLEVHHIKFRRDGGTDDEDNLITLCKECHDGVHAGTIELNKKPKKSKNLKYATHMSIIRSQLLKKYPDAIEIFGFVTAENRNHLKLKKDHYIDACVIASGGLEFEHSNIILYKRRVSKGDYQLCKGIRGEQIIPTGKICGFRKFDKVVYLRKEYFIKGRMSSGFAVLMGIDGNKVDFSYMSKGLKTPKLLNCKRVSSRSSCLCITQKIVLNIV

SEQ ID NO: 6158 - protein, 515 aa, unidentified
MATVYVLNKDGKPLMPTTRCGHIRHLLKEKKARVVRTNPFTIKLVYETDDVVQPLYLGIDPGRTNIGVAVVKVDGTAVFTAHLETRNKEIPKLMAKRKEHRQGRRHYRRCKRQRRAAAHGTLSKKCKKQDTAQGGNISKRAQTIGVFERNLPGCEKSVLCIGIKNKEARFNNRVRPARWLTPTANQLLLTHVNFVKKICKFLPISDVVLEINKFAFMALDNPNIQKWQYQQGPLYQKGSLENAVSEQQDHHCLFCEKTIEHYDHVILRSENGSDTIANIVGLCAEHHDLIHKDDKLKEELAKKKQGLNKKYGALSVLNQIIPALTYELGSRFQGHFYVTTGKSTYDYRAAHSVSKDHWLDAYCIACSVLPDGCFDNTINSRVPYELKQFRRHDRQVCQQQNVKRKYYLDKKLVATNRHKAIKQETDSLEEYRNNGGTTDKLVVKEHKPTNKRLNRILPGALMAANGKLNVMVASRGLHNGIPDNYVFDNSSKAKPSKCTLINKNKGIVFVSNSVS

SEQ ID NO: 6159 - protein, 418 aa, Acetohalobium sp.
MAINYAFVLDNEGKMLDPTKAKKAWYLIRQGKAELVEEYPLIIQLNRTVPSSQINDDEIVLGIDDGAKYVGVALVQDCKTKNKVLFKAKMKQRQDVSAKMEERNDYRGYRRSHKRYRPKRFDNRFASKRKGRLPPSIKQRKQAILRVVKHLSKHIRLDKIILEDVSIDIRKLTEGEELYSWQYQESNRLDENLRKATLKRDDYTCQLCEVEDTMLHAHHIIPVRDGGADSIYNLITLCADCHNNKVDNNEYKYKDQLLTKIDGKELNLKPAMHVMQGKSWLREELSTMAKLEITTGGDTANRRIDYNIEKTHSNDAICITGLLPIDRLDIKGYFIKPLRKKRASKIDSLGDFKHRDVIRYIKRDGTTYLGYITALRVKNNKYNSKVCNFTTLDGEKTFRGYGLTNLTLVNRPQGLMII

SEQ ID NO: 6160 - protein, 409 aa, Microcoleus sp.
MSNQPNYVFVLDTNRKPLTPCKPSLARKLLTTGKAKVFKLYPFTIILNKEVVDTPRPLTLKIDPGSRVTGLALLSGSTLLWVAELTHRGQAIKVSLESRRSLRRGRRNRHTRYRQARFLNRTRPKGSLAPSLQHRVETTLTWVRRLSKLAPINAVFQELVRFDLQQLENPEISGVEYQQGELAGYEVREYLLNKWDRKCAYCGAQNLPLQVEHIQPKAQGGSNRISNLCLACEPCNIKKGTKNINIFLAKKPEVLKRIMALTKRPLKDAAAVNSTRGTLFGLLKETGLTISTGSGGLTKFNRTQLNLPKTHFFDAACVGDTPELLVLANQPLLIKATGHGSRQMCRTDKFGFPSRYVPRFKFVKGFQTGDIVKAIVTSGKKMGAYTGRVAVRLAWELQYLNNNWVNSRN

SEQ ID NO: 6161 - protein, 431 aa, unidentified
MDAWDIIVVLNKRGKPLMPCSPAKARLLLKEKKAIVKRRTPFTIQLTIATGESKQPVTLGVDAGYKHVGLSASTEKAELYASEVELRQDVSDLLSARRALRQSRRNRKTRYRAPRFNNRLRTKRKGWLAPSVENRINAHLSRIEAVLRLLPVTKITVETASFDMQLLKNPDIAGKEYQEGEQLGFWNVREYVLFRDRHVCQHCYGRSKDPVLNVHHLESRRTGGDSPDNLITLCETCHKALHRGDITLKAKRGKSFRAEAFMGIMRWEVHNRLRALHPGIEVSNTYGYRTKHARIANGIAKSHCADAFCIAGNLGAERLCEFFFQKQTRRNNRQIHKLSILKGGIRKRNQAPFEVKGFRLFDKVACQGEEGFIFGRRSSGFFDVRKLDGTRISAGISCKKLHLLEKRRTYLTEIRKEEALPPLPEGRGLRA

SEQ ID NO: 6162 - protein, 447 aa, unidentified
  REGION 1..447: note = Ga0315294_10071848
MQKLKQRTKKNTPTDTPQVCSNCGLLLNKEETLSVTNLKTCLNNPEVDLPSHTKGLKASVYVISVDGKVLMPCKPAKARKLLKTQRAVVVKLYPFTIKLTFQCENQVQEVELGIDSGYQNIGFSCITAKRELASGTVILDGRTSSRLTERKMYRRGRRNKLWYRKPRFLNRKKSKGWLPPSVQRRYNTHLSLINRLKAILPISKITIEVANFDIQKIENENINGIGYQEGDMYGYQNVRSFLMAREKGKCQLCKKEFEKGSPSHIHHCKQRSEEGSNRVKNLAILHKKCHTKLHEKGLKLSISKQYKTPTFLSIINKRFKTDVSDVNITFGYITFTERIKLSLEKTHYNDAFVITGGNNQERCLPIEVRQKHRNNRAIQLNRKGFAPSIRKQRHAIQPKDLVWIDGKKLVAKSTHCNGTRVITEASKKSFSIKKVEKTYHYGSFTYN

SEQ ID NO: 6163 - protein, 420 aa, unidentified
MQYVYVLNKHGEPLMPCSPGKARLLLKQQKAHVVKRTPFTIKLLYGSTGYKQPITLGVDAGSKHVGLSASTEKRELYCEEFTPRNDVVELLSTRRQSRRSRRNRKTRYSAPRFNNRVHGKHKGWLAPSVEVKIQEHITVIKRICRILPVTLVRVETAEFDTQRLKAMLAGKPLPVGTDYQLGEMYDKYNVRQYVLKRDNYTCQCCGAHTTAKKAVKLRVHHLESRKVGGNAPSNLITLCTTCHNALHKGKVSLDGKERGKPLRDTAFMGIMRKTLMTQLREELPIPVQGTYGYITKMRREQNNIKKSHVNDARCISKHPLAEPCSVCYRTKAIRHHNRQTHKANFSKGGIRKRSQMPYVVEGYRLWDKVLYNGQECFVSGRRASGSFTLKKLDGTRVSKGVTFKKLQLLEPATNYLIERM

SEQ ID NO: 6164 - protein, 431 aa, unidentified; identical to SEQ ID NO: 5812

SEQ ID NO: 6165 - protein, 431 aa, unidentified; identical to SEQ ID NO: 3801

SEQ ID NO: 6166 - protein, 512 aa, unidentified; identical to SEQ ID NO: 4350

SEQ ID NO: 6167 - protein, 376 aa, unidentified
  source 1..376: note = Microcoleaceae bacterium UBA11344
MSNFVFVLDTQKRSLNLIRPGRARKLLTTGKAAVFKRYPFTIILKVEVTATPEPITLKIDPGSQTTGIALVQGEKVLWGAELNHRVETTLTWAKKLTKFAPINKIVQELVRFDLQQLENPEISGFEYQQGTLFGYEVREYLLNKWDRKCAYCGVENVPLQVEHIHPKTQGGTNRISNLCLACEKCNLKKGAQNIEQFLAKKPEVLKRILSQVKRPLKDATAVNSTRWALFNRLKETGLPVSTGSGGLTKFNRPRLNLPKTHWIDAACVGQITSLKLLTNQPLLIKATGHGTRQMCRTDKFGFPSRYVPRLKFVKGFQTGDIVKAIVTSGKKIGTYIGRVAVRASGSFNISASELVSGISYKYCSIIHRKDGYSYAA

SEQ ID NO: 6168 - protein, 415 aa, unidentified; identical to SEQ ID NO: 2674

SEQ ID NO: 6169 - protein, 442 aa, unidentified
MSTTVFVLDKKHRPLMPCRPARARRLLRAGRARVVKRFPFVIRLVDRTVEQSEVQPVLIKLDPGSRETGAAVVRDDEKKRHHALAFFVIKHRGGAIRDALKARSAFRRRRRSQNLRCRSPRFLNRVKPKGWLPPSLRHRVETTLSFVRRMCRYLPVSGIATELVKFDSQKLQNPEVSGVDYQQGTLFEYEVREYLLEKFGRKCVYCGAEGVPLNIDHVVPRAKGGSNRVSNLVLACMSCNQKKGARSLEDFLKGKPKVLARVRRELKTPLRDAAAVNATRWVLFNELKATGLPVETGSGALTKLNRHAFGVEKEHWLDALCVGRLNGVVTRKGLNVLEIRCMGRGSRQRTRLTKYGFPRGYLMRQKCVHGFATGDMVEANVPKGKKAGLWRGRVAVRVSGSFNIQTPKGVIQGVGWKHCRLISHNDGYGYAWLGHAPHSSPA

SEQ ID NO: 6170 - protein, 490 aa, unidentified
MNYVYVLDKKGKPLMPTTRYGKVRRMLKSGQAKPVQNLPFTIQLTYIPKTTVCQPVIVGFDPGRTNIGISAVREDGTCLNLTHCETRNREIPKLMQKRKEHRQTSRRGERLVRKRLAKRHGTVSSKPLERILPGCEKPLKVKDIINTESRFNNRLRSEGWLTPTATQLLRTHVNLLKRMCQILPATDVVMEVNRFAFMQLDQPNVKKCGIDFQHGPLFGTDGIKEAVSIQQDGRCLLCEKRTIEHYHHIVPRAYRGSDTAENIAGLCAGCHKLVHTSREASNKLKHKKDGINKKYGGISVLNQVIPFLFMEFEQMFPGHTYATNGWNTKQFREKYRLAKDHSVDAYCIAASILPEPKVELPEDTHEIVQYRRHDRARIKRQTERTYCLGKKGVCKNRHKRFEQKTDSLEEYVEKYPNFLSNLTVKKSQRSYNDLKRVLPGAVILYQGKRYILSGRSSGGKQYRMLGYGNQNFTASKCTIVQQNTGLVYVS

SEQ ID NO: 6171 - protein, 427 aa, Fischerella sp.
MSKVFVIDLEKRPLDPVHPAQARQLLRNKKAAVFRRFPFTIILKDSQAYAPVQPIRLKIDPGAKHTGIALVNDSTGEVVFAAELKHRGFAIRDALTSRRQLRRGRRNRKTRYRKPRFLNRTRLEGWLVPSLQSRVENIKTWVERLRKLVPITTISQELVRFDMQLMRNPNIQGKEYQQGTLAGYETREYLLEKWDRQCAYCGVKDVPLQIEHIHPRAKGGSNSITNLTLSCSKCNTNKGTKDIKDFLKKDPLRLQKILKQACIPLADAAVVNTTRFALFEVLKSTGLPVETGSGGLTKFNRSQQNLEKSHWLDAACVGKSTPILDIKSVKPLLITANGHGTRQSCRTDKFGFPNRHCSRTKFHFGFQTGDIVKAVVTSGKKVGEYAGRIATRASGSFNISTKNGLVQGISYKYCKHIHKKDGYSYAT

SEQ ID NO: 6172 - protein, 453 aa, unidentified
LDTVAVISASGKKLMPTNSYRARGLLKSKRAVIHKYRPVFTIKLVDRTNGYTQPIEYKCDTGYQNIGISICSDTKEFVNEQRDLLKDEVKKHSDSRRYRRTRRNHLRYRKKRFDNRRGMISRDGFAPSIRNKRDVHVRLYEEYYKIFPIAKAVFEMGQFDTQVLKAIEAGLPVPKGTDYQRGEQYGYATLREAVFARDDYKCICCGKSAIKDGVKLRIHHIGYLSGDRSNRMANLGSVCENCHTPNNHKYGGKLYNLKPKLKELKGATFMTTVRYSMIKNLKAATPNVDIKVTYGAATKLARKDLNVRKTHSNDAYCMGEFHPKHRSDFKHYKKCRRNNRVLSRFYDAKYRDLRDGSTKTGSQLSCGRTNRKISRHTKLDERIYRAHKISKGRISTRRQHYSLRPGDKVLYDGKVYFAKGVQSNGTSIKLANGKACPLKKVSILQHCNAWAIV

SEQ ID NO: 6173 - protein, 428 aa, Enterococcus sp.; identical to SEQ ID NO: 4335

SEQ ID NO: 6174 - protein, 321 aa, unidentified
HINLVKKIQKFLPISDVVLEVNKFAFMQLDNPNIQKWQYQQGPLYQKANLEEAVSEMQEHHCLFCKKPIAHYHHVVPQSENGSDTIGNIVGLCTKHHDLVHKDTEWQKKLAKKKTGLNKKYGALSVLNQIIPALTKELSSLFPKHFFATNGKSTYDYRAAHGVSKDHWLDAYCIACSVLADDVCDNNINSHVPYELKQFRRHDRRALHKENMSRVYTLNGKSVATNRHKATEQTTDSLEEFRQRQPNDVCKLKVKEHHPEYRNPKRNFPGCVFLVGKHTHVMQGTSGSHNGKADGYYDTNGNSYSSGECKFVAKNGGIVFA

SEQ ID NO: 6175 - protein, 406 aa, unidentified
LLDEGKAKVKKRTPFTIQLIYGSSGYTQEVILGVDAGSKTIGMSVSTTKEELLSAEVKPRNDVVDLLSTRREFRRARRNRKTRYRKPRFDNRVRSKHKGWLAPSVEVKIQEHITSIKRVCRILPVSKVVIETAEFDLQLLKAIEESKPVPQGEDYQQGEMYGHYNVRQYVLWRDGYTCQCCGAHATKKKEVRLHVHHLESRKVDGDAPDNQVTLCESCHEKLHKGLIAEKDFKKRKRKSTRDATFMGIMRKTLMQRLCSELPIPVIETRGYITKATREKLLVLPKSHTNDALAIAQGKQGFNVGYLPEIAQIDKICTIRPVRHHNRQLHKATILKGGIRKSNQTEKYVFGYRLFDKVQFNGQDCFIWGRRTTGIFTIKTINGKMIKDGISFKKLKPVEKSTSYLIA

SEQ ID NO: 6176 - protein, 406 aa, unidentified
MVYVQDINGKPMMPTTRHGKVRRLLKDKKAVVVNLCPFTIKLMYVTSDYKQEIVLGVDAGTKHVGLSATTKSKELYSSEVILRNDIVDLLSTRRELRRARRNRLRYRKPRFNNRIKSKRPGWTAPSVKYKIDAHIRVIDNVCSILPIFRIVIEVAQFDTQKIKNPNISGKEYQEGDQLGFWNTREYVLARDGHKCQYCKGKSKDKILNVHHLESRKTGGDSPSNLITLCETCHKEYHKGNIDLKIKRGSSLRDAAVMGIMKWKLYEELRSRYDRVSMTFGYITKHNRIKYGIEKSHTSDAFVISKNINAKRIGCQYLKRLIRRHNRQIHKMKILKGGKKKNNQAPFEVFGFRLFDKVLYNNKICFVYGRRKSGSFNIRDFNGENSKDVSRKKFKLIRGKRHPIILK

SEQ ID NO: 6177 - protein, 442 aa, Lactobacillus sp.
MKHENANRVFLLNKDGKPLMPCRPRKARQLLKSGKAFVVKKYPFTIQLKYGSYGYKQKVSLGVDTGQRHIGFAVVSQDKVLHQSEVELRQDVHTNLYTRKIYRRGRRNRKTRYRQARFLNRVHGKRDGLWLPPSVKSKVSHNIAWIKRYLAVLPNPDLHIEVGKFDMAKMVNPDISGKQYQEGSLKDWKNYEYYVLARDEYTCQLCYKHGEGVKLVVHHIVYRSQGGTDRVDNLITLCTNCHTTKNHQPGGKLYKWMKAKKKVTKQLKGATFMNILRKRIMTTFPEASFQYGSQTYVDRKNLLLPKGHFMDAIAISGIKPVGQMPETVTMISQFRKKKRSLHEATARKGRKQPNTSSKRNEKNTKYARGLWLNDYVRVIGNNAKGYVKGFKSNGYSVYLTDGLGNYVLNDGRNYVNSKQCQLITHNSSWQKAEQMLSLYEFK

SEQ ID NO: 6178 - protein, 424 aa, unidentified; identical to SEQ ID NO: 5750

SEQ ID NO: 6179 - protein, 425 aa, Tolypothrix sp.
MQNYVFVIDQNKQPLNPVSPARARELLTKQKAAAYRVYPFVIILKHVVDNPNPKPLTIKLDPGSKITGIAILDQDKVVWAAELEHRGWQIKNALESRRSLRRNRRNRKTRYRQPRFNNRKRKEGWLAPSLMHRVLTIETWVKRLCLYSPITEIAMELVKFDTQKMQNPEISGAEYQQGELAGYEVREYLLEKWGRKCAYCDKEGVPLQVEHIHPRAKGGSNRVSNLTLSCERCNTKKGTKSINEFLKTDGSRLEKIKRQAKQPLKDAAAVNATRWELFRTLKNTLPTTTGTGGQTKYNRTRFELPKQHWIDAACVGDVERIQLLTQQPLRIKCTGWGTRQMCGTDRHGFPTRHRERSSVHFGFKTGDIVKAVVTTGKKVGEYVGRVLCRKTGSFDIATKSGRVAGISHKFCSLIHQKDGYSYASF

SEQ ID NO: 6180 - protein, 406 aa, unidentified; identical to SEQ ID NO: 2874

SEQ ID NO: 6181 - protein, 378 aa, unidentified
MRVFVLDKNRKPLDPCHPAKARKLLKSGRAKVLRRYPFTIIIKDLEAENCSTHNHQLKIDPGAKTTGLAIVQGDRVIWGAELTHRGFQIKEALTSRRQLRRSRRNRKTRYRQPRFLNRTRQKGWLAPSLMSRVHNILTWVNKLIKFCPIAGISQELVRFDTQKMLNPEISGIEYQQGTLYGYELREYLLEKWDRTCAYCGAKNTRLEIEHIKPKSKGGSDRVSNLAIACHNCNQAKGNLEIEEFLSSKPDILKRILSQAKKPLADAAAVNATRWRLHDELKLIGLPVEVGSGGLTKYNRCRQNLPKTHWLDAANVGKVETLYISDYQPLLIAAKGHGKRQVCGTNKYGFPIRHHSRKKIHKGFQTGDIVKAVVTKGKK

SEQ ID NO: 6182 - protein, 435 aa, unidentified
MVYVLDIDGQPLMPTSRHRKVRKLLNSHLAKVAKRCPFTIQLLYQSTKETQPVSLGVDAGSRHIGLSATTEREVVYQEELVPRNDIVKLLSARRALRRSRRNRKTRYRRVRFNNRVHSKHKGWLAPSVEVKIQEHITATKRICQILPIFDIHVETAEFDLQRLKAMEEGRPLPVGTDYQLGEQYDFYNTRQYVLHRDEYTCQCCGTHDNNVKLHVHHIESRQTGGDAPNNLITLCEHCHKLLHAGKTILPKGKKRGKSYRDATFMGIMRKTLLERLRKEVDVPVSWTYGYITKYWREKTDLEKSHINDAICISKYPYAKPLDTYYLTKAVRHHNRQIHKSNFSKGGIRKRNQAPYLVKGFRLFDKVLYQGKSYFIFGRRATGYFDIRTLDGTKINKGSIGYRKLRIQDTAKAYLTETKKEARAIPHMNEFTCVLA

SEQ ID NO: 6183 - protein, 433 aa, unidentified
MGQSIIYVQNIKGQPLMPTRRHNKVWYWLRKGLAHLVSREPFTIRLRFQTTGHTQLATVGVDTGSQTVGIAAITNEEVVLQAEVRLRDDITERMRQRRQYRRHRRGHKTRYRKPRWLNRRKTDGWLPPTLQSKAEATIKAVRWVTTLLPVHQIKVEVGSFDTQKMQNPEITGVTYQQGELYGYLMREYVLSKWKRQCSYCHTTGVPLQLEHIIPKARGGSDRVSNLCLACEKCNLAKGTQTATEFGYPQVQVQAKIPLKDAAHVSSIKTRIVHDLQAIFGAHQVSITYGYETKYKRIQVLGLCKSHTNDAVAIAYEIGEVPKPLETIHHLRCLARGQYQRFNGQRSEHKCWAPRKVRGFKLYELVKARGQVGYIAGRREKGAFIIKDVTSGKKLAEVTPRKLVRVARPKEGWMVVRLPTLESIRKESGASSPS

SEQ ID NO: 6184 - protein, 422 aa, unidentified
MQYVYVVGSNGKPLMPCSPTKARKLLKSKSAAVLQRTPFTIKLLHHAGGYKQPITLGVDAGSKHVGLSACTDTEELYKEELTPRNDVVKLLSARRECRRGRRHRKTRYRAPRFNNRVHSKHKGWLAPSVEVKIQEHITAIHRICRRLPITKIVVETAEFDTQRLKAMLEGKPLPVGIDYKRGEMYDEYNVRQYVLKRDNYTCQHCGARGSAEKGIKLHVHHLETRQTGGNAPNNLITLCKDCHTALHDGKITLKLDKKKRGKPLRDSAFMGIMRKTLLSRIRKEVAIPVVETQGYITKLLREENHIQKSHTNDARCIAGCPKALPCDTTYHTKAIRHHNRKIHKTNILKGGVRKLNQAPYKVFGFRIWDKVKYKGQECFITGRRSSGYFALKKLGGTTISNSANYKKIHFLEPANHYIIERS

SEQ ID NO: 6185 - protein, 429 aa, Ktedonobacter sp.; identical to SEQ ID NO: 6059

SEQ ID NO: 6186 - protein, 496 aa, unidentified; identical to SEQ ID NO: 2063

SEQ ID NO: 6187 - protein, 512 aa, unidentified
MSTIYVLNKDGEPLMPTTRGGHVRHLLKEQKARVVQSNPFTIQLLYETNDVVQPLYLGIDPGRTNIGVAVVKADGTAVFAAHLETRNKKIPKLMQDRKKARRARRTNGRRCRRQRRAKANGTISKKCVKQDTAQSKNPSKRAKEIGVIKRHLPGCKKDVLCVGIKNKEAKYTNRARLEGWLTPTANQLVQTHINLVKKIQKFLPISDVVLEVNKFAFMRLDNPNIQKWQYQRGPLYQKGSLENAVSEMQEHHCLFCEKPIEHYHHVVPKSENGSNTIANIVGLCAEHHNLVHKDVAWQEKLVEEKTGLNKKYGALSVLNQIIPALTKELSFLFPKHSFMTNGKSTHDYRAAHGISKDHWLDAYCIACSVLPIDVCDSTINNCVPYELKQFRRHDRRALNNENMNRVYTLNDKVVATNRHKATEQEAASLEEFRKEHPNDVCKLKVKEHHPTYRNMNRNYPGSVFLVGKQIHVMQGIASSKDGKATKYNDTRATTIAAGKCKFVAKNSGILFV

SEQ ID NO: 6188 - protein, 413 aa, unidentified; identical to SEQ ID NO: 2636

SEQ ID NO: 6189 - protein, 406 aa, unidentified; identical to SEQ ID NO: 6079

SEQ ID NO: 6190 - protein, 442 aa, Lactobacillus sp.; identical to SEQ ID NO: 5193

SEQ ID NO: 6191 - protein, 515 aa, Streptomyces sp.
VRRPTAPCFLSGALWNPQEQTPLGVGTKRLADPRPPCRARVLNMGEGRSCRRAPIWQDVTPPPLQRGRARPVRVIQRCSFWTDTTNRSCHVRRPVPAKLLSHGRAVVHRHTPFVIRLKDRTAATSEVTGAELGIDPGSRFTGIALFRAVDEADASVRHGLFAIELVHRGGPISVRLTSRATLRRARRQRNLRYRAPRFNNRARPEGWLAPSLRHRVDTITAWVNRMTRWAPVRAVHVELSVFDPHAMSAGTSASVAEYRGGTLQGMEVREYLLMKWNRACAYCGATSTPLNIDHIHPRSRGGSDRVSNLTLACLPCNKRKSNMPVEDFLKKKPAVLSKILQQAKTPLRDAAAMNATRCAVLRALKALHPDVRPSTGGRTRWNRRRTSTPKSHTLDALCVGVLASVVRHPKAIQVVTATGRGTYRRTAPDRYGFPRLALPRTKQYFGYATGDLVRANVPNGKRQGNHTGRVAVRVTGNFNIKTRHGLVQGVNHRHVRLLQRADGYAYTTRAEVAHA

SEQ ID NO: 6192 - protein, 404 aa, unidentified
LLKEKKAIVKRRTPFTIQLTIATGETKQPGSLGVDAGYEHVGLSASTEKAELYASEVELRQDITDLLSARRALRQSRRNRKTRYRAPRFDNRIRTKRKGWLAPSVENRINAHLSRIEAVLRLLPVTKITVETASFDLQLLKNPDISGKEYQEGEQLGFWNIREYVLCRDGHVCQHCYGRSKDPVLNVHHLESRRTGGDSPGNLITLCETCHKALHRGEITLKAKRGQSFRAEAFMGIMRWEVLNRLKASHPELEVNNTYGYRTKHARISNGIAKSHCADAFCIAGNLGAKRLGEFFFQKQTRRNNRQIHKLSILKGGIRKRNQAPFEVKGFRLFDKVACQGEEGFIFGRRSSGFFDVRKLDGTRISAGISCKKLHLLEKRRTYLTEIRKEEALPPLPEGRGLRA

SEQ ID NO: 6193 - protein, 417 aa, unidentified
MFVYVLDKNGQPLMPTQRFGKVRRLLRDKKAKVIRSCPFTIRLLYEPETKIVQNIVLGVDTGSKYVGIACVGNDKVLYQSQVELRDDIKLKMDSRRMYRRNRRQRKTRYRKCRFLNKRNSIREDRYCPTITSKCFGHIREIEFCKRILPIKHIVFETAKFDTQLMEKPWLQEQKWAYRKGVNYGYANAREHALIRDKYTCKCCGKKNCRIEAHHIVFRSKNGSNDLENYVTLCEDCHKAVHLGKIELKLKGKHRSNLRHATQMSIIRSMLLRKYPNVIETFGFVTKANRENLGLKKSHCIDACVIASGGLKFKELGVLYRKKCVPVQSRILARGNRGEQRLPTGKVHGFKRYDKVKYLGVVCFVKARRVGGSFTLMDINSKVLDFRGVGGKNYPLYKYIERLNTRSSVLCISERMGE

SEQ ID NO: 6194 - protein, 256 aa, unidentified
LQFYRKEHGIMQYVYVLSKHGEPMMPCSPGKARLLLKQQKACVVRRTPFTIKLLYGSAGYKQPITLGVDAGSKHVGLSASTEKRELYREEFTPRNDVVELLSTRRQNRRSRRNRKTRYRAPRFDNRVHSKHKGWLAPSVEVKIQEHITIIKRICKILPISLVRVETAEFDTQRLKAMLAGKPLPVGTDYQLGEMYDEYNVRQYVLKRDNYTCQCCGAHTTAKKLVKLHVHHLESRKTGGNAPSNLVTLCTTCHKNL

SEQ ID NO: 6195 - protein, 512 aa, unidentified
MSTVYVLNKDGKPLMPTTRGGHVRHLLKEQKARVVRTKPFTIQLLYETKDVVQPLYLGIDPGRTNIGVAVVKENGTTVFTAHLETRNKEIPKLMKKRKESRCARRTNGRRCRRQRRAKANGTLSKKCVKQTTAQNGSVSKRAKEIGVIKRRLPGCEKDVLCIGIKNKEAKFTNRTRPEGWLTPTANQLLQTHINLVKKIRKYLPISDVVLEVNKFAFMALDNPNIQKWQYQQGPLYKKESLESAVSEMQEHHCLFCKKPIDHYHHVVPQHKNGSNTIGNIVGLCTKHHDLVHKEAAWQEKLAKKKTGLNKKYGALSVLNQIIPALTKELSSLFPKHFFATNGKSTYDYRSAHGISKDHWLDAYCIACSVLPNDVCDSGINNRVPYELKQFRRHDRRALNNENMSRVYTLNDNVVATNRHKATKQTTDSLEEFRQNHPDDVCKLKVKEHHPTYRNMNRNYPGNVFLIGKQVHVMQGIAGSKDGEATTYKDTNANSIAAGKCKFVAKNSGILFV

SEQ ID NO: 6196 - protein, 365 aa, unidentified
VSEMTSYSFVLDANGKQLAPTKEPKAWFLIRKKRAALVSKYPMVIQLKKKIQENEICKDEIRCGIDDGGLHVGIALVQKCKSKNKVVFKGTIEQRNDVKHLMEVRRNYRRYHRYHKRYRQARFDNRKSSKRKGRIAPSILQKRQATIRVINRLNKWINITNYWLEDVSIDIRVLTDGYKSYSWQYQKSNRLDENIRKATILRDGGKCMECGKSNCRLEVHHIKPRRRNGSNTLDNLITLCESCHQKTEGQEELYMDRYFSLLKSSDNKNLNYAQHVMIGKMWLRKQLSGLGVLYLTSGGDTANKRIDWNIEKSHTNDAVCITDLQPDTCDIKEWAIKPMRRQSKAKTDHVLGIHHRDLVEYTFKN

SEQ ID NO: 6197 - protein, 434 aa, Lactobacillus sp.
MQNRVFVINKHGKALMPCKPRKARILLRDGKAKVLKKEPFTIQLLYGSTGYKQDISVGIDSGQRYIGLAVTSQNKVLFQGEVELRQDVKKLIDTRRTYRRSRRNRKTRYRKSRFLNRIAKKKDNWLPPSVASKVNHNINWIKRLLSVLPKADLHIEVGKFDMQKMKNPEINGEGYQQGDLYGYQTVKQFVLARDNYTCQVCKKKGGKFKIHHIIYRSLGGTNTVDNLITVCSNCHTTKNHQTGILAKWCKDKMKVNKSYKGATFMNILKRRLFLAFPQAKFQYGAWTTLQRVDLDLTKSHYNDAVAISGIRKVKAKPTSIMMFKQFRKKKRSLHEATARKGRKTPNITSKRNAKNTKYAKGFWLNDYVKIKDSNKKGYISGFMSKGTNVRLRDIFGEYVSNSDKSYTSTKNISLINHSNNWQKQVITEKQYIMG

SEQ ID NO: 6198 - protein, 413 aa, unidentified; identical to SEQ ID NO: 2636

SEQ ID NO: 6199 - protein, 424 aa, unidentified; identical to SEQ ID NO: 5075

SEQ ID NO: 6200 - protein, 423 aa, unidentified; identical to SEQ ID NO: 3951

SEQ ID NO: 6201 - protein, 459 aa, Leptospirillum sp.
MAVFVLDRKKKPLMPCSEKRARLLLERKKAVVHRMAPFTIRLKDRIGGETQPIRIKLDPGSKTTGIALVREEEILSPEIGEAETAAHVLFLGEIGHRGGRIRDRLSARRAFRRRRRSKLRHRKPRFDNRTKPEGWLPPSLQHRVDTTASWVERLRRLVPVSSISMELVRFDMQKIENPETSGVEYQQGALAGYEVREYLLEKWDRTCAYCGKKDVPLEIDHIHPRSKGGSDRISNLTLACRPCNEKKGNRPVEAFLVGKPELLKKILSRAKAPLRDAAAVNATRWALFERLNQTGLPVETGSGGRTKWNRTRLGIPKTHALDAACVGKVDRVEGGTRPVLEIKTMGRGSYQRHRLDAFGFPRGFLTRKKSHFGFQTGDRVRAVVRTGKKIGTYVGRVAVRASGSFNLQTGSGLVQGIPHTVCRLLQRADGYGYSLVTTNRKESAFLPAVNGEVSNARRG

SEQ ID NO: 6202 - protein, 421 aa, unidentified
MEVYVISQDGKPLMPTTPARARKKLRDKKAKCIRKTPFTIKLLYKTTTYTQSITLGIDTGSSHIGSAAVDDRGNVLYLSEVEIRNDIADKMKRRAKYRRNRRNRKTRYRQARWLNRKNSIKSDRFSPTMVSKVNSHLKEVKFVKSLLPITHVILETGTFDPHALKNPDVLKNKWLYQRGANYGFANTRAFVLDRDSYICQYCKGKSKDRRLEVHHIIFRSNGGSDEAENLITLCKTCHDKVHANKIKLKGGKVKGQLKHATQMNSIRKRLLRLLPEAEETFGYITKEHRYLMSLPKEHYFDAVAIASLDNIRNEGLVSVNFKTCLLRKKCISKGDYQQTKGIRSEQLIQTGKIMGFRKFDKVRYMNKEYFIKGRMSTGYAVLMDIVGNKVSLKPIPKFCKMERLSARKSWIIQQEIIQNIA

SEQ ID NO: 6203 - protein, 512 aa, unidentified
MSTIYVLNKDGKPLMPTTRGGHVRHLLKEQKARVVQSNPFTIQLLYETNDVVQPLYLGIDPGRTNIGVAVVKADGTAVFAAHLETRNKKIPKLMQDRKKARRARRTNGRRCRRQRRAKANGTISKKCVKQDTAQSKNPSKRAKEIGVIKRHLPGCKKDVLCVGIKNKEAKYTNRARLEGWLTPTANQLLQTHINLVKKSQKFLPISDVVLEVNKFAFMRLDNPNIQKWQYQRGPLYQKGSLENAVSEMQEHHCLFCEKPIEHYHHVVPKSENGSNTIANIVGLCAEHHNLVHKDVAWQEKLVEEKTGLNKKYGALSVLNQIIPALTKELSFLFPKHSFMTNGKSTHDYRAAHGISKDHWLDAYCIACSVLPIDVCDSTINNCVPYELKQFRRHDRRALNNENMNRVYTLNDKVVATNRHKATEQEAASLEEFRKEHPNDVCKLKVKEHHPTYRNMNRNYPGSVFLVGKQIHVMQGIASSKDGKATKYNDTRATTIAAGKCKFVAKNSGILFV

SEQ ID NO: 6204 - protein, 453 aa, unidentified
MTAVYVISADGQKLMPTLRNGKVRHLLKEGKAKICKYRPFTIQLTYDTPNQVQPIEIGMDSGYQHIGLSVKTEKKEIFSAEFTLLTDEKKRHDDCRKYRRNRRNRLRHRKPRWLNRTKTIPEGWLAPSLLHKAEAHIKLIKDICSVAPINNVTTEVGEFDPALLKAMHEGKEPPQGTDYQQGPLYFADSLRKAVFQRDNYTCKICHKSALKDKDVILKIHHALYWKNRHGNNLSELITVCDRCHTSANHAPNGKLYGLEPKVARLESAAYMNIVRWYIINTLKKELPNIQVNFCYGALTARKRKDLKLEKSHTNDAFCIGNFLPSLRSVATEYFKKKRRNSRILEKFYDAKYIDIRDGKIKKGAELSTGRTNRSIPRNNENNLRKFRSEKKSKGRRQIRKTRYSFQQNDFVFYKKRLYKVIGMQNLGKYISLQGFKPVPISQVQLYKHANAWT

SEQ ID NO: 6205 - protein, 289 aa, unidentified
NIQKWQYQQGPLYQKASLEEAVSEMQEHHCLFCKKSIVHYHHVVPQSENGSDTIGNIVGLCTKHHDLVHKDTAWQKKLAKKKTGLNKKYGALSILNQIIPALTKELSSLFPKHFFATNGKSTHDYRAAHDVSKDHWLDAYCIACSILPNDTCDKNINGRVPYKLKQFRRHDRRALHKENMSRVYTLDGKKVATNRHKAIKQTTDSLEEFRQRQPNDVCKLKVKEHHPEYRNPERNFPGCVFLVGKHTHVMQGTSGSHNGKADGYYDTNGNSYPSGKCKFVAKNKGIVFA

SEQ ID NO: 6206 - protein, 406 aa, unidentified; identical to SEQ ID NO: 2703

SEQ ID NO: 6207 - protein, 512 aa, unidentified
MSTVYVLNKDGKPLMPTTRGGHVRHLLKEQKARVVRAKPFTIQLLYETNDVVQPLYLGIDPGRTNIGVAVVKANGTAVFTAHLETRNKEIPKLMQDRKKARRARRTNGRRCRRQRRAKANGTISKKCVKQDTAQSKNPSKRAKEIGVIKRRLPGYKKDVLCIGIKNKEAKYTNRTRPEGWLTPTANQLLQTHINLVRKIQKFLPISDVVLEVNKFAFMRLDNPDIQKWQYQQGPLYQKGSLENAVSEMQEHHCLFCDKPIDHYHHVVPQSENGSNTIANIVGLCAEHHNLVHKDAAWQKKLAEEKVGLNKKYGALSVLNQIIPALTNKLSVLFPKHFFVTAGKSTHDYRATHGVSKDHWLDAYCIACSVLPSDVCDSNINNHMPYELKQFRRHARRALNNENMNRVYTLNDKAVAINRHKATEQEAASLEEFRKEHPNDVCKLKVKEHHPTYRNMNRNYPGSIFLVGKHVHIMQGIAGSKDGKATTYKDSNANSITASKCKFVAKNSGILFV

SEQ ID NO: 6208 - protein, 442 aa, unidentified; identical to SEQ ID NO: 2637

SEQ ID NO: 6209 - protein, 447 aa, Geobacillus sp.
LFVYIINKHGKPLMPCSPRKARLLLKQKKAKVVRRTPFTIQLLYGSSGYKQPVSLGVDMGTRHVGISATTKKDVLFEAEAQLRTDIVELLAIRRQFRRSRRNRKTRYREARFLNRRKPEGWLPPSIQHKINSHIKLIDLVHNILPVTSVTIEVAAFDTQKLKNLNIRGVEYQQGEQMGFWNVREYVLYRDNHTCQYCKGKKKDPVLQVHHIESRKTGGDSPDNLITLCKTCHHEIHEKGLEHIFQRKRPPMRDASQMTAMRWAMFSRIREKYSHANITYGYITKCIRIANGLSKSHMVDARCISGDPLAKPSGTVYLLKFVRKNNRQLHKATILKGGKRKSNKAPRFVKGFQLFDKVVYERKECFIFGRRSSGYFDLRLLDGTKVHASASWKKLKRVEHASTLLIERSIPVRSFSGDLIKKSPLGMMQGCQTHHSPYQGGLQMNCTQ

SEQ ID NO: 6210 - protein, 424 aa, Enterococcus sp.
MRVFVRNMQGKPLMPCSNRKARLLLKEGKAKIYQYNPFTIQLCYASREYVQECHIGIDTGTKHIGMAVTSEDKVLFKGETELRQDVKSNLDTRRSYRRDRRNRKTRYRKARFLNRKKKESWLPPSIENRINHTFKWINKLVALLPNPKLHIEVGKFDVAKMINLDVQGVDYQHGQTYGFYNVRYFVFARDNYTCQCCKKSKNKILQTHHIIYRSNGGSNRADNLITVCTDCHTYENHQKGGILYQWQENRKKTKQYKEPPFMNVLRKRIFTQYPNAIITYGSETTPKRKELGLEKTHYNDAIVISGITKIKENPNEWLLIKQFRKKKRSLHEATARKGRKEPNRLQKRNAKNTPYYKGFYLNDKVRVFNQVGHITGFTSSGAYIKNSENEYITLPNKSYKQIGISNIRLLHHNNNWQYIHKHIA

SEQ ID NO: 6211 - protein, 406 aa, unidentified
MPTENHAKVRLLLKSGKAMVVRRTPFTIRLLGISKTYTQSVTLGVDAGSKYVGLSATTAKKELLAAELRPRNDVVKLMSDRRELRRSRRSRTTRYRAARFDNRIHSKHNGWLAPSVEVKIWNHIQSVKLISRLLPLTTIRVETTEFDLQRLKAMESGRPLPVSTDYQFGEQYDEYNVRQYVLHRDGYTCQCCGAHGTAEKSVKLHVHHLESRETGGNAPDNLITLCKDCHKAYHAGKIQLPVRGRRRRSTRDAAFMGIMRKTLMQRLREMFLNIEICGTYGYITKYWREKKNIVKTHINDAFVIAKNFEAERLEKCLLIVPRRQHNRQIHKCKIYKGGIRKLNQTPKYVFGFQLFDKVLFKGREGYIFGRRSSGRFVIKDIEGKPIAEPRCSKLRLLEKRGAFLIS

SEQ ID NO: 6212 - protein, 420 aa, unidentified
MQYVYVLNKHGEPLMPCSPCKARLLLKQKKACVVKRTPFTIKLLYGSTGYKQPITLGVDAGSKHIGISATTEKYELYREEATPRNDVVDLLSARRAFRRNRRNRKTRYRAPRFDNRVHSKHKGWLAPSVEVKIQEHITLIKRVCRILPVTLVRVETAEFDTQRLKAMLEGKPLPVGTDYQLGEMYDEYNVRQYVLKRDNYTCQCCGAHPTKTKAVKLHVHHIETRRTGGNAPNNLITLCTACHKALHAGKVTLNGKKRGKPLKDAAFMGIMRKTLMERLLKELKIPVQETYGYITKYLREKHSIPKSHTNDARCISKNPLAIPCDTCYYTKAIRHHNRQLHKATILKGGIRKANQAPYTVKGYRLWDKVSYNGSECVITGRRTSGYFALKKLDGTVVSNSASYKKLRLLEVATNYITERR

SEQ ID NO: 6213 - protein, 433 aa, Lactobacillus sp.
MQNRVFVINRQGEPLMPCKQRKCRKLLQFGKAKVVKKEPFTIQLLFGSTGYKQPVSIGVDSGQHHIGLAVTSQDKVLFQGEVSLRQDVKKLLDTRRSYRRGRRDRNTRYRPPRFLNRAKPAGWLPPSVASKVQHNITWIQRIQAVLPKAELHIEVGKFDMAKMVNPGITGLGYQQGDLYGYETAKQYVLDRDNYTCQICHGKTKDPKLKIHHIIYRSNGGTNQVSNLLTVCASCHTQANHQPGGKLYVLQAKQFQSHRSLKGATFMNILRRRLFTAFPAASFQYGAQTTLDRAKLDLPKAHYNDAVTISGIQNIVQQPTAVVMFHQFRKKKRSLHEATARKGRKTPNRVSKRNAKNTKAVSGFHLNDYVQLPNSQRGYISGFSGKTTCYVKAGNHYLTVSPKYKQVSLSKLKVIRHQNNWNVQEISTGNYTMA

SEQ ID NO: 6214 - protein, 442 aa, unidentified
MSTSVFVLDKKHRPLMPCRPARARRLLRAGRARVVKRFPFVIRLVDRTVEQSEVQPVLIKLDPGSRETGAAVVRDDGKKRHHALAFFVIEHRGGAIRDALKARSAFRRRRRSQNLRCRSPRFLNRVKPKGWLPPSLRHRVETTLSFVRRMCRYLPVSGIATELVKFDSQKLQTPEVSGIEYQQGTLFEYEVREYLLEKFGRKCVYCGAEGVPLNIDHVVPRAKGGSNRVSNLVLACVSCNQKKGARSLEDFLKGKPEVLARVRRELKTPLRDAAAVNATRWVLFNELKATGLPVETGSGALTKLNRHAFGVEKEHWLDALCVGRLNGVVTRKGLNVLEIRCMGRGSRQRTRLTKYGFPRGYLMRQKCVHGFATGDMVEANVPKGKKAGLWRGRVAVRVSGSFNIQTPKGVIQGVGWKHCRLISHNDGYGYAWLGHAPHSSPA

SEQ ID NO: 6215 - protein, 513 aa, unidentified
LKKEAAGHRQGKDCRPVRYGPPYRAGMPDGRRKPERKHMVAVVTSTGKPLMPTSAYRARKLLKKGRAVIFKYRPYFTIQLVDRADGEVQEVEYKSDTGSVHVGISVCTEKKELLSEQRDLLENEPEHHNDRKKNRRTRRNRKRYRKPRFDNRKKKPQEGHEKWLPPTLLHKMEVQVRLFREFCRVVPVTSACFEMGKFDTQALKAVSKGEPVPEGEGYQNGERYGTDTLRAAVFLRDGHTCRFCERSVKDGAILHVHHVGYWKGDRTNRPANLASACEQCHTPANHGKNGILYGKEPEFKTLKDASYMTSVRWIMLDEIIKAAPGVQVSVTYGVTTKRKRQELHLPKSHVNDAFSMASFHPKKRSDTEYWKKIPRHDRVLQKFYDAIYLDTRDGSEKKGSELSNGRISRNHKKDSENLHQYRGHKVSKGHNSIRRGASSLKPGSIVMYKGEKMTVHGTHTRYVKGKDGKTAKKVNVQFTCPASDGKKSASLEKCTPVSRVYNTGWKRYWPDKK

SEQ ID NO: 6216 - protein, 512 aa, unidentified; identical to SEQ ID NO: 4350

SEQ ID NO: 6217 - protein, 380 aa, Bacteroides sp.
LFDCENRIQDITLGIDAGSKHLGLSATTEQKELYAADVELRSDIVELLSTRRQYRRTRRGRLRYRAPRFCNRVRSRNKGWLAPSVEQKIKTHLRVVNDVCRILPVSKIIVETAAFDVQKIENPDISGEGYQQGSQLDFWNVREYVLWRDNHECQCCHGKSMDKILNVHHIESRKTGGDSPKNLITLCKNCHDQYHMGKINPNLKCREPLRDAAFMGIMRWSFYNRLKNEYLNVSMTYGYITKNTRIQHDLPKEHYTDARCISGNPQAEPLGYYFCQKKVRCHNRQIHKANIQKGGIRKRNQAAYLVKGFRLFDKVRYDNQAGFVFGRRANGYFDLRKLNGEVIHRSASYKKLELLDTRKTLLTERRQAVPLKAKAMSIPA

SEQ ID NO: 6218 - protein, 424 aa, unidentified; identical to SEQ ID NO: 3351

SEQ ID NO: 6219 - protein, 420 aa, unidentified
MQYVYVLNRHGEPLMPCSPGKARLLLKQQKACVVKRTPFTIKLLYGSAGYKQPITLGVDAGSKHVGLSASTEKRELYSEEFTPRGDVVELLSTRRQNRRSRRNRKTRYRAPRFDNRVHSKHKGWLAPSVEVKIQEHITIIKRICKILPISLVRVETAEFDTQRLKAMLAGKPLPVGTDYQLGEMYDEYNVRQYVLKRDHYTCQCCGAHNTAEKVVKLHVHHLESRKTGGNAPSNLVTLCTTCHKNLHKGKVTLDGKERGKPLRDAAFMGIMRKTLMARLKEELPIPVQGTYGYITKMRREQNDIKKSHTNDARCISKHPLAEPCSVCYRTKAIRHHNRQTHKANFSKKGIRKRSQMPYLVEGFRLWDKVLYKGQECFVSGRRSSGSFALKKLDGTSISKGVTFKKLRLLEPATNYLIERM

SEQ ID NO: 6220 - protein, 328 aa, unidentified
LRVFVLNKRGKPLMPCSPAKARLLLKEKKAIVVRRTPFTIQLTIATGESKQPVSLGVDAGYKHVGLSASTDKAELYASQVELRQDITDLLSARRALRQSRRNRKTRYRAPRFDNRIRTKRKGWLAPSVENRINAHLSRIEAVLRLLPITKITVETASFDMQRLKNPDISGKEYQEGEQLGFWNVREYVLFRDGHVCRHCHGRSKDPVLNVHHLESRRTGSDSPDNLITLCETCHKALHRGEITLKAKRGQSFRAQAFMGNMRREVLNRLKASYPELKVHETYGYLTKHARIANGIVKSHGADAFCIAGNLGAERLGEFFFQKQTRRNN

SEQ ID NO: 6221 - protein, 424 aa, unidentified
MRVFVLNMRGEPLMPCTQRKARLLLKESKAVIYKYNPFTIQLTYATGETKQDCHIGIDTGSKYIGVAITSEDKILFKGEIELRQDVKSNLDKRRMYRRDRRNRKTRYRQPRFLNRKRTDKWLPPSLQNRINHTDHWIDAFSCLVPSPELHIEVGKFDTAKMINPEINGVDYQHGQTYGFFDERHFVFARDNYTCQCCGKSKDKILQTHHIIYRSNGGTNRVNNLITVCTECHTSENHKKGGVFYKWQEQHKKVKQYKEPPFMNTLRKQIFAKYPNAVITYGSETTPKRKEMGLNKTHYNDAIVISGIYKINEDSEEWLLIKQFRKKKRSLHEATARKGRKIPNRNQVRNSKNTPCYQGFFLNDKVSVLGKSGYITGFTSNGAYIKDNASNYITLPNKTYKQVSISKLRLKHHNNNWQYVVKTAV

SEQ ID NO: 6222 - protein, 406 aa, unidentified
MVYVQDINGKPMMPTTRHGKVRRLLKENKAVVVNLCPFTIKLIYVTSDYKQEIVLGVDAGAKHVGLSATTKSKELYSSEVILRNDIVDLLSTRRESRRVRRNRLRYRKPRFDNRVKSKRPGWVAPSVKYKIDAHIRVIDNVCSILPISRIVIEVAQFDTQKINNPEISGKEYQEGDQLGFWNTREYVLARDGHKCQYCKGKSKSKILNVHHIESRKTGGDSPSNLITLCETCHKEYHKGNIDLKIKRGSSLRDAAVMGIMKWRLYEELKSRYDRVFMTFGYITKHNRIKYGIEKSHTSDAFVISMNINAKRIERQYLKRLIRRHNRQIHKMKILKGGKKKNNQAPFEVFGFRLFDKVFYNNKIFFVYGRRKSGNFNIRDFNGENPKDVSRKKFKLIRGKRHPIILK

SEQ ID NO: 6223 - protein, 175 aa, unidentified
MVYVQDIDGKPMMPTTRHGKVRRLLKDNKAVVVNTCPFTIKLTYKTSDYKQEIVLGVDSGTKHVGLSATTKSKELYASEVILRSDVVDLLSTRRGLRRTRRSRLRYRKQRFNNRVKSKKDGWIAPSVRHKIDSHVRIISFVYSILPVSKLIVEVAQFDTQKIKNPEISGKEYQEG

SEQ ID NO: 6224 - protein, 536 aa, unidentified
VLRPRYQYPTRWYPSREQGSGNGCLSGEENTDLKQEVSGTLSKGDHSHPGEQDFCVPAITIQGGPAMSVFVVGLNGCRLMPTSERKARLLLKHGKASVYRKVPFTIKLNYKTGSTTQSGYLGIDTGSQHIGVSVVREDGAVLHKEEIGLRDSMSKRKLMQSRASSRRGRRYRKTRYRHPKWRPKAKRVYCEIPDRKRRHWKKKEITFTSKRPKGWLPPSLQSKTDHHIRWIKKLQDLLPEGYRLSIELGRFDPARLKDPEIHGELYQKGPQYDYENVRAYVLNRDRYTCQVCGKKGGKLHVHHILYRSYGATDDPQYMATVCSDCHNTENHHQGGILYQWMQKQKKFTRGLRDATFMNILRKRLIEAFPGATFTYGNITKADRERLRLPKSHGNDATAIAIVKTGIMTVKDKEPVIYIQQVRRKKRSLHEETPRKGRKEPNRKASRYDKNTKAVTVTKRKNKKKISITGCLFDRVELNGKKGWISGFTDKSCYVKDENDQYIRTSPKYKQVSLSKLKILHHCGNWAIGARRSLGKG

SEQ ID NO: 6225 - protein, 419 aa, unidentified; identical to SEQ ID NO: 4877

SEQ ID NO: 6226 - protein, 414 aa, unidentified
MIYVLNHDGQSLMPTDRCWRARHLLKERKAKVVKRCPFTIQLLYQNTNYTQPISLGVDAGSKYIGMSATTETKEVYASEIELRNDIVKLLSDRRALRRGRRSRKTRYRKPRFQNRKRGEKWLVPSIQHKIQTHLDATEAVCKILPITRITVETASFDIQKIKDPEIKGTGYQQGDQLGFWNVREYVFFRDGHTCQCCKGRSKDKILNVHHIESRKTGGNAPNNLITLCETCHKGYHNGTVKLPKRIHRGMSFKDAAFMGIMRWTFYNELKTIYPDVHMTYGYITKNTRIEHGLPKEHYIDARCISGNPTAAPLGVVYYQKKVRRHNRQIHKLKILKGGIRKQNQADYLVKGFRLFDKVKYQRKEYFIFGRRSSGFFDIRTLDGTKINKGSLGYKKFQFLEAPRGYLIEQRKEMA

SEQ ID NO: 6227 - protein, 425 aa, Aphanothece sp.
MSNYVLVIDSNKQPLNPCHPSVARKLLKSKNAAIFRQYPFTIVLKKEILDVVIEPIEIKIDPGSQTTGIALVQGDKVIFGAELSHRGSTIKDSLESRRSLRRGRRSRKTRYRQARFLNRKKPSCWLAPSLQHRVDTTLTWIKKLIKFAPIVGISQELVRFDLQQLENPEISGVEYQQGELVGYEVREYLLNKWDRKCSYCSIENVPLQVEHIHPKAKGGTNRISNLCLACESCNLKKGTKDINVFLAKKPDVLKRILSQAKRPLKDAAAVNSTRWTLFNALKNTGLPITTGSGGKTKFNRTRLNLPKQHWIDAACVGIVDTLKVLTNKPLLIKATGHGTRQSCRTDKYGFPSRYVPRFKFIKGFQTGDIVKAVVTKGKKIGTYVGRVAVRSIGSFNISSPNGLIQGISYKNCTHIHKKDGYSYAT

SEQ ID NO: 6228 - protein, 431 aa, unidentified; identical to SEQ ID NO: 3235

SEQ ID NO: 6229 - protein, 406 aa, unidentified; identical to SEQ ID NO: 2703

SEQ ID NO: 6230 - protein, 431 aa, unidentified
MPDKVYVISRLGHPLMPCSPAKARHLLDDKKAKVVKRMPFTIRLLYGSTKYIQPIILGVDAGSKTIGLSASTAKEEVFAAEVMPRNDVVENLSTRREFRRARRNRTTRYRKPRSDNRVRSNHERWLAPSVKVKIQEHITSIKRVRTILPISKVVIETAEFDLQLLKAIQEGKPIPEGEDYQKGEMYGSYNVCQYVLWRDNYTCICCGVRGTPKNPVRLHVHHFESRKYGGNAPDNHGTLCDDCHKKFHLGIITDVKLKTRRRQSTRDAAFMGIMRKTLMWRLRTELFIPVAETKGYITKATREKLLVLPKSHTRDALAIAQGRHGFGIKEYAYVEPANHIYTVRPVRHHNRQLHKASILKGGIRKRNQASKYIFGFRLYDKVLYQGKACFVWGRRTSGTFLLRTIDGIKVKDGVSYRNLTLLERSSNYLIA

SEQ ID NO: 6231 - protein, 512 aa, unidentified
MSTVYVLNKDGKPLMPTTRGGHVRHLLKEQKARVVRAKPFTIQLLYETNDVVQPLYLGIDPGRTNIGVAVVKANGTAVFTAHLETRNKEIPKLMQDRKKARRARRTNGRRCRRQRRAKANGTISKKCVKQTTAQNGSVSKRAKDIGVIKRRLPGCEKDVLCIGIKNKETKFTNRTRPEGWLTPTANQLLQTHINLVKKIQKFLPISDVVLEVNKFAFMRLDNPNIQKWQYQQGPLYKKESLESAVSEIQEHHCLFCKKPIDHYHHVVPQHKNGSNTIGNIVGLCAKHHDLVHKDSAWEKKLAKKSTGLYKKYGALGVLNQIIPTLTNELSSLFPKHSFVTNGKSTYDYRAAHGVSKDHWLDAYCIACSVLPSNVCDSNINNHMPYVLKQFRRHDRRVLNNENMNRVYTLNNKAVAINRHKAKDQKTVSLEEFRKEHPDDVCKLKVKEHHPTYRNMNRNFPGSVFLVGKQIHVMQGIASSKDGKATKYNNTSATAIAAGKCKFVAKNTGILFV

SEQ ID NO: 6232 - protein, 408 aa, unidentified
MVYVQDIDGSPLMPTTRHGKVRRLLKSKKATVVNLCPFTIRLLYDTTGYKQEITLGVDAGTKHVGLSATTKSKELYASEVILRSDVVDLLSTRRELRRARRYRLRYRKPRFNNRVKYKKDKWIAPSIRQKIDSHIRIIGFVYSILPVSKLIIEVAQFDTQKIKNPEISGKEYQEGEQLGFWNIREYILARDGHKCQHCRGKSKDPILNVHHIESRKTGGDSPSNLITLCETCHKEFHKGNIKLKVSRGKSLRDAAVMGIMKWKLYEELRSRYDNVSMTFGYITKYNRIKYGIEKSHISDAFVISKNFNALMLEYHYKVRLIRRHNRQIHKQKVLKGGVKKPNQSSFEVFGFRLFDRVMFEGNYYFIFGRRKSGSFNIRDIDGGNQRDITYKKLKLLRCKRFMIQKETN

SEQ ID NO: 6233 - protein, 413 aa, unidentified; identical to SEQ ID NO: 2636

SEQ ID NO: 6234 - protein, 431 aa, unidentified
MPNKVYVINKHGRPLMPCSPAKARHLLDGGKAKVKKRTPFTIQLLFGSTGYTQEVILGVDAGSKTIGLSASAETKELFSAEVKPRNDVVDLLSTRRESRRARRNRKTRYRKPRFDNRVRSKHKGWLALSEEVKIQEHITAIKMVCRILPVSKVVIETAEFDLQLLKAIADGKPVPQGEDYQKGEMYGHYNVRQYVLWRDGYTCQCCGAHTTKKKEVRLHVHHLESRKTGGDAPGNLVTLCDSCHEKLHKGLITEDDFKKRKRRSTRDATFMGIMRKTLMQRLCSELPIPVIETRGYITKATREKLLVLPKSHTNDALAIALGKQGFNVGYLPGIAQIDKIYTIRPVRHHNRQLHKAAILKGGIRKSNQAGKYVFGYRLFDKVQFNGQDCFIWGRRTTGIFTIKTINGKMIKDGISFKKLKLVEKSTGYLIA

SEQ ID NO: 6235 - protein, 420 aa, unidentified
MQYVYVLNKHGEPLMPCSPGKARLLLKQQKACVVKRTPFTIKLLFGSAGYKQPITLGVDAGSKHVGLSASTEKRELYSEEFTPRSDVVELLSTRRQNRRSRRNRKTRYRVPRFDNRVHSKHKGWLAPSVEVKIQEHITVIKHICKILPISLVRVETAEFDTQRLKAMLAGKPLPVGTDYQLGEMYDEYNVRQYVLKRDNYTCQCCGAHTTAKKLVKLHVHHLESRKTGGNAPSNLVTLCTTCHKNLHKGKVTLDGKERGKPLRDAAFMGIMRKTLMARLKEELPIPVQGTYGYITKMRREQNDIKKSHTNDARCISKHPLAEPCSVCYRTKAIRHHNRQTHKANFSKKGIRKRSQMPYLVEGYRLWDKVLYKEQECFVSGRRSSGSFTLKKLDGTSVSKGVTFKKLRLLEPATNYLIERM

SEQ ID NO: 6236 - protein, 407 aa, Methanohalobium sp.
MRVFVLSKNKKPLMPTRPAKARRLLESGKAKVVRRSPFTIKLLYDTAEYTQPVIAGMDSGSKHIGCAAVANDEVLYQSEVELRDDVSKKVQQRASYRRNRRSRKTRYRKPRFNNRGNSKKDGRIAPSIKSKVQSHERERRFVESILPVKKWIVETASFDIHKITNPNVSGTDYQNGDLKGYYNIRTYVLHRDNYTCQKCKNRSKDPKLECHHIVFRSKGGTNRPDNLITLCETCHGKLHNGKFTINKKPSNTKHPTEIGIVRSQIRKLNWKFQETFGYITKYKREQILGLEKTHYNDAVAICCDENNPNLQLSNVVYYKKHVSSGDYQQTKGIRSDKKIPTGKLHGLRKFDFIKTPDVSGFVKGKRTSGNFSIMDIFGNTFKKNPNVKKNCRRISARCTTLTQQIQI

SEQ ID NO: 6237 - protein, 472 aa, unidentified
MAVFVLDKRGKPLMQCSEKRARLLLDRGRARIHKMLPFTIRVVDRLVEDSQLQPLEIKLDPGSKTTGVAVVRISVAVDAQTGEVQKRVHVLNLFDLIHRSRQITEALMGRRGHRRLRRSKLRYRAPRFDNRGNQKKGWLPPSLQHLVDTSLEWVKRIEKLAPISGISTELVRFDMQAMENPEIEGAQYQQGTLAGYEVREYLLEKWDRTCAYCGAKDVPLQIEHIHPKSKNGSDRINNLTLACQCCNQKKAALPVEMFLAKKPELLKRILAQAKRPLKDAAAVNSTRWALVNTLKTTGLVVETGTGGQTKFNRSQFDIPKTHALDAACVGEVGSITDWQKPTLSIKAMGRGSYQRTRLDKFGCVRGYLTRSKSIKGFQTGDMVKAEVTTGKKIGSYTGRVAVRATGSFNIQTSAGLVQGVSHRYCTVVQRGNGYGYSLVAKTDVRGTPPQHRDASHPALYLPGLKAEVSRAN

SEQ ID NO: 6238 - protein, 435 aa, unidentified
MVYVLSINGKPLMPTNRHGKVRRLLKQGLAKVVKVKPFTIQLLYDTTTYTQDVILGIDSGYNYIGFSAITEKKELISGEVKLRNDISELIKERRMYRRIRRNRLRYRKPKFNNRVSSKKEGWLAPSIKHKLDSHIRFIEYLKKILPITNIVIEVANFDTHKLKNPNVEGEGYQQGEQQGFWNIREYILYRDNYTCQLCGRKDTVLEVHHIGYYKQDRTDRPSNLITLCTKCHTPKNHKEGGKLYGMKPIQKPLKEATFMSTVRWKLVNTLMCSHTYGYITKSKRISLNLEKTHYNDAFCIAGGNNQERIEPIYFEQIRRNNRSLEKFYDAKYTDIRDNSTKTGQELFCGRRTRNKNLNEENLRKYRGTKKSSGRRSIRKQRYSYQPKDIVIYQGKKYTVKGIQNKGDYIRLVELTKPVKTNLVKPYIFRKGLCVL

SEQ ID NO: 6239 - protein, 465 aa, unidentified
MSTCVCVLSNSGKRLMPTFRLGKVRHLLKDGKAKIVKHHPFTIQLLYDGKTNTQPIEICEDVGYNYIGISVKSQSHEYVSAQYDTLQDEKACHDSCRKLRRSRRNRLRYRKPRFDNRKRSEGWLAPSLRHKKELNVNVVKMYCAVMPITHATVEVGSFDTMLVKAIQEGKAIPEGADYQKGPRYNLATLREAVFYRDNYVCKVCGRKATEGAILHVHHMFYWKGRHGNSLSELITVCEKCHTPANHQKGGKLYGFGENVKFADLSGAAFMNTVRWQIVNELYAAFGKDFVTVTYGAMTKEKRIALRLEKSHNNDAYAMGEFHPNCRCTFEHYEKVRRNNRILEKFYDSRYIDIRTGEIATGKELFNGRINRSHKKDSENLHKYRGKRIRKGYRALRRKKVALNPGDLVSLNGEILTVHGTHTKKNGSVNVEFKTPSKSGKKSTSLKKLKIIKTISPMRSAWDKVS

SEQ ID NO: 6240 - protein, 490 aa, unidentified; identical to SEQ ID NO: 3566

SEQ ID NO: 6241 - protein, 456 aa, Fervidobacterium sp.
MVFVISKDGKPLMPTKRHGKVRRLLKQGLAKVVNREPFTIQLLYETTNYTQPVTVGIDIGSKVVGVCAVTDKEEMFSAEIQLRQDISKLLLERRQHRRFRRYRKTRYRKPRFLNRRKEDGWLPPSLQWKVDAHVRIVNKLSKIIPITKVVVEVAPFDIQKVLNPDIEGEDYQNGPQKGFSDVRDYCLWRAGYKSELSGKTGILEVHHIIPRSKGGTDAPSNLIVLTTQEHKMLHEGKIKIPKSRLEQIKVFKDAAHVSTIEQHIVNRLKQNYHVEITYGSITKERRDMYGLEKSHRDDAFVIAGGNIQERASEWYFGKFFRRQNRSLHKANPIKGGRRPINTVKQVNGFIRFDKVECEGEIAIITGLRSSGYFSISSLSGEKISDSVKYTKLRLIERAKTLMFERRERATCSWLKPRVSVARFHEIKTAHSRSFKRSTICFTMDNWFSYFYAYTAH

SEQ ID NO: 6242 - protein, 351 aa, unidentified
ASEVELRQDVSDLLSARRTLRQSRRNRNTRYRAPRFDNRIRTKRKGWLAPSVENRINAHLSRIETVIRLLPVTKITVETTSFDMQLLKNSDIAGKKYQEGEQLGFWNVREYVLFRDGHVCQHCHGRSKDPVLNVHHLESRRTGGDSPGNLITLCETCHKALHRGEITLKAKRGQSFRAETFMGIMRWEVLDRLKASHSKLEVQNTYGYRTKHARISNGIAKSHCADAFCIAGNLGAERLGEFFFQKQTRRNNRQIHKLSILKGGIRKRNQAPYEIKGFRLFDKVACQGEEGFIFGRRSSGYFDVRKLNGTHISAGISCKKLRLLEKRQTYLTEIRKEKALPPLPEGRGLRA

SEQ ID NO: 6243 - protein, 431 aa, unidentified
MPNKVYVINKHGRPLMPCSPAKARHLLDAGKAKVKKRTPFTIQLVYGSSGYTQEVILGVDAGSKTIGMSASTTKEELLSAEVKPRNDVVDLQSTRREFRRARRNRKTRYRKPRFDNRVRSKHKGWLAPSVEVKIQEHITSIKMVCRILPVSKVVIETAEFDLQLLKAIADGKPVPQGEDYQKGEMYGHYNVRQYVLWRDDYTCQCCGTHATKKKEVRLHVHHLESRKVGGDAPDNQVTLCESCHEKLHKGLITAKDFKKRKRRSTRDATFMGIMRKTLMQRLCSELPIPVVETRGYITKATREKLLVLPKSHTNDALAIAQGKRGFNVGYLPGIIQTDKIYTIRPVRHHNRQLHKAAILKGGIRKSNQAGKYVFGYRLFDKVQFNGQDCFIWGRRTTGIFTIKTINGKMIKDGISFKKLKLAEKSTSYLIA

SEQ ID NO: 6244 - protein, 411 aa, unidentified
MVYVQDIDGKPMMPTTRHGKVRRLLKDNKAVVVNTCPFTIKLMYKTSDYKQEIVLGVDSGTKHVGLSATTKSKELYASEVILRSDVVDLLSTRRGLRRTRRSRLRYRKQRFNNRVKSKKDGWIAPSVRHKIDSHVRIISFVYSILPVSKLIVEVAQFDTQKIKNPEISGKEYQEGEQLGFWNVREYVLARDGHKCQHCKGKSKDPILNIHHIESRKIGGDSPSNLITLCETCHKEFHKGNIKLKVSRGKSLRDAAVMGIMKWKLYEELKSRYDNVSMTFGYITKYNRINHGIEKSHVSDAFVISRNFNSCRLGYYYKRKLVRRHNRQIHKMKILKGGIRKRNQAPFKVFGFRLFDKVMFQGEEHFIYARRLSGQFNIRDINGENKKDVSCKKLKYVSHGLVSVKTNLFLSQ

SEQ ID NO: 6245 - protein, 442 aa, Lactobacillus sp.; identical to SEQ ID NO: 5571

SEQ ID NO: 6246 - protein, 418 aa, unidentified
MVYVLGQDGHPLMPTCRHGKVRRMLKSGMAKVVQRCPFTIQLQYESTTHTKNINLGIDAGSKTIGVSVTTDTKVLYESEVVLRNDIVELLSGRRALRRSRRNRKTRYRKPRFDNRKKHDGWLAPSIRQKIEIHVTVVENVMKILPVTKIIVETASFDIQKIKNPEIEGEEYQHGEKLDFWNVREYVLFRDGHICQCCKGKSKDNILNVHHIESRKTGGNAPNNLITLCETCHQAYHKGIITLPKEIHRGMRFRDASFMGIMRWAFYDRLKELYTPLDVEVVNTYGYITKNTRIEHGLPKVHYVDARCISDNPASKPMDHYYFQKKVHCHNRQIHKNTILKGGIRKRNQAAYLVNGFRLFDKVKYQNQEYFIFGRRSSGFFDIRTLDGTKVNKGSISCKKFQLVEKSKHYLTEQRKVTA

SEQ ID NO: 6247 - protein, 509 aa, unidentified; identical to SEQ ID NO: 4834

SEQ ID NO: 6248 - protein, 423 aa, unidentified; identical to SEQ ID NO: 3951

SEQ ID NO: 6249 - protein, 1304 aa, Nocardiopsis sp.; identical to SEQ ID NO: 3641

SEQ ID NO: 6250 - protein, 429 aa, unidentified; identical to SEQ ID NO: 3501

SEQ ID NO: 6251 - protein, 425 aa, Nodularia sp.; identical to SEQ ID NO: 3165

SEQ ID NO: 6252 - protein, 417 aa, unidentified
MIYVRSKEGSVLMPTERCGKIGYLLRHGKAHVVSRVPFVVQLDYDSTTYTQDVSLGIDAGSKHIGVSASSEKKEMLAAQVELRSDIVNLLSTRRELRQTRRNRKTRYRKARFDNRKKKDGWLAPSVEQKIESHLKVIRLVHKILPITKTTIEVAQFDAQKIKNPYIKGDEYQQGEQMGFWNVREYVLARDGHKCVHCKGKSKDPILNVHHLESRKAGGNSPSNLVTLCETCHKAYHRGEFDLKIKRGSSLRDAAVMNIMRWAVYERAKAEFGNVHLTYGYITKHTRIENGIAKTHAADAFCIAKNVHAMRLSSFFMCRCVPRHTRALHVANPKKCGIRRNTIASHKIGKSNFQRFDMVRWMGKECFIFGSTRGRPVLRDIEGVKMHENASVNIKTIKFLKRLKNNILMEEKNFRRLN

SEQ ID NO: 6253 - protein, 424 aa, Succinatimonas sp.
LQDLAYSKKLHLFKGLNMVYVLNCKGVPIMPTTRHGMVRRLLKEHKAKVVKRCPFTIQLSYECANITQPITLGVDTGYENVGISACTEKKVLLEAKAKIRTDIVKLLSARKEARRTRRNKKTRYRKARFLNRGIEKGWLPPSIRAKVESHLGLVAKAHEILPIGKIVVEIASFDIQKIKNPDIKGAEYQQGDQLGFKNVKAYVLARDGCTCRCCKGRSKDKILRVLHLESRIIGGDAPNNLVTLCNSCHTKFHKGLISLDDIKRGKSFKAETFMGLMRNFFFKELFNKYPCVKSTYGYITKHLREKYYLKKDHHVDARCICGVPQALPSDVYLIKKVRCHNRQIHKFTTLKGARRRLNQAPYTVKGFRLFDKVKVGEQVGFIYGRRQSGSFDVRTVYGERINGSISYKKLQLIETRKSWLIERC

SEQ ID NO: 6254 - protein, 470 aa, unidentified; identical to SEQ ID NO: 2825

SEQ ID NO: 6255 - protein, 415 aa, Bacillus sp.
MRVFVKNLRGEPLMPCSNRKARLLLKQGKAKIIGYTPFTIQLQYATGETVQSVAIGVDSGSKYVGIAITTEDKVLAKGTIELRQDVKENLTLRATLRRSRRQRKTRYRKARFLNRKKREGWLPPSIQSRMHNQIHWIEIFRSLLPSPKVIVEVGKFDAQKLKNSDIQGKEYQQGDAFGFWNTRYYVVTRDHYTCQICKKKGGILHTHHIIERCSGGSDMADNLVTVHEECHQKFHQGTIKHIFKKPKQYKETAFMNILRLQIMNRLGCEITYGSYTTPKRKELRLSKTHYNDAIAITTPTKLQEYEQSGEFRIKQFRKKKRSLHESTARKGRKTKNTTAKRNNKNTPKVHGIYLGDKVKVFGQVGFVTGFTGKMMYVQDIDGHYLQNPSKSYKQVKISDIECIHHNNNWLFLQIS

SEQ ID NO: 6256 - protein, 440 aa, Ktedonobacter sp.
LSNVFVLDTNKQALNPVHPGRARRLLSLGQAAVFKRYPFTIILKSAASSPHVWPLRVKLDPGSKTTGLAIVNDASGEVVFAASLIHRGDAIRERLEKRRAARRSRRQRKSRYRQSRFDNRGTKKKGWIAPSVQSRVCNVITWVKRLVRLCPITAISQELVKFDLQQMDHPEISGVNYQQGTLSGYEVREYLLDKWGRQCAYCGAKDVPLEVEHINPRSKSGDDRVCNLTLACEPCNTRKGTQDIRVFLAHQPELLAKLLAQAKSPLKDAAAVNITRWVLHAQLKAFGLPLECGSGGRTKFNRITRGLEKTHWCDAACVGASTPEVLHIGQVRPLSIAAYGHGRRQMCLMNKSGFPRTNPKQKKFKHGFRTGDLVKAVVPPHFKHAGTHVGRMSAKASGAFTIATAGGTVTDIGKKYCRMLQRADGYGYTQKGELAFPPVP

SEQ ID NO: 6257 - protein, 450 aa, Altererythrobacter sp.
MCVFVLDKRKNPLMPCSQRRARLLLERGRAVVHRHHPFTIRLKDRVGGKTQPVEIRVDPGSKGTGLAVVRIAEDTCPETGEVTTIVHVLERIELRHRGAAIRKALLQRSQRRRRRRSKNLRYRAPRFNNRRRPKGWLPPSLQHRVDTTASWVRRLSRMAPVLRARVETVRFDTQALETPEISGIEYQQGTLAGYEVREYLLEKWGRCCAYCDATGVPLQIDHIHPRARGGSNRVSNLTLACGPCNQTKGSTPVEAFLAHAPKRLARILAQARRPLQDAAAVNATRFAVCSAISDQTGLPITRFSGGQTKWNRTRAGLAKTHANDAVCVGPTDQVVGAAGPTLLVTCTGRGTRQRIMPNAHGFARGHRPRTKSVQGFRTGDLVRAEIPSGVNAGVWTGRIAVRSTGWFLLTATGQGADGERGHRKIGGVAARYCALVASGDGYGYAREVQP

SEQ ID NO: 6258 - protein, 442 aa, unidentified; identical to SEQ ID NO: 2637

SEQ ID NO: 6259 - protein, 414 aa, unidentified
MPCSPAKARLLLKEKKAIVKRRTPFTIQLTIATGEAKQPVSLGIDAGYKHVGLSASTEKAELYASEVELRQDITDLLSARRALRQSRRNRKTRYRAPRFDNRISTKRKGWLAPSVENRINAHLSRIEAVLRLLPVTKISVETASFDMQLLKNPDIAGKEYPEGEQLGFWNVREYVLFRDRHVCQHCYGRSKDPVLNVHHLESRRTGGDSPGNLITLCETCHKALHRGDITLKAKRGKSFRAEAFMGIMRWEVHNRLRALHPGIEVSNTYGYRTKHARIANGIAKSHCADAFCIAGNLGAERLCEFFFQKQTRRNHRQIHKLSILKGGIRKRNQAPFEVKGFRLFDKVACQGEEGFIFGRRSSGFFDVRKLDGTRISAGISCKKLHLLEKRRTYLTEIRKEEALPPLPEGRGLRA

SEQ ID NO: 6260 - protein, 457 aa, Scytonema sp.
MITNSVFVLSKNGKILKPTTPVRARILQSQGKAKKLNLFPFTLILESMVDENVEPYLELRIDPGSKITGFSLVDLNKNEVIWAMELEHRGLAIKMEMLTRAGVRRSRRSRRLRYRKKRFERKKPQGWLPPSLRHRLLTTETWIKRLLKVTPIKSIAIESVKFDLQKMETPNIEGIEYQQGTLFGYTLREVLLEHWGRECVYCGKTNVPLQIEHINPRSLGGSDRFSNLTLSCEKCNQKKGNKPVEQFLKNKGEILQKIKAHQKKSLSDAATVNSTRKAIFEMAQQFGLPVMSGDGASTKMIRIKSGLPKLHWIDSACVGTSEIVKLRICQPLRATCTGHGTRLVQRMNAKGFPAIASIKKNPMTGKKEVKLVAKNQKYTHATAGDYVVCTLLKDRKHVRWGIYRARVKTPTPKGVEVLINGHRISLDRRHVKLIHQSDGYEYSFTTIDQDLLRFSAI

SEQ ID NO: 6261 - protein, 453 aa, Fervidobacterium sp.
MVFVISKDGKPLMPTKRHGRVRRLLRQGLAKVVNREPFTIQLLYETTNYTQPVTVGIDIGSKIVGISAVTDKMEIFSAEIQLRQDISKLLPERRQHRRFRRYRKTRYRKPRFLNRRKENGWLPPSLQWKVDAHVRIVNKLSKIIPITKVVVEVAPFDIQKVLNPDIEAKDYQNGPQKGFADVREYCLWRAGYKSELSGKTGVLEVHHIIPRSKGGTDTPSNLIVLTVEEHKMLHEGKIKIPKSRLEQVKVLKDAAHVSAIGWYIVNKLKQNYQVAITYGSITKARRATYGLEKSHRDDAFVIAGGNIQERANEWYFGKLLRRQNRSLHKANPIKGGKRPLNTIKQVKGFRRFDRVECEGKIGIISGLRSSGYFSISSLNGEKISDSVKYTKLRLLERAKTLMFERRERATCSWLKPRVSVARRYEIPQNFAKRSTHGRSTLRRSSARRYRKLF

SEQ ID NO: 6262 - protein, 456 aa, unidentified; identical to SEQ ID NO: 4017

SEQ ID NO: 6263 - protein, 423 aa, unidentified
  source 1..423: note = Cyanobacteria bacterium UBA9226
MSNYVFLIDSHKTPLNPVHPAQARKLLESGKAAVFRRYPFTLILKRVVENPLIHPLTLKIDPGSKVTGIALVTDRNEAIWAMELEHRGEAIKSALLQRRIVRRGRRNRKTRYRQARFLNRKRPNGWLAPSLQHRILTTSTWVKRIQKFAPVGAIAQELVKFDTQALQNPEIQGTEYQQGTLFGYECREYLLAKWQRKCAYCGVKDVPLEIEHIQPKSRGGSHRISNLSLACHQCNQQKGDQDIKDFLKNKPQVLNRILSQAKTPLKDAAAVNSTRWGLFNVLKSFGLPLTTGTGGQTKFNSMRLNLPKAHWIDAACVGIVETLKLVTSKIFQVKATGFGGRKRCQTDKFGYPIKHRPLRPIHGFSTGDIVRADVPKGKYKGTFTGRVCPMSHGYGEFVINGKRRSIKLAYLTPIHQKDGYSYG

SEQ ID NO: 6264 - protein, 422 aa, unidentified
MVYVLNKDGQPLMPTNKHGKVKHLLKDDKAKVVKRCPFTIKLLYETSNYTQHLTLGVDTGSGTIGTAVSDDDGNIVYTSKVTVRNDIKDKMAQRSKYRKNRRSRKTRYRKARFDNRKNSIKKDRFSPTMVSKINSHIKEIEFIKSILPIKTLVLEAGTFDTHLMKKPNLANPKIRPWGYQKGTNYGFENTKAMVLNRDSYTCQCCKGKHKDSKLEVHHIIFRSQGGSDDESNLITLCHTCHQNLHRGIIKPKFEGKKKGTLNYATQMNSIRIQLLKHYPEAIETFGMITKANRQSLNIEKDHHLDACVIASGGNPIKLKTNSLYLKRAIPKGDYQQTKGVRSEQKITTSKICGFKKFDKVRYLDDEYFIKGRISTGYAVLMNIDGKKIDFLSMPIKTPKLSLCERISARKSLMIKETFIPNL

SEQ ID NO: 6265 - protein, 376 aa, unidentified
LSKVKTMRVFVFNMRGRPLMPCSQRKARLLLRENKAMIYKYHPFTIQLTYTTGETKQDCHIGIDTGSKYIGAAVRSEDKVFWKGEIELRQDIRSNLDTKRIYRRSRRNRKTRYRKPRFLNRKRRDEWLPPSLQSRINHTFHWIDTLSSLVPNPILHIEVGKFDVAKMINPEIHGVDYQHGQTYGFFDERYFVFARDNYTCQCCGKSKNKILNTHHIIYRSNGGTNRVDNLITVCTDCHTSQNHRKGGIFYQWQEQHKKVKQYKEPPFMNTLRKRIFVAYPDAEITYGSETTPKRKAMKLDKTHYNDAIVISGINEIKENPEEWLLIKQFRKKKRSLHEATARKGRKKPNRNQTRNSKNTPYYKGFYLNDKVSVFGK

SEQ ID NO: 6266 - protein, 456 aa, unidentified
MSTCVCVLSNSGERLMPTFRLGKVRRLLKDGKAKIVKHHPFTIQLLYDSKANTQPIEICEDVGYNYIGISVKSQSHEYVSAQYDTLQDEKACHDSCRKLRRTRRNRLRYRKPRFDNRKRGEGWLAPSLRHKKELNVNVVKMYCAVMPITHATIEVGSFDTMLVKAIQKGKAVPEGADYQKGPRYNLATLREAVFYRDNYVCKVCGRKATEGAILHVHHMFYWKGRHGNSLSELITVCEKCHTPANHQKGGKLFGFGEDKEFANLSGAAFMNAVRWQIVNALYATYGKEFVTITYGAMTKEKRIALQLEKTHSNDAYAMGNCHPAHRCEFGHYQKRCRNNRVLEKFYDATYIDTRTGNKAKGKELFNGRISRNHKKDSEDLHKYRSKKVSKGRRSIRRQRYAIQPYDTVRLESKTYITSGCHNKGTRLLIPVNGKSKSVAISKVQVVCHAGAWIQII

SEQ ID NO: 6267 - protein, 430 aa, unidentified
MPKVYVLNRHGRPLMPCTPAKARHLLDAGKAKVRQRTPFTIQLLYGSTGYTQEVILGVDAGSKTIGLSASTETEELFSTEVKPRSDVVELMSARRQFRRARRSRKTRHRKPRFNNRVRSKHKGWLAPSVEVKIQEHMTAIRRVCVILPISKVVVETAEFDLQLLKAVAEGKPVPQGEDYQKGEMYGHYNVRQYVLWRDGYTCRVCGAHGSVKKGVPLHVHHLESRKVGGDAPDNLVTLCTACHDKLHKGIITAADLKKRKRRSTRDATFMGIMRMTLLRRLREQLPVPVVETRGYITKATREKLLVLPKSHTNDALAIAHGPQGFRAGYLPNIRQADRLYTIRPVRHHNRQLHKATILKSGVRKANQAETYICGFRLYDKVLYNGIECFVWGRRTSGSFLLRQLNGEKVKDGVSHKHLKLLERSQSYLVA

SEQ ID NO: 6268 - protein, 441 aa, unidentified
MSVLVLDKRGRPLMPCSERRARLLLARGRARVHRVVPFVIRLTDRYAEDSVFQTLRVKLDPGSKATGIALVRETGSGVAVLNLFELMHRGRQISEALTARRYFRKRRRSANLRYRAARFNNRKRPEGWLAPSLQHRVDTTMTWVKRLMHWAPVSALSMELVRFDMQAMQNPEISGVEYQQGELAGYEVREYLLEKWGRQCAYCDDKGVPLQIEHILARARGGSNRVSNLTIACGPCNLLKGALDVREFVKDETRRNRILARAKAPLRDAAAVNSTRWALLAQLRTTELCVETASGGRTKWNRTRFEIPKAHALDAVCVGDVGSVEGWRRPTLEIKCAGRGSYQRTRLTAQGFPRGYLTRQKRVHGFQTGDRVRADVLKGKKAGIYVGRVAVRATGSFNIQTPQCVVQGISHRHCKVVQRADGYGYQLKKQPASPALLSSSS

SEQ ID NO: 6269 - protein, 517 aa, Streptosporangium sp.
MATLNTRQQTHRQVLPQSAALESVGADTPQGRDETAHGHRHTAVPGVQHGRGETERTGTRSARRHPDLASAGEGAGSSAHPVVFVLDKHGQPLQPTSPAYARKLLRSGRAVVHRHTPFVIRLKDRTAAGSTVAGVHVGIDPGSKHTGIAVFTEHGGSRTGRYALQLDHRGAAIGDRLASRAALRRGRRSRNLRYRAPRFNNRTKPKGWLAPSLKHRVDTTMSWVGRLRRWAPVSAVHVERVAFDTHTLSAGRPLAGAEYQRGTLVGYEVREYLLAKWGRACAYCGISGAPLNIDHIHPRSRGGSDRISNLTVACVPCNQTKNATPVEEFLKARPALLATILRQVKAPLRDAAAVNATRWALWRALEATGLPIATASGGRTRWNRSRTGAAKSHALDALHVGHLETVIGWPSTVLVVTATGRGTYARTTPDRYGFPRLLRPRIKLHHGFQTGDLVRANVPTGKKAGVHVGRVLVRSSGSFDVTTRHGRVAGINHRHVRHLQRADGYGYTTQKEADRND

SEQ ID NO: 6270 - protein, 420 aa, unidentified; identical to SEQ ID NO: 6212

SEQ ID NO: 6271 - protein, 512 aa, unidentified
MSTVYVLNKDGKPLMPTTRGGHVRHLLKEQKARVVRAKPFTIQLLYETNDVVQPLYLGIDPGRTNIGVAVVKANGTAVFTAHLETRNKEVPKLMQDRKKARRARRTNGRRCRRQRRAKANGTISKKCVKQDTAQSKNPSKRAKEIGIIKRRLPGYKKDVLCIGIKNKEAKYTNRTRPEGWLTPTANQLLQTHINLVRKMQKFLPISDVVLEVNKFAFMRLDNPDIQKWQYQQGPLYQKGSLENAVSEMQEHHCLFCDKPIDHYHHVVPQSENGSNTIANIVGLCAEHHNLVHKDAAWQKKLAEEKVGLNKKYGALSVLNQIIPALTNKLSVLFPKHFFVTAGKSTHDYRAAHGVSKDHWLDAYCIACSVLPSNVCDSNINNHMPYELKQFRRHDRRVLNNENMNRVYTLDNKAVAINRHKATEQEAASLEEFRKEHPNDVCKLKVKEHHPTYRNMNRNFPGSVFLVGKQIHVMQGIASSKDGKATKYNDTSATAIAAGKCKFVAKNTGILFV

SEQ ID NO: 6272 - protein, 414 aa, Streptomyces sp.
LKLATFRVGEKTHQAVLHQQLALELDPADNPGNRDETGAERREATGVEHVRGEIPAASPGGGGVTPNQPVGEEPRERHPFVFVLDKHGQPLQPCTPARARKLLKKGRAVVHRHTPFVIRLKDRTIAESEVDGVELGIDPGSRHTGIAAFTARAGERRGRYAVQLDHRGAVIRKRMGQRAAYRRRRRTSNLRYRAPRFNNRARPDGWLAPSLRHRVATAVSWVTRLSRWAPVRAVHVERVAFDTHAISAGRPLEGAEYQHGTLHGTEIREYLLAKFGRACVYCNISGVPLNIDHVHPRSRGGSDRISNLVTACIPCNETKSNRPVEEFVRDKTKLAKMLSRAKAPLRDAAAVQSTRWALWRALDQMLPTHIASGGRTKWNRTRCGLPKSHTLDALNVGKLDTVTETVTPILVAGC

SEQ ID NO: 6273 - protein, 514 aa, Nocardiopsis sp.
MATFRTGQQTHPPVLPQQVALESESADKPRIGYETGLRHHPTVVPGADHVRGETTDISPDVGGVTTRPLAGERPRERHPSVFVLDKNQVPLQPCHPARARKLLSKGRAVVARHTPFTIRLKDRTIDTSVVDGVQVGIDPGSKHTGIAVFTHQAGERRGRYGIQLDHRGAQIRKKMGQRSAYRRGRRSRNLRHRAPRFANRSRPEGWLPPSLRHRVETTTAWVDRLTRWAPVRAVHVERVAFDTHVLSAGRPLEGVEYQRGALHGYEVREYLLAKFDRACVYCGVTDTPLNLDHVHPRSRGGSDRVSNLVLACVPCNRTKGDRPVGEFVTNTRLLARILARAKAPLRDAAAVQSTRWALWRALDQRLPAHVGSGGRTKWNRTRNHLPKTHTLDALAVGEVDTVTETIYTVLVAGCTGRGSYARTRPDKHGFPRLRLPRTKGFFGFTTGDLVRAVVPQGKKAGVHTGRVAVRASGSFNITTTQGTVQGIRYKHVRLLQRADGYGYTWKGEGVSSRP

SEQ ID NO: 6274 - protein, 417 aa, unidentified
MPCSPAKARLLLKEKKAIVKRRTPFTIQLTIATGEAKQPVALGVDSGYKHIGLSATTEKAELYASEVELRQDITDLLSARLALRCSRRSRKTRYRAPRFDNRVASKREGWLAPSVENRIAAHMSRVEAVMRVLPVTAITVETAAFDTQLLKNPDIAEAAYQQGEQLGFWNVREYVLFRDGHVCQHCRGKSKDPILNVHHIESRRTGGDAPNNLITLCETCHKAFHRGEIELKVRRGKSFKAATFMGIMRWTLFERLKKAHPELSVRNTYGYLTKHKRISHGIAKSHCADAYCIADNLGAKRLEGFFFQKQTRKHNRQIHKLSILKGGLRKKNQAPYEVKGFRLFDKVICKGEEAFIFGRRTSGSFDVRRLDGTRISAGISCKKLRLLEPRTTYLTEFRKEAALPPLHECSGSRAEFR

SEQ ID NO: 6275 - protein, 465 aa, unidentified; identical to SEQ ID NO: 3856

SEQ ID NO: 6276 - protein, 412 aa, unidentified
MTNYVFVLDAAGKQLAPTKETKAWFFIRKEHATLVSKYPMVIQLNKEVSDDEICKDEIRCGIDDGGLHVGIALVQKCQTKNKVVFKGTIEQRNDVKHLMDVRRGCRHYHRYHKRYRQSRFNNRSSSKRGRIAPSILQKRQATVRVINQLNRWIHITNYWLEDVSIDIRALTDGYKSYSWQYQKSNRLDENIRKAVILRDECKCMECGKSNCRLEVHHIRPRRLNGSNTLSNLITLCEKCHQKTEGSEELFMDKYFSLLKSSDNKNLNYAQHVMIGKKWLREQLSNLGLLYLTNGGDTANKRIDWNIEKSHSNDAICITDLQPDTCDVKEWTIKPMRRQSKAKTDNVLGIKHRDLVEYTFKNGETHKGYVTALYPKQNAINFQSPTKHCKKVNAKKCRLLWKFNKIYWLDNVS

SEQ ID NO: 6277 - protein, 514 aa, unidentified
MSTVYVLNKNGKPLMPTTRCGRVRHLLKEQKARVVTSNPFTIQLLYETDDVVQPLYLGIDPGRTNIGVAVVKTDGTAVFTAHLETRNKEIPKLMQGRKKARRARRTNGRRCRRQRRAKANDTISKKCVKQDTAQSGSASKRAKKIGVIKRHLPGCEKGVLCIGIKNKEAKFSNRTRPEGWLTPTANQLLQTHINLVKKIRKFLPISDVVLEINKFAFMQLDNPNIQKWQYQQGPLYQKASLEEAVSEMQEHHCLFCKKPIAHYHHVVPQSENGSDTIGNIIGLCTKHHDLVHKDTAWQKKLAKKKTGLNKKYGALSVLNQIIPALTKGLGSRFQGYFYVTTGKSTYDYREVHGVSKDHWLDAYCIACSVLPNDVCDSDINNRVPYELKQFRRHDRRALHKANINRVYTLNGKSVATNRHKAIKQTIDSLEEFRQCQPDDVCKLKVKEHHPEYRNPERNFPGCVFLVGKHTHVMQGTSGSHNGQADGYYDTNGNSYSSGKCKFVAKNEGVVFTLN

SEQ ID NO: 6278 - protein, 419 aa, unidentified; identical to SEQ ID NO: 3670

SEQ ID NO: 6279 - protein, 450 aa, unidentified
MVYVINFEGKPLMPTTNAKARKLLNQKKATVKRANPFTIQLLYKTDTEYIQTITLGIDSGYLNIGFSAITDSKELIVGEVKLLQGIKDRLLEKSQYRKIRRQRLRYRKPRWNNRKIRQGWLAPSLQHKLDTHVKFIDYLNTILPIRNIVLEVANFDIQKIKNPDISGVEYQQGEQMGFWNIREYILHRDGHKCQNPNCKNKSKEQILEIHHIKYKSKGGSDAPSNLITLCNKCHTYPNHKKGKFLYDWCENGKKVRGFKDATFMSMIRWYLLEQLKEKYTNIKATYGYLTKNHRIEHGIEKSHFNDAFAIAKGVNQVRNSEIFKVEQSRLNNRSLEKFYDAKYIDSRTGEKVSASELNCGRRTRNKNLNSENLRVFRGQKISKGQRRIRKKKSLYQPNDLIKYESKVYTVKGSQNEGKYIALKGIKKVPNVKLIKPYIFKKGLNWSHGLC

SEQ ID NO: 6280 - protein, 334 aa, Anoxybacillus sp.
VVGSASVLHITSIYNMVEENMTCFMQRKGENPMVFVLDTNKRPLAPCHEAVARKLLKQGKAAIYRRFPFTIILKKSVDESEIKATYRLKIDYGSRHTGLAILRGQEVVWLGQLDHRTDIKERIDKRRAFRRVRRNRKTRYRKPRFLNRKRKEGWLPSSLESRVQNIQTWVNRLKKLCPIGYISYENAKFDTQLMRNPEINGVEYQQGTLQGYEVREYLLEKFGRKCCYCGKENVPLEVEHIIPKSRGGTDRVDNLCLACHDCNQRKGSKTAEEFGYPHIQKQVKESLKDASAINSTRWKAYEVLKQTGLDVECGTGARTKMNRIRLDLPKTHYF

SEQ ID NO: 6281 - protein, 419 aa, unidentified
MVYVLDINGQPLMPTARHGKVRRLLNSHLAKVVKRCPFTIQLLYQSTKETQSVSLGIDAGSKHIGLAATTEKKDVYQEELIPRNDVVKLLSARRILRRSRRNRKPRYRKPRFNNRVHSKHKGWLAPSVEVKIQEHITAIKRICQILPISEIHVETAEFDLQRLKAMEEGSPLPVGTDYQLGEQYDFYNTRQYVLHRDRYTCQCCGAHDNNVRLHVHHIESRQTGGNAPNDLITLCEHCHKALHEGKLELSKGKKRGKSYRDAAFMGVMRKTLLERLKKEVDVPVTETYGYITKYWREKAGLEKSHINDAICISKHPYAKPLDTYYLTKAVRHHNRQIHKVNFSKGGVRKRNQAPHLVKGFRLFDKVLYQGKECFIFGRRVSGRMDIRLLDGTRINASVGYKNLKLLELRKAYLTERRTC

SEQ ID NO: 6282 - protein, 418 aa, unidentified; identical to SEQ ID NO: 4327

SEQ ID NO: 6283 - protein, 414 aa, unidentified
MPCSPAKARLLLKEKKAIVVRRTPFTIQLTIATGETKQPVSLGVDAGYKHVGLSASTEKAELYASEVELRQDITDLLSARRALRQSRRNRKTRYRAPRFDNRIRTKRKGWLAPSVENRIDAHLSRIEAVLRLLPVTKITVETASFDLQLLKNPDISGKEYQEGEQLGFWNIREYVLCRDGHVCQHCYGRSKDPVLNVHHLESRRTGGDSPGNLITLCETCHKALHRGEITLKAKRGQSFRAEAFMGIMRSEVLNRLKASHPELEVNNTYGYRTKHARIANDIAKSHCADAFCIAGNLGAERLGEFFFQKQTRRNNRQIHKLSILKGGIRKRNQAPFEVNGFRLFDKVACKGEEGFIFGRRSSGFFDVRKLDGTRISAGISCKKLHLLEKRRTYLTEIRKEEALPALPEGRGLRA

SEQ ID NO: 6284 - protein, 471 aa, Acidiferrobacter sp.
MAVFVLDRRKKPLMPCAERRARLLLARGRARVHRVVPLTIRLVDRLQEDSTLQPLRLKMDPGSQTTGMALVREPDTTDTTREDTIRALTVLMLLEIQHRGPSIHEALTQRSSHRRFRRGRLRHRPARFDNRTKPEGWLAPSLQHRVDTTMAWVDRLCRWAPVAALSQELVRFDTQQMQNPEISGVAYQHGTLAGYEVREYLLEKWARTCAYCGAHNTPLEIDHIHPKSQGGSDRVSNLTIACHDCNQRKGSQDVAVFLAKRPETLQRIRAQAPAPLRDAAAVNSTRWALYQRLKATGLEVEVASGGRTKWNRHRLHLPKTHSLDAVCVGSVDTIHNAQQPVLTIKATGRGSDQRTRLTKHGFPRGYLTRSKSAFGFQTGDLVKAVVTSGKKAGRYFGRVAIRATGSFNIQTATGLVQGIAHRFCILIQRADGYGYALTKRAFDTGEAGTGAAYAAALSLPGMNPGVSRANG

SEQ ID NO: 6285 - protein, 393 aa, unidentified; identical to SEQ ID NO: 6115

SEQ ID NO: 6286 - protein, 507 aa, unidentified; identical to SEQ ID NO: 5548

SEQ ID NO: 6287 - protein, 437 aa, unidentified
MPCSEKRARLLLARGRACVHRLVPFVIRLTDRQLDTCTLQPLRIKLDPGSKTTGLALVRDTEHLNTDTGEIQRGVAVLSLIELVHRGRQISEALTARRQMRRRRRGCLRYRAPRFLNRGNKARGWLAPSLQHRINTTTAWVARFRRWSPVTALSAELVRFDMQRLQNPEISGVEYQQGTLAGYEVREYLLAKWSRKCAYCGVENVPLQIDHVHPKAKGGTNRVSNLTLACGPCNARKSAQSVDAFLAKDPKRLTALLAQAKRPLKDAAAVNATRWALVGALKATGLPVETASGGCTKFNRSRLAIPKTHALDAVCVGAVSVVTNWQKPSLTIKCTGRGSYQRTRLDKYGFPRGYLMREKSVKGFKTGDLVRAIVPTGKKAGRHTGRVAIRKSGSFNIQTLAGVVQGIGYRHCRLLQRADGYGYFFNKAACDTAQKRE

SEQ ID NO: 6288 - protein, 414 aa, unidentified
MPCSPAKARLLLKEKKAIVVRRTPFTIQLTIATGESKQPVSLGVDAGYKHVGLSASTEKAELYASEVELRQDITDLLSARRALRQSRRNPKTRYRAPRFDNRIRTKRKGWLAPSVENRINAHLSRIETVIRLLPVTKISVETTSFDMQLLKNSDIAEKEYQESEQLGFWNVREYVLFRDGHVCQHCHGRSKDPVLNVHHLESRRTGGDSPGNLIALCETCHKELHRGEITLKAKRGQSFRAETFMGIMRWEVLDRLKASHPKLEVQNTYGYRTKHARIVNGIAKSHCADAFCIAGNLGAERLGEFLFQKQTRRNNRQIHKLSILKGGIRKRNQVPFEVKGFRLFDKVACKGEEGFIFGRRSSGYFDVRKLDGTRISAGISYKKLRLLEKRQTYLTEIRKEEALPPLPEGRGLRA

SEQ ID NO: 6289 - protein, 368 aa, unidentified
VVYIQDIDGNPLMPTTRHGKVRRLLKSNKAIVINLCPFTIQLTYATSGYKQEVVLGVDAGTKHVGLSATTKSKELYASEIILRSDIVELLSSRRESRRRRRNRLRYRKPRFMNRIKTKKEEWVAPSVRQKIDSHLKIIGFVYSILPISKLIIEVAQFDTQKIKNPEISGKEYQEGEQLGFWNVREYVLARDGHKCQHCKGKSKDPILNVHHIESRKTGGNSPSNLITLCETCHKEFHKGKIKLKVKRSASIRDAAVMGIMKWRLYNKLKSLYPNVKMTFGYITKHDRINHGIEKSHVSDAFVISRNFNSCRLGYYYKRKLVRRHNRKIHKMKILKGGIRKRNQAPFKVFGFRLFDKVMFQGEEYFIYA

SEQ ID NO: 6290 - protein, 512 aa, unidentified
MSTIYVLNKDGKPLMPTTRGGHVRHLLKEQKARVVRAKPFTIQLLYETNDAVQPLYLGIDPGRTNIGVAVVKANGTAVFTAHLESRNKEILKLMQDRKKARRARRTNGRRHRRQRRAKANGTISKKCVKQDTAQSKNPSKRAKEIGVIKRRLPGHKKDLLCIGIKNKEAKYTNRARPEGWLTPTAIQLLQTHINLVKKIQKFLPISDVVLEVNKFAFMRLDNPDIQKWQYQQGPLYQKGSLENAVSEMQEHHCLFCDKPIDHYHHVVPQSENGSNTIANIVGLCSEHHNLVHKDAAWQKKLAEEKVGLNKKYGALSVLNQIIPALTNKLSVLFPKHFFVTTGKSTHDYRESHSVSKDHWLDAYCIACSVLPSNVCDSNINNHVPYELKQFRRHDRRALHKENMSRVYTLNGKAVATNRHKAIKQTTDSLEEFRQSHPGDVCKLKVKEHHPAYRNLNRNHPGSVFFVGEQAHVMQSIVASKDGKATRYKDTNVNKIAAGQCRFVAKNEGIVFT

SEQ ID NO: 6291 - protein, 454 aa, unidentified
  REGION 1..454: note = Ga0315284_10011788
MQKLQAKLKNVPKDAHQVLCSTNSDLNRVEKLSDQSIVLACNNPDGDQSHSKNEKQDLRVPVVYVLNMRGNPLMPCSCRKAKKLLKEGKAKVVKRIPFTIQLRIPTGEAKQDIILGVDTGYKNIGISAISGIKELLSIDVGLRNDITDKLKERGMYRRGRRNRLWYRKPRWLNRANSRKEGRLMPSVLQKVNTHISIIEKIKKLLPISKVIIETGLFDVAKMKNEEIRNWEYAKGEMFGFENVKAYVLSRDNHKCYFNDRCSDKLHVHHIKFRSKGGSNNPNNLITLCERHHDQLHEGKIVLNIKKHKELKSATIMNIIRKRLVEYFPESIETFGYETKVKRRELGIEKSHVNDAFVIANGKTQERIIPFNIIQKRKNNRCLQLNRKGYKPSIKKERSKIQPLDLFWVKGNKYLCKGMFNYGKYICYGSTKLKEYFKIELVESYYYQGIFVWNI

SEQ ID NO: 6292 - protein, 424 aa, unidentified
MVYVISQDGKPLMPCSNPIARLLLKQGKAKVKKREPFTIKLTYEAPNYTQDLTLGVDTGSGTIGTAVSKDNGDIVYMSEVIVRNDITDKMTQRVKYRRNRRNRKIRYRKARWLNRANSIKNDRFSPTMQSKLHSHVKEIEYIKSILPITEMVFETGQFDTHFMKNPSLANPKVKHWGYQKGTNYGFENTKAMVLNRDSYTCQCCKGKHKDSKLEVHHIVFRSQGGSDEESNLITLCHTCHKDLHSGKINPKLSGKVKGNLKYATQMNSIRKQLFRLYPNAIETFGYVTKANRLHLGVNKEHYYDACTIATQGNAFNVKSNLYKKKCVSDGDFQKTKGVCSEQPIVTDKICGFRKFDKVRYFGNDYFIKGRMSTGYAILMDIDGDKVDFSAMPKGYKTPKMVNLKRLEARSTWMITTVEVTPNIA

SEQ ID NO: 6293 - protein, 396 aa, unidentified; identical to SEQ ID NO: 4508

SEQ ID NO: 6294 - protein, 416 aa, unidentified
MVYVLSKTGQPLMPTENHAKVRVLLKQQKAKIVHRCPFTIQLLYDSTNYTQPVSLGIDAGSRHIGISATTETKVLYEADVTLRNDIVNLLSTRREARRTRRSRKTRYRKPRFNNRTRKDGWLAPSVRQKVDTHLTTVRKVTEILPVNSITVETASFDIQKIKNLNIVSTDYQHGEQFDFWNVREYILFRDGHKCQCCKGKSKDPVLNVHHIESRKTGGNAPNNLITLCETCHKGYHNGTVSLPKNIRRGMKFNDAAFMGIMRLAFFNKVKETYEPLGIMVNMTYGYITKNTRIEHNLPKDHFIDARCISGHPDATSDGTVFYQKKVRCHNRQIHKQKIFKGGIRKRNQAPYEVKGFRLYDEVLWKGQKCFIFGRRSTGRMDLRLLDGTHINASVGYKNLKLLRKRSNYLTEQRKVG

SEQ ID NO: 6295 - protein, 413 aa, unidentified
MTNYAFVLDADNKQLTPTKEQKAWFLIRKKRATLVSKYPMVIQLKKKIPDKEICKDEVRCGIDDGGLHVGVALVQKCHTRNKVIFKGVIEQRNDVKHLMDVRRGYRRYHRYHKRYRPARFNNRNSSKREGRITPSILQKRQATIRVVNQLNKWINITNYWLEDVAIDIRALTDGYKPYRWQYQKTNRLDENIRKAVILRDGCKCMECGKSNCRLEVHHIKPKRLKGSNTLGNLITLCAKCHQKTESVEELYMDRYFALLKSSDNKNLNYAQHVMIGKKWLREQLSNLGMLHLTNGGDTANKRIDWDITKSHSNDAICITDLKPDTCEIKEWVIKPMRRQSKAKADNVLGIKHRDLVEYTFRNGETHRGYVTALYPEQNAINFQSPTKHCKKVNARKCKVLWKYSKIYWLDNVS

SEQ ID NO: 6296 - protein, 443 aa, unidentified
MVFVLNKDKTPLAPCHETVARKLLKQGKAVIHRIYPFTIRLKEQKDTSTFKPNYRLKIDYGSRHTGIAIIKNDREVIFLMQIHHRTDVKENMDTRRIFRRSRRNRKTRHRAPRFLNRRRDTDWFPPTLLSRIRNIETWVRRLCKLCPITAISYENVKFDMQFMRNPEISGIEYQQGTLQGYEVREYLLEKFGKRCVYCGATNVPLEIEHVIPKSRGGTDMIDNLVIACHECNQKKGNKTAEEFGYPEIQQLVKEPLRDCALVNATRWRIYNILKETGLPVECGSGALTKMNRTRLGLPKNHHFDAVCVGFSTPERIWFKTKNVLHVIAKGRGTRQIAVLDRFGFPRGHRTRKKFFYGFKTGDIVRANVPKGKYKGVWTGIVACRESGYFDIKDRTGRRIVQGISYKYCKVIQRFDGYCYDLKQAEVPGTFPLQPVEVGASMCQ

SEQ ID NO: 6297 - protein, 459 aa, unidentified
  source 1..459: note = uncultured beta proteobacterium
VVFVLDKRGKPLMPCTERRARILLERRRARIHRLYPMVIRLVDRFAEDSEFQELNLKLDPGSKTTGMALNRADDSTETVLSLFELMHRGALISKKLEQRRSMRRARRNRHTRYRQARFLNRGNKQKGWLAPSLMHRVNTTMAWIDRIMRWSPVSLLTQELVRFDTQKLENPEISGVEYQQGTLLGYEVREYLLNKWNRACAYCDAQNVPFEVEHIHPKSKGGSNRVSNLALACRSCNNKKDNLPIDVFLAKDQSRLKRILVQAKAPLKDPAAVNSSRWRLFNELKATGIVVKTGTGGQTKFNRVQNKIPKTHALDAACAGHVEFVSDWQKPTLSIKCSGRGTYARTKLDSYGFPRGYCLRQKQVHGFATGDIVRAKVTKGKKSGTYFGKVAIRESGSFNISTNAGVIQGVSHQYCKVVQRADGYGYLFNQDSKQSRVQGIALQSALSLPALKDGVSRAN

SEQ ID NO: 6298 - protein, 412 aa, unidentified; identical to SEQ ID NO: 4932

SEQ ID NO: 6299 - protein, 431 aa, unidentified
MPDKVYVISRLGHPLMPCSPAKARHLLDDKKAKVVKRMPFTIRLLYGSTKYIQPIILGVDAGSKTIGLSASTAKEEVFAAEVMPRNDVVENLSTRREFRRARRNRTTRYRKPRSDNRVRSNHERWLAPSVKVKIQEHITSIKRVCTILPISKVVIETAEFDLQLLKAIQEGKPIPEGEDYQKGEMYGSYNVCQYVLWRDNYTCICCGVRGTPKNPVRLHIHHFESRKYGGNAPDNHGTLCDDCHKKFHLGIITDVKLKTRRRQSTRDAAFMGIMRKTLMWRLRTELFIPVAETKGYITKATREKLLVLPKSRTRDALAIAQGRHGFGIKEYAYVEPANHIYMVRPVRHHNRQLHKASILKGGIRKRNQASKYVFGFRLYDKVLYQGKACFVWGRRTSGTFLLRTIDGIKVKDGVSYRNLTLLERSSNYLIA

SEQ ID NO: 6300 - protein, 373 aa, Moorena sp.
MQNYVLVIDTDKQPLNPISPKKARRLLDKGKAAVFRMYPFTIILKAAIANPTISPCQIKIDPGSKVTGFALVQDDQVIWGMELEHRGGLIKKKLESRSGVRGGRRNRNTRYRKPRFLNRKRPEGWIPPSLEHRVLTIETWVRRLTKFCPVNEIWIEIVKFDTQKMQDPEINGVEYQQGELAGYEVREYLLEKWGRECAYCGKQNIPLQIEHIHPKSKGGSDSAKPTLRERVSNLCLACEKCNQRKGNRPIEEFLKKKPGLLQKIKNKALSPLRDAAAVNTTRNKVVKVLNEIKPVVTGTGAQTKYNRTKLGLPKQHWIDAACVGDVEALVLRTYQPLVVTCKGQGGRQKAALNKYGYPIRHNPLKPIKGWKAW

SEQ ID NO: 6301 - protein, 442 aa, Lactobacillus sp.; identical to SEQ ID NO: 4549

SEQ ID NO: 6302 - protein, 450 aa, unidentified; identical to SEQ ID NO: 2935

SEQ ID NO: 6303 - protein, 431 aa, unidentified
MPDKVYVISRLGHPLMPCSPAKARHLLDDGKAKVVKRTPFTIKLLYGSTEYTQPVILGVDAGSKTIGLSASTTKEELFAAEVMPRNDVVENLSTRREFRRARRNRTTRYRKPRFNNRVHSKNNGWLAPSVEVKIQEHITSIKRVCAILPISKIVVETAEFDLQLLKAVQDGKPVPEGEDYQKGEMYGSYDVRQYVLWRDNYTCICCGVKGTDKKPVKLHVHHFESRKHGGNAPDNYGTLCEDCHKKLHLGIITDISLKTRKRPSTRDAAFMGIMRKTLMQRLITGLSIPVAETKGYITKAAREEILKLPKTHTNDALAIAQGRHGFGIREQAYVKPTNRIYTVRPVRHHNRQLHKATMLKGGIRKLNQASKYIFGFRLYDKVLYQGGECFVWGRRRSGSFLLRTIDGTKVKDGVEYRNLTLLERSTNYLIA

SEQ ID NO: 6304 - protein, 424 aa, Tolypothrix sp.
MQNYVFVIDTNKQPLNPISPARARELLTKKKAAVFKIYPFTLILKHAVDNPNPNPLTIKLDPGSKFTGIAILNDDKVIWAAELEHRGRQIKGSLESRHSLRRSRRTRKTRYRKPRFENRKRPEGWLPPSLMHRVFSVETWVKRLCRYAPIAQISMELVKFDTQKMQNPEVDGVEYQQGELAGYEVREYLLEKWRRKCAYCDKEGVPLQIEHIHPKSIGGSNRVSNLTLSCERCNIKKGTKSVDEFLKKAPTRLADIKRQAKQPLKDAAAVNATRWSLFRTLKNILPITTGTGGQTKHNLIKFDLPKYHWVDAACVGNVEKLKLLTQQPLRIKCTGWGTRQMCGTDRYGFPIRHKERKQVHFGFKTGDIVKAVVSTGKKIGEYVGRVLCRKTGSFDIVTKSGRVAGINYKFCTPIHKKDGYSYAF

SEQ ID NO: 6305 - protein, 431 aa, unidentified
  REGION 1..431: note = Ga0307928_10034124
MTNLFNSREEHLTLTDGGHKDNMLVYVINKNGNRLMPCKPAKARHLLRDGKAHVVKRSPFTIQLDWDCEENVQDVTLGIDKGSKITGLCCVGNGRVLLSGNINHRRDIKKKMDGRRNNRRARRSRKWYRPPRFNNRASSRRSGRLPPSIKANAEEVIRATKKIPLPISHIVVEDVLVDIARLNNPNLRGKQYQQSNRLDENLRLATLMRDNFKCAQCNVGDTRLEAHHIIWSGQGGKDTISNMATLCSSCHAKVHAGVITVSGGVSGFRDRIAQRTMQGKTYLYNSLSAMAPLSKVFGYQTAEYRKALRLPKDHDIDALCIATMLTGEVVPHNRDNFYGIKFRARQTRRQYFDLPRSGKGRVRYQVNKELYGFRKGDIVKVKGKWTKQINSICSRGYLAFQRTGNGPGSASPKYCQLLEKASTIKWSKSNE

SEQ ID NO: 6306 - protein, 426 aa, unidentified
MVYVQNRLGQPLMPTKDHRKVRLLLDSGAAVVVKRTPFTIRLTTKAKSYVQPIILGVDAGSKTIGLSASTETEELFAAEVTPRNDVVDNLSTRREFRRSRRNRKTRYREPRFNNRVRSKHKGWLAPSVEVKIQEHITAVKRVCALLPVGKIVVETAEFDLQLLKAVEAGLPVPQGEDYQKGEMLGHYNIRQYVLWRDGYTCRCCGTHGKGVKFHVHHLESRKTGGNAPDNLVTLCDGCHKKFHKGIITPDILKKRKRRSTRDAAFMGIMRKTLMERLRAELAIQVVETKGYITKYTRVELLKLEKTHTNDALAIAQGRRGFGVEELTTIPQSDYIYRIRPVRHHNRQLHKATILPGGIRKSNQAPRYVWGFRLFDKVSYLGEDCFIWGRRSSGSFLLKLLDGTKVKDGVGYKRISLLERSASYLIS

SEQ ID NO: 6307 - protein, 427 aa, unidentified
MQYVYVLNKHGEPLMPCSPRKARLLLNQKKACVVKRTPFTIKLLYGSTGYKQPIILGVDAGSKHIGISATTEKCELYREEAIPRNDVVDLLSARRAFRRSRRNRKTRYRAPRFNNRVHSKHKGWLAPSVEVKIQEHITLIKRVCRILPVTLVRVETAEFDTQRLKAMLEGKPLPVGTDYQHGEMYDEYNVRQYVLKRDNYTCQCCGAHPTKTKAVKLHVHHIETRRTGGNAPNNLITLCTVCHKALHVGKVTLDGKKRGKPLKDAAFMGIMRKTLMERLLKELKIPVQETYGYITKCLRERHSIPKNHTNDARCITKNPLAIPCDTCYYMKAIRHHNRQLHKATILKGGIRKANQAPYTVKGYRLWDKVSYNGSECFITGRRTSGYFALKKLDGTIVSNGASYKKLRILEVATNYITEKKVNGQFLP

SEQ ID NO: 6308 - protein, 512 aa, unidentified
MSTVYVLNKNGKPLMPTTRCGHIRYLLKEKKARVVASKPFTIQLLYETNDVVQPLYLGIDPGRTNIGVAVVKTDGTAVFTAHLETRNKEIPKLMKKRKDSRRARRTNGRRCRRQRRAKANDTISKKCVKQATAQNGSVSKRAKEIGVIKRHLPGCEKEVLCIGIKNKEAKFSNRTRPEGWLTPTANQLLQTHINLVKKIRKFLPISDVVLEINKFAFMQLDNPNIQKWQYQQGPLYQKASLEEAVSEMQEHHCLFCKKSIVHYHHVVPQSENGSDTIGNIVGLCTKHHDLVHKDTAWQKKLAKKKTGLNKKYGALSILNQIIPALTKELSSLFPKHFFATNGKSTHDYRAAHDVSKDHWLDAYCIACSILPNDTCDKNINGRVPYKLKQFRRHDRRALHKENMSRVYTLDGKKVATNRHKAIKQTTDSLEEFRQRQPNDVCKLKVKEHHPEYRNPERNFPGCVFLVGKHTHVMQGTSGSHNGKADGYYDTNGNSYPSGKCKFVAKNKGIVFA

SEQ ID NO: 6309 - protein, 414 aa, unidentified
MVYVINKQGQALMPTERFGKVRRLLKNSLAHVVCRIPFTIQLDYDTTDYTQPVSLGVDAGSKHIGISATTSEKELYAADVELRNDIVDKLSTRREQRRTRRSRLRYRKARFNNRVSSKRKGWLAPSVENKIQTHLTVVEKIHKFLPITNIVVETASFDIQKINNPSISGSEYQQGEQLDFFNVREYVLFRDNHTCQHCKGKSKDKVLNVHHIESRKTGGDSPKNLITLCETCHKAYHRGEFKLNIKRGKSFRDSAFMGIMRWSFYNRLKNIYPNVSMTFGYITKNTLITNNLPKDHYVDARCISGNPTAKPLGYYFYQKKVRCQNRQIHKANFLKGGRKKLNQAPFLVKGFRLFDLVEYQKDLYYIFGRRDSGFFDIRKLDGTKVNKGSINCKYLRLVDTRKSILIEKRMQVNL

SEQ ID NO: 6310 - protein, 327 aa, unidentified
LERRNRKTRYRKPKFLNRKRRDEWLPPSLQSRINHTFHWIDTLSSLVPNPILHIEVGKFDVAKMINPEIHGVDYQHGQTYGFFDERYFVFARDNYTCQCCGKSKNKILNTHHIIYRSNGGTNRVDNLITVCTDCHTSQNHRKGGIFYQWQEQHKKVKQYKEPPFMNTLRKRIFVAYPDAEITYGSETTPKRKAMKLDKTHYNDAIVISGINEIKENPEEWLLIKQFRKKKRSLHEATARKGRKKPNRNQTRNSKNTPYYKGFYLNDKVSVFGKSGYITGFTSNAAYIKDENNDYITLPNKTYKQVSINKMKLECHNNNWQYIIKNAV

SEQ ID NO: 6311 - protein, 426 aa, unidentified; identical to SEQ ID NO: 2797

SEQ ID NO: 6312 - protein, 414 aa, unidentified
MPCSPAKARLLLKEKKAIVVRRTPFTIQLTIATGESKQPVSLGVDAGYKHVGLSASTEKAELYASEVELRQDITDLLSARRALRQSRRNRKTRYRAPRFDNRIRTKRKGWLAPSVENRINAHLSRIETVLRLLPVTKITVETASFDMQLLKNPDIAGKEYQEGEQLGFWNVREYVLFRDGHVCQHCHGRSKDPVLNVHHLESRRTGGDSPGNLITLCETCHKALHRGEITLKAKRGQSFRAEAFMGIMRWEVLNRLKASHPELEVNNTYGYRTKHARIANGIAKSHCADAFCIAGNLGAERLGEFFFQKQTRRNNRQIHKLSILKHGLRKRNQAPFEVKGFRLFDKVACQGEEGFIFGRRSSGFFDVRKLDGTRISAGISYKKLRLLEKRQTYLTEIRKEEALPPLPEGRGLRA

SEQ ID NO: 6313 - protein, 442 aa, Lactobacillus sp.; identical to SEQ ID NO: 4549

SEQ ID NO: 6314 - protein, 406 aa, unidentified
MVYVQDINGKPMMPTTRHGKVRRLLKDKKAVVVNLCPFTIKLTYVTSDYKQEIVLGVDAGTKHVGLSATTKSKELYSSEVILRNDIVDLLSTRRELRKTRRNRLRYRKPRFNNRVKNKRPGWIAPSVRYKVDAHIRVIDNICYILPISRIVIEVAQFDTQKINNPEISGKEYQKGDQLGFWNIREYVLARDGHKCQYCKGKSKDKVLNVHHIESRKTGGDSPSNLITLCETCHKEYHKGNIDLKIRRGKSLRDAAVMGIMKWRLYEELKSKYDNVSMTFGYVTKHNRIKHGIEKSHVSDAFVISKNINAKRIGCQYLKRLIRRHNRQIHKMKILKGGKKKNNQAPFEVFGFRLFDKVLYDNKICFVYGRRKSGNFNIRDFSGENPKDVSHKKFKLIRGKRHPIILK

SEQ ID NO: 6315 - protein, 456 aa, Halomonas sp.
MAVFVLDKHKQPLMPCSEKRARLLLQRGRAVVHKRYPFTIRLKDRVGGDTQPLRLGLDPGSKTTGLALMRESDDSQRHVLCLFDLVHRGYQIKKALQQRAAFRRRRRTANLRYRAPRFDNRTRKADWLPPSLQHRVDTVMAWVQRLSKLAPITGISQELVRFDTQQLDNPEISGVEYQQGTLLGYEVREYLLEKWGRECAYCGTADTPLEMEHVVPRSRGGCNRVSNLTIACHDCNQAKDSLPLATFFATDKGLKKRLKANGLSAGARLERVQRQLKQPLRDASAVNSTRWALLTALNATGLPVAVTSGGRTKYNRQRLDIPKTHALDAACVGAFDLLHDWTVPTLTIKCTGRGSYQRTRLTKHGFPRGYLMRQKQVHGFQTGDMVKAIVPTGKKAGTHTGRVAVRKTGSFNIQTEQGAVQGISHKYCTVIQRGDGYGYHLTPFINHKGGAEKAVA

SEQ ID NO: 6316 - protein, 469 aa, unidentified; identical to SEQ ID NO: 3785

SEQ ID NO: 6317 - protein, 455 aa, unidentified
MAALTGFKLHKERKCKMMVRVIAKDGTVLQPTNRHGKVRRLLDNNKAEVVCKSPFTIRLLYKTTKKTQKVKVYFDTGGKYQGFAIISNGKVIQKGTIELRDGIPELLKQRRSYRRGRRHRNKRYRPARFNNRKRKKGWLPPSVRSKYRHIINWIDKLTNYLPKYNLTVEIAKFDIQKLKNLNIEGKEYQQGSLYQYENTKQYLIFRENNKCQLCGKKKGDDTWNLHHLHQSKDCGTDSPDNLALLHSKCHDKLHSNSLDDKLKENDKKLTSQKANVKQFRYTTFMNIIKNRLCNELKNKYSNKVNFTYGYITNINRRKLELEKTHYNDCLAMHKKEVEDNINSIYIKQVRKKKRSLHEAIPRAGRSDKVNTTQKRSSKNTKEVIKNDKKWSLWDKVYISELGTTGFVSGFTGKWVYVQDINNNYLKLPNKSYKQMNRDNVRLVTRNNNWIRKEIA

SEQ ID NO: 6318 - protein, 512 aa, unidentified; identical to SEQ ID NO: 3720

SEQ ID NO: 6319 - protein, 521 aa, unidentified
MRDYMTQKRKEASRMSEYIYVLGMDGDPEMPTKRKRHVEKMLQTGRARVFRQVPFTIQLTYKNQPVLQPVTIAEDPGRSNIGMAVVSLSGELLSAAVVQTRNKEIVKLMEKRKQHRRASRNGERKARQRLAKKCHTMIKAGFLMRKLPMYGKDKRVQCNVIRNTEARFCNRKREDGWLTPSAEHLVRTHINLIHKMQKFLPITDVAIEVNRFAFLSLEDPSISGVDFQNGPLKGYDDLNAAVEDLQDGHCLMCNSPIEHRHHIVPRSMQGSNTIGNIAGLCCKCHERIHKDARFEDHLKKKKAGLNKRYAAVSVLNQAIPFICKRLEQEFGKERVHYCSGRDTSMVRRSLGYHKTKEEQLHEVDAWCIAVLALRQIPEKAPEFDHVHEILQFRRQDRSIIDAQTSRMYYHEGKKVAKNRKKAEGQKDDSLQEWRERQVERYGKEQTRKMISQLEIKKSSRRYNRLDRLMPGAVFYYQGVRYVMRGQHSNRQYLQAVGMGSKDFPAKKCKIVVHNEGLVFVS

SEQ ID NO: 6320 - protein, 512 aa, unidentified
MSTVYVLNKDGKPLMPTTRGGHVRHLIKEQKARVVRAKPFTIQLLYETNDVVQPLYLGIDPGRTNIGVAVVKANGTAVFTAHLETRNKEIPKLMQDRKKARRARRTNGRRCRRQRRAKANGTISKKCVKQTTAQNGSVSKRAKDIGVIKRRLPGCEKDVLCIGIKNKETKFTNRTRPEGWLTPTANQLLQTHINLVKKIQKFLPISDVVLEVNKFAFMRLDNPNIQKWQYQQGPLYKKESLESAVSEIQAHHCLFCKKPIDHYHHVVPQHKNGSNTIGNIVGLCAKHHDLVHKDSAWEKKLAQKSTGLNKKYGALGVLNQIIPTLTNELSSLFPKHSFVTNGKSTYDYRAAHGVSKDHWLDAYCIACSVLPSNVCDSNINNHMPYVLKQFRRHDRRVLNNENMNRVYTLNNKAVAINRHKAKDQKTVSLEEFRKEHPDDVCKLKVKEHHPTYRNMNRNFPGSVFLVGKQIHVMQGIASSKDGKATKYNDTSATAIAAGKCKFVAKNTGILFV

SEQ ID NO: 6321 - protein, 428 aa, unidentified
MQYAYVLNKRGEPLMPCSPGKARILLKQQKACVVKRTPFTIKLLHGSAGYKQPITLGVDAGSKHVGLSASTEKRELYSEEFTPRNDVVELLSTRRQNRRSRRNRKTRYRAPRFNNRVHSKHKGWLAPSVEVKIQEHITVIKRICRILPVTLVRVETAEFDTQRLKAMLAGKPLPVGTDYQLGEMYDEYNVRQYVLKRDNYTCQCCGAHTTAKKTVKLHVHHLESRKVGGNAPSNLITLCTTCHNNFHKGKITLDGKKRGKTLRDAAFMGIMRKTLLARLHEELPIPVQGSYGYITKMRREQNDIKKSHVNDARCISKHQLAEPCSVCYRTKAIRHHNRQTHKANFSKDGIRKRSQMPYVVDGYRLWDKVLYEGQECFVSGRRASGSFTLKKLDGTRISKGVTFKKLRLLEPATNYLIERIRTGNSSHD

SEQ ID NO: 6322 - protein, 431 aa, unidentified; identical to SEQ ID NO: 6048

SEQ ID NO: 6323 - protein, 407 aa, unidentified
QPLMPTDRHRKVRLMLQSGQAKVIKRCPFTIQLTYNTGHQAQEISLGIDAGSKHIGVSATTKTRVLYEADVELRNDIVDLLSSRRELRRGRRNRKTRYRPARFDNRRREDGWLAPSIRQKIGTHLTVVENICKILPISRITVETASFDIQKIKNPDIQGAEYQQGDQLGFWNIREYVLFRDNHTCQCCKGKSKDKILNVHHIESRKTGGNAPNNLITLCEICHTGYHKGAVQLPKTVKRGMRFKDAAFMGIMRWAFYEALKQQYEPVGTPVHNTYGYITKHTRIEHNLPKEHYVDARCISGNPDAFPNGEYYYQKKVRCHNRQMHKLTILKGGIRKQNQATYLVKGYRLFDKVSYQRKEYFVFGRRKSGFFDIRTLSGKQVNKGSLSCKKLKFIATRMYYLIERRAV

SEQ ID NO: 6324 - protein, 419 aa, Scytonema sp.
MQNYVFIVDVNKQPLNPIRPKRARTLLMRGKAAVLRMYPFTLILKTAVENPVLRPVELKIDPGSKVTGLALVQDGSVVWGANLEHRGSEIKSDLESRSAVRRSRRNRKTRYRKARFLNRKRTLKWLAPSLMHRVLTIETWVKRLCRYVPITGIAMELVRFDTQALQNPEITGQEYQQGELFGYEVKEYLLAKWGRNCVYCGKQDVPLQVEHIHPKSNGGSDRVSNLTISCARCNQNKGSKSIEDFLKKKPDLLRKIKAVRLAPLKDAAAVNSTRWALYQSLKKVSGLNVATSTGGRTKYNRIKNGFDKDHWIDACCVGESGDRVVLKTKQPMIIKSTGVGSGRQMTRTNKFGFPCAKAKQRYQHGWKTGDIARFIDGTIGRIVVQSASRLEIRINKQRIGGLLNLFNKLHSVDGYNYAF

SEQ ID NO: 6325 - protein, 545 aa, unidentified
VQFAWWLCHPKPSDNIEDVKHETALMLLQIKAGTETFGTAPCGFGPKAEGVSPERKAMNTVAVVTNTNKPLMPTSPYRARKLLSSGKAKIVKHRPFTILLVNRSDGNVQEIEYKSDTGYLHVGISVCSEKREFVREQRDLLPDEKEKHNDRRKYRRTRRNRKRYRKARFDNRIGKIRKKEKNEHVWLPPSLEHKVDAQVQLFLRLYQVMPIKRAVFEMGQFDPALMKALEKGEAAPQGIDYQMGERYQIATRRAAVFTRDRYACVFCGRSIKDHAILHVHHIGFWKQDRSNRLDNLATCCEQCHTSENHRPGGILYGVEPKLESLASATYMNVVRFELLQRLKEAAPDVEFHISYGAKTSVIRKQRSISKSHTNDAYCLGQYFPKLRAEEIGFQKIRRNDRILQKFYDAEYLDSRDGTTKKGKELTNGRISRNHMKDHKNLHQYRGKKLSKGRVTIRRGRSSLKPGSLVRFDGEVLTVHGTHRSRRKNKAGHIKVSVNVEFERPSKTGRKSAALSKCQIISQSYNTGWKKIQLRKEEQGKIAAVV

SEQ ID NO: 6326 - protein, 431 aa, unidentified; identical to SEQ ID NO: 4377
  source 1..431: note = uncultured cyanobacterium

SEQ ID NO: 6327 - protein, 442 aa, unidentified
MSKVLLLDTTKEPLDPVHPGRARLLLKEGKAAVYRRYPFTLILKTQVDSPAVSALRLKLDPGAKTSGLALVDDASGEVVWAAELGHRGASIKKRIDARRGVRRKRRSRFTRYRKPRFHNRRSSRRKGRLPPSLESRVANMLTWVGRLRRLCPIEAISMELVKFDMQAMQNPEITGAQYQQGERMGYETREYLLAKWGRRCAYCGAEDVPLEIEHILCRARGGTHRVSNLTLACEPCNVKKGTQLIEDFLNKKPDVLARILAQAKTPLKAAAAVNATRWHLFERLKATGLPLETGSGGLTKYNRAKRHLPKTHWLDAACVGQSTPKPLETSQVVPLLIEATGHGNRQMCGVDEHGFPIRHRQRKKVHFGYQTGDLVRAVVPTGARAGTHVGRVLARASGSFDLRTKAGRQAGISYRYCRPIHRNDGYRYQKGARHAVPATQST

SEQ ID NO: 6328 - protein, 310 aa, Moorena sp.
MPNYVFVIDTNKQPLNPIPPKKARRLLDKGKAAVFRMYPFTIILKTAIDNPIVSPCQIKIDPGSKTTGFALVQNNQIIWGMELEHRGGKIKKKLESRKAVRHRRRNRHTRYRKPRFFNRKRSEGWLPPSLEHRVSTIETWVKRLTKFCPVNEIWVERVKFDTQKMQNPEINGIQYQQGELAGYEVREYLLEKWGRECTYCGKQSVPLQIEHIHPKSFGGSNRVNNLCLACEKCNQRKGNKPIEEFLKKKPSLLQKIKTKAKQPLKDAAAVNATRNKLVKVLQNIKFVVTGTGAQTKYNRTRLGLPKEHAY

SEQ ID NO: 6329 - protein, 462 aa, Halomonas sp.
MAVFVWDKHKRPLMPCSEKRARLLLARGRAVVHKRYPFTIRLKDRVGGDTQPLRLGIDPGSKTTGLALMRETDSTESDGPQRHVLCLFDLVHRGYQIKKSLEQRRGFRRRRRSKNLRYRAPRFNNRTKPKGWLAPSLQHRVDTVMAWVERLSKLAPVTAISQELVRFDTQKLDNPEISGVEYQQGTLLGYEVREYLLAKWGRECAYCGTGDTPLEIEHVVPRSRGGSNRVSNLTLSCHPCNQAKGSLPLADFFSRDKGLRKRLKANGLSADARLERVQRQLKQPLRDASAVNATRWALFNALKTTGLPVAVASGGRTKYNRQRLGIPKTHALDAACVGAFGWLHDWTASTLTIKCTGRGNYQRTRLTKYGFPRGYLMRQKQVRGFQTGDIVKAVVPSGKKAGTYTGRVAVRKTGSFNIQTDQGAVQGISHKHCTVIQRGDGYGYHLTPTIHQLKGGAGQAVA

SEQ ID NO: 6330 - protein, 464 aa, unidentified
MYVFVIGLDGTRLMPCKPRKARKLIEAHKAEIYKKQPFTIRLLYKTGCASQPITLGIDTGSQHIGIAVTSENKVLYQAEIELRSTMDKRSLMETRYSYRRSRRYRKTRYRSPKFRFHTKRTYSETLVKRKTTGIMTHWVKHTNSMSTNRPDGWLAPSMQSKVDHHIRWINRFLDVLPPDTKLRLEIARFDMARMKNPEVHNELYQHGPQYDYENLKAYVFDRDHYKCVVCKRKLGSKQPDGHSLKGMMHHITFRSKGATDNPDQLVTVCEYCHTPQAHKEGGVLWDLKEKHKSVQRGLRDATQMNIIRTRLVKAFPDAELTYGNITAADRKKMHLPKSHAGDAVAIAMKGEDVNICEPTVYIKQIRKKKRSLHEATPRKGRKRPNTQAVRNPKNTKSIGIYHIYDTVRFQNETGFISGFTGKSAYVQDFDGNYITMPGKSYKQINLSSLELVKHNNNWIQKTRN

SEQ ID NO: 6331 - protein, 453 aa, unidentified
  REGION 1..453: note = Ga0315294_10017328
MQKFKAKLKNTPRNAPQVPCSVSTSLNREEILGEASKVRALNNPDVDLRQHKGEQGLRVPVITYVLNQRGNSLMPCPARKARILLKKGEAHVVKTNPFFVIQLNKATGEQVQNCFLGIDSGSKNVGFSVVSDRKEIVSGTLVLDQKTSDRLTERRMYRRGRRNKLWYRKLRFDNRKKKKGWLPPSTQRRFDTHITLINKLKQLLPIKNITIEVGNFDIQKIENPDILGIQYQQGSMFEYQNVRSFLMAREKGKCQLCDKEFSKGNSSHIHHIISRNNGGTDREKNLALIHESCHKKLHKNKSFNLLKKNKTYKDATFMSIISWKFRELLSDCKLTYGNETFVKRNILRLEKTHYNDAFVIAGGNNQIKVQPVILNQKHKNNRVLQLNRKGFKPSIRRQRYSIQPYDVITVSNKKYVAKGCHSYGKSVLCTDGIKNFDFGIKKVEKVFNTQTIY

SEQ ID NO: 6332 - protein, 442 aa, Lactobacillus sp.; identical to SEQ ID NO: 3826

SEQ ID NO: 6333 - protein, 535 aa, Streptomyces sp.
MRHVRSLNSNVTHTTPLSPKSLRAPASGATCPRRPHVRVISPDPCSLGNPRCVASGASREGRSLAPSYRVTSPGHHDLRISRGASMTTFFTGEQTHQAVLPQQPALESAGAYTPGSRDETAHGLPDPKPGTGVGHGRGETGAVRTRTRRRHARRLDPGSKATGIAVTDERDEVGAKGRTALVRRGLVSIELRHRGRQIHSGMVRRAGHRRRRRSANLRYRAPRRDNRTRPDGWLPPSLRHRIDSTMSLVARLCRYAPVLEIHVEQVAFDTALIAAAVSSREQDFSERTHAGSEIRESLLAKWERSCAYCGATGVLLTIEHVRPRSRGGSDRVANLVIACVPCNQAKGTARIDEFLADRPARLERVIAQLRRPLHDVAAMNTTRLLLVKTLATHGVAVHTWSGGRTSWNRLAMGLPKSHTLDALATGVIDLERGDAVVRIPAQILVVRSTGRGSYARTTPDRYGFPRLQRPGGQHRITTLTSHFDVSHRNLRLLQRADGYTYGFADEIRLSEEHGPAYSGRTLKGGDPGNVRTPDA

SEQ ID NO: 6334 - protein, 460 aa, unidentified
MVAVVDLFGKPLMPTNEYRARKLLKRKKAKIFGYRPFTIQLTERKDTEIQPIELCMDTGYIHIGISAKSERHEYLGMQIDTLTDEKLKHDDKRQYRRQRRNRKRYRAPRFDNRRRKEGWIAPSLEHKKEIHIDAIQRICKVMPITDLTLEMGNFDTQVLKAVEEGKTLPQGSDYQHGERYGIATLREAVFLRDGYKCQCCEKTVKDGAILHVHHIKYRSQGGTNRMSNLITVCDKCHTPQNHKPGGKLWNWKTKLAEFKGASYMTSIRWMLYNEVTALLPNSSVHITYGAKTKESRRELDIEKSHVNDAYVMGLFHPKHRTQPVYFKKKRRNNRVLEKFYDAKYIDSRDGKKQSGQELFNGRISRNHRKDSENLHLYRKQKVTKGKRSIRNRHYPIQPHDILLYQKKKYETAGCHNNGSRAILLPEKKSVALKQLTMYQYAGGYYRVPYESNKKEERTGS

SEQ ID NO: 6335 - protein, 451 aa, unidentified; identical to SEQ ID NO: 5203

SEQ ID NO: 6336 - protein, 442 aa, Lactobacillus sp.; identical to SEQ ID NO: 5193

SEQ ID NO: 6337 - protein, 414 aa, unidentified; identical to SEQ ID NO: 3759

SEQ ID NO: 6338 - protein, 427 aa, unidentified
  REGION 1..427: note = Ga0214071_1496828
MVFVVDKNKRPLAMCHSGKVRKLLDTNKATVISQYPFTVKLTTKEITSPIEDNYSLKIDPGAKFTGLAILNSKMELVFCATIKHKTFEIVDKMKLRASLRKGRRQRHTRYRKPRFLNRVSTKKQGWLPPSLHSRIDNIINWIKKIISICPIGEIIFENTSFDTQLMENPDISNLEYQRGELFGFEIQEYLREKTGFKCAYCKKSGTEEKLEIEHIIPKSRGGSNRISNLTLACHKCNQRKGNKTAKEFGFPDIQSNNIKKFLKDTAIMNSSRKLILQELKQFNLPIELASGGRTKYNRVNNNLPKTHYFDAACVGKLAGEIIIKENNVNNLNIKAVGRGKYKRTDTDKYGFPRQYRARLGYFQGFKSGDIVKTDKYGIKSIVSVRAKGSFTLENKKSISPKKCKLVQRCNGYTYNIEKIKIRKEKGV

SEQ ID NO: 6339 - protein, 443 aa, Anoxybacillus sp.
MVEENMTCFMQRKGENPMVFVLDTNKRPLAPCHEAVARKLLKQGKAAIYKRYPFTIILKEIVDNFRPKTPYRLKIDYGSKHTGLAIVRGQEVVWLGQLDHRTDIKERLDKRRAFRRARRKRKTRYRKPRFLNRRRKDGWLPPSLESRVQNIQTWVERLRKICPIEHISYENAKFDTQLMRNPEINGVEYQQGTLQGYEVREYLLEKFGRKCCYCGKEGVPLEIEHTIPKSRGGTDRVDNLCLACHDCNQRKGSKTAEEFGYPHIQEMVKKTLKDASVVNATRWKVYEVLKQSGCEVECGTGARTKMNRIRLGLPKIHYFDACCVGESTLLQLHFKTKEALFIKAKGRGSRSRTNLDKYGFPRGFLARQKYFFCFQTGDIVKANVPKGKYQGVWFGEVACRKNGSFDMKDKDGKRIAQGISYKYFNIIQRFDGYTYRREGMNIA

SEQ ID NO: 6340 - protein, 423 aa, Deinococcus sp.
MSNRVFVLNPDHSPLMPCTPKRARKLLEAGRAAVFRRYPFTIILGAESPSAAQPLALKLDPGSKTTGLALVLSGETGEKCIWGAELAHRGLAIKLKLLTRRAQRASRRNRKLRHRPARFLNRIRPEGWLPPSLMHRVLTTLSWARRLGRFAPLSSIAMELVSFDTHKIINPAVRGQGYQKGTLHGTEVRAYLRHKWNNLCAYCGKKGEEVEHLTPKSRGGTDNVSNLVWSCTACNLKKSTRTAEDFLAKKPALLQNIKMQQQTSLQDAAAVNATKLRLLDELNRLGLPVSTGDGAQTSFNRTSQGFDKAHWIDAACVGDGGAHVQIETHRPLMITAMGRGNRQRCGTDRFGFPNRHRTRQKRFFGFQTGDIVRAVVVGGKKTGTYTGRVSVRATGSFRLPQVDGLHHRFCTTLHKGDGYGYRC

SEQ ID NO: 6341 - protein, 502 aa, unidentified
MSIIYVQDRHGKPLAPTTRGGHVRRLLDSKQARVVCGNPFTIRLMYGVDPCTQGFILGIDPGRTNIGVTVAAADGTCVFSAKAETNNKDVPKRMKERKAHRQASRQGERKRRQRRARKNGTCFGERKRILPGCKEPITNHYITNTEARFMNRARTKGWLTPTANQLLQSTISLVRKVCKFLPVTDVVLELNEFAFMAMDDPGIQRWEYQKGPLYGYGSVEAAVYTQQDGHCIFCEQAIAHCHHVIPASKGGSDTLENRAGLCGGHHDLVHKEQSWTDKLAELKAGMNKRYAALSVVNQIIPRLADELGKMFPGHAFATNGWSTKQFRDAHGIPKDHNTDADCIACSILENPTIKLPEKVYELRKFRRHDRAQISRMEDRNYYLPGADPKTGKPKKVLAAKNRHKRTEQKTDSLEEFRAAHPNDVGRLMVARGGPKHKDPNRVLPGAIFQVETSSGNVEQLVLQGSHGRDKNGQPLYLEFVGQGNFRPNRCKYVARGRGWQFV

SEQ ID NO: 6342 - protein, 461 aa, unidentified
LAKALKGVVYTRLPHKINQFKRKDFVKRMTTQKVIQVCVLDQNNIPLMPTQRLGKVYRLLKTKKAHIVNYEPFTIKLDYEPKTHIIQPMTLGVDSGAIHSGYSLANEHREYYNAEVIARDNISKNLSDRRMYRRNRRSRKTRYRKPRFNNRKNKKKGWLPPSLEQKVYVQVNEIGHLHKYFPINNIIIEVAEFDTQKIKNPDISGNEYHQGTLHGYNIRNYLLEKYHHKCFYCDKEVSAFEVEHMIPRARRGSNHIDNLTLSCHNCNQKKGTLTAEEFIRQTLTSQKAAQKLRQLPETKQLLKYMAHMNATRWALYNAVKEKYDSVSITYGYITKYNRINAGLPKAHHIDAKCITGFSTVPSFDVTVVKTKMRRHNRQLHRATFSKGHIRKVATLPRFVHGFQLYDIVLFNKHRYYIKSRRSSGYFTLVSLEGLKNEDRSYKKITFLAHTNTYLTNRYIET

SEQ ID NO: 6343 - protein, 442 aa, unidentified; identical to SEQ ID NO: 2834

SEQ ID NO: 6344 - protein, 424 aa, unidentified; identical to SEQ ID NO: 3351

SEQ ID NO: 6345 - protein, 442 aa, unidentified; identical to SEQ ID NO: 3658

SEQ ID NO: 6346 - protein, 291 aa, unidentified
MVYVQDIDGKPMMPTTRHGKVRRLLKDNKAVVVNTCPFTIKLTYKTSDYKQEIVLGVDAGTKHVGLSATTKSKELYSGEVILRNDVVELLSTRRESRRARRNRLRYRKPRFENRVKSKRLGWVAPSVRHKVDAHIRVIDNICSTLPISRIIVEIAQFDTQKIKNPDISGNEYQEGDQLGFWNVREYVLARDGHKCQHCKGKSKDPILNVHHIESRKTGGDSPSNLITLCETCHKEYHKGNIDLKVKRGKSLRDAAVMGIMKWKLYEELKSRYPNVSMTFGYITNTIGLNTE

SEQ ID NO: 6347 - protein, 419 aa, unidentified
QYVYVLNKHGEPLIPCSPGKARLLLKQQKACVVKRTPFTIKLLFGSAGYKQPITLGVDAGSKHVGLSASTEKRELYSEEFTPRSDVVELLSTRRQNRRSRRNRKTRYRVPRFDNRVHSKHKGWLAPSVEVKIQEHITVIKHICKILPISLVRVETAEFDTQRLKAMLAGKPLPVGTDYQLGEMYDEYNVRQYVLKRDHYTCQCCGTHNTAKKVVKLHVHHLESRKTGGNAPSNLVTLCTTCHKNLHKGRVTLDGKERGKPLRDAAFMGIMRKTLMVRLKEELPIPVQGTYGYITKMRREQNDIKKSHTNDARCISKHPLAEPCSVCYRTKAIRHHNRQTHKANFSKKGIRKRSQMPYLVEGFRLWDKVLYKGQECFVSGRRSSGSFALKKLDGTSISKGVTFKKLRLLEPATNYLIERM

SEQ ID NO: 6348 - protein, 426 aa, unidentified
MSNYVFVIDQKKTPLKPVHPKRARQLLSSGKAAVFRLFPFTLILKKEVPNPDIHPLTLKIDPGSKVTGFALVTDQGEVVWRMQLEHRGGIIKKRLEQRRALRRKRRSRLRYRQPRFLNRKRQEGWLPPSLMHRVQTTETWVKRLIKFCPIKEIWIERVKFDTQLMENPEISGKEYQQGTLQGYSVREYLLEKWDRKCAYCKKENVPLQVEHIHPKSKGGSNRVSNLCLACERCNQKKGDKSIKDFLKKKPTILESVLKQAKSPLKDASAVNATRNKIVEVMSEYRPIKTATGAQTKMNRVRLGLPKEHCLDAACVGEVETLTILSHQPLIVTATGTGGRQKCQTNKYGYPIKHRPLKPIQGFQTGDIVQVDIPKGKNQGQWTGRLCPYSDGNCEICPKGRKRLGTKLSYVSRVVHQKDGYKYRHLS

SEQ ID NO: 6349 - protein, 465 aa, unidentified
MSTCVCVHSNSGERLMPTFRLGKVRRLLKDGKAKIVKHHPFTIQLLYDSKTNTQPIEICEDVGYNYIGISVKSQSHEYVSAQYDTLQDEKACHDSCRKLRRTRRNRLRYRKPRFDNRKRGEGWLAPSLEHKKQLNIRLIERYVSVIPITHATVEVGSFDTMLVKAIEEGKATPESADYQKGPRYNLATLREAVFYRDNYICKVCGRKATEGAILHMHHMFYWKGRHGNSLDELLTVCEKCHTPANHQKSGKLYGFGENVKFADLSGAAFMNTVRWQIVNELYAAFGKDFVTVTYGAMTKEKRIALHLEKSHNNDAYAMGEFHPNCRCTFEHYEKVRRNNRILEKFYDSRYIDIRTGEIATGKELFNGRINRNHKKDSENLHKYRGKRLYKGHRALVRKKVNFNPGDLVSLNGEVLVVHGTHTNKKGAVNVEFKTPAKNGRKSANLKKLKIVKAAGSIHPAWEKVS

SEQ ID NO: 6350 - protein, 512 aa, unidentified; identical to SEQ ID NO: 4350

SEQ ID NO: 6351 - protein, 416 aa, unidentified
MPCSSAKARILLKEKKAVVVRRTPFTIQLTIATGETKQPVSLGVDAGYKHVGLSASTEKAELYASEVELRQDITDLLSTRLALRRSRRNRKTRYRAPRFDNRVRSKHKGWLAPSVENRINAHLSRIAAVLRILPLTKITVETAAFDTQLLKNPDVSGEAYQQGEQLGFWNVREYVFFRDGHVCQHCHGKSKDPVLNVHHLESRRTGSDSPSNLLTLCETCHKALHRGEIKLKTQRGKSFRAETFMGIMRWTVLNRLKSAYPELDVRNTYGYLTKHARITHGIAKSHCADAFCIAGNFGAKRLGYYYFQKQTRRHNRQIHKLSILKGGLRKRNQAPYEVKGFRLFDKVACKGEDAFIFGRRSSGSFDVRKLDGTRISAGISFKKLRLLEKRRTYLTEIRKEAALPPLPKRRGLRVDF

SEQ ID NO: 6352 - protein, 483 aa, unidentified
VSRCDIAGAGHGHSRGETNRKIRVTRPVRAFIERKTMSVFVLDRCKQPLMPCSEKRSRLLLGRGRALVVRAYPFTIRLKDRAGGITQPVRIKIDPGSKTSGIAVVRESGQKQHVLALMELAHRGRQISKSLEQRRAFRRRRRSQLRYRAPRFLNRTKPRGWLAPSLQHRVDTTKSLVNRLRSLVPVESISQELVRFDTQKMENPEVSGVEYQQGTLLGYEIREYLLEKWGRECAYCADKDTPLQIEHIDPKANGGSNRISNLTLACGPCNREKGRQPLADFFASSKRLKNHQARPDRILEQCKKPLRDASAVNSTRWALHQTLKQMGLSVEVGTGGRTKFNRQRLEIPKTHALDAACVGEVEIVEGWNVPTLAIKATGRGSYQRTRLTRYGFPRGYLMRQKKVQGFQTGDMVRAVVPTGTKAGTWLGRVAVRKTGSFNIQTSSGAIQGISHRHCALTQRADGYGYHIQPNQPKEEGGRKNESR

SEQ ID NO: 6353 - protein, 426 aa, unidentified
MLVYVLKQNGQPFMPTERFGKVRRLLKEKKAKVVRREPFTIKLLYEPDTDVVQACYCGVDTGSKHIGVAVVGNDRVLYQSQIELRTDIKKKMDRRRGFRRLRRSRKTRYRKARFLNRRNSIKKDRLPPSVKHKVQAHIDEIEFCKKILPVSDENVILEVSQFDIALMKNPSLTSEEGKKWGYQQGFDYGYSSRREAIRHRDNYTCQCCGKKNCRLEVHHIKFRRDGGTDDEDNLITLCKECHDGVHAGTIELNKKPKKSKNLKYATHMGIIRSQLLKKYPDAIETFGFVTAENRNHLKLKKDHYIDACVIASGGLEFEHSNIILYKRRVSKGDYQLCKGIRGEQIIPTGKICGFRKFDKVVYLRKEYFIKGRMSSGFAVLMGIDGNKVDFSYMSKGLKTPKLLNCKRVSSRSSCLCITQKIVLNIV

SEQ ID NO: 6354 - protein, 470 aa, unidentified
MKQTQTKIVPVLAVDGTPLMPTTHGYARVLIARGKAVAVKQKIFTIQLLHEHKTNKEEIKCELKVDCGFGNIGYSVVANNEELIGGEVELLTGMSARITTKAGYKTQRNGRKRYRKPRFDNRKRKDDWLPPSNEHKNESHFKLIDLMCSLYPVNHLKLEAGNFDMQKFKNPDIKGKQYQESNLDKKLNPNLRLAILYRDDYKCQCCGDSLSKNKNIKLEVHHIVYRSKGGSDSEANLVTLCTKCHTAKNHKDGGILHKWMLQKKSMGSLKEATYMNILASRLKQRYPQAEICFGYDTAEKRKSLGLEKTHHNDAFVVGGGVDETTMRVESSTNFKQKRRHDRSLTKFYDAQYIDIRDGKKKKGAELSCGRTKRNKNLNGENERIFRGEKVLKGRVTHCLTKYPIESGDIISYQGQIYVSGGNKNKGAYIKVVVEGKELSLKTPEVKVLKRNRGTYITTQPSRACLNPVNG

SEQ ID NO: 6355 - protein, 419 aa, unidentified
MVYVISQDGKPLMPCSDPIARLLLKQGKAKVKKREPFTIKLTYETTNYTQGLTLGVDTGSGTIGTAVSKDNGDIVYMSEVVVRNDITDKMTQRAKYRRNRRNRKTRYRKARWLNRASSIKKDRFSPTMQSKLHSHVREIEYIQSILPVTEMVFETGQFDMQLMKNPSLANPKVRPWGYQKGANYGFENTKAMVLNRDNYTCQCCKGKHKDSKLEVHHIVFRSQGGSDEESNLLTLCHTCHKDLHSGKINPKLSGKLKGNLKYATQMNSIRKQLFRFYPNAIETFGYVTKANRLHLGVDKEHYYDACTIATQGNAFNVKSNLYKKKCVSDGDFQKTKGIRSEQPIVTDKICGFRKFDKVRYFGNDYFIKGRMSTGYAILMDIDGNKIDFSTMPRGYKTPKLSNCKRITARSTVMTQVKVV

SEQ ID NO: 6356 - protein, 354 aa, unidentified
AVSKDNGDIVYMSEVVVRNDITDKMTQRAKYRRNRRNRKTRYRKARWLNRASSIKKDRFSPTMQSKLHSHVREIEYIQSILPVTEMVFETGQFDMHLMKNPSLANPKVRPWGYQKGANYGFENTKAMVLNRDNYTCQCCKGKHKDSKLEVHHIVFRSQGGSDEESNLLTLCHTCHKDLHSGKINPKLSGKVKGNLKYATQMNSIRKQLFRFYPNAIETFGYVTKVNRLHLGVAKEHYYDACTIATQGNAFNVKSNLYKKKCVSDGDFQKTKGIRSEQPIVTDKICGFRKFDKVRYFGNDYFIKGRMSTGYAILMDIDGNKIDFSTMPRGYKTPKLSNCKRITARSTVMTQVKVV

SEQ ID NO: 6357 - protein, 420 aa, Petrotoga sp.
MLVYVLNKYGKPLMPCKPSKARKLLKEGKAKVVRKEPFTIQLLYGSSGYKQPITLGVDAGSKTVGLSATTENKELFAAEVELRDDIPKLISQKGQYRKGRRFRKTRYREPRFLNRVHSKNKGWLAPSVEHKIKSHIKLIDLVHSLLPVTKIVVEVASFDIQKIKNPNIEGKQYQQGEQLAFWNTREYVLWRDNYTCQHCKGKTKDKRFNVHHIESRQIGGDAPGNLITLCETCHKDYHDGKIKLNFKRGQKFKDATFMGIMRWTLYNRLKTLYPKVHLTYGYITKNTRIQNNLPKTHRIDALCISGNPQAKQLEHYYHIKEVRRHNRQIHKAKILKSGIRKLNQASYLVHGFRLFDKIRYNGIECFIFGRRSTGYFDIRKLDGTVIHRSAKSKDLILVSKAKTLLWERRENSAFLSPLKW

SEQ ID NO: 6358 - protein, 493 aa, unidentified; identical to SEQ ID NO: 3781

SEQ ID NO: 6359 - protein, 494 aa, unidentified
MAMVYVQNKDGKPLMPTTRYCYVRLLLKEKKARVVCTTPFTIQLNYDTPDITQDLILGIDPGRTNIGVAVVTEDGQCVFSAHLETRNKDVPLLMQKRAGFRKQHRTLDRRRKRQRRAKAAGTTIAEGSVERLLPGYEKPVICHHIRNKEARFNNRKRSQGWLTPTANHLLQTHINLIAKVAKFLPITKVVVELNRFAFMAMDNPNIRRWEYQQGPLYGLGSVEDAVYAQQNGHCLFCKKPIDHYHHVVPRHKGGSETLANRCGLCVEHHDLVHTDKAWADKFVTRKEGMNKKYHALSVLNQIIPHLMEYLGDETLYDVYATDGRSTKGFRIAKNVPKEHYTDAYCIACSILDTDIEVSAPVEPFELKQFRRHDRQACIRQMVDRKYLLDGKVVAANRHKAIEQKSDSLEEFREAYGDAAVSQLTVRPHSPQYKDMTRIMPGAAMDFDGTVGVFQGSSGRNNGTPNYYNSTKGARVLTNRCALLAKNVGMVFIPA

SEQ ID NO: 6360 - protein, 442 aa, unidentified
MVYVLNKDGQPLMPTNRHGKIRRLLKTNKAKVIKRCPFTIQLLYDTTNHTQDITLGVDAGSKHIGLSATTEDKVLFEADAELRNDISKLLEARYTFRRSRRNRKTRYRKKRFDNRVSSKHKGWLAPSIEHKIQSHFAMVEKVHRILPVTKIVVETASFDTQLLKAQLEGKPIPQGTDYQNGELAGWNIREYIFHRDNYTCQWCKGKSKDPVLVTHHHADWKGDHTNKPSSLITLCNTCNDSKYHKKEANRLWGWEPKITNSYKHAVFMGVMRWTFYNRLKEIYPNVSMTYGYITKNTRIENNLPKAHYVDARCISGHPEAKSNGEYFYYKKVRCHNRQLHKANTLKGGIRKRNQAEYTVKGFRLFDRVEYQNNEYFVFGRRASGFFDIRTLDGQKVNKGSISFKKLKLKETSKTYLIERRMADTGVSLAPLTTEVTSLRQTG

SEQ ID NO: 6361 - protein, 420 aa, unidentified
MQYVYVLNKHGEPLMPCSPGKARLLLKQQKACVVKRTPFTIKLLFGSAGYKQPITLGVDAGSKHVGLSASTEKRELYSEEFTPRSDVVELLSTRRQNRRSRRNRKTRYRVPRFDNRVHSKHKGWLAPSVEVKIQEHITVIKHICKILPISLVRVETAEFDTQRLKAMLAGKPLPVGTDYQLGEMYDEYNVRQYVLKRDHYTCQCCGTHNTAKKVVKLHVHHLESRKTGGNAPSNLVTLCTTCHKNLHKGRVTIDGKERGKPLRDAAFMGIMRKTLMVRLKEELPIPVQGTYGYITKMRREQNDIKKSHTNDARCISKHPLAEPCSVCYRTKAIRHHNRQTHKANFSKKGIRKRSQMTYLVEGFRLWDKVLYKGQECFVSGRRSSGSFALKKLDGTSISKGVTFKKLRLLEPATNYLIERM

SEQ ID NO: 6362 - protein, 427 aa, Enterococcus sp.; identical to SEQ ID NO: 2410

SEQ ID NO: 6363 - protein, 414 aa, unidentified
MPCSPAKARLLLKEKKAIVKRRTPFTIQLTIATGETKQPVSLGVDAGYKHVGLSASTEKAELYASEVELRQDITDLLSARRALRQSRRNRKTRYRAPRFDNRIRTKRKGWLAPSVENRINAHLSRIEAVLRLLPITKITVETASFDTQLPKNPDIAGKEYQEGEQLAFWNVREYVLFRDGHVCQHCHGRSKDPVLNVHHLESRRTGGDSPGNLITLCETCHKALHRGEIKLSAKRGQSLRAEAFMGIMRWEVLNRLKLSHPELEVNNTYGYRTKHARIANGIAKSHCADAFCIAGNLGAKRLGEFFFQKQTRRNNRQIHKFSILKDGIRKRNQAPFEVNGFRLFDKVACKGEEGFIFGRRSSGYFDVRKLDGTCISAGISYKKLHLLEKRRTYLTEIRKEKALPPLPGGSGLRA

SEQ ID NO: 6364 - protein, 578 aa, unidentified
MVYVYVLDKHGKPLMPTTRCGHVRRLLKSGKAVVVSTTPFTIRLKYESTHFTQPVHEGIDTGRENIGDAVSLEDGRNVFLADVKTHNKSIKKKMVERAGFRRERRRHRRIRKQRRAMHDQTTMQKGKADTVRTKRACQSVEITYPSADNPVTQKVIQGKESKFANRRRPDGWITPSARQVIQITMDEIKQTAKILPVTDIYLERVAFDFQKLENTNIRKWQYGKGPLYGYKTYKDYIWDEQHGKCACCGKPIEEYHHIHHRAEGGIDNVKNIIGLCHHCHEEIHNSKEAEDRLMELKQGALQKYCVGLLNSVMPALIDAVQAYCDEHGLTLTATNGKTTSETRDKYGLEKDHCIDAYAISLAERDVTTVRPADTIYMKRRFKKKTKALISTRNQRVYKLDGKAVAYNRHKALNQKTDSLEELLVQYKGSHSAKDVQKLMHRMKVEPARRTYTYRKQGLVAPVRPGDLVLYRKVRKVKGDVKTEVFSAVSVEYTEVVKKTNGVVTKERDWKIGVDDNRVRKSKFCSVLNHSCVQFTGSEPTSEYLKKVEEEAAERKKKAAKKAAEHKTKAAEGAAKASA

SEQ ID NO: 6365 - protein, 427 aa, Parasutterella sp.; identical to SEQ ID NO: 4733

SEQ ID NO: 6366 - protein, 376 aa, unidentified
MFVDMVYVQDIDGKPMMPTTRHGKVRRLLKDKKAVVVNLCPFTIRLTYVTSDYKQEIVLGVDAGTKHVGLSATTKSKELYSSEVILRNDIVDLLSTRRELRRTRRNRLRYRKPRFDNRIKSKRPGWVAPSVKYKVDAHIRVIENICSILPISRIVIEVAQFDTQKINNPNISGKEYQEGNKLGFWNVREYVLARDGHKCQYCKGKSKSKILNVHHLESRKTGGDSPSNLITLCETCHKEYHKGNIDLKIKRGSSLRDAAVMGIMKWKLYEELRSRYDRVSMTFGYVTKYNRIKYGIEKSHTSDAFVISKNINAKRIGCQYLKRLIRRHNRQIHKMKILKGGKKKNNQAPFEVFGFRLFDKVLYNNKICFVYGRRWW

SEQ ID NO: 6367 - protein, 465 aa, unidentified; identical to SEQ ID NO: 3306

SEQ ID NO: 6368 - protein, 413 aa, unidentified
MTSYAFVLDANGKQLAPTKEQKAWFLIRKKRATLVSKYPMVIQLKKKIPDEKICKDEIRCGIDDGGLHVGVALVQKCQTRNKVVFKGTIEQRNDVKHLMDVRCGYRRYHRYHKRYRPARFNNRSSSKREGRIAPSILQKRQAIIRVINRLNKWINITNYWLEDVAIDIRALTDGHKPYWWQYQKSNRLDENIRKAVILRDGRKCMECGKSNCRLEVHHIKPRRLKGSSTLGNLITLCTKCHQKTEGVEELYMDKYFALLNSSDNKNLDYAQHVMIGKKWLRKQLSNLGLLYLTSGGDTANKRIDWDITKSHSNDAVCITDLRPDTCEIKEWIIKPMRRQSKAKTDNVLGIKHRDLVEYTFRNGETHRGYVTALYPEQNALNFQSLTKHCKKVNARKCKVLWKYSKIYWLDNVV

SEQ ID NO: 6369 - protein, 413 aa, unidentified
LKVFVLNMRGQPLMPCSPAKARHLLKAGKAVVRRRTPFTIQLRIATGETKQSVTLGVDAGAKHVGLSAATEKEEVFASEVELRQDITGLLAARLSLRRERRQRKTRYRAPRFLNRVRSKHKGWLAPSVENRIQAHMSRIDAVCRLLPVTKIVIETASFDVQKIKNPTIEGTDYQQGDQLGFWNVREYVLFRDGHICQHCRGRSKDPILNVHHLESRKTGGDAPNNLITLCETCHKAYHAGKIKLKVKRGQSFRAEAFMGIMRWTLLDRVRKTHPKLPVENTYGYLTKHKRIALGLPKTHCADAFCIAGNLKALRRGDFLFQQQTRKHNRQIHKCSILKGGVRTLNQAPFLVKGFRLFDKVRIGGQIGFVFGRRVRGTFNIRRLDKTVIGTDINCKKLSLLETRKTFLTELRKE

SEQ ID NO: 6370 - protein, 440 aa, unidentified
MPTNSYRARRLLKSKRAVIYRYRPVFTIKLVDRTNGYTQPIEYKCDTGYQNIGISICSDTKEFVNEQRDLLKDEVKRHSDSRKYRRTRRNRLRYRKARWNNRKGMISKDGFAPSIRNKRDVHIHLYEEYYKVFPITKAVFEMGQFDTQVLKAVEAGLQVPEGTDYQRGEQYGYATLREAVFARDDYKCICCGKSAIKDGVKLRIHHIGYLSGDRSNRMANLGSVCENCHTSKNHKPGGKLYNLKPKLKTFKGATFMTTVRYSMVKKLKVTTPDVDIRVTYGAATKLARRVLSVKKTHSNDAYCMGEFHPKHRSNFKHYKKCRRNSRVLSRFYDAKYRDLRDGSVKTGSQLSCGRTNRKISRHAELDERIYRTHKISRGRVSIRRQHYSLRPGDKVLYDGKIYFVTGMQNSGTHVKLTNGKVCSLKKVHVLQHCNAWTAVI

SEQ ID NO: 6371 - protein, 397 aa, unidentified
  VARIANT 341..354: note = X can be any naturally occurring amino acid
LQTRQAFPTLTKSTLLRKEIHVMFVYMLNCHGEPLMPCLPRKARWLLKEKKATVVKMVPFTLQLLYGSSGYKQEVSLGIDAGTQHIGVAATTEKRLLFEAEVQPRNDITELLATRRQFRRARRSRKTRYRTCRFLNRKKRAGWIAPSVQHKVEAHLKTIRLVHKLLPVSRTTIEVAQFDLQKIRTPEIAGQEYQEGPQLGFWNTREYVLFRDAHRCQWCEGKSKDKILNVHHIESRKTGGDTPDNLITLCETCHDLIHQTHQEHKIERKSKSFRDATQMSIIRWRIYEQAKLLFSHVHLTYGYLTKYTRITHSLEKSHLIDARCISGNPLAAPDSTSYLIXXXXXXXXXXXXXXDQEGWRTATQYCAQGCARLSALRLRALPGEGVLCVWKASFRLL

SEQ ID NO: 6372 - protein, 453 aa, unidentified
MLMAVAVVSRTGVPLMPTSPYRARKLLASGKAEKYGYDPFTIRLTERETGDTQPVELCMDTGYIHIGVSVKSEKHEYLALQIDTLTDEKKKHEKCREKRRNRRSRKRYRKPRFDNRKRDKGWLAPSLEHKKEIHVRAAERICRVVPVTDITMEMGNFDTQVLKAKEEGRPLPQGTDYQQGERYGTATLREAVFSRDNYTCLCCGRTMKDGAYFHVHHIRYRSQGGTDRMANLATVCEKCHTPANHQPGGKLYNWKPEIKSFKGATFMTAVRWQMYREIKEKIPDVSVHLTYGAATKERRRALDIEKSHVNDAFVMGRFHPGHRARPELYIKKRRNNRVLESFYDARYIDSRDGKRKPGKELFNGRISRNHKKDSENLHKYRLRKVSKGKRCIRKKHYLIQPHDILVYCGRKYETAGCHNLGTGAILLPERRSIAVSKLKIYRYSGGYYKAAFN

SEQ ID NO: 6373 - protein, 552 aa, unidentified
MTSCTCTVFPACNHAKASSSQGKHNLLLRQERFIVKEVANMSTVYVLNKDGKPLMPTTRGGHVRHLLKEQKARVVRAKPFTIQLLYETNDVVQPLYLGIDPGRTNIGVAVVKANGTAVFTAHLETRNKEIPKLMQDRKKARRARRTNGRRCRRQRRAKANGTISKKCVKQTTAQNGSVSKRAKDIGVIKRRLPGCEKDVLCIGIKNKETKFTNRTRPEGWLTPTANQLLQTHINLVKKIQKFLPISDVVLEVNKFAFMRLNNPNIQKWQYQQGPLYKKESLESAVSEIQEHHCLFCKKPIDHYHHVVPQHKNGSNTIGNIVGLCAKHHDLVHKDSAWEKKLAKKSTGLYKKYGALGVLNQIIPTLTNELSSLFPKHSFVTNGKSTYDYRAAHGVSKDHWLDAYCIACSVLPSNVCDSNINNHMPYVLKQFRRHDRRVLNNENMNRVYTLNNKAVAINRHKAKDQKTVSLEEFRKEHPDDVCKLKVKEHHPTYRNMNRNFPGSVFLVGKQIHVMQGIASSKDGKATKYNDTSATAIAAGKCKFVAKNTGILFV

SEQ ID NO: 6374 - protein, 512 aa, unidentified; identical to SEQ ID NO: 3680

SEQ ID NO: 6375 - protein, 459 aa, unidentified
  source 1..459: note = Bacterium sp.
MRVYVLNKNGNPLMPCKPAKARHLLRDGKAEVVNRKPFTIQLLWDCEENVFEISCGIDKGCNVTGIACVGNGEILFSADIKHRNPVAVQQKEGSKTFVQVRAERRRGRRNRHRWHRKPRFNNRASSKKSGRLPPTIKMNVMEVVRVVKQIPLPISHITVEDVAVDVRRLSDPNVTNKEYQQSNRLDENLRLACLMRDSFICQKCSKKETLLEAHHIVWTSKGGKDSIYNLTTLCENCHDKVHKKGESGKVRLKGGKVITGMDGFSDKIAARTMQGKSLMYQELEKIAPLSTVYGYQTAVFRKSCGFPKEHWIDAFCIANFETGEFVQPREENHYQIWFRAKQTRRIFDTQPKKGGVIKQWQKYLGLASNGDNCILVDKRDRNFVLPLGYTLYKKGDVISISGYKTEIASINGKSKGFYYWIYQSDGSRKYASISHKKVKLVEYAQTINYISNDVAFIPS

SEQ ID NO: 6376 - protein, 426 aa, unidentified
  source 1..426: note = Filamentous sp.
MSNHVLLIDANKTPMNPIHPAHAQKLMDTGKAAVFRFYPFTLIVNRVVENIITYPIALKIDPGSKTTGISLVNNRNEVIWGMELEHRGSVIKDALQSRRAVRLNRRQRKTRYRKARFLNRKRPKGWLAPSLMHRVQTIETWVKRLCKFALIAEIRQELVKFDMQQLENPEISETDYQQGTLEGYSVREYLLEKYDRTCCYCGKTDVPLQIEHIQARSKGGSNRVSNLCIACEKCNQKKGDRDIKDFLKGKPDIISKILKQAKAPLKDAAAVNATRWKLLETLKMLELPVTTGTGAETKFNRIRLHLAKEHWIDAACVGVTNILKVLTSKILRVKSTGQGGRKKCQTDTIGYPQKYRPLKPIHGFCTGDIVKTVIPKGVNRGTYIARLCPYSDGNGEIYPKSGKKRIGIKLEYIKKAVHRKDGYSYA

SEQ ID NO: 6377 - protein, 426 aa, unidentified
MVYVQDINGKPLMPTTRHGKVRRLLKDKKAVVVNLCPFTIKLMYVTSDYKQEIVLGVDAGTKHVGLSATTKSKELYSSEVILRNDIVDLLSTRRELRRARRNRLRYRKPRFNNRIKSKRPGWIAPSVKYKIDAHIRVVENVCSILPISRIVIEVAQFDTQKIKNPNISGKEYQEGDQLGFWNTREYVLARDGHKCQYCKGKSKDKILNVHHIESRKTGGDSPSNLITLCETCHKEYHKGNIDLKIRRGKSLRDAAVMGIMKWRLYEEIKSKYDRVSMTFGYVTKYNRINHGFEKSHVSDAFVISKNFNAIRLGYYYKVRLVRRHNRQIHKQKIQKGGIKRLNQSPFEVFGFRLFDRVMFENSYYFIFGRRKTGSFDIRYIDGKNQKNVTYKKLKLSRCKRFMIQMELNKKTRTCFENERNSDRDAA

SEQ ID NO: 6378 - protein, 414 aa, unidentified; identical to SEQ ID NO: 4924

SEQ ID NO: 6379 - protein, 427 aa, Parasutterella sp.
LRVFVLNKRGKPLMPCSPAKARHLLKEKKAIVVRRTPFTIQLTIATGESKQPVSLGVDAGYKYVGLSASTEKAELYASEVELRQGITDLLSARRALRRARRNRKTRYRAPRFDNRIRTKRKGWLAPSVENRINAHLSRIETVLRMLPVTKITVETASFDMQLLKDPDISGKEYQEGEQLGFWNVREYVLFRDGHVCQHCHGRLKDPVLNVHHLKSRRTGGDSPGNLITLCETCHKALHRGEITLKAKRGQSFRAETFMGIMRREVLDRLKASHPKLEVQNTYGYRTKHARISNGIAKSHCADAFCIAGNLGAKRLGEFLFQKQTRRNNRQIHKLSILKGSLRKRNQAPFEVKGFRLFDKVAYQGEEGFIFGRRSSGFFDIRRLDGTRISAGINYKKLRLLEKRRTYLTEIRKEEARGPLPEGRGLRA

SEQ ID NO: 6380 - protein, 413 aa, unidentified; identical to SEQ ID NO: 3295

SEQ ID NO: 6381 - protein, 465 aa, unidentified
MSTCVCVLSNSGERLMPTFRLGKVRHLLKDGKAKIVKHHPFTIQLLYDSKTNTQPIEICEDVGYNYIGISVKSQSHEYVSAQYNTLQDEKACHDSCRKLRRTRRNRLRYRKPRFDNRKRGEGWLAPSLRHKKELNVNVVKMYCAVMPITHATVEVGSFDTMLVKAIQEGKAIPEGADYQKGPRYNLATLREAVFYRDNYTCQVCGRKVADGAILHMHHMFYWKGRHGDSLNELLTVCEKCHTPANHQKGGKLYGFGENVKFADLSGAAFMNTVRWQIVNELYAAFGKDFVTVTYGAMTKEKRIALRLEKSHNNDAYAMGEFHPNCRCTFEHYEKVRRNNRILEKFYDSRYIDIRTGEIATGKELFNGRINRNHKKDSENLHRYRGKRTYAGHRALLRKKVNLNPGDLVSLNGEVLVVHSTHTNKKGAVNVEFKTPGKSGQKSASLKKLKIVKAADSMHSAWEKIS

SEQ ID NO: 6382 - protein, 431 aa, unidentified
MPNKVYVINKHGRPLMPCSPAKARHLLDDGKAKVKKRAPFTIQLVYGSSGYTQEVILGVDAGSKTIGMSASTTKEELLSAEVKPRNDVVDLLSTRREFRRARRNRKTRYRKPRFDNRVRSKHKGWLAPSVEVKIQEHITSIKRVCRILPVSKVVIETAEFDLQLLKAIEEGKPVPQGEDYQQGEMYGHYNVRQYVLWRDGYTCQCCGAHATKKKEVRLHVHHLESRKVDGDAPDNQVTLCESCHEKLHKGLIAEKDFKKRKRKSTRDATFMGIMRKTLMQRLCSELPIPVVKTRGYITKATREKLLVLPKSHTNDALAIAQGKRGFNVGYLPEIAQIDKIYTIRPVRHHNRQLHKATILKGGIRKSNQTEKYVFGYRLFDKVQFNGQDCFIWGRRTTGIFTIKTINGKMIKDGISFKKLKPVEKSTGYLIA

SEQ ID NO: 6383 - protein, 427 aa, Nostoc sp.; identical to SEQ ID NO: 2670

SEQ ID NO: 6384 - protein, 429 aa, Ktedonobacter sp.
VSNVFVIDSDCKPLNPVHPGHARRLLRQGKAAVFRRYPFTIVLKRVVEQPEVQPLHLKLDPGSKTTGIALVNGTNGKIVFAAELSHRGHAIKDSLDSRRASRQGRRQRKTRYRKPRFDNRRRKKGWLPPSLESRLANILTWVARLCRYAPIATLSQELVKFDMQLMENPDIAGVEYQQGTLQGYEVREYLLEKWERTCAYCGKQDVPLQVEHIHPRARSGTNRMSNLTLACEPCNTAKGTQEIEVFLKKKPEVLKRLLAQVKKPLKDASAVNSTRCALLERLKALGLPVECGSGGLTKFNRTTRGLPKTHWLDAACVGKSTPDVLLQKGVIPLRIKATGHGRRQMCVPDKYGFPKQHKERKKKFLGYQTGDLVKAITPKGTFEGRIAIRHRPSFRLEKVDIHPKYMRCVQRSDGYEYTQKGVRHAPPHG

SEQ ID NO: 6385 - protein, 495 aa, unidentified
MSTTLARGESGGSMAGEVIHQRRHKVMAYVAVLSASGKSLMPTTAYKARKLLKSGRAKIYSYRPLFTIQMQDREEGTTQPIEMKVDTGAQYIGVSVCSEKHEYWNRRYDMLPNEKEMHDEARKNRRNRRQKLRYRAPRFDNRTHGHNRKEDKWFTPSLKHRENIHIQLAAKICAVVPVTDAYFEMGQFDIQVLKAYEAGKPIPVGDDYQKDERYGYATLREAIFARDNYTCQVCGAKLDDKHRPILRMHHIGYWKHDHSNRMGNLMTVCIKCHTAANHKPGGKLYGLEPELPTFKGAAFMNTVRWDMFTQLKKTLSNVKCHITYGAMTKLKRSELNTRKTHSNDAYCMGTLHPKWRTDFQHYQKVRRNNRVLSKFYDAQYIDTRDGEKMSGSQLSCGRTKRSESRNSIKNLRGYRGRRATSKGKKPKISKGHISIRRHKYAFNTGDIVIVQGKKLTVSGTQHYGEYVVFRDKTHAAAKAKEVTMYRHGDGWVRVV

SEQ ID NO: 6386 - protein, 442 aa, unidentified
MVTVQQSTHHLPFGRVFIRRNLFMVYVISQDGKPLMPCSDPIARLLLKQGKAKVKKREPFTIKLTYETTNYTQGLTLGVDTGSGTIGTAVSKDNGDIVYMSEVVVRNDITDKMTQRAKYRRNRRNRKTRYRKARWLNRASSIKKDRFSPTMQSKLHSHVREIEYIQSILPVTEMVFETGQFDMQLMKNPSLANSKVRPWGYQKGANYGFENTKAMVLNRDNYTCQCCKGKHKDSKLEVHHIVFRSQGGSDEESNLLTLCHTCHKDLHSGKINPKLSGKVKGNLKYATQMNSIRKQLFRFYPNAIETFGYVTKANRLHLGVDKEHYYDACTIATQGNAFNVKSNLYKKKCVSDGDFQKTKGIRSEQPIVTDKICGFRKFDKVRYFGNDYFIKGRMSTGYAILMDIDGNKIDFSTMPRGYKTPKLSNCKRITARSTVMTQVKVV

SEQ ID NO: 6387 - protein, 425 aa, unidentified
MENTLKVFVLNMRGQPLMPCSPPKARKLLRAGKAVPVRRTPFVIQLTVPTGETKQPITLGVDAGYKHVGLSATTAKEELLASEVELRQDVTGLLSNRLALRRARRNRKTRCRAPRFDNRVRSKHKGWLAPSVENRIQAHISRIEAVCRVLPITKIVIETASFDIQKIKNPEVEGTDYQQGDQLGFWNVREYVLFRDGHVCQACKGRSKDLILNVHHIESRKTGGDALGNLITLCEACHKAYHAGKLKQFSPRRGASFRAETFMGIMRWTVLNRLRERHPELPVTNTYGYLTKHKRIVAGLPKTHCADAFCIAGVLDAKRRGEYLFQKQTRRHNRQIHKLTILKGGVRKRHQAPYLVHGFRLFDKVLCKGEVGFIFGRRSSGAFDVRRLNGTKISAGISYKKLSLLEKRKMFLTELRKEGRDSSRV

SEQ ID NO: 6388 - protein, 402 aa, unidentified
MPNKVYVINKHGRPLMPCSPAKARHLLDAGKAKVKKRTPFTIQLVYGSSGYTQEVILGVDAGSKTIGMSASTTKEELLSAEVKPRNDVVDLLSTRREFRRARRNRKTRYRKPRFDNRVRSKHKGWLAPSVEVKIQEHITSIKRVCRILPVSKVVIETAEFDLQLLKAIEEGKPVPQGEDYQQGEMYGHYNVRQYVLWRDGYTCQCCGAHATKKKEVRLHVHHLESRKVDGDAPDNQVTLCESCHEKLHKGLIAEKDFKKRKRKSTRDATFMGIMRKTLMQRLCSELPIPVIETRGYITKATREKLLVLPKSHTNDALAIAQGKQGFNVGYLPGIVQINKIYTIRPVRHHNRQLHKATILKGGIRKSNQTEKYVFGYCLFDKVQFNGQDCFIWGRRTTGIFTI

SEQ ID NO: 6389 - protein, 466 aa, unidentified; identical to SEQ ID NO: 2809

SEQ ID NO: 6390 - protein, 514 aa, Nocardiopsis sp.; identical to SEQ ID NO: 3215

SEQ ID NO: 6391 - protein, 414 aa, unidentified; identical to SEQ ID NO: 6363

SEQ ID NO: 6392 - protein, 304 aa, unidentified
VVRRTPFTIQLTIATGESKQPVSLGVDAGYKHVGLSASTEKAELYASEVELRKDITDLLSARRALRQSRRNRKTRYRAPRFDNRIRTKRKGWLAPSVENRINAHLSRIEAVLRLLPITKITVETASFDMQRLKNPDISGKEYQEGEQLGFWNVREYVLFRDGHVCRHCHGRSKDPVLNVHHLESRRTGSDSPDNLITLCETCHKALHRGEITLKAKRGQSFRAQAFMGIMRREVLNRLKASYPELKVHETYGYLTKHARIANGIVKSHGADAFCIAGNLGAERLGEFFFQKQTRRNNRQIHKLS

SEQ ID NO: 6393 - protein, 440 aa, Fervidobacterium sp.; identical to SEQ ID NO: 4293

SEQ ID NO: 6394 - protein, 443 aa, unidentified
LTKDENRPSGRTTGLRAEQAEPAGIRKGDTLKVFVLNMRGKPLMPCSPAKARHMLKAGKAVVVRRTPFTIKLTIATGETKQDVTLGVDAGARHVGISATTEKEEVFASEVALRQDITGLLADRLAFRRARRNRKTRYRAPRFNNRVRSKHKGWLAPSVENRIQAHMSRIDAVCRLLPVTKIVIETASFDIQKIRNPEVEGTGYQQGDQLGFWNVREYVLFRDGHVCQHCHGRSRDKILNVHHLESRKTGGDAPNNLITLCETCHKAYHAGKIKLKVKRGQSFRAEAFMGIMRWTLLDRVRKTHPKLPVENTYGYLTKHKRIALGLPKTHCADAFCIAGNLKALRRGDFLFQQQTRKHNRQIHKCSILKGGVRKLNQAPFLVKGFRLFDKVRIGGQIGFVFGRRVRGIFNIRRLDKTVIGTDINCKKLSLLETRKTFLTELRKE

SEQ ID NO: 6395 - protein, 424 aa, Caldicoprobacter sp.
MVYVISKAGKPLMSTERHGKVRRLLKQGLAKVVKREPFTVQLLYDTTTYTQPVTVGLDIGSKTTGVSAVTEKKEMFSAEVELRDDIKGLLIERRQYRRMRRYRKVRYRKPRFLNRARGDRWLAPSLQWKVDAHIRIVDMLGRIMPIERVVVEVAPFDTQKILNPDIEGEDYQNGVQKGFWDVREYCLWRAGYRSELSGKRGILEVHHIVPRSKGGTDTPSNLIVLTADEHKAVHEGRIRIPKSKIEKIKLLKDAAHVSTIGWHIVNRLRERYSVEVTYGSTTKAKRLSCGMEKSHRVDAFIIAGGDLQERLREWYLGKFLRRQNRSLHRANPIKGGVRPVNTIKEAYGFRRYDRVEYEGIIGIIAGLRSSGYFAIRSLSWEKIHDSAKHSKLRLIEGAKTLMLERRKERIPLHLEEDGVSCARI

SEQ ID NO: 6396 - protein, 440 aa, Lactobacillus sp.
MKGKKAMQNRVFVINKHGKALMPCKPRKARILLRDGKAKVLKKEPFTIQLLYGSTGYKQDISVGIDSGQRYIGLAVTSQNKVLFQGEVELRQDVKKLIDTRRTYRRSRRNRKTRYRKSRFLNRIAKKKDNWLPPSVASKVNHNINWIKRLLSVLPKADLHIEVGKFDMQKMKNPEINGEGYQQGDLYGYQTVKQFVLARDNYTCQVCKKKGGKFKIHHIIYRSLGGTNTVNNLTTVCSNCHTTKNHQTGILAKWCKDKMKVNKSYKGATFMNILKRRLFLAFPQAKFQYGAWTTLQRVDLDLTKSHYNDAVAISGIRKVKAKPTSIVMFKQFRKKKRSLHEATARKGRKTPNITSKRNAKNTKYAKGFWLNDYVKIKDSNKKGYISGFMSKGTNVRLRDIFGEYVSNSDKSYTSTKNISLINHSNNWQKQVITEKQYIMG

SEQ ID NO: 6397 - protein, 430 aa, Polaromonas sp.
VIRLIDRKAEDSAFQSVRVKLDPGSKTTGIALVREMADASASNDIAVLSLMELMHRGCQISKALTARRQMRRRRRSANLRHRAPRFSNRGNKGKGWLPPSLAHRLETTMSWVKKLSRYAPVEAISTELVRFDMQLMQNPEISGLEYQQGELQGYEVREYLLEKFSRTCAYCDAKDLPLQIEHITPRAKGGSNRVSNLTLACQCCNQKKGALDVQDFVKDRARLAKILAKARAPLKDAAAVNSTRWALVNALKTTGLDVETGSGGLTKFNRSRLAIPKTHALDAACVGRVGSVLDWNRPTLQIKCTGRGSYQRTRLTAQGFPRGYLMRQKQVHGFQTGDMVKAVVTKGKKVGTHCGRVAVRASGSFNIQTPQGAVQGVAHRFCKIMQRNDGYGYSLMAKTDATGTPSKSRNASRPALYLTGLKADVSRANA

SEQ ID NO: 6398 - protein, 516 aa, Streptomyces sp.
LATFHAGQQTHQAVLPQRPALEFDSADTPGNRDETGFEGRKAPGVEHVRGEIIGGSPATGDVTPAREGREKGREARAVDPVVFVLDRHGLPMQPTSPARARKLLSCGRAVVHRHTPFVIRLKDRTVERSQVDGVELGIDPGSKHTGLSVFTARHGNRRGLYHVELTHRGAQVRDSLARRASYRCGRRSRNVRYRPPRFCNRARPEGWLPPSLRHRVDTTMTWAVRLARWAPVVAVHVELAAFDTHALSAGRPLEGVEYQHGTLHGTEIREYLLAKWGRACVYCGTTGVPLNVDHIRPRSRGGSSRVDNLAIACAPCNQAKGSHAVEDFLRHRPKVLARVLAQAKAPLRDTAAINATRWELFHALKAEFPTVVHASSGGRTKWNRQRARLPKSHTLDALCVGQVGTVDQHPADVLAATATGRGTYSRTRADAFGFPRLRLPRQKRFHGFATGDLVRAIVPTGTKAGRYTGRVAVRTRGTFNIRTAHGTVTDIHHRHVRLLQRADGYAYITRKENTRA

SEQ ID NO: 6399 - protein, 461 aa, Parasutterella sp.; identical to SEQ ID NO: 3646

SEQ ID NO: 6400 - protein, 442 aa, unidentified
MATVKQSTHHLPFGRVFIRRNLFMVYVISQDSKPLMPCSNPIARLLLKQGKAKVKKCEPFTIKLTYETTDYTQDLILGVDTGSGTIGTAVSKDNGDIVYMSEVVVRNDITDKMTQRTKYRRNRRNRKTRYRKARWLNRSNSIKKDRFSPTMQSKLHSHVREIEYIQSILPITEMVFETGQFDMHLMKNPSLANLKVRPWGYQKGANYGFENTKAMVLNRDNYTCQCCKGKHKDSKLEVHHIVFRSQGGSDEESNLITLCHTCHKDLHSEKINPELSGKVKGNLKYATQMNSIRKQLFRLYPNAIETFGYVTKANRLHLSVDKEHYYDACTIATQGNAFNVKSNLYKKKCVSDGDFQKTKGIRSEQPIVTDKICGFRKFDKVRYFGNDYFIKGRMSTGYAILMDIDGNKIDFSTMPRGYKTPKLSNCKRITARSTVMTQVKVV

SEQ ID NO: 6401 - protein, 461 aa, Verrucomicrobium sp.
MAVLVLDKRKKPLMPCTERRARLLLTRKRAIVHRRYPFTIRLKDREDGRTQPLRLKIDPGSKTTGLALVREDANGGQHVLWLAELEHRGSVIRGRLIARRAFRRRRRAQLRYRPARFDNRRRTDDHLAPSLRHRVDTAMSWIGRLRRLAPVTGMSQGLVRFDTQAIQNPEITGVEYQQGALAGYEVREYLLEKWSRQCAYCGAKDVPLEVDHIHPKSRGGSDRVSNLTLACHECKQVKDNRKVDEFLANRPDRMATILAKAKAPLHDAAAINSTRWALYNRLKDTGLPIETGSGGRTKYNRSQLNIPKTHCLDAACVGELKTLLGWDAPVLNIKAAGRGSYQRTRLTQHGFPRGCLTRSKRHFGFQTGDLVKAAVPSGKKVGIHLGPVAVRKSGSFNIQTLHGVVQGIGHRNCALIQRADGYGYAIKPKIAERKDAGTGAVSGRRAIPPRHKCPGSPARKR

SEQ ID NO: 6402 - protein, 512 aa, unidentified
MSTVYVLNKDGKPLMPTTRGGHVRHLLKEQKARVVRTNPFTIQLLYETDNLVQPLYLGIDPGRTNIGVAVVKTDGTAVFTAHLETRNKEIPKLMQGRKKARRARRTNGRRCRRQRRAKANGTISKKCVKQATAQNGSVSKRANEIGVIKRHLPGCEKEVLCIGIKNKEAKFSNRTRPEGWLTPTANQLLQTHINLVKKIQKFLPISDVVLEINKFAFMQLDNPNIQKWQYQQGPLYQKANLEEAVFEMQEHHCLFCKKPIAHYHHVVPQSENGSDTIGNIVGLCTKHHDLVHKDTAWQKKLAKKKTGLNKKYGALSVLNQIIPALTKELSFLFPKHFFATNGKSTYDYRAAHGVGKDHWLDAYCIAGSVLPNDVCDNNINNHVPYELKQFRHHDRRALHKENMGRVYTLNGKSVATNRHKAIKQTTDSLEEFRQRQPNDVCKLKVKEHHPEYRNPKRNFPGCVFLVGKHTHVMQGTSGSHNGKADGYYDTNGNSYSSGKCKFVVKNEGIVFT

SEQ ID NO: 6403 - protein, 429 aa, Macromonas sp.
MPCSEKRARLLLERGRARVHRVVPMVIRLVDRQVADCTLQPVRVKLDPGSKTTGLALVRDAERIDVTTGEIQREAAVLNLMELVHRGRQISEALSARSRMRRCRRGNLRYRAPRFLNRRKPQGWLPPSLRHRVDTTVAWVERLRRWTPVVAISSELVRFNMQALANSEIAGVEYQQGTLAGYEVREYLLEKWGRKCAYCCATEVPLQVEHIQPKARGGTNRISNLTLACRPCNERKAARPVQEFLAKEPQRLASVLAQAKRPLKDAAAVNTTRWALANALKDTGLPVELASGGQTKYNRVRLGLQKTHALDAVCVGVVGTTVTHSQQPTLTITCTGRGSYQRTRLDQYGFPRGYLMRTKRVKGFGTGDMVRAHVTSGKKVGNYVGRVAVRASGSFNIRTSGELVQGISHKYCHLVQRADGYGYFFNYRA

SEQ ID NO: 6404 - protein, 443 aa, Anoxybacillus sp.
MVEENMTCFMQRKGENPMVFVLDTNKRPLAPCHEAVARKLLKQGKAAIYKRYPFTIILKKIVDNFRPKTPYRLKIDYGSKHTGLAIVRGQEVVWLGQLDHRTDIKERLDKRRAFRRARRKRKTRYRKPRFLNRRRKDGWLPPSLESRVQNIQTWVERLRKICPIEHISYENAKFDTQLMRNPEINGVEYQQGTLQGYEVREYLLEKFGRKCCYCGKEGVPLEIEHIIPKSRGGTDRVDNLCLACHDCNQRKGSKTAEEFGYPHIQEMVKKTLKDASVVNATRWKVYEVLKQSGCEVECGTGARTKMNRIRLGLPKIHYFDACCVGESTPLQLHFKTKEALFIKAKGRGSRSRTNLDKYGFPRGFLARQKYFFCFQTGDIVKANVPKGKYQGVWFGEVACRKNGSFDMKDKDGKRIAQGISYKYFNIIQRFDGYTYRREGMNIA

SEQ ID NO: 6405 - protein, 430 aa, unidentified
MPKVYVLNRHGRPLMPCTPVKARHLLDAGKAKVRQRTPFTIQLLYGSTGYTQEVVLGVDAGSKTIGLSASTETEELFSAEAKPRNDVVELMSARRQFRRARRTRKTRHRKLRFNNRVRSKHKGWLAPSVEVKIQEHMTAIRRVCGILPVSKVVVETAEFDLQRLKAVAEGKPVPQGEDYQKGEMYGHYNVRQYVLWRDGYTCRVCGAHGSVKKGVPLHVHHLESRRVGGDAPDNLVTLCTACHDKLHKGIITVEDLKKRKRRSTRDATFMGIMRMTLLRRLWEQLPVPVVETRGYITKVTREKLLVLPKSHTNDALAIAHGPQGFRAGYLPNIRQADRLYTIRPVRHHNRQLHKATILKGGVRKANQAEKYICGFRLYDKVLYNGIECFVWGRRTSGSFLLRQLNGEKVKDGVSHKQLKLLERSQSYLVA

SEQ ID NO: 6406 - protein, 440 aa, unidentified
LVFVLNKNKKPLNPCHFAVARKLLKQGKAVVHKQFPFTIRLKDLKEVNPKGLIIKLDPGAKQTGVALHKPNGEVILLATIEHRADKIKQNLEARRAFRRTRRNRKTRYRTPRFLNRKRPEGWLPPSIQSVVDNVKNFIIKLKKLCYIDTIYIETVRFDTQLMLNPSIEGVDYQQGTLLGYEIREYLLYAYGHTCQYCKGLTNDTKLEIEHKHPKSRGGSNSIRNLTVACRTCNQEKGNNTLDEWVQSLSKSKLDKERVKNINLILKTNKPINLKDTAKVNSSRNAILREMYKLTSNVVVSTGGVTKHNRIKVNLPKTHYYDALCVKETPKIKMHKGLKELYIKSTGRGTRSRTLLNKYGFPRAYLPRQKQFFGYQSGDMVKANIPKGKYIGQYVSNVSCRSTGTFAIYSKKHGKQIDVNHKYLKLIQKGDGYRYELKTLA

SEQ ID NO: 6407 - protein, 429 aa, Ktedonobacter sp.; identical to SEQ ID NO: 5743

SEQ ID NO: 6408 - protein, 453 aa, Anaerotruncus sp.
MSVAVISNTGIRLMPTSEYRARHLLKAGKAVIEQYRPIFTIRLTDREKGKTQPIEYACDTGYQHVGVSIKSEKHEFVHAQYDMLSNETERHNDRRKYRRTRRNRKRYRKPRFDNRSRKNQEMAPSLRHRKENQINLFESFCKVMPITSATFEMGKFDTQLLQAIADGKPLPEGKDYQQGLKYLFQTEREAVFSRDHYTCQVCGKSVKDGVILHTHHIGYWKGYRSNRISNLLTVCEHCHTAKNHKPGGALWGLEPQSTNLAAATYMSIVRWAIYRELVLKYPEIDIHIQYGAKTSVTRKSLHLAKTHANDAYCVGSLHPRHRTAELIYQKKRRNNRILAKFYDAKYIDVRDGAKKSGAVLSCGRTNRRESRRSDKNQRIYRGKKCSSGHTSVRKNHYVYQPGDTIVFHSQRFIVNGSHCKGARVILDTGKSVKATDLTCIKKEGGWHFLPAQA

SEQ ID NO: 6409 - protein, 405 aa, unidentified
  REGION 1..405: note = Ga0373628_0007102
VGQRKQVSGLKVTVPVLSITGSPLMPCSLTKARHLLERRRAKIVSLNPFAIKLTFECENKTQEVSLGVDTGYKHIGFSAITKTKELVSGEIVLDDKTSKRLTERKMYRSNRRSRLRYRKPRFNNRKTPKGWLPPSVQRRLDTHINIINRLKELTPVKKMTVEIGAFDIQKLMDPEISGKEYQQGNLYGYNNLKAFLFSREHGKCQLCGKEIVKGEKAHLHHIKPRSETGTDRPSNIALLHEDCHDKLHKKGLYKKLKAPKQYKSETFMSIVADRLKKVLDCDVTYGYETAIKRNVLGIEKSHVNDALVIAGGTNQDRCLPYSVEQKRINNRVLQTNRKGFAPSIRKQRHKIQNRDFVWIGGRRCVCGGVACKGAMIYYFYGTEKKTIYYKKVSRFFSTGSLVWMN

SEQ ID NO: 6410 - protein, 423 aa, Symploca sp.
MRVFVLNKNRQPLDPCKPARARIILSTGKAKVYRRYPFTIILTEEIEEPITHTHQLKIDPGAKTSGLAIVQNSRVVWGGELTHRGFQIRDALTSRRQLRRARRNRKTRYRKPRFLNRSWSEGWLAPSLMSRVYNILTWVKKLTRLCPITGISQELVRFDTQKLQNPEISGSEYQQGTLYGYELREYLLEKWNRKCAYCGTTDTQLEIEHILPKSKGGSDRVSNLAIACHSCNQAKSNQEIEDFLSGKPDVLRRVLAQAKRPLADAAAVNATRWKLYHELKSIGLPVELGSGGLTKFNRCRQNLPKTHWLDAANVGKIETLVIEVTHPLIITAKGHGTRQLCRTNKYGFPIRYCSRTKVHKGFQTGDIVRAVVTKGKKIGTYVGRVATRKSGSFNISTKSGLVQGISHKYCQFIHRKDGYAYTI

SEQ ID NO: 6411 - protein, 425 aa, Nodularia sp.; identical to SEQ ID NO: 3165

SEQ ID NO: 6412 - protein, 487 aa, unidentified
LLKEQKARVVRTKPFTIQLLYETDDVVQPLYLGIDPGRTNIGVAVVKADSTAVFTAHLETRNEEIPKLMQGRKKARRARRTNGRRCRRQRRAKANGTISKKCVKQTTAQNGSASKRAKEIGVIKRHLPGCEKDVLCIGIKNKEAKFSNRTRPEGWLTPTTNQLLKTHINLVRKIRKFLPISDVVLEINKFAFMRLDNPNIQKWQYQQGPLYQKASLEEAVSEMQEHHCLFCKKSIAHYHHVVPQSENGSDTIGNIVGLCTKHHDLVHKDTAWQKKLAKKKTGLNKKYGALSVLNQIIPALTKELSSLFPKHFFATNGKSTYDYRAAHGVSKDHWLDAYCIACSVLADDVCDNNINSHVPYELKQFRRHDRRALHKENMSRVYTLNGKSVATNRHKATEQTTDSLEEFRQCQPDDVCKLKVKEHYPEYRNPKRNFPGCVFLVGKHTHVMQGTSGSHNGKADGYYDTNGNSYPSGKCKFVAKNKGIVFA

SEQ ID NO: 6413 - protein, 462 aa, unidentified
MSVLVIGRNGRALMPTNPRKARLLLKKKTASVVCRHPFTIQLLYKTGCATQEGCIGIDTGSQHIGVGITCGDKVILKDEHALRSSMEKRSLLATRAVMRRGRRYRKVRYRKPKWRHHTKRMYFEKANRRGQHWRKVKTTTQSPRSKGWLPPSLQSKCDHHFRIIDRYLKYLPDPITRNLVIEAGRFDMARMNDPTIHGEMYQRGPMYDAENLRAYIFARDNYQCACCKAKAGTTRKADGTTVKLVAHHILFRSRGATDNPKYIISVCDHCHTTKAHQPGGILYSWMENNKKVARGLRDAVFMNILRKRLFARYPQSAFTYGNITATDRKQLRLPKSHANDAVAISLFGKEASTVKNICQTMHYKQIRKSKRSLHEAIPRKGRKNPNTKAVRNKKNTTQVNGFKLWDSVLADGKKLFICSFTGTSAYLIDKNGCYISQPGKTYKQWPLSKLKRLHPNGNWLMA

SEQ ID NO: 6414 - protein, 420 aa, unidentified
MQYVYVLNKHGEPLMPCSPRKARLLLKQKKACVIKRTPFTVKLLHGSAGYKQPVTLGVDAGSKHIGISATTEKHELYREEATPRNDVVDLLSARRAFRRSRRNRKTRYRAPRFNNRVHSKHKGWLAPSVEVKIQEHITLIKHVFRILPVTLVRVETAEFDTQRLKAMLEGKPLPVGTDYQLGEMYDEYNVRQYVLKRDNYTCQCCGAHSTKTKGVKLHVHHIETRRTGGNAPNNLITLCKACHKALHAEKVTLDGKKRGKPLKDAAFMGIMRKTLMERLRKELKIPVQGTYGYITKYLREKNGIPKSHTNDARCISKNPLAIPCDTCYYTKAVRHHNRQLHKATILKGGIRKANQAPYIVKGYRLWDKVAYNGTECFITGRRTSGYFALKELDGTVVSNSISYKKMRLLEAATNYITERK

SEQ ID NO: 6415 - protein, 441 aa, unidentified
MSVSVFVLDRKHRPLMPCRPARARRLLKSGRARVVRLFPFTIRLTDRLIEDSKLQPVLVKIDPGSRRSGFAVVRVDEKGQHHALFFIELVHRGESIRDALTARRNCRRRRRGNLRHRAPRFLNRTKPKGWLPPSLRHRVDTTTAWVAKLIKLAPVTEIVEELVKFDTQKLQNPEISGIEYQQGTLFEYEVREYLLEKFGRKCVYCGAENVPLNIEHVVPKARGGSNRVSNLVLSCENCNKKKDAQPVEVFLKNRPEVLDRIKRGLKTPLRDAAAVNATRWSLFNALKAFGLPVETGSGALTKFNRHTFRVPKEHWLDALCAGRVNGVHYPEGMGILQVRCTGRGSYQRTRVDKYGFPRSYLTRQKRVHGFATGDMVEAVIPSGKKAGTYRGRVAVRARGCFVIQTPEGKVDGIGWRHCRLLSFNDGYGYAWLRPAPYSSPV

SEQ ID NO: 6416 - protein, 420 aa, unidentified
MQYVYVLNKHGEPLMPCSPRKARLLLKQKKAYVIKRTPFTVKLLYGSAGYKQPVTLGVDAGSKHIGISATTEKHELYREEATPRNDVVDLLSARRAFRRSRRNRKTRYRAPRFNNRVHSKHKGWLAPSVEVKIQEHITLIKHACRILPVTLVRVETAEFDTQRLKAMLEGKPLPVGTDYQLGEMYDEYNVRQYVLKRDNYTCQCCGAHSTKTKGVKLHVHHIETRRTGGNAPNNLITLCKACHKALHAEKVTLDGKKRGKPLKDAAFMGIMRKTLMERLRKELKIPVQGTYGYITKYLREKNGIPKSHTNDARCISKNLLAIPCDTCYYTKAVRHHNRQLHKATILKGGIRKANQAPYIVKGYRLWDKVAYNGTECFITGRRTSGYFALKKLDGTVVSNSISYKKMRLLEAATNYIIERK

SEQ ID NO: 6417 - protein, 501 aa, unidentified
LHRGVRYGPPYRAGMPDGRRKPERKHMVAVVTSTGKPLMPTSAYRARKLLKKGRAVIFKYRPYFTIQLVDRADGEVQEVEYKSDTGSVHVGISVCTEKKELLSEQRDLLENEPEHHNDRKKNRRTRRNRKRYRKPRFDNRKKKPQEGHEKWLPPTLLHKMEVQVRLFREFCRVVPVTSACFEMGKFDTQALKAVSKGEPVPEGEGYQKGERYGTDTLRAAVFLRDGHPCRFCGRSVKDGAILHVHHVGYWKGDRTDRLANLASACEQCHTPANHGKNGILYGKEPEFKTLKDASYMTSVRWIMLDEIKKVAPGVQVSVTYGVTTKRKRQELHLPKSHVNDAFSMASFHPKKRSDTEYWKKIPRHDRVLQRFYDAVYLDTRDGSEKKGSELSNGRISRNHKKDSENLHRYRGYKVSKGHNSIRRGASSLKPGSIVMYKGEKMTVHGTHTRYVTDKDGKTVKKVNVQFTRPASDGKKSASLKKCTPVSRVYNTGWKRYWPDKK

SEQ ID NO: 6418 - protein, 489 aa, unidentified
MTMVYVQNKDGKPLMPTTRYCYVRLLLKEKKARVVCTTPFTIQLNYDTPDVTQDLILGIDPGRTNIGVAVVKEDGSCVFSAHLETRNKEVPLLMKKRAAFRRQHRTQDRRRKRQRRAIAAGTTVESNTIERLLPGYEKPVVCHYIRNKEARFNNRSRPAGWLTPTANHLLQTHINLIAKIAKVLPITKVVVELNRFAFMAMDNPNIHRWEYQQGPLYGLGSVKDAVYAQQDGHCLFCKKPIDHYHHVVPRHKGGSETLANRCGLCERHHALVHKDKAWADKLVTRKEGMNKKYHALSVLNQIIPFLMEYLGSETLYDVYAIDGRSIKGFRIAKNVPKEHYTDAYCIACSTLDTDNKVSAPVEPFELKQFRRHDRQACIRQMVDRKYLLHGKVVAANRHKAFEQKSDSLQEFREAYSDVAVSQLTVKPHPPQYKDMSRIMPGAVMDFDGIVGVMQSSIVGQFYKSTKGHKATPRRCVLLAQNAGMVFLPA

SEQ ID NO: 6419 - protein, 418 aa, unidentified
MVYVLNKNNEPVMPCSERKARLLLKQGRAVIYRKDVFTIKLINGSYGYKQHITIGIDCGSKHIGISATTNKKELFSANAELRNDIVKLLSDRKSLRRNRRYRKTRYRKPRFDNRRIKEGWIAPSIRQKIDSHVRIVSLIHKLLPVKQVNVEVVAFDMQKIKNPDIKRSEYQMGEQLDSYNVREYVLFRDNHICQHCKGKSKDDVLQVHHIESRKTGGNAPNNLVTLCKTCHEKYHSGEITLNVNRGKSFRDASAMSTMRWFLYEELKSRFSNVNITYGYITKYKRIKLGLSKEHYNDAYCIAGNLNTSRLCNRHLIRFIPRHSRILHVQKFSKGGVRRSASAPYWLNGGKPSKHGIIFTRFDKVKFNSVVCFISGSSNGFASLRDINWNKVHGCKTTVTVNKLVLVSRRRGSMLFGEL

SEQ ID NO: 6420 - protein, 429 aa, Ktedonobacter sp.
MVFVLDRHKKPLMPCTPRRARLLLARKRAVVHRLSPFTIRLKDRSVQQSTLQPVALKIDPGAKTTGLALARVEETSEGEVHHALHLAELSHRGEEVRDQLRKRAGYRRRRRSTNLRYRPARFLNRRRAPGWLPPSLRSRIDNVLSWGRRYQRWVPLVRIAVERVKFDTQLLQQPEISGVEYQRGELAGWEVRAYLLEKFGRRCVYCGRTDTPFELDHIQPRSRGGSNRVSNLALSCHTCNAAKGERTAAEFGHPEVAAQAKQPLRDTAAVNATRYALCDELRTLDLPLTTWSGGRTRWNRARFSIPKTHALDALCVGEVAGVKVGAHQALAITATGRGRYSRTNVDESGFPVGSLMRRKQVLGIKTGDRVRAMVPEGFAAQGTHTGRIAVRANKHFRMGKVQGIPARFCRVLQLADGYDYAVVATTLQG

SEQ ID NO: 6421 - protein, 413 aa, unidentified
MTSYAFVLDANGKQLAPTKEQKAWFFIRKKRASLVSKYPIVIQLMKEIPEKEICQDEIRCGIDDGGLHVGIALVQKCKTKNKVVFKGTMEQRNDVKHLMEVRRGYRRYHRYHKRYRQARFDNRKSSKREGRIAPSILQKRQATIRVIHWLNKWINITNYWLEDVSVDIRALTDGYQSYRWQYQKSNRLDENIRKAAILRDDGKCMECGKSNCRLEVHHIKPRRRNGSNTLDNLITLCESCHQKTEGQEELYMDRYFSLLKSSDNKNLNYAQHVMIGKMWLRKQLSGLGVLYLTSGGDTANKRIDWNIEKSHANDAVCITDLRPDTCDVKEWTMKPMRRQSKAKTDHVLGIHHRDLVEYTFKNGETHRGYVTALYPEQKAINFQSPTKHCKKVNARKCKLLWKYSKIYWFENAS

SEQ ID NO: 6422 - protein, 456 aa, unidentified
MTNIYILDINGKPLMPCHNGAFVRCRLKNKEAKVIKRKPFTVQLMYEVKNNYKQDIYLGVDAGYKYIGFSASTSNQELFSGELEQDCGMVERNKERRMYRRQRRSRLRYRKARFNNRKAGKPQGWTAPSLQRKRDTHLRFIMMLSSIMPITDINVEIRLFDPALMKATAEGRTIKGADYQHGEAEGFENMKSYIRYRDSYTCQNPDCKCHKMKKEDREKLKLHVHHIGYYKHDRSSRPGNLITLCELSHTPETHQPGNLLYGWKPKMKSLRETAFMNTVRKEIVDTLKAVYPDKTVRYTYGYKTNLTRRDWHVPKSHHDDAFCIAGQYSLKRAETVYFNQQRRNNRSLEIFHDAKYIDSRDGKRKTGKELYCGRNTRNKNFNKENLHQYRSKKVSRGKRNIRKQHYKYQPNDIVVFEGQKYKIRGSHCKGSRVILDTKKSVSVKKIHILKHCSGIC

SEQ ID NO: 6423 - protein, 461 aa, Parasutterella sp.; identical to SEQ ID NO: 3646

SEQ ID NO: 6424 - protein, 396 aa, unidentified
VVRRTPFTIQLTIATGESKQPVSLGVDAGYKHVGLSASTEKAELYASEVELRKDITDLLSARRALRQSRRNRKTRYRAPRFDNRIRTKRKGWLAPSVENRINAHLSRIEAVLRLLPITKITVETASFDMLLLKNPDIAGKEYQEGEQLGFWNVREYVLFRDGHVCQHCYGRSKDPVLNVHHLESRRTGGDSPGNLITLCETCHEALHRGEIALKTKRGHSFRAEAFMGMMRWEVLNRLKASHSELEVNNTYGYRTKHARIVNGIDKSHCADAFCIAGNLGAERLCEFFFQKQTRRNNRQIHKLSILKGGIRKRNQAPFEIKGFRLFDKVACKGEESFIFGRRSSGYFDVRKLDGTRISAGISYKKLRLLEKRRTYLTEIRKEEALPPLPEGRGLRA

SEQ ID NO: 6425 - protein, 470 aa, unidentified
MSVFVVGLNGCRLMPVSERKARLLLKGGKASVYRKVPFTIKLNYKTGSTVQPGYLGIDTGSQHIGVSVVQKDGTVLHKEEIGLRDSMSKRKLLESRASSRRGRRYRKTRYRHPKWKPKTKRIYNEKADRKGRHWKKQKNTFTSKRQAGWLPPSLQSKTDHHIQWIRKLLDLLPEGYRLSIELGRFDPARMKDPEIHGELYQKGPQYDYENVRAYVLARDGYTCRVCKKKGGKLHVHHILYRSRGASDNPKYMAAVCSKCHTTENHLPGGILYQWMQDQKKFTRGLRDATFMNILKKRLRKAFPDAVFTYGNITKADREKLELPKSHGNDATAIALVNTEVKSVKDEEPVIHIQQVRRKKRSLHEETPRKGRKEPNRTASRSDKNTKSVTVAKGSGEKKASMTACLFDRVELDGKKGWITGFTGTSCYVKDKEDNYICTSPKYKQVSISRLRILHHCGNWAIGAEKPLGKG

SEQ ID NO: 6426 - protein, 377 aa, unidentified
MSKVFVLDTNFTPLNPIHSAQARQLLRTKKAAIFRQFPFTIILKKSRPDSPVSSLRLHIDPGAKFTGMALVNDSTGKVVFAAELKHRGFAIRDALTSRKQLRHSRRARKTRYRQPRFLNRTRPEGWLAPSLQSRVENIKTWVERLRKLAPIEAISQELVRFDMQLMANPDIQSKEYQQGTLAGYETREYLLEKWGRQCAYCGVKDVPFQVEHIHPRAKGGSNSITNLTLSCEKCNTKKGTKDIKDFLKKDPSKLEKILKQAKRPLADAAAVNTTRTALLEVLKATGLPVETGSGGLTKFNRNQQKLEKTHWIDAACVGQSTPILNIKGVKPLLITANGHGSRQSCRTDKYGFPNRHVPREKIHFGFQTGDIAKAVVT

SEQ ID NO: 6427 - protein, 512 aa, unidentified; identical to SEQ ID NO: 5858

SEQ ID NO: 6428 - protein, 406 aa, unidentified
  REGION 1..406: note = Ga0315273_10202850
MLVYVLNKEGKPLMPTKPSIARILLKEGKAKAIKKTPFTIKMLIETTNYKQEVIAGMDTGSKVIGTACISNGKVLYKSETFIRQDVSKKMEQRKMYRRNRRGRKTRYREARWNNRANSLRKDRLAPSLLSKLNSHLREKKFIEKLLPVSKWILELASFDIHKISNSEVKDYQKGQQKGFYNVKAFILDRDGFTCQHCKTKKSKLHVHHIIFRSNGGTDSPENLITLCEGCHDKLHKGEFEIKGKKSITKHATEIGITKSQLKKKFGDFVETFGYETKFKREQILQLSKSHCNDAIAICCSDSEIIKDLNYYFIKKNVAKGDYQQTKGIRSEKKIPTGKLFGFKKFDKVKTPEGIGFIKGKRSSGAFVIMDILGNIFNKSWNAKKYLERISARKNYIMEVCAVPMQL

SEQ ID NO: 6429 - protein, 470 aa, Anaerostipes sp.; identical to SEQ ID NO: 2825

SEQ ID NO: 6430 - protein, 434 aa, Solobacterium sp.; identical to SEQ ID NO: 6112

SEQ ID NO: 6431 - protein, 431 aa, unidentified
MPNKVYVINKHGRPLMPCSPAKARHLLDEGKAKVKKRTPFTIQLVYGSSGYTQEVILGVDAGSKTIGMSASTTKEELLSAEVKPRNDVVDLLSTRREFRRAQRNRKTRYRKPRFDNRVRSKHKGWLAPSVEVKIQEHITAIRRVCGILPVSKVVIETAEFDLQLLKAIADGKPVPQGEDYQQGEMYGHYNVRQYVLWRDGYTCQCCGAHATKKKEVRLHVHHLESRKVGGDAPDNQVTLCESCHEKLHKWLIAEKDFKKRKRKSTRDATFMGIMRKTLMQRLCSELPIPVIETRGYITKATREKLLVLPKSHTNDALAIAQGKQGFNVGYLPEIAQIDKIYTIRPVRHHNRQLYKATILKGGIRKSNQTKKYVFGYRLFDKVQFNEQDCFIWGRRTTGIFTIKTINGKMIKDGISFKKLKLAEKSTSYLIA

SEQ ID NO: 6432 - protein, 481 aa, unidentified
MWTTVLRGEKPYGRSSALPVRECVSIAKKRRHHMVAVLSKTGIRLMPTSSYRARKLLAKKKAVICMYRPFTIRLTERETGDVQPVELAVDTGYFHVGNSLKTAKHELAAVEIRTLMDEKQRYDDRRRYRRMRRSRLRYRAMRFDNRRRPEGWLALSIQGRMEQNLAFLRRVLSVVPVTRIVMEMGQFDTQVLKAVEEGRPLPEGTDYQQGERYGIATLREAVFTRDNYTCQCCKKTIHDGVILHVHHIVYRSQGGTNRMGNLITVCEKCHTPKNHKPGGKLYKWKPTVKSFKGATFMTAVRWIMYRFVKECFPDVDVRITYGAKTKLQRRALDITKSHVNDAYAMGDFHPKHRARPVILQKKRRNNRILEKFYDAKYIDTRDGSKKTGQQLFNGRTNRNHNTDTENLRLYRGMKLSKGKRAIRTTRYKIQPHDILVYQGQEMEASGCHNKGTRVMTIAKKSLPIGKVRVRRYSGGYYAVAE

SEQ ID NO: 6433 - protein, 453 aa, Halomonas sp.; identical to SEQ ID NO: 2619

SEQ ID NO: 6434 - protein, 544 aa, unidentified; identical to SEQ ID NO: 3705

SEQ ID NO: 6435 - protein, 465 aa, unidentified
MSTCVCVFSNNGERLMPTIRLGKVRHLLKDGKAKIIKHHPFTIQLLYDSKTNTQPIEICEDVGYNYIGISVKSESHEYVSAQYDTLQDEKEHHDDCRKYRRTRRNRLRYRKPRFDNRKRDDGWLAPSLEHKKELNVNVIKMYCEVMPITHAIVEVGSFDTMLVKAIEEGKATPESADYQKGPRYKLATLREAVFYRDNYTCQVCGRKANEGAILHVHHMFYWKGRHGNSLSELITVCEKCHTPANHQKGGKLYGFGEDIKFANLSGAAFMNTVRWQIVNVLNAAFGKPFVTFTYGAMTKEKRIALHLEKSHNNDAYAMGSFHPVNRCAFEHYEKVKRNNRILEKFYDSQYIDIRTGEIATGKELFNGRISRSHKKDSENLHKYRGKRICKGHRALRRKKVALNPGDLVSLNGEILVVHGTHTKKNGSVNVEFKTPSRGGKKSASLKKLKIVKTSNLMHSAWTKVA

SEQ ID NO: 6436 - protein, 415 aa, unidentified
MVYVVANDGQPLMPTERHGKVCRMLKSGMAKVVKKCPFTIQLQYESERNVQPVSLGVDAGSKHIGISATTKTKVLYESDVELRDDIVKLLATRRQLRLSRRSRKTRYRPVRFDNRKRKEGWLVPSIRQKIGSHLTVVANVCKILPINQIIVETASFDIQKIKDPEIQGIEYQQGEQMDFWNIREYVLFRDGHTCQCCKGRSKDKILNVHHIESRKTGGNAPNNLITLCETCHKGYHNGTVILPKNIKHGMQFKDAAFMGIMRWTFYNTLKEQYEPDIPVHYTYGYITKNTRINHNLPKGHCIDARCISGNPDAVSDGTYYYQKKVRCHNRQIHKQTILKGGIRKSNQAEYLVRGFRLFDKVRYQGREYFIFGRRKSGFFDIRTLSGEKVNKGSISVKKLTFADTRKNYLTERRTV

SEQ ID NO: 6437 - protein, 440 aa, Ktedonobacter sp.
LSKVFVLDTNKQALNPVHPGRARRLLSLGQAAVFKRYPFTIILKSAASSPHVWPLRVKLDPGSKTTGLAIVNDASGEVVFAASLIHRGDAIRERLEKRRAARRSRRQRKSRYRQSRFDNRGTKKKGWIAPSVQSRVCNVITWVKRLVRLCPITAISQELVKFDLQQMDHPEISGVNYQQGTLSGYEVREYLLDKWGRQCAYCGAKDVPLEVEHINPRSKSGDDRVCNLTLACEPCNTRKGTQDIRVFLAHQPELLAKLLAQAKSPLKDAAAVNITRWVLHAQLKAFGLPLECGSGGRTKFNRITRGLEKTHWCDAACVGASTPEVLHIGQVRPLSIAAYGHGRRQMCLMNKSGFPRTNPKQKKFKHGFRTGDLVKAVVPPHLKHAGTHVGRMSAKASGAFTIATAGGTVTDIGKKYCRMLQRADGYGYTQKGELAFPPVP

SEQ ID NO: 6438 - protein, 447 aa, unidentified; identical to SEQ ID NO: 5316

SEQ ID NO: 6439 - protein, 408 aa, unidentified; identical to SEQ ID NO: 4826

SEQ ID NO: 6440 - protein, 431 aa, unidentified; identical to SEQ ID NO: 5232

SEQ ID NO: 6441 - protein, 309 aa, unidentified
MKGVQIMQNRVFVINKHGKALMPCKPRKARILLRDGKAKVLKKEPFTIQLLYGSTGYKQDISIGIDSGQRHIGLAVTSQDKVLFQGEVELRQDVKKLIDTRRIYRRSRRNRKTRYRKAKFLNRIAKKKDNWLPPSVLSKVNHNINWIKRLLSVLPKADLHIEVGKFDIQKMKNPEINGEGYQQGDLYGYQTVKQFVLARDNYTCQVCKKKGGKLKIHHIIYRSLGGTNTVNNLITVCSNCHTTKNHQTGILAKWCKDKKKVNKSYKGATFMNILRRRLFLAFPQAKFQYGAWTTLQRADLELTKSHYNN

SEQ ID NO: 6442 - protein, 442 aa, unidentified; identical to SEQ ID NO: 3791

SEQ ID NO: 6443 - protein, 453 aa, Solobacterium sp.
  source 1..453: note = isolate UBA2814
MSVAVLSSTGRKLMPTSNYRARKLLKSKRAVIECYRPIFTIRLTDREEGNTQPIEYACDTGYQHVGVSIKSEKHEFVHAQYDMLSDETERHNDCRKCRRTRRNRLRYRKPRFDNRSKKNKEMAPSLRHRKENQIRLFESFCKVMPITSAAFEMGKFDTQLLQAIADKKPLPKGKDYQRGSKYLYQTEREAVFGRDHYTCQVCGKSVKDGVILHTHHIGFWKGYRSNRISNLLTVCEHCHTAKNHQPGGKLWGLEPKSTNLAPATYMSTVRWAMYRDLVLTHPELDIYFQYGAKTAVTRKSLHLAKTHANDAYCVGSLHPRHRSTELVYQKKRRNNRILAKFYDAKYIDIRDGEKKSGSALSCGRTNRRESRRSDKNQRIYRGKKCSSGRTSVRKKRYSYQPGDAILFRSQRFTVNGAHCNGTRVILNTGKSVKMADLTCIKMEGGWCFLPAQA

SEQ ID NO: 6444 - protein, 431 aa, Moorena sp.
MRVFVLDKNLKPLDPCRPARARLLLKQGRAKVLRRYPFTIILSDLEVENCRTHNYQLKIDPGAKTTGVSYRQDNTVIWGAEITHRGFQIRDALTSRRQLRRSRRSRKTRYRKPRFLNRKRPSGWLAPSLMSRVHNILTWVKKLIRFCPIAGISQELVRFDTQKMENPEISGTEYQQGTLCGYEIREYLLEKWNRKCAYCGATDARLEVEHIKPKSLGGSDRVSNLAIACHDCNQAKGSQEIEQFLSGKPDVLKQVLSQAKRSLADAAAVNATRWKLYNELKFTGLPVETGSGGQTKYNRRRFNLVKTHWIDAACVGNVQNIYVEDYQFLSIMAKGHGTRQICRTDKFGFPKRYCSRTKIHKGFQTGDIVKAIVTKGKKIGTYVGRVATRKTGSFNISTSNGLIQGISHKYCTLIHKKDGYAYQINTLSSLS

SEQ ID NO: 6445 - protein, 406 aa, unidentified
MVYVQDIDGKPMMPTTRHGKVRRLLKSKKATVVNLCPFTIRLLYDTTGYKQEITLGVDTGTKHVGLSATTKSKELYASEVILRSDVVDLLSTRRELRKIRRYRLRYRKPRFMNRIKSKKRGWIAPSIRQKIDSHIRIIGFVYSILPVSKLIIEVAQFDTQKIKNPEISGKEYQEGEQLGFWNVREYVLARDEHKCQHCKGKSKDPVLNVHHIESRKTGGDSPSNLITLCKTCHKEFHKGNIKLKVNRGESLRDAAVMGIMKWELYDELKSLYPNVKMTFGYITKYNRINHGIEKSHVSDAFVISRNFDSERLGYYYKRKLVRRHNRQIHKMKAPKGGNKRMNQSPFKVFGFRLFDKVMFQGKERFIYARRLRGIFNIRDINGENKKDISYKKLEYVSHGLISIVAG

SEQ ID NO: 6446 - protein, 465 aa, unidentified
MVIALDRHKKPLGFVTERRCRKLLEVRRAVFYRHYPAVIILKDVDARNIYKLPSYRIKIDPGAVHTGIAIVCNETNEVMYFLQIEHRGSEVKKALITRKQTRRNRRSRETRYRRCKFKNGGDFDSSRKNGWLPPSVKSTADNVIHWVEKLCRYINITECSFEAVRFDSQLMDNPEIGGEEYQQGTLSGYELREYLMEHFRHTCQYCGGESGDPVLEWEHKIPRSRGGSDSVKNASLACSCCNRDKGNRTLEEYLEDSKHISPKGKSEKALNEARISHISGILEKGTIYGSNRYSAWVNSTRRYIEKYLFLMFDDVECCSGGRTKYNRIKLKLPKDHHYDALCVGSVPKEGYTDRTNSYVLYVKATGRGTRFRGQCNSCGVITVKYKNNSKRKFGFQTGDIVQLNKPKGKDTGQYTGKVAVRSSGSFDLIRKGCKRITANYKYFRMMQYSDGYEYLGPLRPIPHSA

SEQ ID NO: 6447 - protein, 456 aa, unidentified
MNTCVCVLSNSGERLMPTFRLGKVRRLLKDGKAKIVKHHPFSIQLLYDSKTNTQPIETCEDVGYNYIGISVKSESHEYVSAQYDTLQDEKEHHDDCRKYRRTRRNRLRYRKSRFDNRKRDKGWLAPSLEHKKQLNISLIERYVSVIPITHVTVEVGSFDTMLVKAIQEGKVIPEGADYQKGPRYNLATLREAVFYRDNYVCKVCGRKATEGAILHMHHMFYWKGRHGYQLDELVTVCEKCHTPANHQKGGKLYGFGKDKKFANLSGAAFMNAVRWQIVNALYATYGKEFVTITYGAMTKEKRIALQLEKTHNNDAYAMGDYHPARRCKFRHYQKRRRNNRVLEKFYDATYVDTRTGNKAKGKELFNGRISRNHKKDCENLHKYRSKKVSKGRRSIRRQHYAIQPYDTVRLEGKTYITSGCHNKGTRLLIPVNGKSKSVAISKVQVVCHAGAWIQII

SEQ ID NO: 6448 - protein, 406 aa, unidentified
MVYVQDIDGKPMMPTTRHGKVRRLLKDNKAVVVNTCPFTIKLMYKTSDYKQEIVLGVDAGTKHVGLSATTKSKELYSGEVILRSDIVELLSTRRESRRTRRNRLRYRKPRFNNRIKSKRTGWVAPSVRHRIDAHIRVIDNICSILPVSRVIVEVAQFDTQKIKNPDISGDEYQEGDQLGFWNVREYILARDGHKCQHCKGKSKDPILNVHHIESRKTGGDSPSNLITLCETCHKEYHKGNIDLKVKRGKSLRDAAVMGIMKWKLYEELKSRYPNVSMTFGYITKYNRIKYGIEKSHTSDAFVISRNFNAKRIERQYLKRLIRRHNRQIHKMKILKGGKKKNNQAPFEIFRFRLFDKVLYNNEILFVYGRRKSGNFNIRDFNGENPKDVSHKKLKLIRGKRHLIILK

SEQ ID NO: 6449 - protein, 442 aa, unidentified; identical to SEQ ID NO: 2903

SEQ ID NO: 6450 - protein, 420 aa, Geobacillus sp.; identical to SEQ ID NO: 4984

SEQ ID NO: 6451 - protein, 418 aa, unidentified
VYVLNMHGEPLMPCSPRKARLLLKEGKARVVKRTPFAIKLLYGSAGYKQPVTLGVDAGSKHVGLSACTESRELYKEELTPRNDVVELLSARRQYRRSRRNRKTRYRASRFDNRVHSKHKGWLAPSVEVKIQEHITAIKRVCKILPVTLIRVETAEFDTQRLKAMLEGKPLPVGKDYQLGEMYDEYNVRQYVLKRDNYTCQCCDAHPTIKKPIRLHVHHLESRQTSGNAPNNLIVLCEHCHKALHEGKIKLKNGKKRGKPLRDAAFMGIMRNTLLARLRKELPIPVEQTYGYITKLLREKNKISKSHVNDARCIAGFPNAESCDTMFRTRALRHHNRQIHKAKTLKGGIRKKNQAPYLVKGFRLWDKVRYNGEECFISGRRSSGYFALKKYNGAVVSSGVSYKRLTLLEAATNYITERS

SEQ ID NO: 6452 - protein, 408 aa, unidentified
LRVFVLNKRGKPLMPCSPAKARLLLKEKKAIVKRRTPFTIQLTIATGETKQPVGLGVDAGYKHVGLSASTDKAELYASQVELRQDITDLLSARRALRRARRNRKTRYRAPRFNNRIRTKRKGWLAPSVENRINAHLSRIEAVLRLLPVTKITVETASFDMLLLKNPDIAGKEYQEGEQLGFWNVREYVLFRDGHVCQHCYGRSKDPVLNVHHLESRRTGGDSPGNLITLCETCHEALHRGEIALKTKRGHSFRAEAFMGMMRWEVLNRLKASHSELEVNNTYGYRTKHARIVNGIDKSHCADAFCIAGNLGAERLCEFFFQKQTRRNNRQIHKFFQVKDGIRKRNQAPFEIKGFRLFDKVACKGEESFIFGRRSSGYFDVRKLDGTRISAGISCKKLRLLEKRRTYLT

SEQ ID NO: 6453 - protein, 411 aa, unidentified; identical to SEQ ID NO: 3917

SEQ ID NO: 6454 - protein, 456 aa, unidentified
MNTCVCVLSNNGERLMPTFRLGKVRRLLKDGKAKIVKHHPFTIQLLYDSKTNKQPIEICEDVGYNYIGISVKSESHEYVSAQYDTLQDEKEHHDDCRKYRRTRRNRLRYRKSRFDNRKCDKGWLAPSLEHKKQLNISLIERYVSVIPITHVTVEVGSFDTMLLQSIQKGEAKPEGADYQKGPRYNLATLREAVFYRDNYTCQVCKRKIADGAILHMHHMFYWKGRHGYQLDELVTVCEKCHTPANHQKGGKLYGFGKDKKFANLSGAAFMNAVRWQIVNALYATYGKEFVTITYGAMTKEKRIALQLEKTHNNDAYAMGDYHPARRCKFRHYQKRRRNNRVLEKFYDATYVDTRTGNKAKGKELFNGRISRNHKKDCENLHKYRSKKVSKGRRSIRRQHYAIQPYDTVRLEGKTYITSGCHNKGTRLLIPVNGKSKSVAISKVQVVCHAGAWIQII

SEQ ID NO: 6455 - protein, 431 aa, unidentified; identical to SEQ ID NO: 4200

SEQ ID NO: 6456 - protein, 413 aa, unidentified; identical to SEQ ID NO: 3587

SEQ ID NO: 6457 - protein, 532 aa, unidentified
MPTVYVLNKDGKPLMPTTRGGHVRHLLKEQKARVVRAKPFTIQLLYETDDAVQLLYLGIDPGRTNIGVAVVKANGTAVFTAHLETRNKEIPKLMQDRKKARRARRTNGRRCRRQRRAKANGTISKKCVKQTTTQNGSVSKRAKEIGIIKRHLPGCEKDVLCIGIKNKETKFTNRTRPEGWLTPTANQLLQTHINLVKKIQKFLPISDVVLEVNKFAFMRLNNPNIQKWQYQQGPLYKKESLESAVSEIQEHHCLFCKKPIDHYHHVVPQHKNGSNTIGNIVGLCAKHHDLVHKDSAWEKKLAKKSTGLYKKYGALGVLNQIIPTLTNELSSLFPKHSFVTNGKSTYDYRAAHGVSKDHWLDAYCIACSVLPSNVCDSNINNHVPYELKQFRRHDRRVLHKANMSRVYTLNGKAVATNRHKAIKQTTDSLEEFRQNYPDDVYKLKVKEHHPAYRNLNRNYPGSVFLVGKQAHVMQGIASSKDGKTTKYNDTNATTITAGKCKFVAKNSGILFVQCKFRKALSDGTTKKLQYPV

SEQ ID NO: 6458 - protein, 430 aa, unidentified
MLVYVLDMNGQPLMPTHNGAKVRVLLNQRRAKVVSKCPFTIKLLYESTSFTQPLTLGVDTGSKYVGSAVVNDTTSEVVYESQVELRDDIKSKMDRRRQFRGARRTKLRYRPARFNNRKSSKRKDRYNPTLISKFQGHKREIEFIKSILPITEVVLEIGEFDPHLIQDPTLAYHKWDYAKGELYQQENFKQAAKARDDYKCQCCGKKDCRLEVHHLIPHSRGGSDKLANLITLCSDCHHLAHSSESQLLAFQKKFGKKARGTLRYATQMNVLRHMLQREYPDAEITYGFITKEMRRVFELEKSHMIDACCIASRGVLFKNNGSNKYKKKCVPKGDYVRTNTTNGKYVVIPKGKIAGFKRYDKVLYDNNECFIVGRMSTGYVYLIDIDNNRVNVERTERTTGKKYLAKASIKVSLIKKIASAKTPIISLVNY

SEQ ID NO: 6459 - protein, 424 aa, unidentified
MVYVLNVEGRPLMPTGRHGHVRRMLRDGKARVVRRCPFTIQLMCEGTSYTQPVHLGIDAGSKRIGVSAATEKEVLYEAEVELRNDIKELLSSRREARRARRNRKTRYRKPRFLNRTKAKRKGWLAPSVEQKVQTHLTVIRKACGILPVSKITIETASFDTQMLRAKELGLSLPAGTDYQQGEQLYSWNVREYVLFRDGHTCRCCKGKSKDGVLEVHHIESRKTGGDAPNNLVTLCRTCHEGHHRGTVKLPEDIKRGNRYNDAAFMGIMRWKVYDRLKEEYGPDMVHMTYGYITKRTRIGHGLQKGHRIDARCISGHPDVAPPEEVFFQKKIRCHNRQIHKFGIPKGGVRKRNQAPYLVKGFRLFDKVEYGGQECFIFGRRSSGYFDVRLLDGTKVHAGVSYRKLRFLEPRRTMLIERRTQGTTA

SEQ ID NO: 6460 - protein, 454 aa, Calothrix sp.; identical to SEQ ID NO: 4352

SEQ ID NO: 6461 - protein, 512 aa, unidentified
MSTVYVLNKDGKPLMPTTRGGHVRYLLKEKKARVVTSKPFTIQLLYETDDVVQPLYLGIDPGRTNIGVAVVKTDGTAVFTAHLETRNKEIPKLMQERKKARRARRTNGRRCRRQRRAKANGTISKKCVKQATAQNGSASKRAKKIGVIKRHLPGCEKEVLCIGIKNKEAKFNNRTRPAGWLTPTANQLLQTHINLIKKIQKLLPISDVVLEINKFAFMQLDNPNIQKWQYQQGPLYQKANLEEAVSEMQEHHCLFCKKKIDHYHHVVPQHKNGSNTIDNIVGLCTKHHDLVHKDTAWYEKLTKKKTGLNKKYGALSVLNQIIPALTKGLSSLFQKHFFVTTGKSTYDYRAAHGVSKDHWLDAYCIACSVLPNDVCDSNINSHVPYELKQFRRHDRRALHKENINRVYTLNGKKVATNRHKAIEQTTDSLEEFRQNHPDDVCKLKVKEHHPEYRNPKRNFPGCVFLVGKRTHVMQGTSGSHNGKADGYYDTNGNSYPSGKCKFVAKNKGIVFA

SEQ ID NO: 6462 - protein, 423 aa, Moorena sp.
MRVFVLNSNRQPLDPCKPARARILLSTGKAKVYRRYPFTIILTEEIQEPITHGSQLKIDPGAKTSGLAIVQGNRIVWGGELTHRGFQIRDALTTRWQLRCARRNRKTRYRKPRFLNRSRPEGWLAPSLMSRVHNILTWVKKLTRLCPIAGISQELVRFDTQKLQNPEISGIEYQQGTLYGYELREYLLEKWNRKCAYCGTTGTQLEIEHIKPLSKGGSNRVSNLAIACHSCNQSKSDQEIEQFLSGKPDVLKRVLSQAKRPLTDAAAVNTTRWKLYHEMKSIGLPVEVGSGGLTKFNRCRQNLPKTHWLDAANVGKVDTLIIEGYQPLLIAAKGHGTRQICRTNKYGFPIRYCSRTKIHKGFQTGDIVRAVVTKGKKIGTYVGRVATRKSGYFNISTKSGLVQGISHKYCQFIHRKDGYAYTI

SEQ ID NO: 6463 - protein, 512 aa, unidentified; identical to SEQ ID NO: 5824

SEQ ID NO: 6464 - protein, 424 aa, unidentified
MQNRVFVLDTNKQPLSPTHPARARKLLTRGKAAVFRTYPFTIILRKTVESPGDEPHRIKLDPGAKVTGIALVNERTGTVVWAAELTHRGDMIRQKLEKRRVVRRNRRKHKTRYRPARFNNRKRPNGWLAPSLQHRVETAMTWVKRLRKYCPITDISMELVRFDMQKLRNPEISGVSYQQGVLFGYELREYILTKWRHQCAYCGAKEVPLEIEHIHPKSKGGSDRVSNLAIACHKCNQKKGDKHVEQFLKKKPEVLKRLLAQAKAPLRDAAAVNYTRRTLFNRLKETGLAIETGTGGLTKYNRTLQGLSKTHWLDAACVGKSTPMLKIATTQPLLITCKGRGGRQKARINKYGYPICHRPLKPIKGWQTGDIAKHQVHGIGRVTPRSSGSFRLTKPDKTNKYVKPTDLKHLKPVSRRDGYSYKWV

SEQ ID NO: 6465 - protein, 417 aa, unidentified
MQYVYVLNKHGEPLMPCSPGKARLLLKQQKACVVKRTPFTIKLLHGSAGYKQPVTLGVDAGSKHVGLSASTETHELYCEEFTPRNDVVELLSTRRQNRRSRRYRKTRYRAPRFNNRVHSKHKGWLAPSVEVKIQEHITVIKRICRILPITLVRVETAEFDTQRLKAMLAGKPIPVGTDYQLGEMYDEYNVRQYVLKRDNYTCQYCGAHTTAKKVVKLHVHHLESRKVGGNTPSNLITLCVTCHNNLHKGKITLDGKKRGKTLRNAAFMGIMRNTLLTRLRNELNIPVQNTYGYITKLLREQNDIKKSHINDARCISKHPLAVPCSVCYCTKAIRHHNRQIYKAKILKGGVRKANQATYIVKGFRLWDKVLYNGQECFISGRRSSGYFALKKLDGTTITNSISFKKIAAIRACNKLLN

SEQ ID NO: 6466 - protein, 442 aa, unidentified; identical to SEQ ID NO: 2903

SEQ ID NO: 6467 - protein, 426 aa, unidentified; identical to SEQ ID NO: 3294

SEQ ID NO: 6468 - protein, 415 aa, Parasutterella sp.
LMPCSPAKARLLLKEKKAIVVRRTPFTIQLTIATGETKQPVSLGVDAGYKHVGLSASTENAELYASEVELRQDVSDLLSARRTLRQSRRNRNTRYRAPRFDNRIRTKRKGWLAPSVENRINAHLSRIETVIRLLPVTKITVETTSFDMQLLKNSDIAGKKYQEGEQLGFWNVREYVLFRDGHVCQHCHGRSKDPVLNVHHLESRRTGGDSPGNLITLCETCHKALHRGEITLKAKRGQSFRAETFMGIMRWEVLDRLKASHSKLEVQNTYGYRTKHARISNGIAKSHCADAFCIAGNLGAERLGEFFFQKQTRRNNRQIHKLSILKGGIRKRNQAPYEIKGFRLFDKVACQGEEGFIFGRRSSGYFDVRKLNGTHISAGISCKKLRLLEKRQTYLTEIRKEKALPPLPEGRGLRA

SEQ ID NO: 6469 - protein, 453 aa, unidentified; identical to SEQ ID NO: 2687

SEQ ID NO: 6470 - protein, 423 aa, Scytonema sp.
MSNYCFLIDANKTPLNPVHPSHARKLLDCGKAAVFRRYPFTLILKRVVENPLVHPLTLKIDPGSKFTGIALITNGGEVIWGMELQHRGQQIKDALEHRRVVRRGRRNRNTRYRQARFLNRKRQAGWLAPSLRHRVLTTETWVKRLQKFTPIGSIVQELVKFDTQAIQNPEISGTEYQQGTLHGYECREYLLEKWNRQCAYCGVKDVPLEIEHIQPKSKGGSDRISNLCLACHKCNQRKGSRDIKDFLKGKPDVLHRVLRQAKSPLKDTASVNSTRWSLFNALKSFGLLVSTGTGGQTKFNRIRFELPKAHWIDAACVGVVDAIKLVTTKILKVKATGFGGRQRCQTDKFGYPQKHRPLRPIFGFCTGDIVRADVPKGKYAGTFTARVCPMSHGYGEFVIDKKRRSIKLEYLTPVHRKDGYDYA

SEQ ID NO: 6471 - protein, 457 aa, unidentified
VWLYQAVYNLGEGFLPSSEERTAFYWLLIYRKEHGIMQYVYVLNKHGEPLMPCSPGKARLLLKQQKACVVKRTPFTIKLLYGSAGYKQPVALGIDAGSKHVGLSASTEKRELYREEFTPRNDVVELLSTRRQNRRSRRNRKTRYRAPRFDNRVHSKHKGWLAPSVEVKIQEHITVIKRICRILPITLVRVETAEFDTQRLKAMLKGKPLPVGTDYQLGEMYDEYNVRQYVLKRDNYTCQCCGAHPTEKKPIRLHVHHIESRHVGGNAPNNLITLCVACHKALHEGKITLDKGKKRGKPLRDAAFMGIMRNTLLARLKDELNIPVKQTYGYITKLLREKNKIPKSHVNDARCIAKAPNAKPCDTMLYTRALRHHNRQIHKAKILKGGIRKKNQAPYLVKGFRLWDKVRYNGEECFITGRRSSGYFALKKYDGTVISNSASYKKLMLLEAATNYITERS

SEQ ID NO: 6472 - protein, 420 aa, unidentified
MQYVYVLNKHGEPLMPCSPRKARLLLKQKKACVVKRTPFTIKLLYGSTGYKQPLTLGVDAGSKHIGISAATEKYELYCEEATPRNDVVDLLSARRAFRRSRRNRKTRYRAPRFNNRVHSKHKGWLAPSVEVKIQEHITLIKRVCRILPVTFVRVETAEFDTQRLKAMLEGKPLPVGTDYQLGEMYDEYNVRQYVLKRDNYTCQCCGAHPTKTKAVKLHVHHIETRRTGGNAPNNLITLCTACHKALHAGKVTLDGKKRGKPLKDASFMGIMRKTLMERLLKELKIPVQGTYGYITKYLREKHSIPKSHTNDARCISKNPLAIPCDTCYYTKAIRHHNRQLHKATILKGGIRKANQAPYTVKGYRLWDKVSYNGSECFITGRRTSGYFALKKLDGTVVSNSASYKKMRLLEVATNYITERR

SEQ ID NO: 6473 - protein, 413 aa, Sutterella sp.
LKVFVLNMRGKPLMPCSPAKARHMLKAGKAFVVRRTPFTIKLTIATGETKQDVTLGVDAGARHVGISATTEKEEVFASEVALRQDITGLLADRLAFRRARRNRKTRYRAPRFNNRVRSKHKGWLAPSVENRIQAHISRIEAVCRLLPVTKIVIETASFDIQKIRNPEVEGTGYQQGDQLGFWNVREYVLFRDGHICQHCRGRSKDPILNVHHLESRKTGGDAPNNLITLCETCHKAYHAGKIKLKVKRGQSFRAEAFMGIMRWTLLDRVRKTHPKLPVENTYGYLTKHKRIALGLPKTHCADAFCIAGNLKALRRGDFLFQQQTRKHNRQIHKCSILKGGVRKLNQAPFLVKGFRLFDKVRIGGQIGFVFGRRVRGTFNIRRLDKTVIGTDINCKKLSLLETRKTFLTELRKE

SEQ ID NO: 6474 - protein, 555 aa, Streptomyces sp.
MTTFPVGEQTHQAVLPQQPALESVGADTPGSRDETAHGHSAVSWSTGRKHGRGETGGRGIASGRRHAKSAVPAAQEAETGSGDTPTSEQDDCSYRGGIGASRVLVLARGGQPLMPCHPARARALLRKGRAAVVRQVPFVIRLKDRTRDASAVEGVQLRIDPGSKGTGLVLTDEKKELDDHGALITVRRGLVSVGLQHRGDQIRAGMRQRAGYRRRRRKANLRYRAARAHNRARRTGWLPPSVRHRVDTTFSLADRLCRQAPVVEIHVERVAFDTHSLSVGKFVQGIEHQRGPLAGTTVRGHVRARWDGACAYCGVSGVPLNVEHLRPRSRGGSHRIANLVLACAPCNRAKGSKPVGAFLADRADRLAVILPQLRAPLDDAATMNATRWQLTDAMSALGKPVDVWAGGLTAANRLAMGLAKTHTIDALCVGPLDHASGDRIVRYPADVLTARATGRGSYARTTPDSHGFPRLLRTRAKQHFGYITGDLVRAVVPRGTWSGTWTGRVSVRARGQHSVTTPVGRINVSHRYLRLLQRGDGYEWGIRPEPPQSTSRKMG

SEQ ID NO: 6475 - protein, 373 aa, Moorena sp.; identical to SEQ ID NO: 6300

SEQ ID NO: 6476 - protein, 442 aa, Lactobacillus sp.; identical to SEQ ID NO: 5193

SEQ ID NO: 6477 - protein, 419 aa, unidentified
MVYVLDINRQPLMPTTRHGKVRRLLNNHLAKAVKRCPFTIQLLYQSTKETQPVSLGVDAGSKHIGLAAATEKKVVYQEELIPRNDVVKLLSARRALRYSRRNRKTRYRKSRFNNCVHSKHKGWLAPSVEAKIQEHITAIKRICQILPVSEIHVETAEFDLQRLKAIEEGKPLPVGTDYQLGEQYDFYNTRQYVLHRDGYTCQCCGTHDNNVKLHVHHIESRQTGGNAPNNLITLCEHCHKALHEGKLKLPKRKKRGKSYRDATFMGIMRKTLLERLKKEVDVPVTGTYGYITKYWREKAGLEKSHINDAVCISKHPYVEPLDTYYLTKAVRHHNRQIHKVNFSKGGIRKRNQAPHLVKGFRLFDKVLYQGKECFIFGRRVSGRMDIRLLDGIRINASVGYKNLELLELRKAYLTERRTC

SEQ ID NO: 6478 - protein, 427 aa, unidentified; identical to SEQ ID NO: 3411

SEQ ID NO: 6479 - protein, 427 aa, unidentified
MVFVLDKSKKPVNMISHAKARILLKNRLAVVHKVYPFTIRLRDNSCVSNDKTYTVKIDPGSKHTGIAIIDDKDTVVMLAEIEHRGHIIKRDMNSRRVVRNSRRQRKTRYRESRFLNRTKPKGWIAPSVKSIADNVINFIKKYKKLLNITKVMIENVSFDTAQMSSDTKLIGIGYQQGPLYNTNLREFVFSRTNGRCSYCGAKATEIDHIIPRAQGGSNSVHNLTPACRSCNQKKSNLSLKDFGEIMNKDYSHLEPKKLPKDAAIVQLARNYMVREITKLVPDTTTHDAWLTKCNRDSLGLSKQHYYDALSVGEVPNKFDFFTDKILVISAKGRGSRKMCKVDKYGFPRTAAKASKSVEGFQTGDIVKAVVSNGLKAVEYLGRVTVRSTGRLNIKTKSGLTKDIGYKYCRLIQRGDGYSYKYKERSLT

SEQ ID NO: 6480 - protein, 414 aa, unidentified
MVYVINKQGQALMPTERFGKVRRLLKNSLAHVVCRIPFTIQLDYDTTDYTQPVSLGIDAGSKHIGISATTSEKELYAADVELRNDIVDKLSTRRELRRTRRSRLRYRKARFNNRVSSKRKGWLAPSVENKIQTHLTVVEKIHKFLPITNIVVETASFDIQKINNPSISGSEYQQGEQLDFFNVREYVLFRDNHTCQHCKGKSKDKVLNVHHIESRKTGGDSPNNLITLCETCHKAYHRGEFKLNVKRGKSFRDAVFMGIMRWSFYDRLKNIYPNVSMTFGYITKNTRTTNNLPKEHYVDARCISGNPVAKPLGYYFYQKKVRCQNRQIHKANFLKGGRKKLNQAPFLVKGFRLFDLVEYQKELYYIFGRRSNGSFDIRKLDGTKVNKGSINCKHLRLISTRKSILIEKRTQVNL

SEQ ID NO: 6481 - protein, 432 aa, unidentified; identical to SEQ ID NO: 6011

SEQ ID NO: 6482 - protein, 453 aa, unidentified
MMTAVLSSMGVRLMPTTCFRARKLIKSGKAVIHSHNPFTIRLTQRENGGTQPIEYCCDTGYQHIGISIKSAKHEYVGVQIDTLKNEKKHHQDAITYRRTRRNRKTRYRAARFDNRKATKSKGWLAPSIRHKKDIHLAQVQKYAKVFPITSIVFEMGEFDTQKLKAIEEGRPAPVGIEYQQGEQYGFDDVRNAVFTRDGYRCVCCGRGIENGAILHAHHLKYRSLGGTNRMGNLVTVCDRCHTPVNHQKGGLLWKLMDKYKVKNFKGATFMTAVRWQMYDELKSMFPDTEIHLTYGSRTKEARRLLSVRKSHINDAYCMGDFHPKHRSKRWLYIKKRRNNRVLAKFYDAKYIDSRDGKKKSGQELFSGRTKRNRELNAENQHRYRQLKVSKGRVSIRRQHYSIQPGDTVIYEGKKHITKGVQNLGTYLKIGEKVVPVKKIHIYRYVGGYIRQMM

SEQ ID NO: 6483 - protein, 471 aa, Acidiferrobacter sp.
MAVLVLDRRKRPLMPCSERRARVLLARGRARIHRIVPFTIRLVDRLQEDSTLQPLRLQADPGSKGTGLALVREQETVDEVTGAMIRTIVVVMLLEIAHRGQTLHEVLTQRRAFRRRRRGNLRHRPDRFDNRTRPEGWLAPSLQHRVDTTASWVDRLCRWAPVTSLSQELVRFDTQQMQDPEIAGVMYQQGTLAGYEVREYLLEKWGRKCVYCGQEGVPIEIDHIHPKSRGGSDRVSNLTLACHDCNQAKGNSPLEQFLAKQPEVLRRIQAQAKTPLKDAAAVNSTRWALVQRLKATGLEVEVASGGRTKWNRHRLHLPKTHSLDAACVGHVDAIHCWQQPVLTIKATGRGSYQRTRLTRHGFPRGYLTRNKSAFGFQTGDLVRAFVTSGKKAGRYLGRVAIRASGSFNIQTATGLVQGIPHRFCTLIQRADGYGYALTQRAFDIGEAGTGAAYAAALSLPGLNPRVSRVIG

SEQ ID NO: 6484 - protein, 431 aa, unidentified
MPNKVYVINKHGRPLMPCSPAKARHLLDEGKAKIKKRTPFTIQLVYGSSGYTQEVILGVDAGSKTIGVSASTKKEELFAANVIPRNDVVDLLSTRRESRRARRNRKTRYRKPRFDNRVRSKHKGWLAPSVEVKIQEHITSIKRVCRILPVSKVVVETAEFDLQLLKAIADGKPVPQGEDYQKGEMYGHYNVRQYVLWRDDYTCQCCGAHATKKKEVRLHVHHLESRKVGGDAPDNQVTLCESCHEKLHKGLITEKDFKKRKRRSTRDATFMGIMRKTLMQRLCSELPIPVVETRGYITKATREKLRVLPKSHINDALAIAQGKQGFNVGYLPGILQIDKIYTIRPVRHHNRQLHKAAILKGGIRKSNQAGKYVFGYRLFDKVQFNGQDCFIWGRRTTGIFTIKTINGKMIKDGISFKKLKLVEKSTSYLIA

SEQ ID NO: 6485 - protein, 412 aa, unidentified
MIYVLNQNGQPLMPTKNHAKVRILLKSKKAKVIRRCPFTIQLMYSSTNYTQSINLGVDAGSKHIGISATTKNKVLFESDVELRNDIVNLLSTRRQNRRTRRNRKTRYRKPRFDNRKRKDGWLAPSVQNKVDTHLTVIRKVHEILPVSKIIVEVASFDIQKIKNPTIGGTEYQQGSQLDFWNVREYVLFRDNHTCQCCKGKSKDKILNVHHIESRKTGGDAPNNLITLCETCHTGYHKGTVNLPKRIKRGMSFKDASFMGIMRWAFYNKLKEIYPNVSLTYGYITKNTRIENKLPKDHYIDARCISGNPKAVSDLGVYYQKKVRCHNRKIHKNTIFKDGYRKRNQAPYEVIGFRLYDKVRWKQQNCFIFGRRSTGRMDLRLLDGTKVNASVGYKNLKMLEMCKNILIELRMEV

SEQ ID NO: 6486 - protein, 447 aa, unidentified; identical to SEQ ID NO: 3915

SEQ ID NO: 6487 - protein, 447 aa, Marinobacter sp.
MSVFVLDRRKQPLMPCTERRARLLLDRRRAVVVRAYPFTIRLKDRTGGITQPVRIKIDPGSKTTGIAVVRENSQKQHVLALMELAHRGRPISKSLDQRRAFRRRRRSQLRYRAPRFLNRTKPKGWLAPSLQHRVDTTRSLVNRLRSLVPVVSISQELVRFDTQKMENPEVSGVEYQQGTLLGYEVREYLLEKWGRECAYCTDKDTPLQIEHIDPKVNGGSSRISNLTLACRPCNQEKGRQPLADFFASSKRLKNHQARLDRILKQCKKPLRDASAVNSTRWTLYQTLKQTGLPVEVGTGGRTKFNRCRLRIPKTHALDAACVGEVEIVEGWDVPTLAIKATGRGSYKRTRLTKHGFPRGYLMRQKQVQGFQTGDMVRAVVPSGLKMGTWLGRVAVRKTGSFNIQTNSGAIQGISHRHCVLTQRADGYGYHIQPNQPKEEGDRKNESR

SEQ ID NO: 6488 - protein, 414 aa, unidentified; identical to SEQ ID NO: 2588

SEQ ID NO: 6489 - protein, 512 aa, unidentified
MSTVYVLNKDGKPLMPTTRGGHVRHLLKEQKARVVRTNPFTIQLLYETDNLVQPLYLGIDPGRTNIGVAVVKTDGTAVFTAHLETRNKEIPKLMQGRKKARRARRTNGRRCRRQRRAKANGTISKKCVKQATAQNGSVSKRANEIGVIKRHLPGCEKEVLCIGIKNKEAKFSNRTRPEGWLTPTANQLLQTHINLVKKIQKFLPISDVVLEINKFAFMRLDNPNVQKWQYQQGPLYQKASLEEAVSEMQEHHCLFCKNTIDHYHHVVPQSENGSNTIGNIVGLCTKHHDLVHKDTSWQEKLAKKKTGLNKRYGALSVLNQIIPALTKELSSLFPKHFFATNGKSTYDYRAAHGVSKDHWLDAYCIAGSVLPNDACDNNINNHVPYELKQFRRHDRRALHKENMGRVYTLNGKSVATNRHKAIKQTTDSLEEFRQRQPNDVCKLKVKEHHPEYRNPKRNFPGCVFLVGKHTHVMQGTSGSHNGKADGYYDTNGNSYSSGKCKFVVKNEGIVFT

SEQ ID NO: 6490 - protein, 414 aa, unidentified
  source 1..414: note = Lachnospiraceae bacterium UBA6986
MRMVYVLNQNGQPLMPTENHAKVRILLKQGKAKVVNKCPFTIQLLYSSTNYTQKVTLGVDSGSKHIGLSATTKNKVLFESDVELRNNIVDLLSTRRELRRSRRSRKLRYRKPRFNNRKRSDGWLAPSVKQKVDSHITMIAKVHKILPISNIIVEAASFDIQKIKNPAISGADYQQGEQLDFWNVREYVLFRDGHKCQCCHGKSKDKILTVHHIESRKTGGNAPNNLITLCETCHTGYHKGIVKLPKTIHRGMSFKDATFMGIMRWALYEKLKTIYSDVKLTYGYITKNIRIKNGLPKDHYIDARCISGNPNAVNNGDVYYYKKVRCHNRQIHKNTILKGGYRKRNQAAYEVKGFRLYDKVLWKGQKCFIFGRRSTGRMDLRLLDGTHLNASVGYKNLKLLKMRSNYLIEQRKVG

SEQ ID NO: 6491 - protein, 442 aa, Moorena sp.
MHLTMQNYVFVIDTNKQPLNPISPKKARRLLDKGKAAVFRMYPFTIILKTAVDNPTISPCQIKIDPGSRFTGFALVQNNQVIWAMELEHRGGLIKKKLEARSAVRRGRRNRHTRYRKPRFLNRRRSEGWLAPSLKHRVLTIETWVKRLIKFCPINEIWVERVKFDTQKMQNPEISGVAYQQGELAGYEVREYLLEKWGRECAYCGKQNVPLQIEHIHPKSKGGSDSAKPTLRERVSNLCLACEKCNQRKGNKPIEEFLKKKPSLLQKIKSKAKQPLKDAAAVNTTRNKLVKVLRSVKPVVTGTGAQTKYNRTRLGFPKQHWIDAACVGDIEMLTLKTSQPLLVTCIGPGGRQKAALNKYGYPVRHNPLKPIKGWITGDIAKHQKLGIGKVTPRTKGSFGFTPLGMKGYKSCKPQDISAIHRKDGYTYSFCELLPESSRKWSS

SEQ ID NO: 6492 - protein, 439 aa, unidentified
VLDRRKKPLMPCSEKRARLLLERGRARVHRLVPFTIRLLDREQEDCALQPVRLKLDPGSRATGVALVRESQEVGADTGEVQRSAHVLFLAELVHRGHAIRAALRQRAAFRRRRRCANLRHRQSRFDNRTRRNGWLPPSLQHRVDTITSWVRRLCRWAPVSSLSQELVRFDTQALQNPEISGIEYQQGTLAGCEVREYLLEKWGRKCAYCDAENVPLGIDHIHPRSKGGSDRVSNLTLACHPCNRRKGAQGIEDFLAKDPKRLARIEAQRKAPLRDAAAVNSTRWELWRRLTATALPVEAGTGGRTKWNRHRLNLPKAHALDAACVGEVHAVTNWRVPTLNIQCTGRGSYQRTRLTKHGFPRGDLTRSKSAFGFQTGDLVRVVVTTGKKAGNYLGRVAIRASGSFNIQSATGLVQGIHHRFCTLLQRADGYGYSWTRIAI

SEQ ID NO: 6493 - protein, 532 aa, Acidithiobacillus sp.; identical to SEQ ID NO: 4458

SEQ ID NO: 6494 - protein, 453 aa, unidentified
MPVAVISKTGERLMPTSEHRARKLLKSGKAIKYSYHPFTIQLTERESGDVQPIELCVDTGYIHIGISVKSEKHEYLAEQIDTLTNEKARHDACRMYRRQKRSRKRYRQPRFNNRKRNNRWIAPSLEHKKSIHIQAILRICKVMPVTDITLEMGNFDTQVLKAREEGKPLPQGVDYQHGERYGITTLREAVFARDGYTCQCCGRAIKDGAILHVHHIVYRSQGGTNRMSNLITICDKCHTPANHKQGGKLYNWKPKIASFKGATYMTTIRWKLYNEVKALFPDIDIDIHITYGAETKERRRALDIDKSHVNDAFVMGQFHPKHRSKPICYKKKRRNNRCLEKFYDAKYIDSRDGKNRSGQELFNGRISRNHKKDSENLHQYRLQKVTPGRRAIRRQHYPIQPHDIIVYNGNKIEVSGCQHKGTRVVFSKTKKSVQISKIKLFKYAGGYSKSVFN

SEQ ID NO: 6495 - protein, 459 aa, Petrotoga sp.
MSKVFVLDTKKRPLLPCHPAKARILLKQGRAAIYKRYPFTIILKQEIANPEVQPLRLKIDPGSKVTGLAVVNDATGEVIFAGELHHRGEQIKAKLATRRTLRRARRNRKKRHRAPRFLNRKKKDGWLPPSLQSRIANVLTWVNRIRRYCPIQSITVELVKFDLQRIENPGIQGIEYQQGTLYGYKIREYLLEKYDHQCAYCRGKSGDSVLEVEHVVPKKPRHGPAGTNRVNNLVIACETCNKSKGNLRPEEWLNYLQASTNSLDQERAKNLLQVLQQLEQPLKDATVVNTIRWILFKRLKELELPLEAGSGGRTKYNRVQMGLPKAHWIDAACTGASTPEHINIDKVVVLEIKATGHGRRQRCRTDKYGFPIQHAPRAKTYLGYQTGDIVKAIIPKGKYAGIHIGRIAIRHKPSFKLIRFDVHPKYLRLLQKADGYEYMLREGSNASSPGVNSGAPGVA

SEQ ID NO: 6496 - protein, 473 aa, unidentified
LVSGQLIMAWEAIQTRRIKPHDIGEGTLRRHAAGTVSFPVLCKNRKETLMSVLVIGRNGRALMPTNPRKARLLLKKKTASVVCRHPFTIQLLYKTGCATQEGCIGIDTGSQHIGVGITCGDRVILKDEHALRSSMEKRSLLATRTVMRRGRRYRKVRYRKPKWRHHTKRMYFEKANRRGQHWRKVKTTTQSPRLKGWLPPSLQSKCDHHFRIIDRYLKYLPDPITRNLVIEAGRFDMARMNDPTIHGEMYQRGPMYDAENLRAYIFARDNYQCACCKAKAGTTRKADGTTVKLVAHHILFRSRGATDNPKYIISVCDHCHTTKAHQPGGILYSWMENNKKVARGLRDATFMNILRKRLFARYPQAAFTYGNITAADRKQLRLPKSHANDAVAISLFGKEASTVKNICQTMHYKQIRKSKRSLHEAIPRKGRKNPNTKAVRNKKNTTQANGFKLWDSVLADGKKLFICSFTGTS

SEQ ID NO: 6497 - protein, 549 aa, unidentified
MYLQVFPAHNTTKLLSSQGKHNLLLRQERLIVRDVTNVSTIYVLNKDGKPLMPTTRGGHVRHLLKEQKARVVRTKPFTIQLLYTTDNVVQPLYLGIDPGRTNIGVAVVKADGTAVFTAHLATRNKEIPKLMKKRKESRRARRTNGRRHRRQRRAKANGTISKKCVKQATAQNGSVSKRAKEVGVIKRHLPGCEKEILCIGIKNKEAKFNNRTRPEGWLTPTANQLLQTHINLVKKIQKFLPISDVVLEINKFAFMALDNPDLQKWQYQQGPLYKKESFESAVSKMQEYHCLFCRKPIDNYHHVVPRHKNGSNTIGNIVGLCTKHHDLVHKDTAWQEKLAKKKTGLNKKYGALSVLNQTIPALTKELGVLFPKHFFVTTGKSTYDYRAAHGVSKDHWLDAYCIACSVLPNDVCDSEINNRVPHELKQFRRHDKRALHKVNMNRVYTLNGKKVATNRHKAIEQTTDSLEEFRQNHPDDVCKLKVKEHHPEYRNPKRNFPGCVFLVGKHTHVMQGTSGSHNGKADGYYDTNGNSYPSGKCKFIAKNEGITFV

SEQ ID NO: 6498 - protein, 406 aa, unidentified; identical to SEQ ID NO: 3980

SEQ ID NO: 6499 - protein, 423 aa, Clostridium sp.; identical to SEQ ID NO: 5342

SEQ ID NO: 6500 - protein, 473 aa, unidentified; identical to SEQ ID NO: 3562
  source 1..473: note = uncultured beta proteobacterium

SEQ ID NO: 6501 - protein, 498 aa, unidentified
MPTTRGGHVRHLLKEQKARVVQSNPFTIQLLYETNDVVQPLYLGIDPGRTNIGVAVVKADGTAVFAAHLETRNKEVPKLMQDRKKARRARRTNGRRCRRQRRAKANGTISKKCVKQDTAQSKNPSKRAKEIGIIKRRLPGYKKDVLCIGIKNKEAKYTNRTRPEGWLTPTANQLLQTHINLVRKIQKFLPISDVVLEVNKFAFMRLDNPDIQKWQYQQGPLYQKGSLENAVSEMQEHHCLFCDKPIDHYHHVVPKSENGSNTIANIVGLCAEHHNLVHKDVAWQEKLVEEKTGLNKKYGALSVLNQIIPALTNKLSVLFPKHFFVTAGKSTHDYRATHGVSKDHWLDAYCIACSVLPIDVCDSTINNCVPYELKQFRRHDRRALNNENMNRVYTLNDKVVATNRHKATEQEAASLEEFRKEHPNDVCKLKVKEHHPTYRNMNRNYPGSVFLVGKQIHVMQGIASSKDGKATKYNDTRATTIAAGKCKFVAKNSGILFV

SEQ ID NO: 6502 - protein, 413 aa, unidentified; identical to SEQ ID NO: 2636

SEQ ID NO: 6503 - protein, 358 aa, unidentified
VLYESEVELRNDIVELISTRREARHARRNRKTRYRAPRFDNRTSSKKEDWLAPSIRQKIHSHLKVIADVHEILPVSKVIIEVASFDTQLLKAAEEGRPLPQGTDYQFGEQLGFYNTREYVLFRDNHTCQCCKGKSKDKVLNVHHIESKKVGGNAPNNLITLCETCHTGYHKGVVKFPSSIRRGMKFNDASFMGIMRWPVYSRLKEIYPSVELTYGYKTKNMRIENQLPKEHYIDARCISGNPKAKSDGIVYYQKKVRCHNRQIHKFKVNKDGLRKLNQAPYLVKGFRLWDKVLYNSEECFVQGRRSSGFFQLKKLDGTMISASASCKKLSLVETGKHFITERKRAIPPTVEECGFSCL

SEQ ID NO: 6504 - protein, 423 aa, Ktedonobacter sp.
MVFVLDKHKQPLMPCTPKRARLLLAQGRAVVHRIKPFVIRLKDRRALDSVLQPVVLKLDPGSKTTGSALVREEATPDGPVHYALHLAELTHRGEAVHRALLQRASYRRRRRSANLRYRPCRVALRRRAPSWLPPSLRSRIGNVLTWAQRYAHWAPVSRIEVERVKFDLALMQNPEVAGVEYQRGELFGWEVRAYLLEKFQYRCAYCGRAHTVFELDHIVPRSRHGSNRVSNLALSCHDCNIAKGKQTAAEFGHPEVEAQAKRPLGDTAAVNATRYALVEALRVLGLPIGTWSGGRTRWNRDRFGIEKAHCLDALCVGTLAGVHVPPLCPLAITAQGRGRHQRTNVNGSGFPRGYFKREKRVRGFSTGDLVRAEVPAHLKTGGVRLGRVAVRASGSFRVGKTDGINARYCRVLQRMDGYSYASS

SEQ ID NO: 6505 - protein, 456 aa, unidentified; identical to SEQ ID NO: 4017

SEQ ID NO: 6506 - protein, 496 aa, Streptomyces sp.; identical to SEQ ID NO: 4777

SEQ ID NO: 6507 - protein, 420 aa, unidentified
MQYVYVLNKHGEPLMPCSPRKARLLLKQKKACVIKRTPFTVKLLHGSAGYKQPVTLGVDAGSKHIGISATTEKHELYREEATPRNDVVDLLSARRAFRRSRRNRKTRYRAPRFNNRVHSKHKGWLAPSVEVKIQEHITLIKHVFRILPVTLVRVETAEFDTQRLKAMLEGKPLPVGTDYQLGEMYDEYNVRQYVLKRDNYTCQCCGAHSTKTKGVKLHVHHIETRRTGGNAPNNLITLCKACHKALHAEKVTLDGKKRGKPLKDAAFMGIMRKTLMERLRKELKIPVQGTYGYITKYLREKNGIPKSHTNDARCISKNPLAIPCDTCYYTKAVRHHNRQLHKATILKGGIRKANQAPYIVKGYRLWDKVAYNGTECFITGRRTSGYFALKELDGTVVSNSISYKKLRLLEAATNYITERK

SEQ ID NO: 6508 - protein, 423 aa, Nostoc sp.; identical to SEQ ID NO: 2734

SEQ ID NO: 6509 - protein, 428 aa, unidentified
LKVFVLNMRGRPLMPCSPAKARHLLKAGKAVVRRRTPFTIQLRIATGETKQSVTLGVDAGAKHVGLSAATEKEEVFASEVELRQDITGLLAARLSLRRDRRHRKTRYRAPRFLNRVRSKHKGWLAPSVENRIQAHMSRIDAICGLLPVTKIAIETASFDIQKIKHPDVEGTDYQQGDQLGFWNVREYVLFRDGHVCQHCHGHAKDKILNVHHLESRQTGGDAPNNLITLCETCHKACHAGKIKLKVKRGQSFREEAFMGIMRWTLLDRVRKAHPGLPVENTYGYLTKNTRITLGLPKAHCVDAYCIAGNLKAVRRGVHLYQRQVRKHNRQIHKCTVLSKTLKDGTKIGYRKLNQTPHLVKNFRLFDKVRCLGQTGFIFGRRSSGYFDVRRLDGVKISSCINYRKLTLLEKRGTCLTELRKEDGASSPV

SEQ ID NO: 6510 - protein, 501 aa, Desulfotomaculum sp.; identical to SEQ ID NO: 2400

SEQ ID NO: 6511 - protein, 415 aa, Beggiatoa sp.
MPCHPARARKLLKKGKAAVYRRYPFTIIMTHRLCGDLQPIEIKFDPGSRTTGIALVGHFDRGSEVIWAGNLNHRGLQVKSNLVSRRAIRRSRRNRKTRYRPARFLNRRRPKGWLPPSLRSRVLNVKNWMLKLSRLAPLTQIAIETVRFDTQKMQKPEISGIEYQQGELVGYELREYLLEKWDRQCAYCGAKNVPLEIEHIQASSKGGSNRVSNLTLACSPCNFDKGNKDIKEFLKRKPKRLKKIQAQAKASLKDAAAVNATRYATGNILKCFGLPITFSSGGRTKFNRLKLGYSKDHWIDAACVGESGSHVVIPKTITPLIITAKGRGSRQKCRMNQYGFPRTGPKKQKRVKGFQTGDIVKAVVTKGKKIGTYIGRVVVRAKGSFDIGSGEEKVGGISYKYCQLLQRSDGYEYLK

SEQ ID NO: 6512 - protein, 529 aa, unidentified; identical to SEQ ID NO: 3816

SEQ ID NO: 6513 - protein, 452 aa, unidentified
VLRVSETPPNMGEGLQPTERSRRQNLRVFVLNKRGQPLMPCSPAKARLLLKEKKAVVRHRTPFTIQLTQATGETVQPVTLGVDAGSKFIGLSASTEKAEHYASEAELRTEVVDLLSSRREMRRARRNRKTRYRAPRFDNRIHSKNKGWLTPSVENKINTHLSCVDNVRKCLPVTKIVVETAAFDIQKIKNPDIEGTDYQQGDQLGFWNVREYVLCRDGHQCCHCHGKSKDPILNVHHLESRKTGGNAPNNLITLCETCHKAYHDGKITLKQKRGQVFRDAAFMGIMRWTFFNRLKAQCPEIEVRNTYGYLTKNTRIRHGLEKSHHTDAFCIAGNLEAKRLGVYFFQKQTRKHNRQIHKMSILKGGVRKLQQAPYEVKGFRLFDKVRYDGREAFIFGRRSSGYFDIRLLTGEKVSAGVSYKKLVLLEKRKTFLTQLIKENAIPPATEVAGFLA

SEQ ID NO: 6514 - protein, 413 aa, unidentified; identical to SEQ ID NO: 3290

SEQ ID NO: 6515 - protein, 407 aa, Methanohalobium sp.
MHVYVLSKNKKPLMPTRPAKARRLLKSGKAKVVRRTPFSIKLLYETTEYTQPVIAGMDSGSKYIGCAAVANDEVMYQSEIKLRDDVSKKMKDRADHRMNRRYRKTRYRKPRFNNRGNSKKENRIAPSIKSKVQSHERERRFVESILPVKKWIVETTSFDIHKITNPNVSGTGYQNGDLKGYYNIRIYVLHRDDYTCQKCKNKSKDPKLECHHIIFRSKGGTDRPNNLITLCETCHSKLHKGEFSINKNPSNTKHPTEMGIVRSQIRKLNWKFQETFGYITKYKREQKLKLEKTHYNDAVAICCDENNPNLQLSNVVYYKKHVNKGDYQQTKGVKSEKKIPTGKLHGLKKFDFIETPYVSGFVKGKRTSGNFSIMDIFGNTSKKNPNVKKNCRRISARCTTLTQQIQI

SEQ ID NO: 6516 - protein, 398 aa, unidentified
MPCGPRKARLLLKEGKAKVVYRVPFTIQLLYGSSGYRQPIYCGRDPGLTQGVGAIRGDGRILFLAEVTGRKDISELIYQRRCLRRSRRHRKTRYRKPRFDNRRRSEGWLPPSVAHLLYEHQKVRRLVESILPVTAWADEINRFDTHRMWNPGVSSRGYQEGPLKGKFDVREYVLERDSYWCVLCGSPEKREVHHIIWRFRGGSNRPRNLVTLCGDFHSKVTSGEIPLSAIVESYRWPARLNAINKRFLEGGSVSVPAYRVKRAREELGLDKTHASDALAVICSAFHLKPDFLEMPPVYRGRFVRRENRQLHRANPAKGGKRPRANANRYLMNKHGVRLTKYDLVEYRNGDRRLIGYINTLRSSGTARVSNWQGRELANVSVNQLKKLQNADTLIWEVD

SEQ ID NO: 6517 - protein, 421 aa, unidentified
MQYVYVLNMHGEPLMPCPPRKARLLLKEGKARVLKRTPFVIKLLHGSAGHKQPVVLGVDAGSKRVGLSVCTENRELYKEELTPRNDVVELLSARRQYRRSRRNRKTRYRAPRFDNRVHSKHKGWLAPSVEVKIQEHITAIKRVCRILPIVLVRVETAEFDTQRLKAMLEGRPLPVGIDYQRGEMYNEYNVRQYVLKRDRYVCQHCGAHPTPEKPVRLHVHHLESRHTGGNAPNNLIVLCEHCHKALHGEKITLDKGKKRGKSLRDAAFMGIMRNTLLARLETELSVPVQQTYGYITKLLREENHIEKSHTNDARCIAGFPKAAPCDTLYCTRAIRHHNRQIHKAKILKGGIRKKNQAPYLTKGFRLWDKVRYNGEECFIAGRRSSGYFALKKYDGTVISNGASYKKLTLLEAATNYITERG

SEQ ID NO: 6518 - protein, 512 aa, unidentified; identical to SEQ ID NO: 3776

SEQ ID NO: 6519 - protein, 379 aa, Arthrospira sp.; identical to SEQ ID NO: 2972

SEQ ID NO: 6520 - protein, 433 aa, Microcystis sp.
MQNYVFQVDADKRPLDMIPPARARKLQARGKAATFRTYPYAVVRPHAIDSPNTKEYILKIDPGAVWTGFAIQCGEDIIFRLELKHRGVEIKESLAKRSGFRRSRRSRQVRYRQKRFNRKKPEGWLPPSLRHRLETTRTWIKRFMALCPITTIEIEQVKFDLQKLENPEIEGCQYQQGTLLGYEIREYLLEKWGRACVYCSATNLPLQIEHIQAKSNRGSNRIGNLTLACPECNQNKGSQDIRDFLAAKPELLGRILAQAPQPLASATAVNATRLAIVEMAQELCDDVRCWTGGRTKYNRVRQGFPKSHSIDAACVGESGANIKVLVAQPLMVESKGHGTRQAVRCNASGFPALGKDGRPIKAKAGYRHCQSGDIVKFCLDKDRKNARSGIYTARVKTQTPKGFEVKINGSRVAQKMEHLIRFVHRNDGYAYSF

SEQ ID NO: 6521 - protein, 439 aa, unidentified; identical to SEQ ID NO: 3280

SEQ ID NO: 6522 - protein, 459 aa, unidentified
LRQAIKSSEGKERCRLHQTPSNIDEGCLLPERAWRQNLRVFVINQRGKPLMPCSPAKARVLLREKKARVKRRTPFTIQLTTATGEARQDVSLGVDAGYRHVGLSASTEKAELYASEAVLRDDITDLLSARLALRRARRSRKTRYRAPRFLNRVHSKNKGWLAPSVEQRIASHLKLVENVCRLLPVTKITVETASFDMQAIKNPDIKGAEYQQGEQLGFWNVREYVLWRDGHQCQHCRGKSGDPILNVHHLESRRTGGDAPNNLVTLCETCHKAYHAGRIDLKLKRGRSMRAEAFMGIMRWTFFNRLKEIYSGKTVENTYGYLTKHTRITHGIEKSHCADAYCIAGNLRAERLPDYLWQKQVRKHNRQIHKLTIGKGGIRKRQQTPFEVKGFRLFDKVRLGDEEGFIFGRRSSGYFDVRRLDGQKLSAGVSFRKLHLLEKRTTYLTVLLPRLKTRVSAPE

SEQ ID NO: 6523 - protein, 453 aa, unidentified
MNTVAVISNTGEKLMPTTSYRARRLIKSGKAIAYKYRPVFTIQLIERKTGEVQPIEYACDTGYQHIGISIKSATKEYVNRQYDLLLNEPEKHNDRLKYRRTRRNRLRYRAARWNNRKSSMICKDGFAPSIRNKRDRHIDLCKSFCEIMPITYIIFEMGQFDTQVLKAIEEGKPIPEGTDYQQGEQYGYATLREAVFNRDNYTCIVCGKSALKNGAILKIHHLGYLQNDRTNRMNNLATVCSCCHTSKNHKPGGKLYELKPKFKNFKGATFMTSVRWSMLDSLRESFPEIPVHVTYGAYTKMARRTLNVKKDHSNDAYCMGKLHPKHRTDWEHLKKCRRNSRVLSKFYDAKYVDKRDGSIKSGSQLSCGRTNRSVSRHTDSDERQYRLCKVSKGKFATRRQHYQYRPGDTVWIENKKYKVKGIQSNGKTVNVFERSFSVNKIQKCVHTGAFTFV

SEQ ID NO: 6524 - protein, 417 aa, unidentified
MPCSPAKARLLLKEKKAIVKRRTPFTIQLTIATGEARQPVTLGVDSGYKHIGLSATTEKAELYASEVELRQDITDLLSARLALRRSRRSRKTRYRAPRFDNRVASKRKGWLAPSVENRIAAHMSRVEAVMRVLPVTAITVETAAFDTQLLKNPDIAGEAYQQGEQLGFWNVREYVLFRDGHVCQHCRGKSKDPILNVHHIESRRTGGDAPNNLITLCETCHKAFHRGEIKLKVKRGKSFKAETFMGIMRWTLFERLKKAHPELRVRNTYGYLTKHKRISHGIAKSHCADAYCIADNLGAKRLEGFFFQKQTRKHNRQIHKLSILKGGLRKKNQAPYEVKGFRLFDKVICKGEEAFIFGRRTSGSFDVRRLDGTRISAGINYKKLRLLEPRTTYLTEFRMEAALPPLHECRGFRAEFL

SEQ ID NO: 6525 - protein, 427 aa, unidentified
MSKVFVIDSEKRPLEPIHSAQARQLLRNKKAAVYKRFPFTLILKESRSEAPVHPLRLKIDPGAKHTGIALVNDRTGEVVFAGELKHRGFAIRESLTSRRQLRRSRRNRKTRYRQTRFLNRTRPDGWLAPSLQSRVDNIKTWVERLCKLAPIEAISQELVRFDMQLMRNPEIQGKEYQQGTLAGYETREYLLEKWSRQCAYCGVKDVPLQIEHIHPRAKGGSNSITNLTLSCEKCNTNKGTKDIKDFLKKDLSRLEKILKQAKRPLVDAAAVNTTRFALLEVLKSTGLPVETGSGGLTKFNCNQQNLAKSHWLDAAYVGKSTPKLIIKGVKPLLITANGHGARQSCRTDKFGFPSRHVPREKIHFNFQTGDIVKAIVTTGKKVGQYVGKVAIRSSGSFNISAKNGLIQGISHKFCQRIHAKDGYSYAT

SEQ ID NO: 6526 - protein, 406 aa, unidentified
MVYVQDIDGKPMMPTTRHGKVRRLLKDNKAVVVNTCPFTIKLTYKTSDYKQEIVLGVDAGTKHVGLSATTKSKELYSGEVILRNDVVELLSTRRESRRARRNRLRYRKPRFENRVKSKHHGWVAPSVRHRIDAHIRVIDNVCSILPISRIIIEVAQFDTQKINNPNISGNEYQKGDQLGFWNVREYVLARDGHKCQHCKGKSKDHILNVHHIESRKTGGDSPSNLITLCETCHKEYHKGNIDLKVKRGKSLRDAAVMGIMKWKLYDELKSKYDNVSMTFGYITKYNRIKYGIEKSHTSDAFVISRNFNAKRIERQYLKRLIRRHNRQIHKMKILKGGKKKNNQAPFEVFGFRLFDKVLYNNEINFIYGRRKSGCFDIRDFDGKNSKNVTYKKLKLIRGKRYPIILK

SEQ ID NO: 6527 - protein, 415 aa, Bacillus sp.; identical to SEQ ID NO: 2671

SEQ ID NO: 6528 - protein, 413 aa, unidentified; identical to SEQ ID NO: 3751

SEQ ID NO: 6529 - protein, 413 aa, unidentified
MTNYAFVLDANGKQLAPTKEQKAWFLIRKKRATLVSKYPMVIQLKKEISDEQICKDEICCGIDDGGIHVGLALVQKCKTKNKVIFKGTIEQRNDVKHLIEVRKGYRNYHRFHKRYRQARFNNRKSSKRKGRIAPSIFQKRQATIRVIKQLNKWINIANYSLEDVAIDIRALTDGYKSYRWQYQQSNRLDENIRKAVILRDGCKCMECGKSNCRLEVHHIKPRRLNGSNTLDNLISLCEKCHQRTEGQEELYMDRYFSILSSTDNKNLDYAQHVMIGKKWLREQLSELGTLILTTGGDTANKRIDWNIEKSHANDAICITGLQPDACNVKEWTIKPMRRQSKAKTDNVLGIKHRDLVEYTFKNGETHRGYVTALYPKQNAINFQSPTKHCKKVNAKKCKLIWKYSKIYWLDNVL

SEQ ID NO: 6530 - protein, 413 aa, unidentified; identical to SEQ ID NO: 2636

SEQ ID NO: 6531 - protein, 440 aa, Lactobacillus sp.; identical to SEQ ID NO: 5150

SEQ ID NO: 6532 - protein, 470 aa, unidentified; identical to SEQ ID NO: 2925

SEQ ID NO: 6533 - protein, 424 aa, unidentified
MVYVISKDGNPLMSCCNVIARLLLKQGKAQVKKREPFTIKLNYETTNYLQNLTLGVDTGSRTIGTAVSNDNGDILYMSEVVVRNDITEKMTQRAKYRRNRRNRKTRYRKARWLNRANSIKNDRFSPTMRSKLYSHVKEIECIKSILPITQMVFETGQFDTHLMKNPSLANPRIRRWGYQKGPNYGYENTKAMVLNRDNYTCQCCKGKHKDSKLEIHHIVFRSKGGSGEASNLITLCHTCHKDLHSGKINPKLKGRIKGNLKFATQMNTIRKQLFRLYPNAIETFGYITKANRLQLGVNKEHYYDACTIATQGNRFTIKSNLYKKKCISDGDFQQTKGICSKQPIVTNKIHGFRKFDKVRYLGKNYFIKGRMSTGYAVLMDINGKKADFSNMPKGFKTPKMANFKRIEARTTWMTTTVVLTSNIA

SEQ ID NO: 6534 - protein, 415 aa, unidentified
MENRIEYCFVVDKNNRPLTPTKVNKGWYLVRKSRAKLKSKYPMVIQLEKEVKSDEDDESHIVCGIDDGSAHVGLAIVQKCPTKNKVVFKGTIEQRQDVKHLMDVRRGHRRYHRYHKRYRQARFNNRSSSKRTCRLAPSIKQKKDAILRVLYQLNKWVNIQEYHLEDVCIDIRALTDDYKPYRWQYQKSNRLDENLRKATILRDECRCQECGKSNCVLEVHHIRARKYGGADTIGNLITLCSGCHQKTEGRERDFEDRYFNMIKSKPKRFDYAMHVMQGKTYLREKISELGSLHLTNGGETANKRIEWNMEKSHGNDAICVTDCIPDNCDVKEWIIKPMRRKSKAKTNNLLGIRHRDLVSYTYKNGETHTGYVTALYPEQLVLNFQSKTKHCKKVNARKCRLLWKFNKIYWLEQCV

SEQ ID NO: 6535 - protein, 458 aa, Lactobacillus sp.
LKGVGMMSEIKKVDYIYVVDSNGTPLMPTSRLGMVRRWLKTGQAKWFGNSRNTIQFVRPVTTNTQELTLGVDAGFHLGLSVVGNNRECYVSESLRKSEKDRITSRRESRRTRKNRLRYRKARFDNRRRKEGWLAPSIQHRLDFTIKEIKRLYMFLPIANLVVEVTPFDNQKLLNPDIQGWQYQKGKMYGFKTIKDYLLARDNYRDALDGKQYPASQLRVHHLVQRKDGGSNQPDNLVLLSDINHNQANHNNGILAKLKENRQKTIDYRGAYFMSVLATRLSNYFDNFTITQGYLTANLRQKYEIEKSHLNDAFVIAGGTDTTLRTNNVYSRQKLRNNNRVLQKFYDAKYIDSRDGKKKTGKELSSGRTRRSRELNYTNLRQFRKEKVKKGRISIRRGHYQLRPHDVVLNTRTNRIEIVKGVQNSGTVIKFQTGKTCSIKSVVSLYHVNGILEKKMENV

SEQ ID NO: 6536 - protein, 430 aa, unidentified
MPKVYVLNRHGRPLMPCTPAKARHLLDAGKAKVRHRTPFTIQLLYGSTGYTQEVILGVDAGSKTIGLSAATETEELFSAEVKPRNDVVELMSARRQFRRAQRNRTTRYRKPRFDNRVRSKHKGWLAPSVEVKIQEHMTAIRRACAILPVSKVVVETAEFDLQLLKAVAEGKPVPQGEDYQKGEMYGHYNVRQYVLWRDSYTCCICGVHGSVRKGVPLHVHHLESRRVGGDAPDNLVTLCTACHDKLHKGIIMAADIKKRKRRSTRDATFMGIMRMTLLRRLREQLPVPVVETRGYITKATRENLLVLPKSHANDALAIAHGPQGFRAEHLPNIRQADRLYTIRPVRHHNRQLHKATILKGGVRKTNQAEKYICGFRLYDKVLYNGIECFVWGRRTSGSFLLRQLNGEKVKDGVSYKHLKLLERSQSYLVA

SEQ ID NO: 6537 - protein, 413 aa, unidentified
VLNIEGQPLMPCKEAKARKLLKQNKAKIYKREPFTIQLLFVCENQTQDITLGVDAGSKHIGLSATTKEKELYAADVELRNDIVELLAIRRQNRRARRNRLRYRKPRFNNRVYSKKSGWLAPSVEQKIRTHFRVIEDIHKLLPITKIVVETASFDIQKIKNPEIHNEEYQQGEQLGFWNVREYVLFRDNHTCQCCKGKSKDKILNVHHIESKKTGGNAPNNLITLCETCHKGYHNGTVKLLKTIKRGMSFKDAAFMGIMRWSFYDRLKEAYPNVFMTYGYITKNTRVKCNLPKEHYIDARCISGNPNVEPLGYYFYQKKVRCHNRQIHKAKILKGGKKKMNQASYLVKGFRLFDKVEFDGQVGFIFGRRNSGYFDVRKLNKEVISRSASYKKLTFLETRKSLLIEKRIQGVGII

SEQ ID NO: 6538 - protein, 480 aa, unidentified; identical to SEQ ID NO: 2726

SEQ ID NO: 6539 - protein, 512 aa, unidentified; identical to SEQ ID NO: 4031

SEQ ID NO: 6540 - protein, 428 aa, unidentified
LKVFVLNMRGQPLMPCSPAKARHLLKAGKAAVRRRTPFTIQLRIATGETKQSVTLGVDAGAKHVGLSAATEKEEVFASEVELRQDITGLLAARLLLRRERRQRKTRYRAPRFLNRVRSKHKGWLAPSVENRIQAHMSRIDAICGLLPVTKIVIETASFDIQKIKHPDVEGTDYQQGDQLGFWNVREYVLFRDGHVCQHCHGHAKDKILNAHHLESRQTGGDAPNNLITLCETCHKACHAGKIKLKVKRGQSFRAEAFMGIMRWTLLDRVRKAHPGLPVENTYGYLTKNTRITLGLPKAHCVDAYCIAGNLKAVRRGVYLHQRQVRKHNRQIHKCTVLSKTLKDGTKIGYRKLNQTPHLVKNFRLFDKVRCLGQTGFIFGRRSSGYFDVRRLDGVKISSCISYRKLTLLEKRSTCLTELRKEDGASSPV

SEQ ID NO: 6541 - protein, 466 aa, unidentified
MSVFVVGLNGCRLMPVSERKARLLLKGGKASIYRKVPFTIKLNYKTGSTVQPGYLGIDTGSQHIGVSVVQKDGTVLHKEEIGLRDSMSKRKLLESRASSRRGRRYRKTRYRHPKWKPKTKRTYNEKADRKGRHWKKQKNTFTSKRQAGWLPPSLQSKTDHHIQWIRKLLEGYRLSIELGRFDPARMKDPEIHGELYQKGPQYDYENVRAYVLARDGYTCRVCKKKGGKLHVHHILYRSRGASDNPKYMAAVCSKCHTTENHLPGGILYQWMQDQKKFTRGLRDATFMNILKKRLRKAFPDAVFTYGNITKADREKLELPKSHGNDATAIALVKTEVKSVKDEEPVIHIQQVRRKKRSLHEETPRKGRKEPNRTASRSDKNTKSVTVTKGSGEKKASMTACLFDRVELDGKKGWITGFTGTSCYVKDKEDNYICTSPKYKQVSISRLRILHHCGNWAIGARQSLGKG

SEQ ID NO: 6542 - protein, 516 aa, unidentified
MTPKERRHLMSEFIYVLGMDGKPQMPTTRRRHVRKLLDTGKARIAEHVPYTIQLLYDNNPVLQPVALALDPGRTNIGMASVSGKGDLLFSAVAETRNREIAKLMLKRRQYRRASRNGERKARQRLAKRFGTMVKAGMRMRKLPMYGEDKLLTCKWIRNTEARFCNRKRPEGWLTPSARHLVDTHLHLIHKCQKYLPVTDIALEVNKFAFMLLEDPSISGIDFQNGPLKGFPSLHDAVNYLQHGKCLLCNDKIEQYHHIVPRSRNGADTINNITGLCCRCHEKVHKDEKYAKVLLDEKAGVDKKYGALSVLNQSIPFICGKLEAEFGQEHVYYCTGKDTSEIRHYYGFHKTKKDQLHEVDAWCIGICALGLSPEKVPDFAAIHTIRQFRRQDRSLVQAQVERTYRLEGKVVAKNRRKKMGQKSDSLEEWYEKQVQIYGEAKAKRLRNQLSITGSYRRYQNPKRVMPGAVFLYKGIRHVLNSSITNGQYFRTVGDPKTNYPARDCVILKQNEGLVFIG

SEQ ID NO: 6543 - protein, 424 aa, Anabaena sp.
MQNYVFVVDTNKQPLNPIPPARARELLTKEKAAVFRMYPFTIILKHTVLNPTLKPLTVKLDPGSKFSGIAVLDEENVIWVAELEHRGGQIKNALESRRSLRRSRRNRKTRYRQPRFNNRKRTEGWLAPSLMHRVFTIETWVKRLCRYAPIVQITMELVKFDTQAMQNPEIDGVEYQQGELAGYEVREYLLEKWGRKCAYCDQEAVPLQIEHIHPRAKGGSNRVSNLTLSCQRCNTKKGTRSIDEFLQKNPSRLKKIQRQAKQPLRDAAVVNSTRWALFQTLKNILPTTTGTGGQTKYNRTRLELPKHHWVDAACVGNVEKLNLLTQQPLRIKCTGWGTRQMCGTDKYGFPIRHRERKQVHFGFRTGDIVKAVVLSGKKVGQYVGRLLCRKIGSFDIVTHVGRVAGVSYRFCTPIHKQDGYSYKF

SEQ ID NO: 6544 - protein, 466 aa, Cupriavidus sp.
MAVFVLDKHSKALMPCSEKRARLLLERGRARVHRLMPFTIRLTDRCLDDSELQPLRLKLDPGSKETGVAIVRETTFGADGAREAYVLSLAEIIHRGRQISEALTARRSMRRARRRRKTRYRAARFDNRRKPKGWLAPSLLHRVVTTEAWVRRFSKVAPLQAIGVELVRFDTQAMENPEISGVEYQQGTLLGYELKEYLLAKFGRTCSYCDAADRPLETEHIVAKANGGSNRVSNLTLACRPCNEKKGKLPLEVFLRKDPARAKRILARAKAPLGDAAAVNTTRLALLDALKAFGLPVETGSGGQTKYNRRRLEIPKSHALDAACVGQVHAVLDWQRPALRIKCTGRGSYQRTRLSAHGFPRGYLMRSKRVFGFQTGDMVEAIVPTGKKAGTYVGRVAIRVTGFFNIQTAAGAVQGISHKHCKLIQRGDGYGYQLVAQTAKESENRGDASRRALSLPGLKAEVSRAN

SEQ ID NO: 6545 - protein, 466 aa, unidentified; identical to SEQ ID NO: 4288
  source 1..466: note = Cyanobacteria bacterium UBA11369

SEQ ID NO: 6546 - protein, 507 aa, unidentified
MSEYIYVIGMDGDPQMPTKRKRHVEKLLQTGRARVFRQVPYTIQLTYKNQPVLQPVTIAEDPGRSNIGMAVVSLSGELLSAAVVQTRNKEIVKLMEKRKLHRRASRNGERKARQRLAKRCHTMLKAGFLMRKLPMYRKDKRVKCLVIRNTEARFCNRKREDGWLTPSAEHLVRTHINLIHKMQKFLPITDVAIEINRFAFLSLEDPSISGVDFQKGPLKGYDDLNAAVEDLQDGHCLMCDSPIEHRHHIVPRSMQGSNTIGNIAGLCCKCHERVHKDARFEDRLKKKKAGLDKRYAAVSALNQAIPFICKRLEQEFGKEHVHYCSGRDTAMVRRSFGYYKTKEEQLHEVDAWCIAVLSLQQVPEKAPEFDHVHEILQFRRQDRSIINAQTSRRYYHEGKKIAKNRKKAEGQREDSLQEWRKRQVERYGEEQTRKMISQLKVKKSIRRYNRLNRLMPGAVFYYQGVRYVMRGQHCEGTYLQAVGMGSKDFPAKKCKIVANNEGLVFVS

SEQ ID NO: 6547 - protein, 388 aa, unidentified
MSVAVISKTGERLMPTSEYRARKLLKLGKAVKYSYHPFTIQLTERKAGDVQPIELCMDTGYIHIGISVKSEKHEYLAEQIDTLTNERTRHDACRMYRRQRRGRKRYRQPRFNNRKRDKGWIAPSLEHKKDIHVQAISRINKVMPLTNITMEMGNFDTQVLKAKEEGKPLPHGADYQHGERYGIATLREAVFSRDGYKCQCCGKTISEGAILHVHHIKYRSRGGTNSMTNLATVCDKCHTPKNHKPGGKLYDWKPKLPDFKGTTFMTTIRWQLYSEVKSLFPDVNIHVTYGAATKEQRRELNIDKSHVNDAFAMGKFHPKHRINAVLYKKKRRNNRCLEKFYDAKYIDSRDGSKRTGQELFNGRINRNHKKDSENLHQYRLQKTTFAPR

SEQ ID NO: 6548 - protein, 408 aa, unidentified
MVYVQDINGKPMMPTTRHGKVRRLLKENKAVVVSLCPFTIKLTYVTSDYKQEIVLGVDAGTKHVGLSATTKSKELYSSEVILRNDIVDLLSTRRELRKTRRNRLRYRKPRFNNRIKSKRSGWIAPSVKYKVDAHIRVIDNVCSILPIFRIVIEVAQFDTQKIKNPNISGKEYQEGDQLGFWNTREYVLARDGHKCQYCKGKSKDKILNVHHIESRKTGGNSPSNLITLCETCHKEYHKGNIDLKIRRGKSLRDAAVMGIMKWRLYEELKSKYDNISMTFGYVTKYNRINHDIEKSHVSDAFVISKNFNAIRLGYYYKVRLVRRHNRQIHKQKIQKGGIKRLNQSPFEVFGFRLFDRVMFENSYYFIFGRRKTGSFNIRDIDGKSQKNITYKKFKLSRCKRFMIQKEMN

SEQ ID NO: 6549 - protein, 416 aa, unidentified
MVYVLDQSGQPLMPTERHGKVRHLLKSGKAKVIKRCPFTIQLLYNSTHYTQDITLGVDAGSKQIGLSATTKQKELYAAEIELRNDIVKLLAARRELRRSRRSRKTRYRKPRFQNRTHSRKPGWLAPSIRQRIQCHLTVIANVHKLLPTKTILIETASFDIQKIKHPDIHGVQYQKGEQLDFWNVREYVLFRDNHTCQCCKGRSKDNILNVHHIESRQTGGNAPNNLITLCETCHTGYHNGKVILPKTIKRGMSFKDAAFMGIMRWSCYDMLKNIYPDVHMTYGYITKNTRIGNNLPKEHYVDARCISKNPKAEPLPYYYYQKKVRCHNRQIHKTKPTKHGIRKRNQAEYVVHRYRLFDKVQYQNNEYFIFGRRKTGYFDIRTLTGVKVKNGSISYKKLKLLEKSKKYLTETRLQTT

SEQ ID NO: 6550 - protein, 413 aa, unidentified; identical to SEQ ID NO: 2636

SEQ ID NO: 6551 - protein, 413 aa, unidentified; identical to SEQ ID NO: 2636

SEQ ID NO: 6552 - protein, 414 aa, unidentified; identical to SEQ ID NO: 4492

SEQ ID NO: 6553 - protein, 442 aa, unidentified; identical to SEQ ID NO: 3791

SEQ ID NO: 6554 - protein, 431 aa, Escherichia sp.; identical to SEQ ID NO: 3801

SEQ ID NO: 6555 - protein, 433 aa, unidentified
MTIGLRAEQAEPAGIRKGDTLKVFVLNMRGKPLMPCSPAKARHMLKAGKAVVVRRTPFTIKLTIATGETKQDVTLGVDAGARHVGISATTKKEEVFASEVALRQDITGLLADRLAFRRARRNRKTRYRAPRFNNRVRSKHKGWLAPSVENRIQAHMSRIDAVCRLLPVTKIVIETASFDVQKIKNPTIEGTDYQQGDQLGFWNVREYVLFRDGHVCQHCHGRSRDKILNVHHLESRKTGGDAPNNLITLCETCHKAYHAGKIKLKVKRGQSFRAEAFMGIMRWTLLDRVRKTHPELPVENTYGYLTKHKRIALGLPKTHCADAFCITGNLNALRRGDFLFQRQTRKHNRQIHKCSILKGGVRKLNQAPFLVKGFRLFDKVRIGGQIGFVFGRRVRGIFNIRRLDKTVIGTDINCKKLSLLETRKTFLTELRKE

SEQ ID NO: 6556 - protein, 406 aa, unidentified; identical to SEQ ID NO: 6072

SEQ ID NO: 6557 - protein, 451 aa, unidentified
MSVAVMSKTGMRLMPTSEYRARKLLKSKKATVYGHNPFTIQLTERETGDVQPVELCMDTGYLHIGTSVKSEKHEYLGVQIDTLTDEKQKHDACRMYRRQRRSRKRYRQSRFNNRKRSDGWIAPSLEHKKDIHIQTISRICNAMPITNITLEMGNFDTQVLKALEENRPLPQGTDYQHGERYGIATLREAVFARDKYTCQCCRKTIADGAILHVHHIIYRSRGGTNRMSNLATVCDRCHTPANHKPGGRLYNWKPKIASFKGATFMTAVRWKMYNEVKSKFSDINIHITYGAETKEQRRAFDITKSHVNDALVMGQFHPKHRSRPVCYKKKRRNNRCLEKFYDAKYIDSRDGKKRSGQELFNGRINRNHKKDSENLHQYRQQKVSAGRRTIRKQHYSIQPHDIIVFNRQQFETSGCHCNGARAILLPQKKSVAIKKLSIHKYAGGYFKSDFT

SEQ ID NO: 6558 - protein, 257 aa, unidentified; identical to SEQ ID NO: 5154

SEQ ID NO: 6559 - protein, 442 aa, Virgibacillus sp.
VKVHVLDKSGKALMPTKRFGKVRRMLKQKKAKVVQRKPFTIQLLFETTTHTQDLTLGIDSGYKYIGVSVVSEKEELLSAELELLDGVKKRLKERSDYRKQRRSRKRHREPRFDNRITSKKKGWFAPTVQHKLDTHIRFIDMLKGILPISKTIIEVANFDIQKIKNPEITGKQYQEGEMMGFWNLREYILHRDKHTCQNPDCKNNEAHPILEIHHIVFRDNEGTDAPSNLITLCNKCHTSANHKKGKYLYEWQTKKPKLNKFRDATFMSTVRFRLVNLKDVTHTYGYITKNNRIRLGIKKTHYNDAFVIAGGTEHKRVKPIFFKQSRSNNRSLQKFYDAKYIDLRTGKKVAAAELHCGRTRRSKNTNGENLKGFRGQKISKGRKTIRKQRYFYQPNDLVYFEGNLCKVIGTMNKGKSVKLDNKKNPDPKKLKPCKYGKGIVAI

SEQ ID NO: 6560 - protein, 459 aa, Ammonifex sp.
VVFVLDRKGRPLMPCSERRARKLLEQGRAVVVRLEPFVIRLKDRVAEEASLQPLRLKIDPGYEVTGISVVRVAGGKEVVVYFAEVHHRTDVPGKLLSRRQARRSRRSRKTRYREPRFDNRRKPEGWLPPSAEARVSQVFSVVGKLVRWLPVTEIVVESAKFDTQKLQNPEVSGVEYQQGELQGYEVREYLLEKYGRRCAYCGKENVPLEVDHVVPKSRGGTDRVSNLTLACRECNQAKGNKLPQEWLEELKDSGRAVDRKRAENVPKVLARLKEPLKAAACMNATRYVLVERLRALGPPVLTATTAQTKYNRARFNLPKTHYFDACCVGEVSGELEVAAGYVQVFRAVGRGTRRVANLDRHGFPRGHRAREKVHFGFATGDLVVAEVPNGKYAGRYVGYVAVRRSGYFDLKDLSGRRVCQGIAFHHFKLVQRFDGWRYEKFKVAALSSPHLKVGASSAA

SEQ ID NO: 6561 - protein, 407 aa, unidentified; identical to SEQ ID NO: 3417

SEQ ID NO: 6562 - protein, 518 aa, unidentified
MTPKKRKEASRMSEYIYVLGIDGNPQMPTKRKRYVEQLLQTGRARIFRQVPFTIQLTYKNEPVLQPVTIAEDPGRSNIGMAVVSLSGELLSAAVVQTRNKEIVKLMEKRKQHRRASRNGERKARQRLAKKCHTMIKTGFLMRKLPMYGKDKRVRCNVIKNTEAKFCNRKREDGWLTPSAEHLVRTHINLIHKMQKFLPITDVAIEINRFAFLSLEDPSISGVDFQNGPLKGYDDLNAAIEDLQDGHCLMCNSPIEHRHHIVPRNMQGSNTIGNIAGLCCKCHERVHKDARFEDRLKKKKAGLNKRYAAVSVLNQAIPFICKRLEQEFGKEHVHYCSGRDTSMARRSLGYHKTKEKQLHEVDAWCIAVLALQHVPEKAPEFDHVHEILQFRRQDRSRIKAQTSRAYYHEGKKIAKNRKKAEGQREDSLQEWRKRQVERYGKEQTRKMISQLEVKESIRRYNRLDRLMPGAVFYYQGVRYVMRGQHSNGQYLQAVGMGDKDFPAKKCKIVVHNQGLVFVS

SEQ ID NO: 6563 - protein, 245 aa, unidentified
LPIYRKEHDIMQYVYVLNKHGEPLMPCSPGKARLLLKQQKAHVIKRTPFTIKLLYGSTGYKQPITLGVDAGSKHVGLSASTEKRELYREEFTPRNDVVDLLSTRKQNRRSRRNRKTRYRPPRFDNRVHSKHKGWLAPSVEVKIQEHITVIKRICRILPITLVRVETAEFDTQRLKAMLAGKPIPVGTDYQLGEMYDKYNVRQYVLKRDNYTCQCCGAHTTAKKAVKLHVHHLESRKVGGNAPSNL

SEQ ID NO: 6564 - protein, 422 aa, Petrotoga sp.
MLVYVLNKHGEPLMPCKPSKARKLLKDGKAKVVRKEPFTIQLLYGSSGYKQPITLGVDAGSKTVGLSATTKKKELFASEVEIRDDITKLISQKRQYRRDRRLRKTRYRKPRFLNRVHSKNKGWIAPSVEHKIKSHIKLIDLVYRLLPITKIVVEVASFDIQKIKNPNIEGKQYQQGKQLDFWNVREYVLWRDNYTCQHCKGKSKDKRLNVHHIESRQIGGNAPSNLITLCETCHRDYHNGKIKLNFKRGQKFKDATFMGIMRWTLYNRLKDLYSNVHLTYGYITKNTRIQNNLPKTHRIDALCISGHPQAKQLDYYYHIKEVRRHNRQIHKANILKGGTRKLNQAPYLVHGFRLFDKVRYNGIECFIFGRRSTGYFDIRKLDGTVIHRSAKSKDLILVSKAKTLLWERRENSAFLSPLPYLP

SEQ ID NO: 6565 - protein, 465 aa, unidentified; identical to SEQ ID NO: 3603

SEQ ID NO: 6566 - protein, 440 aa, unidentified
LLLKKKTASVVCRHPFTIQLLYKTGCATQKGSIGIDTGSQHIGVGITCGDKVILKDEHALRSSMEKRSLLATRAAMRRGRRYRKVRYRKPKWRHHTKRMYFEKANRRGQHWRKVKTTTQSPRSKGWLPPSLQSKCDHHFCIIDRYLKYLPDPITRNLVIETGRFDMARMNDPTIHGKMYQRGPMYDAENRRAYIFARDNYQCACCKAKAGTTRKADGTTVKLVAHHILFRSRGATDNPKYMVSVCDHCHTTKAHQPGGILYSWMENNKKVARGLRDAAFMNILRQRLFARYPQAAFTYGNITAADRKQLLLPKSHANDAVAISLFGKEVSAVRNTCQTIYYRQVRKSKRSLHEAIPRKGRKNPNTKAVRNKKNTTQVNGFKLWDSVLANGKKLFICSFTGTSAYLIDKNGCYVSQPGKTYKQWPLSKLKRLHPNGNWLMA

SEQ ID NO: 6567 - protein, 433 aa, Lactobacillus sp.
MQNRVFVINKHGKALMPCKPRKARILLRDGKAKVLKKEPFTIQLLYGSSGYKQDVSIGIDSGQRHMGLAVTSQDKVLFQGEVELRQDVKKLIDTRRTYRRSRRNRKTRYRKVRFLNRIASKKDNWLPPSVASKVNHNINWIKRLLSVLPKADLHIEVGKFDMQKMKNPAINGEGYQQGDLYGYQTVKQFVLARDNYTCQVCKKKGGKLKIHHIIYRSLGGTNTVDNLITVCSKCHTTKNHQTGILAKWCKNKKKVNKSYKGATFMNILRRRLYAAFPQAKFQYGAWTTLQRAGLELTKSHYNDAVAISGIRKIKEKPTSIMMFKQFRKKKRSLHEATARKGRKTPNITSKRNAKNTKYAKGFWLNDYVKIKDSNKKGYISGFSKTTCYIKDIFGNYLTTSDRYKQVALSKLDRLSHYNNWSKQEINENIYQMN

SEQ ID NO: 6568 - protein, 416 aa, unidentified
MVYVLDKNGQPLMPTDRHRKVRLMLQSGQAKVIKRCPFTIQLTYNTGHQAQEISLGIDAGSKHIGVSATTKTRVLYEADVELRNDIVDLLSSRRELRRGRRNRKTRYRPARFDNRRREDGWLAPSIRQKIGTHLTVVENICKILPISRITVETASFDIQKIKNPDIQGAEYQQGDQLGFWNNREYVLFRDNHTCQCCKGKSKDKILNVHHIESRKTGGNAPNNLITLCEICHTGYHKGAIQLPKTVKRGMRFKDAAFMGIMRWAFYEALKQQYEPVGTPVHNTYGYITKHTRIEHNLPKEHYVDARCISGNPDAFPNGEYYYQKKVRCHNRQMHKLTILKGGIRKQNQATYLVKGYRLFDKVSYQRKEYFVFGRRKSGFFDIRTLSGKQVNKGSLSCKKLKFIATRMYYLIERRAV

SEQ ID NO: 6569 - protein, 396 aa, unidentified
VVRRTPFTIQLTIATGESKQPVSLGVDAGYKHVGLSASTEKAELYASEVELRQDITDLLSARRALRQSRRNRKTRYRAPRFDNRIRTKRKGWLAPSVENRINAHLSRIEAVLRLLPITKITVETASFDMQRLKNPDISGKEYQEGEQLGFWNVREYVLFRDGHVCRHCHGRSKAPVLNVHHLESRRTGSDSPDNLITLCETCHKALHRGEITLKAKRGQSFRAQAFMGIMRREVLNRLKASYPELKVHETYGYLTKHARIANGSVKSHGADAFCIAGNLGAERLGEFFFQKQTRRNNRQIHKLSILKGGIRKRNQAPFEAKGFRLFDKVACQGEEGFIFGRRSSGSFDVRKLDGTRISAGISCKKLRLLEKRRTYLTEIRKEEALPPLPEGRGLRA

SEQ ID NO: 6570 - protein, 431 aa, unidentified
MPNKVYVINKHGRPLMPCSPAKARHLLDAGKAKIKKRTPFTIQLVYGSSGYTQEVILGVDAGSKTIGMSVSTTKEELLSAEVKPRNDVVDLQSTRREFRRARRNRKTRYRKPRFDNRVRSKHKGWLAPSVEVKIQEHITSIKMVCRILPVSKVVIETAEFDLQLLKAIEEGKPVPQGEDYQKGEMCGHYNVRQYVLWRDDYTCQCCGTHATKKKEVRLHVHHLESRKVGGDAPDNQVTLCESCHEKLHKGLITAKDFKKRKRRSTRDATFMGIMRKTLMQRLCSELPIPVVETRGYITKTTREKLLVLPKSHTNDALAIAQGKQGFNVGYLPGILQIDKIYTICPVRHHNRQLHKATILKGGIRKPNQAEKYVFGYRLFDKVQFNGQDCFIWGRRTTGIFTIKTINGKMIKDGISFKKLKLAEKSTSYLIA

SEQ ID NO: 6571 - protein, 425 aa, Caldicellulosiruptor sp.; identical to SEQ ID NO: 3912

SEQ ID NO: 6572 - protein, 470 aa, unidentified; identical to SEQ ID NO: 3168

SEQ ID NO: 6573 - protein, 428 aa, Oblitimonas sp.; identical to SEQ ID NO: 4442
  source 1..428: note = isolate UBA2435

SEQ ID NO: 6574 - protein, 464 aa, unidentified
MYVFVIGLDGTRLMPCKPRKARKLIEAHKAEIYKKQPFTIRLLYKTGCATQPVTIGIDTGSQHIGIAVTSGNKVLYQAEIELRSTMDKRSLMETRRSYRRSRRYRKTRYRSPKFRFHTKRTYSETLVKRKTTGVMTHWVKHTNSMSTNRPDGWLAPSMQSKADHHIRWINRFLDVLPPDTKLRLEIARFDIARMKNPEVHSELYQYGPQYDYENLKAYVFDRDHYKCVVCKRKLGSKQPDGHSLKGMMHHITFRSKGATDNPDQLVTVCEYCHTPQAHKKGGVLWDLKEKHRPVQRGLRDATQMNIIRTRLVKAFPDAELTYGNITAADRKKMHLPKSHAGDAVAIAMKGKTVNICEPTVYIKQVRKKKRSLHEATPRKGRKNPNTQAVRNPKNTKSIGIYHIYDTVRFQNKTGFISGFTGRSAYVQDFDGNYITMPGKSYKQINLSNLELVRHNNNWIQKTGN

SEQ ID NO: 6575 - protein, 420 aa, unidentified
MQYVYVLNKHGEPLMPCSPRKARLLLKQKKACVVKRTPFTIKLLYGSAGYKQPITLGVDAGSKHVGLSASTEKRELYSEEFTPRSDAVELLSTRRQNRRSRRNRKTRYRVPRFDNRVHSKHKGWLAPSVEVKIQEHITVIKHICKILPISLVRVETAEFDTQRLKAMLAGKPLPVGTDYQLGEMYDEYNVRQYVLKRDHYTCQCCGTHNTAKKVVKLHVHHLESRKTGGNAPSNLVTLCTTCHKNLHKGRVTLDGKERGKPLRDAAFMGIMRKTLMVRLKEELPIPVQGTYGYITKMRREQNDIKKSHTNDARCISKHPLAEPCGVCYRTKAIRHHNRQTHKANFSKKGIRKRSQMPYLVEGFRLWDKVLYKGQECFVSGRRSSGSFALKKLDGTSISKGVAFKKLRLLEPATNYLIERM

SEQ ID NO: 6576 - protein, 442 aa, unidentified; identical to SEQ ID NO: 3791

SEQ ID NO: 6577 - protein, 451 aa, unidentified
MPVAVISKTGERLMPTSEHRARKLLKSGKAIKYSYHPFTIQLAERESGDVQPIELCMDTGYIHIGISVKSEKHEYLAEQIDTLTDEKARHDACRMYRRQRRSRKRYRQPRFNNRKRNDRWIAPSLEHKKSIHIQAILRICKVMPVTDITLEMGNFDTQVLKAREEGKPLPHGADYQHGERYGIATLREAVFTRDDYKCQCCGRTIKDGAILHVHHIKYRSQGGTNRMSNLITVCDKCHTPANHKQGGKLYNWKPKIASFKGATYMTTIRWKLYNEVKALCPDIDIHITYGAETKERRRALDIDKSHVNDAFVIGQFHSKHRSEPICYKKKRRNNRCLEKFYDAKYIDSRDGKKRSGQELFNGRISRNHKKDSENLHQYRLQKVTPGRRAIRRQHYPIQPHDIIVYNGNKIEVLGCQHKGTRVVFSKTKKSVQISKIKLFKYAGGYSKSVFN

SEQ ID NO: 6578 - protein, 411 aa, unidentified; identical to SEQ ID NO: 5658

SEQ ID NO: 6579 - protein, 414 aa, unidentified
MPCSPAKARLLLKEKKAIVKRRTPFTIQLTIATGETKQPVSLGVDAGYKHVGLSASTEKAELYASEVELRQDITDLLSARRALRQSRRNCKTRYRAPRFDNRIRTKRKGWLAPSVENRINAHLSRIEAVLRLLPVTKITVETASFDMQLLKNPDISGKEYQEGEQLGFWNIREYVLCRDGHVCQHCYGRSKDPVLNVHHLESRRTGGDSPGNLVTLCETCHKALHRGEITLKAKRGQSFRAEAFMGIMRWEVQNRLKASHPELEVNNTYGYRTKHARIANDIAKSHCADAFCIAGNLGAERLGEFFFQKQTRRNNRQSHKLSILKGGIRKRNQAPFEVNGFRLFDKVACKGEEGFIFGRRSSGFFDVRKLDGTRISAGISYKKLHLLEKRRTYLTEIRKEEVLPPLPEGRGLRA

SEQ ID NO: 6580 - protein, 440 aa, unidentified
LVFVLNKNKKPLNPCHFAVARKLLKQGKAVVYKQFPFTIRLKDLKEVNPKGLIIKLDPGAKQTGVALHKPNGEVILLATIEHRADKIKQNLEARRAFRRTRRNRKTRYRTPRFLNRKRPEGWLPPSIQSVVDNVKNFIIKLKKLCYIDTIYIETVRFDTQLILNPSIEGVDYQQGTLLGYEIREYLLYTYGHTCQYCKGLTNDTKLEIEHKHPKSRGGSNSIRNLTLACRTCNQEKGNNTLDEWVQSLSKSKLDKERVKNINLILKTNKPVSLKDTAKVNSSRNTILREMYKLTPDVVVSTGGVTKHNRIKVNLPKTHYYDALCVKETPKIKIHKGLKELCIKSIGRGTRSRTLLNKYGFPRAYLPRQKQFFGYQSGDMVKANIPKGKYMGQYVSNVSCRSTGTFAIYSKKHGKQIDVNHKYLKLIQKGDGYRYELKTLV

SEQ ID NO: 6581 - protein, 492 aa, unidentified; identical to SEQ ID NO: 4486

SEQ ID NO: 6582 - protein, 420 aa, unidentified
MQYVYVLNKHGEPLMPCSPGKARLLLKQQKACVVKRTPFTIKLLFGSAGYKQPITLGVDAGSKHVGLSASTEKRELYSEEFTPRSDVVELLSTRRQNRRSRRNRKTRYRVPRFDNRVHSKHKGWLAPSVEVKIQEHITVIKHICKILPISLVRVETAEFDTQRLKAMLAGKPLPVGTDYQLGEMYDEYNVRQYVLKRDHYTCQCCGTHNTAKKVVKLHVHHLESRKTGGNAPSNLVTLCTTCHKNLHKGRVTLDGKERGKPLRDAAFMGIMRKTLMVRLKEELPIPVQGTYGYITKMRREQNDIKKSHTNDARCISKHPLAEPCSVCYRTKAIRHHNRQTHKANFSKKGIRKRSQMPYLVEGFRLWDKVLYKGQECFVSGRRSSGSFALKKLDGTSISKGVTFKKLRLLEPATNYLIERM

SEQ ID NO: 6583 - protein, 442 aa, unidentified; identical to SEQ ID NO: 3161

SEQ ID NO: 6584 - protein, 512 aa, unidentified
MSTVYVLNKDGKPLMPTTRGGHVRHLLKEQKARVVRTKPFTIQLLYETDDVVQLLYLSIDPGRTNIGVAVVKTDGTAVFTAHLETRNKEIPKLMKKRKNSRRARRTNGRRCRRQRRAKANGTISKKCVKHDTAQNGSVSKRAKEIGVIKRHLPGCEKDVLCIGIKNKEAKFSNRTRPEGWLTPTANQLLQTHINLVKKIQKFLPISDVVLEINKFAFMRLDNPNVQKWQYQQGPLYQKANLEETVSEMQEHHCLFCKKKIDHYHHVVPQHKNGSNTIDNIVGLCTKHHDLVHKDTAWHEKLTKKKTGLNKKYGALSVLNQIIPALTKELSSIFPKHFFVTTGKSTYDYRAAHGVSKDHWLDAYCIACSVLPNDVCDNNINSHVPYELKQFRRHDRRALHKENMSRVYTLNGKSVATNRHKATEQTTDSLEEFRQRQPNDVCNLKVKEHHPTYRNMNRNYPGSVFLIGKQVHVMQGIAGSKDGEATTYKDTNANSIAAGKCKFVAKNSGILFV

SEQ ID NO: 6585 - protein, 470 aa, unidentified; identical to SEQ ID NO: 2825

SEQ ID NO: 6586 - protein, 456 aa, unidentified; identical to SEQ ID NO: 3505

SEQ ID NO: 6587 - protein, 438 aa, Methanosarcina sp.
  source 1..438: note = isolate UBA402
MIFVLNKNKQLLNPCHPAVARKLLGMGKAVIHKKYPFIIRLKELKKSESNAKFRLKIDYGSRHTGLAILNGSKVTWLAQIHHKTNIKKNMDSRRAMRRARRNRKLRYRKPRFLNRKRNDGWIPPSLQSRVDNIKNWVIRLRKLCPLTHISYENVKFDTQLMQNPEISGIEYQQGELQGYEIREYLLKKMGRKCAYCGAENVPLEVEHIIPKIRGGSSRVSNLTLACRYCNQAKGSMTAEEFGHPEVYDLVKKPLKDVAIVNATRWKIYDILVSIGLKIECGTGGRTKFNRIKLNLPKDHHFDAVCVGQSTPNEINFKTNQVLHIKAKGRGSHCRTNLNKYGFPRGYLARQKSFFGFQTGDIVKAIIPKGKYKGTHIGAISCRKTGYFDIKNKEGMKIAQGINHKYCNVLSRTDGYEYTLNGLEVDGIPLTTKVASILP

SEQ ID NO: 6588 - protein, 417 aa, unidentified
MFVYVISKDGQPLMPTTRFGKVRRLLRDKKAKVVRSCPFTIKLLYEPENLVVQEVVLGQDTGSKHVGTACVSNDKVLYQSEVALRDDIKKKMDNRRSSRRNRRYRKTRYRKPRFLNRANLAKKDRLPPSVRSRVQSHIDEIEFCKKILPISKIVLEVSQFDTHLMKNPELIDEKVKHWGYREGFNYEYSSRREAVLVRDNYTCQCCGKKHAKLEVHHIIFRSMGGTDDERNLITLCEKCHKMVHDGLLILTKKPRKLNLKYATQMSIIRSQLLKIYPDAIETFGFVTKENRNNLNLPKGHYIDACVIASGGKKFKQLNWLFKKRRVAKQNRQLCKGIRGEKKLPTGKVFGFKRFDKVKYLKEICFIKGRRTSGGFVLMDIDNNAIDFRDRGGRQNPSYKLLERLNTRRSILCISQRI

SEQ ID NO: 6589 - protein, 414 aa, unidentified; identical to SEQ ID NO: 2588

SEQ ID NO: 6590 - protein, 447 aa, unidentified; identical to SEQ ID NO: 5309

SEQ ID NO: 6591 - protein, 408 aa, unidentified
LMPCSPGKARLLLKQQKACVVKRTPFTIKLLYGSAGYKQPITLGVDAGSKHVGLSASTEKRELYREEFTPRNDVVDLLSTRRQNRRSRRNRKTRYRAPRFDNRVHSKHKGWLAPSVEVKIQEHITVIKRICRILPITLVRVETAEFDTQRLKAMLKGKPLPVGTDYQLGEMYDEYNVRQYVLKRDNYTCQCCGAHPTEKKPVRLHVHHLESRHVGGNAPNNLITLCVACHKALHEGKITLDKGKKRGKPLRDAAFMGIMRNTLLARLKDELNIPVKQTYGYITKLLREKNKIPKSHVNDARCIAKAPNAKPCDTMLYTRALRHHNRQIHKAKILNGGIRKKNQAPYLVKGFRLWDKVRYNGEECFITGRRSSGYFALKKYDGTVISNSASYKKLMLLEAATNYITERS

SEQ ID NO: 6592 - protein, 442 aa, Sutterella sp.; identical to SEQ ID NO: 3234

SEQ ID NO: 6593 - protein, 456 aa, Halomonas sp.
MAVFVLGKNKQPLMPCSEKRARLLLERGRAVVVNLTPFVIRLRDRCLSDCALQPTLLGIDPGSKETGLTLMRLENNATEEKAPATRHGLCLFQLVHRGFQIRQALEQRAGFRRRRRSKNLRYRQPRFDNRTRKKGWLPPSLQHRVDTTMAWVDKLCRWAPVTHLNMELVRFDLQKMENPEISGVEYQQGTLLGYEVREYLLEKWGRECAYCGTGDTPLEIEHVVAKSRDGSSRVSNLTIACHECNQAKDNQWLTDFFATDKGLKKRLKANGLSATVRLERVQRQLKLPLRDATAVNATRWTLFGTMKATGLPVAVGSGGRTKYSRQRLGIPKTHALDAACVGKFDTLKGWRAPTQVIKAMGRGSYQRTRLDKYGFPRGYLMRQKQVQGFQTGDRVRAVVPSGKKAGTHTGRVAIRKTGSFNIQTEQGAVQGISWRHCTLLQRGDGYGYHPLPTIQS

SEQ ID NO: 6594 - protein, 456 aa, unidentified
MSTCVCVLSNSGERLMPTFRLGKVRRLLKDGKAKIVKHHPFTIQLLYDSKTNTQPIEICEDVGYNYIGISVKSESHEYVSAQYDTLQDEKEHHDDCRKYRRTRRNRLRYRKPRFDNRKRSEGWLAPSLEHKKQLNIRLIERYVSVIPITRATVEVGSFDTMLLQAIQKGESKPEGVDYQKGPRYNLATLREAVFYRDNYTCQVCGRKIADGAILHMHHMFYWKGRHGYQLDELVTACEKCHTPANHQKGGKLYGFGKDKKFANLSGAAFMNAVRWQIVDALHATYGKEFVTITYGAMTKEKRIILGIEKTHNNDAYAMGDYHPAHRCVFRHYQKRRRNNRVLEKFYDATYIDARTGNKAKGKELFNGRISRNHKKDSENFHKYRSKKVSKGRRSIRRQRYAIQPYDTVRLEGKTYITSGCHNKGTRLLIPANGKSKSVAISKVQVVCHAVAWIQII

SEQ ID NO: 6595 - protein, 462 aa, unidentified; identical to SEQ ID NO: 5736
  source 1..462: note = Myxococcales bacterium UBA6777

SEQ ID NO: 6596 - protein, 417 aa, unidentified
MVYVISKENKPLMSCSNVVARLLLRQQKAKVKRKQPFTIKLLYETTNYIQDLTLGVDTGSGTIGAAVTTDDGKIIYASEVIVRNDINDKMTQRSKYRRNRRNRKTRYREPRFLNRKNSIKSNRFSPTMVSKFHSHIKEIEYIKSILQIKTLVLETGQFDVHLLKNPELKYKPWGYQKGKNYGFSNTKEIVLNRDNYTCQYCEGKHKDNKLEVHHIVYRSNYGSDDESNLITLCHTCHQLLHRGDIELNLKGKTKGVLKYATQMNSIRKQLLKFYPEAIETFGFITKENRLNVNVDKKHYLDACIIATGGKAFKICCDIYKKRCISKGDFQQTKGIRSEQKLNTKKICDFRKFDKVKYFGKEYFIKGRMSTGYAVLMDVGGNKIDFSNMLNGYKTVKLNNCKRISARKSQLIAIHPTP

SEQ ID NO: 6597 - protein, 430 aa, unidentified
MPKVYVLNRHGRPLMPCTPAKARHLLDAGKAKVRHRTPFTIQLLYGSTGYTQEVILGVDAGSKTIGLSAATETEELFSAEVKPRNDVVELMSARRQFRRARRNRTTRYRKPRFDNRVRSKHKGWLAPSVEVKIQEHMTAIRRACAILPVSKVVVETAEFDLQLLKAVAEGKPVPQGEDYQKGEMYGHYNVRQYVLWRDSYTCRICGAHGSVRKGVPLHVHHLESRRVGGDAPDNLVTLCTACHDKLHKGIIMAADIKKRKRRSTRDATFMGIMRMTLLRRLREQLPVPVVETRGYITKATRENLLVLPKSHTNDALAIAHGPQGFRAEYLPNIRQADRLYTIRPVRHHNRQLHKATILKGGVRKANQAEKYICGFRLYDKVLYNGIECFVWGRRTSGSFLLRQLNGEKVKDSVSYKHLKLLERSQSYLVA

SEQ ID NO: 6598 - protein, 421 aa, unidentified
MVYVLNKYGQPLMPTNRYGKVRHLLKDSKAKVVNRCPFTIKLLYDSTNYTQNLTLGIDTGSGTLGSAVSDDNGNVVYMSKVVVRNDITDKMTRRAKYRRNRRNRKTRYRKARWLNRKNSIKKDRFSPTMISKFHSHIKEIEYIKSILPITTLVLETAQFDTHLLENPSLVNPKIKHWGYQKGINYGFENTRAMVLNRDNYTCQYCKGKHKDSKLEVHHIVFRSRGGSDEESNLITLCHTCHKDLHSGKIAPKFSGKKKGTLKYATQMNSIRCQLLKKYPDAIETFGCVTKANRLSVGIEKDHHLDACVIASGLNPIAIKTNLLYIKKSVSKGDYQQTKGIRSEQPITTGKICGFRKFDKVKYFGKEYFIKGRMSTGYAVLMDIDGNKIDFSTMPKGYKTPKLSNCKRLASRKTTLVTQVAV

SEQ ID NO: 6599 - protein, 453 aa, unidentified; identical to SEQ ID NO: 5967

SEQ ID NO: 6600 - protein, 420 aa, unidentified; identical to SEQ ID NO: 5866

SEQ ID NO: 6601 - protein, 471 aa, Acidiferrobacter sp.
MAVFVLDRRKKPLMPCSERRARLLLTRGRARVHRVVPFTIRLVDRCQEDSILQPLRLKMDPGSKETGLALVREPDTVAGATGEIVRTLTVLMLLELRHRGPSIHEALTQRSSHRRFRRGRLRHRPARFDNRTRPEGWLAPSLQHRVDTTMAWVDRLCRWAPVAALSQELVRFDTQQMQNPEIVGTEYQQGTLAGYEVREYLLEKWDRTCAYCGAHNTPLEIDHIHPKSRGGSDRVSNLTIACHDCNQRKGNRPLTEFLAQDPERARRIRAQAPAPLRDAAAVNSTRWALFQQLKATGLEVEVASGGRTKWNRHRLHLPKTHSLDAVCVGSVDTIHNAQQPVLTIKATGRGSYQRTRLTKHGFPRGYLTRSKSAFGFQTGDLVKAVVTSGKKAGRYLGRVAIRATGSFNIQTATGLVQGIAHRFCILIQRADGYGYALTKRAFDTGEAGTGAAYAAALSLPGMNPGVSRANG

SEQ ID NO: 6602 - protein, 433 aa, unidentified
  source 1..433: note = Microcoleaceae bacterium UBA9251
MSKIPNQVFVLDNSKKPLTPCLPVIARKLLNAGKAKVFRLYPFTIILKKTVDEQPQPIEIRIDPGSKTTGIALVSLTQVIWGAELTHRGQEIKSRLETRHAIRCSRRHRKTRYRQPRFLNRTRPKGWLPPSLQHRVLTTMTWVNRLCKLAPIKSIAFELVNFDTQKMQNPEISGVEYQQGELQGYEVREYLLEKWNRKCAYCGAEKLPLQVEHINPRASCGSNRVSNLCLACKKCNTKKGTQNIKDFLKGKPEILKRIMSQAKAPLKDAAAVNGTKSALLQALKATNLEPIYVGRGSLTKFNRTKLGLPKAHWIDAACCGDVSQGLTLMIDQPLLIKAMGWGSRQVVQTDKYGLTRKGYKPKQKVKGWNTGDIISVIGGKHEGVKCKRIKTTRFKGDIDIRVNDTTVISVSRNQIKPVYRNDGYNYSFVGNCR

SEQ ID NO: 6603 - protein, 300 aa, unidentified
INAHLSRIEAVLRLLPVTKITVETASFDLQLLKNPDISGKEYQEGEQLGFWNIREYVLCRDGHVCQHCYGRSKDPVLNVHHLESRRTGGDSPGNLITLCETCHKALHRGEITLKAKRGQSFRAEAFMGIMRWEVHNRLRALHPGIEVSNTYGYRTKHARIANGIAKSHCADAFCIAGNLGAERLCEFFFQKQTRRNNRQIHKLSILKGGIRKRNQAPFEVKGFRLFDKVACQGEEGFIFGRRSSGFFDVRKLDGTRISAGISCKKLHLLEKRRTYLTEIRKEEALPPLPEGRGSAPKCDE

SEQ ID NO: 6604 - protein, 426 aa, unidentified
MVYVQDINGKPMMPTTRHGKVRRLLKENKAVVVSLCPFTIKLTYVTSDYKQEIVLGVDAGTKHVGLSATTKSKELYSSEVILRNDIVDLLSTRRELRRSRRNRLRYRKPRFDNRIKSKRPGWIAPSVKYKIDAHIRVVENVCSILPISRIVIEVAQFDTQKIKNPNISGKEYQEGDQLEFWNTREYVLARDGHKCQYCKGKSKDKILNVHHLESRKTGGDSPSNLITLCETCHKEYHKGNIDLKIKRGKSLRDAAVMGIMRWRLYEELKSKYDNISMTFGYVTKYNRIKHGIEKSHVSDAFVISKNFNAIRLGYYYKVRLVRRHNRQIHKQKIQKGGIKRLNQSPFEVFGFRLFDRVMFENSYYFIFGRRKTGSFDIRYIDGKNQKNVTYKKLKLSRCKRFMIQMELNKKTRTCFENERNSDRDAA

SEQ ID NO: 6605 - protein, 413 aa, unidentified; identical to SEQ ID NO: 2636

SEQ ID NO: 6606 - protein, 427 aa, Enterococcus sp.; identical to SEQ ID NO: 2410

SEQ ID NO: 6607 - protein, 412 aa, unidentified
MIYVLNQNGQPLMPTKNHAKVRILLKSKKAKVIRRCPFTIQLMYSSTNYTQSINLGVDAGSKHIGISATTKNKVLFESDVELRNDIVNLLSTRRQNRRTRRNRKTRYRKPRFDNRKRKDGWLAPSVQNKVDTHLTVIRKVHEILPVSKIIVEVASFDIQKIKNPTIGGTEYQQGSQLDFWNVREYVLFRDNHTCQCCKGKSKDKILNVHHIESRKTGGDAPNNLITLCETCHTGYHKGTVNLPKRIKRGMSFKDASFMGIMRWAFYNKLKEIYPNVSLTYGYITKNTRIENKLPKDHYIDARCISGNPKAVSDWGVYYQKKVRCHNRKIHKNTILKDGYRKRNQAPYEVMGFRLYDKVRWKQQNCFIFGRRSTGRMDLRLLDGTKVNASVGYKNLKMLEMCKNILIELRMEV

SEQ ID NO: 6608 - protein, 430 aa, unidentified
MPKVYVLNRHGRPLMPCTPAKARHLLDAGKAKVRHRTPFTIQLLYGSTGYTQEVILGVDAGSKTIGLSAATETEELFSAEVKPRNDVVELMSARRQFRRARRNRTTRYRKPRFDNRVRSKHKGWLAPSVEVKIQEHMTAIRRACAILPVSKVVVETAEFDLQLLKAVAEGKPVPQGEDYQKGEMYGHYNVRQYVLWRDSYTCRICGMHGSVRKGVPLHVHHLESRRVGGDAPDNLVTLCTACHDKLHKGIIMAADIKKRKRRSTRDATFMGIMRMTLLRRLREQLPVPVVETRGYITKATRENLLVLPKSHTNDALAIAHGPQGFRAEYLPNIRQADRLYTIRPVRHHNRQLHKATILKGGVRKANQAEKYICGFRLYDKVLYNGIECFVWGRRTSGSFLLRQLNGEKVKDGVSYKHLKLLERSQSYLVA

SEQ ID NO: 6609 - protein, 424 aa, Caldicoprobacter sp.; identical to SEQ ID NO: 4263

SEQ ID NO: 6610 - protein, 420 aa, unidentified; identical to SEQ ID NO: 3504

SEQ ID NO: 6611 - protein, 429 aa, Moorena sp.
MCNYVFVLDASHKPLNPCRPVTARKLLTAGKAAVYRRYPFTIILKKQVDGSAKPMSLKIDPGSKITGLAVVYSNQVVWSAEIEHRGSKIKSALDYRRGVRRSRRKRKCRYRKPRFNNRKRPEGWLAPSLQHRVATTMTWVLRLMKLTAIGSISQELVRFDTQKLQNPEISGIEYQQGELMGYEVREYLYQKWGRQCVYCGAKSVKLEVEHIIPKSKGGTNRVNNLTLACHRCNQAKGNLDARDFLSGKPHVLKRILGRAKQPLLDAAAVNSTRWQLYLCLKETGLSVAVGTGARTKYNRIKLGLPKGHWVDAACVGEVATLKIVTRQPLLIKAMGHGCRQVIQMDKYGFPRKGYKPKHPVKGWKTGDIVNVVAGKNAGLKGVRIKTVRAKGNFDLIGADHGVSKKVNSASRNYIQCVHRQDGYYYSFAK

SEQ ID NO: 6612 - protein, 406 aa, unidentified
MVYVQDIYGRPLMPTTRHGKVRRLLKSKKATVVNLCPFTIRLLYDTTGYKQEITLGVDTGTKHVGLSATTKSKELYASEVILRSDVVDLLSTRRELRKIRRYRLRYRKPRFMNRIKSKKRGWIAPSIRQKIDSHIRIIGFVYSILPVSKLIIEVAQFDTQKIKNPEISGKEYQEGEQLGLWNVREYVLARDEHKCQHCKGKSKDPVLNVHHIESRKTGGDSPSNLITLCKTCHKEFHKGNIKLKVNRGESLRDAAVMSIMKWELYDELKSLYPNVKMTFGYITKYNRINHGIEKSHVSDAFVISRNFDSERLGYYYERKLVRRHNRQIHKMKAPKGGNKRMNQSPFKVFGFRLFDKVMFQGKERFIYARRLRGIFNIRDINGENKKDISYKKLEYVSHGLISIVAG

SEQ ID NO: 6613 - protein, 414 aa, unidentified; identical to SEQ ID NO: 2588

SEQ ID NO: 6614 - protein, 417 aa, unidentified
MPCSPAKARLLLKEKKAIVKRRTPFTIQLTIATGEAKQPVTLGVDSGYKHIGLSATTKKAELYASQVELRQDITDLLSARLALRRSRRSRKTRYRAPRFDNRVASKRKGRLAPSVENRIAAHMSRVEAVMRVLPVTAITVETAVFDTQLLKTPDIAGAAYQQGEQLGFWNVREYVLFRDGHVCQHCRGKSKDPILNVHHIESRRTGGDAPNNLITLCETCHKAFHRGEIELQIKRGKSFKAETFMGIMRWTLFERLKKAHPELNVHNTYGYLTKHKRISHGIAKSHCADAYCIADNLSAKRLKGFFFQKQTRKHNRQIHKLSILKGGLRKKNQAPHEVKGFRLFDKVICKGEEAFIFGRRTSGSFDVRRLDGTRISAGISYKKLRRLEPRTTYLTEFRKEAALPPLHKCRGLRAEFL

SEQ ID NO: 6615 - protein, 531 aa, unidentified; identical to SEQ ID NO: 4135

SEQ ID NO: 6616 - protein, 417 aa, unidentified
MPCSPAKARLLLKERKAIVKRRTPFTIQLTIATGEAKQPVMLGVDSGYKHIGLSATTEKAELYASEVELRQDITGLLSARLALRRSRRSRKTRYRAPRFDNRVASKRKGRLAPSVENRIAAHMSRVEAVMRVLPVTAITVETAVFDTQLLKTPDIAGAAYQQGEQLGFWNVREYVLFRDGHVCQHCRGKSKDPILNVHHIESRRTGGDAPNNLITLCETCHKAFHRGEIELKIKRGKSFKAETFMGIMRWTLFERLKKAHPELNVHNTYGYLTKHKRISYGIAKSHCADAYCIADNLSAKRLKGFFFQKQTRKHNRQIHKLSILKGGLRKKNQAPYEVKGFRLFDKVICKGEEAFIFGRRTSGSFDVRRLDGTRISAGINYKKLRLLEPRTTYLTEFRKEAALPPLHECRGFRAEFL

SEQ ID NO: 6617 - protein, 331 aa, unidentified
LRVFVLNKRGKPLMPCSPAKARLLLKEKKAIVVRRTPFTIQLTIATGEAKQPVSLGVDAGYKHVGLSASTEKAELYASEVELRQDVSNLLSARRALRQSRRNRKTRYRAPRFDNRIRTKRKSWLAPSVENRINAHLSRIEAVLRLLPVTKITVETASFDMQLLKNPDISGKEYQEGEQLGFWNVREYVLFRDGHVCQHCHGRSKDPVLNVHHLESRRTGGDSPGNLITLCETCHKALHRSEITLKTKRGQSFRAEAYMGLMRWEVLNRLKTSHPGLEVHNTYGYRTKYTRIVNGIDKSHCADAFCIAGNLGAERLGEFFFQKQTRRNNRQI

SEQ ID NO: 6618 - protein, 441 aa, unidentified
MSTCVCVLSNSGERLMPTFRLGKVRRLLKDGKAKIVKHHPFTIQLLYDSKTNTQPIEICEDVGYNYIGISVKSQSHEYVSAQYDTLQDEKEHHDDCRKMRRSRRNRLRYRKPRFDNRKRGESWLAPSLRHKKELNVNVVKMYCAVMPITHATVEVGSFDTMLVKAIQEGKATPESADYQKGPRYKLATLWEAVFYRDNYTCQVCGRKANEGAILHVHHMLYWKGRHGNSLSELITVCEKCHTPANHQKSGKLYGFGENVKFADLSGAAFMNTVRWQIVNELYAAFGKPFVTITYGAMTKEKRIALHLEKSHNNDAYAMGEFHPNCRCTFEHYEKVRRNNRILEKFYDSRYIDIRTGEIATGKELFNGRINRNHKKDSENLHKYRGKRTYAGHRALLRKKVNLNPGDLVSLNGKVLIVHGTHTNKKGAVNVEFKAPAKNGQK

SEQ ID NO: 6619 - protein, 403 aa, unidentified
LLMVAVVDLFGKPLMPTNEYRARKLLKQKKAKIFGYRPFTIQLTERKSAEIQPIELCMDTGYIHIGISAKSERHEYLGMQIDTLTDEKLKRDDKRQYRRQRRNRKRYRAPRFDNRRRKEGWIAPSLEHKKEIHIDAIQRICKVMPITDITLEIGNFDTHVLKAVEEGKPLPQGSDYQHGERYGIATLREAVFLRDGYKCQCCEKSVKDGAILHVHHIKYRSQGGTNRMSNLITVCDKCHTPKNHKPGGKLWNWKPKLAEFKGASYMTSIRWTLYNEVTALLPNSSVHITYGAKTKESRRKLDIKKSHVNDAYVMGLFCPKHRTKPVYFKKKRRNNRVLEKFYDAKYIDSRDGKKQSGQELFNGRINRNHRKDSENLHLYRKQKVTKGKRSIRNKHYLIQPHDI

SEQ ID NO: 6620 - protein, 509 aa, unidentified
MPDTDYIYVLGADGKPQMPTKRKRHVKRLLDTGKARIACHVPYTIQLLYENTPVLQPVILAEDPGRTNIGMAVLSVKGELLMSAVVETRNREIVRLMNHRRGYRRASRNGERKARQRLAKRFSTMLKAGLIMRKLPKFAADKFITCHYIRNTESRFCNRKRPDGWLTPTSRQLVETHINLIHKIQKYLPVTDIAMEVNRFAFLSLENPSVSGVDFQNGPLKGFDSLHDAVNELQHGKCLLCDKKIEHYHHIVPRFMNGSNTIGNIAGLCMECHNKVHKRAAYQKKLNDVKKGLDKKYGALSALNQAVPFICKRLEAEFGKEHVSYCTGRDTAKMRSSFGFQKTKDNQMHETDAWCIGVLALNRIPDIVPDFGQTYCIRQFRRQNRSFVCAQTERAYKLDGVTIAKNRKKRAEQKTDSLEDWYNRQVVLYGKKKADFMRSRLTVVKSKRRYNDLTRVMPGAVFMYNGERYVLSGRLSKGLLFRAVGDAKTNYPASKCKIIRHNEGLVFVC

SEQ ID NO: 6621 - protein, 413 aa, unidentified; identical to SEQ ID NO: 3695

SEQ ID NO: 6622 - protein, 456 aa, unidentified; identical to SEQ ID NO: 5939

SEQ ID NO: 6623 - protein, 416 aa, unidentified
VSEITSYAFVLDVNGKPLAPTKEQKAWFLIRKKRAALVSKYPMVIQLKKEIPENKICKDEIRCGIDDGGLHVGIALVQKCKTKNKVVFKGTIEQRNDVKHLMEVRRGYRRYHRYYKRYRQARFDNRKSSKRKERIAPSILQKRQATMRVIHRLNKWINITNYWLEDVSVDIRALTDGYKPYRWQYQKSNRLDENIRKAAILRDGSKCMECGRANCRLEVHHIKPRRRNGSNTLDNLITLCESCHQKTEGQEELYMDRYFSLLKSSDHKNLNYAQHVMIGKKWLRKQLSNLGVLYLTNGGDTANKRIDWNVEKSHANDAVCITDLQPDTYDMKEWAIKPMRRKSKAKTDNVLGIRHRDLVEYTFKNGETHRGYVTALYPEQKAINFQSPTKHCKKVNARKCKLLWKYSKIYWFENAS

SEQ ID NO: 6624 - protein, 431 aa, unidentified
MPNKVYVINKHGRPLMPCSPAKARHLLDAGKAKVKKRTPFTIQLVYGSSGYTQEVILGVDAGSKTIGMSASTTKEELLSAEVKPRNDVVDLQSTRREFRRARRNRKTRYRKPRFDNRVRSKHKGWLAPSVEVKIQEHITTIRRVYGILPVSKVVVETAEFDLQLLKAIADGKPVPQGEDYQKGEMYGHYNVRQYVLWRDDYTCQCCGAHATKKKEVRLHVHHLESRKVGGDAPDNQVTLCESCHEKLHKGLIAEKDFKKRKRRSTRDATFMGIMQKTLMQRLCSELPIPVVKTRGYITKATREKLLVLPKSHTNDALAIAQGKHGFNVGYLPGIEQIDKICTIRPVRHHNRQLHKAAILTGGIRKSNQTEKYVFGYRLFDKVQFNGQDCFIWGRRTTGIFTIKTINGKMIKDGISFKKLKPVEKSTSYLIA

SEQ ID NO: 6625 - protein, 413 aa, unidentified; identical to SEQ ID NO: 3587

SEQ ID NO: 6626 - protein, 458 aa, Lactobacillus sp.; identical to SEQ ID NO: 5823

SEQ ID NO: 6627 - protein, 464 aa, unidentified
MYVFVIGLDGTRLMPCKPRKARKLIEAHKAEIYKKQPFTIRLLYKTGCASQPITLGIDTGSQHIGIAVTSENKVLYQAEIELRSTMDKRSLMETRYSYRRSRRYRKTRYRSPKFRFHTKRTYSETLVKRKTTGIMTHWVKHTNSMSTNRPDGWLAPSMQSKVDHHIRWINRFLDVLPPDTKLRLEIARFDMARMKNPEVHNELYQHGPQYDYENLKAYVFDRDHYKCVVCKRKLGSKQPDGHSLKGMMHHITFRSKGATDNPDQLVTVCEYCHTPQAHKEGGVLWDLKEKHKSVQRGLRDATQMNIIRTRLVKAFPDAELTYGNITATDRKKMHLPKSHAGDAVAIAMKGEDVNICEPTVYIKQIRKKKRSLHEATPRKGRKRPNTQAVRNPKNTKSIGIYHIYDTVRFQNETGFISGFTGKSAYVQDFDGNYITMPGKSYKQINLSSLELVKHNNNWIQKTRN

SEQ ID NO: 6628 - protein, 442 aa, unidentified
MVTVQQSTHHLPFGRVFIRRNLFMVYVISQDGKPLMPCSDPIARLLLKQGKAKVKKREPFTIKLTYETTNHTQGLTLGVDTGSGTIGTAVSKDNGDIVYMSEVVVRNDITDKMTQRAKYRRNRRNRKTRYRKARWLNRASSIKKDRFSPTMQSKLHSHVREIEYIQSILPVTEMVFETGQFDMQLMKNPSLANPKVRPWGYQKGANYGFENTKAMVLNRDNYTCQCCKGKHKDSKLEVHHIVFRSQGGSDEESNLLTLCHTCHKDLHSGKINPKLSGKVKGNLKYATQMNSIRKQLFRFYPNAIETFGYVTKVNRLHLGVAKEHYYDACTIATQGNAFNVKSNLYKKKCVSDGDFQKTKGIRSEQPIVTDKICGFRKFDKVRYFGNDYFIKGRMSTGYAILMDIDGNKIDFSTMPRGYKTPKLSNCKRITARSTVMTQVKVV

SEQ ID NO: 6629 - protein, 419 aa, unidentified; identical to SEQ ID NO: 4877

SEQ ID NO: 6630 - protein, 443 aa, Chromatium sp.
MAVFVLDKRQQPLMPCSEKKARLLLSRGRAVVARLVPFTIRLKDRVGGAVQPVRIKLDPGSKTTGLALVRETEAIDPETGNTTRRAAVLWLGELTHRGQQISEALTARRQMRRRRRSANLRHREPRFHNRTKPVGWLAPSLRHRVETTQNWVKRLRDLAPVTAISLELVRFDMQQMQNPEISGVEYQRGTLAGYEVREYLLEKWQRQCVYCGAKNVPLQIEHIQPRASGGSNRISNLALACASCNQKKGSQPIAEFLNKKPEVLRRIQAQAKKPLRDAAAVNSTRWALFNALNAIGIPVETGSGGLTQFNRSRLNIPKTHALDAACVGKIDTLTGWQCPILAIKATGRGLYQRAQLDCFGFPRSHRTRRKRIYGFQTGDRVIARVLKGKNAGVHIGRVAIRATGRFNLQTAERLIQSISHRCCTVIQRADGYSYTHQKTLLRR

SEQ ID NO: 6631 - protein, 425 aa, unidentified
MSNYVLVLDAEKRPLDPIHPGAARHLLNEGKAAVFRRFPFTIILKESRPDAPVQDLELKLDPGSKVTGIAIKQGNKVIFGAELQHRGQQIKDALLSRRQLRRGRRNRKTRYRQARFLNRTRPDGWLAPSLQHRVLTTLTWVRKFMRLAPITNITQELVRFDLQLMQNPEISGIQYQQGELQGYEVREYLLEKWNRKCAYCSVENVPLEVEHIQPRSKGGSDRVSNLTIACHACNQSKGNQDIRDFLAGKHDLLNRILKQAKSPLKDAAAVNSTRWALFNALKETGLPVATGTGGQTKFNRTRLGLPKTHWLDAACVGNVESLEILTSKPLIIAAKGHGTRQMCGTNKFGFPTRHKSRVQIHKGFQTGDIVRATVTAGKKIGSYVGRVLCRASGSFDIATTDGRVAGISHKYCKPIHKKDGYLYGF

SEQ ID NO: 6632 - protein, 414 aa, unidentified; identical to SEQ ID NO: 4779

SEQ ID NO: 6633 - protein, 399 aa, unidentified
MRVFVLDKNRKPLDPCHPARARKLLKSGRAKVLRRYPFTIIIKDLEEENCSTHDHQLKIDPGAKTTGLALIQGNRVIWGAELTHRGFQIREALTSRRQLRRSRRNRKTRYRQPRFLNRKRPKGWLAPSLMSRVYNILTWVNKLIKFCPVTGISQELVRFDTQKMLNPEISGIEYQQGTLYGYELREYLLEKWNRTCAYCEANNTRLEIEHIKPKSKGGDHRVSNLAMACHNCNQAKGNLEIEEFLSSKPNVLKRIISQAKKPLADAAAVNATRWKLHDELKLIGLPVEVGSGGLTKYNRCRQNLPKTHWLDAANVGKVEALYIEDYQSLLIAAKGHGKRQICGTNKYGFPIRHNSRKKIHKGFQTGDIVKAVVTKGKKIGTYVGRIATRKTGSFDITTL

SEQ ID NO: 6634 - protein, 480 aa, unidentified
LYTKPLDNIGEGSLLPSGEINLKGMTFMVYVKSIDGKALMPTSNAKARKLLKQKKAKVVSLRPFVVKLTYKTKTEYTQKLNLGVDSGYSNIGFSVIDAKQEYIAGEVKLLEGMKKRLLEKASYRRIRRSRLRYRKARWNNRVKSKKKGWLAPSLKHKLDTHIKFIDYLKNILPIGKITIEVANFDIQKMKDDLISGVDYQNGDMFSFWNVREFVLHRDGHKCQNPNCKHKDKKEQILKVHHIRYRSEGGSDRPENLITLCSKCHTPANHKKGKFLYDWCVNGKKVRGFKDATFMSMIRWYLVNDLKSKHNNVSITYGYITKNHRIQNGIEKSHLNDAFAIAKGTNQARTKDRFLVIQDRLKNRSLEKFYDSKIIDIRTGKKVSGRDLSCGRSTRNKNLNTENLRKYRGAKISKGQRRIRKQKYFYQPNDLVKYDGKVYTVKGTQNEGKYIALKEIKKVPKVELLIPYVFKKGLNWSYGLC

SEQ ID NO: 6635 - protein, 335 aa, unidentified
LISTRRQNRRSRRNRKIRYRKARFQNRVSGKKNWLTPSIRQKVDTHMTVVSRVCKILPVTKIIVETASFDIQKIKDPDISGTGYQHGEQLDFWNVREYVLSRDGHTCQCCKGKSKDPVLNVHHIESRKTGGDAPNNLITLCETCHKGYHSGAVQLPKAIHRGMRFKDAAFMGVMRWNFYNKLKEIYELQGIEIRMTFGYLTKNTRIRHHLPKEHYIDARCISGHPEAISSNVVFYQKKIRYHNRQIHKNTILKGGIRKRNQAGYLVKGFRLFDKVAYEGREYFIFGRRQSGFFDLRNLSGCKVNKGSLSYRKIGFLEPRQYYLCERRVMDTQGCA

SEQ ID NO: 6636 - protein, 432 aa, unidentified
MEGLMSKIFLIDTAKKPLNPIHPAQARQMLRNGKAAIFRRFPFTLILKTAQPETLVDKLRIKIDPGAKTTGLALINDLSGEVIFAAELQNRGFEIRDALKSRSQIRRSRRSRKTRYRARRYKNRSRKEGWLAPSLQSRVDNILTWVSRLRKFAEISAISQELVKFDTQKMQDPEITGKEYQQGTLAGYETREYLLEKWGRKCAYCDTENVPLQVEHIYPQAKGGSNRISNLTLSCEKCNVKKGTKDIKDFLKKHPQRLDAILKQVKKPLADTAAVNTTKYALLKSLEATGLPVETGSGGLTKFNRTQQGLKKTHWIDAACVGQSTPRLIAKNIKPLLIKAEGNGNRKLCITDKFGFPKKHRPRKKLHFGFRTGDIAKAVVTKGKNVGTYIGRVAIRSNGSFDISIKDRHKKQGVSYKYCQTVHRKDGYSYLF

SEQ ID NO: 6637 - protein, 431 aa, unidentified
MVFVLDKHKKPLMPCTEKRARLLLTRKRAVVHKMFPFTIRLKDRTVAQSVLQPLHLKFDPGSKTTGMAVLRGNESDPTEAEAILLGEIRHKPGIKHKLDKRRTVRRSRRARKTRYRKPRFLNRKREKGWLPPSLDARVAQTMSAVNKLLKLLPITSISTEHIKFDTQLIQNPNISGVEYQQGTLAGYEVREYLLEKWARKCAYCQATNVPLQIEHIQPKSRGGTDRISNLTLACHTCNQKKGTRTAAEFGFAGVQDQAKKPLKDAAMLNATRWELYTRLKETGLPVECGTGARTKMRRIRAGFPKSHYYDACCVGAGTPGALVIAQKYISVWTAVGRGSRKLCKTDKHGFPISHRSGKKNHFEFQTGDIVTATVPRGKYMGRHTGRVAARANGSFDIKDSAGKRIAQSVLHKHCRLLQRNSGWHYEKVKAA

SEQ ID NO: 6638 - protein, 414 aa, unidentified
MPCSPAKARLLLKEKKAIVVRRTPFTIQLTIATGESKQPVSLGVDAGYKHVGLSASTEKAELYASEIELRQDITDLLSARRALRQSRRNRKTRYRAPRFDNRIRTKRKGWLAPSVENRINAHLSRIEAVLRLLPVTKITVETASFDLQLLKNPDISGKEYQEGEQLGFWNVREYVLFRDGHVCQHCHGRSKDPVLNVHHLESRRTGGDSPGNLITLCETCHKALHRGEIKLRAKRGQSFRAETFMGIMRWEVLNRLKASHSKLEVNNTYGYLTKHARIKSGITKSHCSDAFCIAGNLGAKRLGEFLFQKQTRRNNRQIHKLSILKGGIRKRNQAPFEIKGFRLFDKVACKGEEGFIFGRRSSGSFDVRRLDGTRISAGISYKKLRLLEKRQTYLTEIRKEEALPSLREGRGLRA

SEQ ID NO: 6639 - protein, 442 aa, Lactobacillus sp.; identical to SEQ ID NO: 3226

SEQ ID NO: 6640 - protein, 473 aa, Aneurinibacillus sp.
MFSMVYVLNHNGEPLMPTKRFGKVRRMLKNKQATVVRRRPFTIQLTYETTNYVQPVTLGVDAGYQTVGFSAVSENEELLSGECRLLTGMSERLKERAMYRRQRRGKLRYRAPRFDNRRRPEGWLAPSIQHKLDSHVRLVELLKKLLPVQKVIVEVANFDIQAIQNPEIAGTLYQEGEQLGFWNLREYILHRDHHQCQHPNCKNKSVNPILQVHHVGYWKGDRSDRPGNLVTLCNQCHIPANHQPKGFLYGWEPKVKSFRPETFMSIVRWRLTQLLGRTATYGYVTKHVRIQHGIEKSHANDAFVIAGGTTQPRTAPFVLQQVRRNNRSLEKFYDAKYVDIRTGAKASGQELFCGRRTRNREVARENLRQYRGVKLSKGRRSIRRMRYPLQPMDTVRFDGKDYLVSGTNNKGKTVVLKGCARVPSVKKVQGVKYGKGFCWLAGEDRRVSGFPFPSEERGIQPGLFMNNQMRRLG

SEQ ID NO: 6641 - protein, 426 aa, Lactobacillus sp.; identical to SEQ ID NO: 3294

SEQ ID NO: 6642 - protein, 443 aa, unidentified
  REGION 1..443: note = Ga0373625_0000996
MLELKNTPTDVQLLQVCSSVSSVLNKVERPSVQDKVLDIINPEGVHSQHTERSLKPLVYVLSKEGNPLMPCTQAKANRMVKKGSCKIIKRFPFTIQLNFECENKTQEVTLGIDSGYENIGFSAVSETKELISGTVKLDGRTSKRIQEKSMYRKLRRNRLWYREPRFLNRTKPEGWLPPSIQRRYDTHLNIINRLKKILPISQVIVEVANFDIQKIMNPDIQGKEYQQGSLYGYQNMRNYLMAREKGRCQLCKKIFEKGQPSHIHHCKPRKEIGSNRPENLAILHKPCHEKLHKQGLKLSKPKSYKPNTFMSIIHKRFWNDIPDLKVVYGYETFIKRNELNLGKFHRNDAFVIANGTIQKRFRSWNVKQKHRHNRAIQMNRKGFKPSIRTSRYKIQPNDLVKIQGLWKETSGIHCKGTRLLVDKKSINIKRVASIYNFGGLSWN

SEQ ID NO: 6643 - protein, 346 aa, Arthrospira sp.
MPNYQNYVFVVDTLGQPLSPTHPARARKLLKQGLAAVFRTYPFTIILKKTVENPVNEPSRIKLDPGASVTGIALVNQSRDTVIWGAELAHRGDRIRAKLAARRLVRRHRRCRKTRYRQARFNNRKRPDGWLAPSLKHRVETTLTWVNRLISSCPITDISMELVRFDTQKLLNPEISGVEYQQGVLFGYELREYLLTKWQHQCAYCGGQNIPLEIEHIQPKSKGGSDRVSNLAIACHKCHQKKGSQPVEQFLLPKPEILKRCSVQAQAPLKNAAAVNSTRWALFNGLKLTGLPIEIGTGGLTKYNRTVQGLPKTHWLDAADCVGKSTHPPVDNQNSPAITNYLFWAR

SEQ ID NO: 6644 - protein, 509 aa, unidentified
MVLTYVLSVDGKPLMPTTRCNRVAWLLKHSMAKVVSKNPFTIRLAYDTPDVTQSLILGIDPGRTNIGLTVIRETGESVYTAHLETRNKKIPKLMKARKQFRTERRTLKRRRKRQCRAIASNTVSPKCVKTSNSQSSNESKKGMKQGVLERLLPGCDTPILCIGIKNKEARFNNRIRKTGWLTPTANHLLQTHLNAMNKICKILPVTKTVLEINKFAFMQLDNPCVKKWQYQRGQLFGYGSVEEVVYEQQNSHCLFCDKAIDHYHHVVPRSKRGSETLANRVGLCAEHHTLVHNDEKWNTKLIDKKQGMNKQYHALSVLNQIIPALSNALVKLFPDRFYATSGKSTYTFREAYGINKDHHIDAYCIAASILPDVNVKLSQTVYEIKQFRRHDRQVCHKANLNRRYALNGKVVATNRHKAMNQKTDSLEEYTTNGGKTENLTVIEHKAQYKRLDRIMPGAIFELDNKRKVMFKTDGFHNNQSDYVCFIDGSKIGYSKCNKPVTLNSGLVYC

SEQ ID NO: 6645 - protein, 444 aa, Trichococcus sp.
MVFVLSKQKQPMDNCTPAKARILLRDGSATIHKQYPFTIRLKDNAAHTADKTYQIKLDPGAKITGVALVDSEAHAVFFAELEHRGERIVALLQTRYRKPKWGNSFKKKDSKFNADTRRPEGWLPPSVVSIEQDIVHFVKKMRNLCMIQLAAVESVKFDMQKMENASITDVVYQQGTLMGYEIRHYLLEKKGHACQYCGGLSQDKHLEVEHMHPKSRGGSDRLSNLNVACHTCNQDKDNRTLAEYVERLKSSKTKLDQTRIKRIEQILRTNKTFIGLRYAAWANSMRHHLVADLEKLLPHISQGTGGQTQYNRTTGMGLPKEHYYDALCVGRIPSSGYRLVTDKVLCIKSYGRGSRFRGRTNSCGIITKQLTRQKQFFSFQTGDVVRATVPNGKKKGIHLGRVAVRKSGYFNIQSTGLVVQGVSYKHCRIIQRNDGYGYTLKQRS

SEQ ID NO: 6646 - protein, 512 aa, unidentified
MSTVYVLNKDGKPLMPTTRGGHVRHLLKEQKARVVRTNPFTIQLLYETDNLVQPLYLGIDPGRTNIGVAVVKTDGTAAFTAHLETRNKEIPKLMQGRKKARRARRTNGRRCRRQRRAKANGTISKKCVKQATAQNGSVSKRANEIGVIKRHLPGCEKEVLCIGIKNKEAKFSNRTRPEGWLTPTANQLLQTHINLVKKIQKFLPISDVVLEINKFAFMQLDNPNIQKWQYQQGPLYQKANLEEAVSEMQEHHCLFCKKPIAHYHHVVPQSENGSNTIGNIVGLCTKHHDLVHKDTTWQKKLTKKKTGLNKKYGALSVLNQIIPALMKELSSLFPKRFFATNGKSTYDYRAAHGVSKDHWLDAYCIAGSVLPNDACDNNINNRVPYELKQFRRHDRRALHKENMSRVYTLNGKSVATNRHKAIKQTTDSLEEFRQRQPNDVCKLKVKEHHPEYRNPKRNFPGCVFLVGKHTHVMQGTSGSHNGKADGYYDTNGNSYSSGKCKFVVKNEGIVFT

SEQ ID NO: 6647 - protein, 414 aa, unidentified; identical to SEQ ID NO: 2588

SEQ ID NO: 6648 - protein, 414 aa, unidentified; identical to SEQ ID NO: 2588

SEQ ID NO: 6649 - protein, 445 aa, unidentified
MSVAVVSKTGMLLMPTSEYRARKLLKSKKAIIHGYHPFTIQLTERETGYIQPVELCMDTGYIHIGTSVKSEKHEYLGEQIDTLTDERQKHDACRMYRRQRRNRKRYRQPRFNNRERDDGWIAPSLEHKKTIHIQAISRICKVIPVTDITLEMGNFDTQVLKAREEGRPLPQGLDYQHGERYSVTTLREAVFLRDGYTCQCCGRTIKDGAILHAHHVVYRSQGGTNRISNLITVCDKCHTPANHKPGGKLYGWKPKVASFKGATYMTTIRWKLYNEVKALFLDIDIHITYGAETKERRRAFDITKSHVNDAFVMGQFHPKHRSKPVCYKKKRRNNRCLEKFYDAKYIDNRNGKTRTGQELFNGRISRNHKKDSENLHQYRRQKISAGKRTIRKQHYAIQPHDIVIFNGEKFETSGCHNNGTRVILLPQKKSVAIKKLNIYRYAGGY

SEQ ID NO: 6650 - protein, 453 aa, unidentified; identical to SEQ ID NO: 4050

SEQ ID NO: 6651 - protein, 414 aa, unidentified; identical to SEQ ID NO: 2588

SEQ ID NO: 6652 - protein, 533 aa, Brachybacterium sp.
VLPQRPALESTSADNPGAGTKRGVEPGTIQDTGVHRGRGETAAPSAASPGKGSFPPPDGGSDPVTHEQPASEGGTSDAPRRAEARVLVLDRRGKPLMPTTPRRARQLLRSGRARVHRVQPFVLRIVDRRVEDSETEPLVLGIDPGFRHTGVALAREQEVPDPRSGRATTIRHGLFLLRVDHRGAVIRDRLSARSALRRGRRSRKLRYRAPRFDNRARAAGWLAPSIRHRAETTVTWARRLAAWAPVTRIDLEVPRFDARALHRADAAVGDRGQGTLHGTEVREYVLERDGRTCVYCGASGLGAASVPLTLDHVRARAHGGPDAPANLVAACVPCNRDKGDREVEEYLARRPAVLARVRRSLASVVQQDLSVSVSRSALCRALQSVGPEVRTHSGGRTKWNRSRAGLPWDHVTDALCVGRVDAIASLPALQHVAVSMGRGSYSRTRMDRYGFPRLRLTRRKMHHGLITGDLVRAVVPSGRRAGTHVGRVAVRASGSCNITTARSTVQHIGHRHITVLQRGDGYRHLRAPVALAA

SEQ ID NO: 6653 - protein, 296 aa, unidentified
INAHLSRIEAVLRLLPVTKITVETASFDMQLLKNPDISGKEYQEGEQLGFWNIREYVLCRDGHVCQHCYGRSKDPVLNVHHLESRRTGGDSPGNLITLCETCHKALHRGEITLKAKRGQSFRAEAFMGIMRWEVQNRLKASHPELEVNNTYGYRTKHARIANDIAKSHCADAFCIAGNLGAERLGEFFFQKQTRRNNRQIHKLSILKGGIRKRNQAPFEVNGFRLFDKVACKGEEGFIFGRRSSGFFDVRKLDGTCISAGISYKKLHLLEKRRTYLTEIRKEEVLPPLPEGRGLRA

SEQ ID NO: 6654 - protein, 515 aa, unidentified
MTALEERLSKTEYIYVLGFDGKPQMPTRRKRHVLKLLKTGRARIAEDIPFTIRLTYRNAPVLQPVTLAEDPGRTNIGAAVLSPLGDLLFAAVIETRNKEIKKLMADRQKSRQASRRGERKARQRLAKRYGSMVKSGMVMRKLPMYAADKFVICKFIRNTQARFCNRKRCPDWITPTVQHLVQTHLNIIRKISRYLPVTDIAFEVNRFAFMHMENPEAMGVDFQNGPLKGYGDVKEAIRTQQHGKCLMCKKPISHFHHIVPRSRGGSDTIQNLAGLCPECHTKVHTDTAFRKDFDEKKSGQLKKYGVLSALNQAVPFICKKLLEEYGEEHVHFCRGLDTSLIRTALGFEKTKKNQMHEVDAYCIGLAALEVNEVETPAFDHTFQIRQFRRQDRSIIHHQTGRSYYQGKEKVAQNRKPGFEQKTTALSQWYEEQVRIHGEKEAEKLRSQLRVEKSCRHYNDMDRFLPGAVFLYEGKRYVLSGRITNGKYLRACGQGMKNFPAAECTFIRHNAGLVFI

SEQ ID NO: 6655 - protein, 424 aa, Ruminococcus sp.; identical to SEQ ID NO: 2430

SEQ ID NO: 6656 - protein, 436 aa, unidentified
MPCHPARARELLKKGRARVHKVFPFTIRLTDRELENSSVQPMLIKIDPGSKETGIALVREEKNKEHHALYFINLQHRGQQIRNALYKRRCLRRSRRSRNLRYRSPRFLNRRRAEGWLAPSLQHRADSILSWVSRLRKITPVERISQELVKFDTQLTQNSKIEGIEYQQGELAGYELREYLLEKFGRKCIYCGADNVPLNIDHVIPKSKGGSNRVSNLVLACVQCNQKKGSRSIEEFLKDKPEVLRQIKNQLKQPLKDAASVNATRWKLFNKLKSTGFPFEVGSGALTKFNRKKFGIPKAHWLDALCVGNVPSVTNWRNLNVLNIKCCGRGAYQRTRTDKYGFPRGICMRQKKVYGFSTGDMVKAIIPKGKKKGVYVGKVAVRKTGSFNLQTSGQTIQGISYRYCRLITHSDGYSYSWKSGPLPPRVETRGILGEVR

SEQ ID NO: 6657 - protein, 407 aa, unidentified
MPCSPAKARLLLKEKKAIVKRRTPFTIQLTIATGEAKQPVTLGVDSGYKHIGLSATTEKAELYASQVELRQDITDLLSARLALRRSRRSRKTRYRAPRFNNRVASKRKGWLAPSVENRITAHMSRVEAVMRVLPVTAITVETAAFDTQLLKNPDIAGEAYQQGEQLGFWNVREYALFRDGHVCQHCRGKYKDPILNVHHIESRRTGGDAPNNLITLCETCHKAFHRGEIELKVRRGKSFKAEAFMGIMRWTLFERLKKAHPELSVRNTYGYLTKHTRISHGIAKSHCADAYCIADNLGAKRLNGFFFQKQTRKHNRQIHKLSILKGGLRKKNQAPYEVKGFRLFDKVICKGEEAFIFGRRTSGSFDVRRLDGTRISAGISYKKLRLLEPRTTYLTEFRKEAALPPPA

SEQ ID NO: 6658 - protein, 442 aa, unidentified; identical to SEQ ID NO: 2903

SEQ ID NO: 6659 - protein, 414 aa, unidentified
MPCSPAKARLLLKEKKAIVKRRTPFTIQLTIATGESKQPVTLGVDAGYKHVGLSASTEKAELYASEVELRQDVSDLLSARRALRQSRRNRKTRHRAPRFNNRLRTKRKGWLAPSVENRINAHLSRIEAVLRLLPVTKISVETASFDMQLLKNPDIAGKEYPEGEQLGFWNVREYVLFRDRHVCQHCYGRSKDPVLNVHHLESRRTGGDSPGNLITLCETCHKALHRGDITLKAKRGKSFRAEAFMGIMRWEVHNRLRALHPGIEVSNTYGYRTKHARIANGIAKSHCADAFCIAGNLGAERLCEFFFQKQTRRNHRQIHKLSILKGGIRKRNQAPFEVKGFRLFDKVACQGEEGFIFGRRSSGFFDVRKLDGTRISAGISCKKLHLLEKRRTYLTEIRKEEALPPLPEGRGLRA

SEQ ID NO: 6660 - protein, 451 aa, unidentified; identical to SEQ ID NO: 3199

SEQ ID NO: 6661 - protein, 394 aa, unidentified
LQFYRKEHGIMQYVYVLNRHGEPLMPCSPGKARLLLKQQKACVVKRTPFTIKLLYGSAGYKQPITLGVDAGSKHVGLSASTEKRELYREEFTPRNDVAELLSTRKQNRRSRRCRKTRYRAPRFDNRVHSKHKGWLAPSVEVKIQEHITIIKRICKILPISLVRVETAEFDTQRLKAMLAGKPLPVGTDYQLGEMYDEYNVRQYVLKRDHYTCQCCGAHNTAKKVVKLHVHHLESRKTGGNAPSNLITLCTTCHKNLHKGKVTLDGKERGKPLRDAAFMGIMRKTLMARLKEELPILVQGTYGYITKMRREQNDIKKSHTNDARCISKHPLAEPCSVCYRTKAIRHHNRQTHKANFSKKGIRKRSQMPYLVEGFRLWDKVLYKGQECFVSGRRSS

SEQ ID NO: 6662 - protein, 529 aa, unidentified
MSTVYVLNKDGKPLMPTTRGGHVRHLLKEQKARVVRTKPFTIQLLYETNDVVQPLYLGIDPGRTNIGVAVVKTDGTAVFTAHLETRNKEIPKLMKKRKESRRARRTNGRRCRRQRRAKANDTISKKCVKQPTAQNGSISKRAKEIGIIKRRLPGCEKDVLCIGIKNKEARFNNRTRPEGWLTPTANQLLQTHINLVKKIQKFLPISDVVLEVNKFAFMQLDNPNIQKWQYQQGPLYKKESLERAVSEMQEHHCLFCDKPIDHYHHVVPQSENGSNTIANIVGLCAEHHNLVHKDAAWQKKLAEEKVGLNKKYGALSVLNQIIPALTKELSFLFPEHSFVTNGKSTYDYRATHGVSKDHWLDAYCIACSVLPSDVCDSNINNHMPYELKQFRRHDRRVLHKANTSRVYTLNGKKVATNRHKAAKQTADSLEEFRQSHPDDICKLKVKEHHPAYRNLNRNYPGSVFFVGKQVHVMQGIASSKDGKATKYNDTSATTIAAGKCEFVAKNSGILFVQCKFRKVFSDETTKKLQ

SEQ ID NO: 6663 - protein, 423 aa, Moorena sp.
MRVFVLNKNRQPLDPCRPARARILLSTSKAKVYRRYPFTIILTEEIKQPVTHGSQLKIDPGAKTSGLAIVQGKRVIWGAELTHRGFQIRDALTSRKQLRRSRRNRKTRYRKPRFLNRTKPKGWLAPSLISRVQNILTWVKKLTRLCPVAGISQELVRFDTQKLQNPEISGIEYQQGTLYGYELREYLLEKWSRKCVYCGATGVQLEIEHIKPKSRGGSDRVSNLAIACHPCNQAKSNQDIELFLSLKPSILRRILSQAKRPLADAASVNTTRWKLYHDLKSIGLPVEVGSGGLTKFNRCRQNLPKTHWLDAANVGKVETLILEVTLPLIITAKGHGTRQICRTNKYGFPTRHCSRIKFHKGFQTGDIVRAVVTKGKKIGTYIGRVATRKSGSFNVSAKSGLVQGISHKYCQFIHRKDGYAYTN

SEQ ID NO: 6664 - protein, 431 aa, unidentified; identical to SEQ ID NO: 4306

SEQ ID NO: 6665 - protein, 436 aa, unidentified
MFRLTVSNIPNQEKGMLCQMVYVLNINGQPLMPTARHGKVRRLLRDKKAKVIKRCPFTIQLLYETLNVTQDITLGVDAGSKHIGLSAATDNKELYAAEVELRNEIVDLLSTRRENRRTRRNRKTRYRKPRFDNRECGDGWLAPSVQNKVDTHLTVIRRVHEILPITKIIVEVAAFDIQKIKNPEIEGVEYQQGEQLGFWNVREYVLFRDGHTCQCCKGKSKDKILNVHHIESRKIGGDAPNNLITLCETCHKDYHEGTVQLPKTIKRGMAFRDATFMGIMRWAFYNQLKGMYPDVSLTYGYFTKNTRIRNGLPKTHFVDARCISGHPLAEPLEYYFYQKKVRCHNRQIHKNAILKSGCRKRNQAPYLVKGFRLFDKVAYNNQECFIYGRRNSGYFDLRKLDGTKVHASASYKKLKLLEPRKTMLCERRMRQFLATV

SEQ ID NO: 6666 - protein, 423 aa, Thermosipho sp.
MVYVISKHGKTLMPTKRHGKVRRLLKQGLAKVVRRGPFTIQLLYDTTTYTQPLTVGIDIGSKTVGISAITEKQELLSMEVELRQDIKRLLLERREYRRNRRYRKRRYRKPRFLNRRRYEGWLAPSVQWKVDAHIRLVNLIAKILPVTKIVIEIAPFDTHKIVNPDVEGIQYQEGPQKSFSDVREYCLWRAGYKSELSGKKGILEVHHIIPRSKGGTDNPSNLIVLTAEEHKALHEGKIKIPRSKLEKVRILKDASHVSTIGWHIVNRLKQQYDVGITFGSITKSKRIEMGLEKTHRNDAFVIADGNKNINRTTKWYFGKFFRRQNRSIHKANPIKGGIRPSNTVKEVRGFRRFDKVRYKNQIGIIHGLRSSGYFDIRTLSGEKIHSSAKWSNLKLLEKAKTLMLESRNQLIPLHLNGVSCAGS

SEQ ID NO: 6667 - protein, 512 aa, unidentified
MSTVYVLNKDGKPLMPTTRCGHVRRLLKEQKAQVVTSKPFTIQLLYETDDVVQPLYLGIDPGRTNIGVAVVKIDGTAVFTAHLETRNKEIPKLMQGRKKARRARRTNGRRCRRQRRAKANGTISKKCVKQTTAQNGSVSKRAKKIGVIKRHLPGCEKEVLCIGIKNKEAKFSNRARPEGWLTPTANQLLQTHINLVKKIQKFLPISDVVLEINKFAFMRLDNPNVQKWQYQQGPLYQKASLEEAVSEMQEHHCLFCKNTIDHYHHVVPQHKNGSNTIGNIVGLCAKHHDLVHKDTSWQEKLAKKKTGLNKRYGALSVLNQIIPALTKELSSLFPKHFFATNGKSTYDYRAAHGVSKDHWLDAYCIAGSVLPNDACDNDINSHVPYELKQFRRHDRRALHKENMSRVYTLNGKSVATNRHKAIKQTTDSLEEFRQRQPNDVCKLKVKEHHPEYRNPKRNFPGCVFLVGKHTHVMQGTSGSHNGKADGYYDTNGNSYSSGKCKFVAKNKGIVFA

SEQ ID NO: 6668 - protein, 442 aa, unidentified; identical to SEQ ID NO: 4467

SEQ ID NO: 6669 - protein, 414 aa, unidentified
MPCSPAKARLLLKEKKAIVKRRTPFTIQLTIATGESKQPVTLGVDAGYKHVGLSASTEKAELYASEVELRQDVSDLLSARRALRQSRRNRKTRYRAPRFNNRLRTKRKGWLAPSVENRINAHLSRIEAVLRLLPVTKITVETASFDMQLLKNPDIAGKEYQEGEQLGFWNVREYVLFRDGHVCQHCHGRSKDPVLNVHHLESRRTGGDSPGNLITLCETCHKALHHGEITLKTKRGQSFRAEAFMGIMRWEVLNRLKVSHPELEVNNTYGYRTKHVRIANGIAKSHCADAFCIAGNLGAKRLGEFFFQKQTRRNNRQIHKLSILKHGLRKRNQAPFEIKGFRLFDKVACKGEEGFIFGRRSSGFFDVRKLDGTRISAGISCKKLHLLEKRRTYLTEIRKEEALPPLPEGRGLRA

SEQ ID NO: 6670 - protein, 422 aa, unidentified
LNKRGKPLMPCSPAKARLLLKEKKAIVVRRTPFTIQLTIATGESKQPVSLGVDAGYKHVGLSASIEKAELYASEVELRKDITDLLSARRALRQSRRNRKTRYRAPRFDNRIRTKRKGWLAPSVENRINAHLSRIEAVLRLLPITKITVETASFDMQRLKNPDISGKEYQEGEQLGFWNVREYVLFRDGHVCRHCHGRSKDPVLNVHHLESRRPGSDSPDNLITLCETCHKALHRGEITLKAKRGQSFRAQAFMGIMRREVLNRLKASYPELKVHETYGYLTKHARIANGIVKSHGADAFGIAGNLGAERLGEFFFQKQTRRNNRQIHKLSILKGGIRKRNQAPFEAKGFRLFDKVACQGEEGFIFGRRSSGSFDVRKLDGTRISAGISCKKLRLLEKRRTYLTEIRKEEALPPLPEGRGLRA

SEQ ID NO: 6671 - protein, 419 aa, unidentified
MVYVQDIDGKPLMPTTRHGKVRRLLKEKKAVVVNLCPFTIKLMYVTSDYKQEIVLGVDAGTKHVGLSATTKSKELYASEVILRNDIINLLSTRRELRKARRNRIRYRKPRFNNRIKSKRQGWIAPSVCQKIDSHIKVVSFIHSILPVSRLIIETSQFDTQKIKNPDILGKEYQQGEQLGFWNVREYILFRDGHKCQHCKGKSKNPILNIHHIESRKTGGDSPSNLITLCETCHKEYHKGNIKLKVKRGTSLRDAAAMGIMKWKLFDKLKSLYPNVSMTFGYITKHNRIKHRIEKSHVSDAFVISENFKAKRLGYHFKMKLTRRHNRQIHKMKMQKGGIKRMNQSPFRVFGFRLFDKVMFYGEKRFIYARRLSGSFKIKDIDGENEKNISYKKLKYIGHGLTSIEVDQSYGYKANTHNNE

SEQ ID NO: 6672 - protein, 266 aa, unidentified
MEEGRPLPVGTDYQLGEQYDFYNTRQYVLHRDEYTCQCWGTHDNNVKLHVHHIESRQTGGDAPNNLITLCEHCHKLLHAGKTIIPKGKKRGKSYRDATFMGIMRKTLLERLKKEIDVPVEGTYGYITKYWRERAGLEKSHIHGAVCISKYPYAKPLDIYYLTKTVRHHNRQIHKSNFSKGGIRKRNQAPYLVKGFRLFDKVLYQGKSYFIFGRRATGFFDIRTLNGAKVNKGSISYKKLRIQDTANAYLKEIKAIPHMNKFTCVLA

SEQ ID NO: 6673 - protein, 453 aa, unidentified; identical to SEQ ID NO: 2687

SEQ ID NO: 6674 - protein, 414 aa, unidentified; identical to SEQ ID NO: 3802

SEQ ID NO: 6675 - protein, 451 aa, Aphanothece sp.
MSNYVLVIDSNKQPLNPCHPSVARKLLKSKNAAIFRQYPFTIVLKKEILDVVIEPIEIKIDPGSQTTGIALVQGDKVIFGAELSHRGSTIKDSLESRRSLRRGRRSRKTRYRQARFLNRKKPSCWLAPSLQHRVDTTLTWIKKLIKFAPIVGISQELVRFDLQQLENPEISGVEYQQGELVGYEVREYLLNKWDRKCSYCSIENVPLQVEHIHPKAKGGTNRISNLCLACESCNLKKGTKDINVFLAKKPDVLKRILSQAKRPLKDAAAVNSTRWTLFNALKNTGLPITTGSGGKTKFNRTRLNLPKQHWIDAACVGIVDTLKVLTNKPLLIKATGHGTRQSCRTDKYGFPSRYVPRFKFIKGFQTGDIVKAVVTKGKKIGTYVGRVAVRSIGSFNISSPNGLIQGISYKNCTPYSQKRMVILMRHRPCPSFPLIANRSTDVARVSMRAER

SEQ ID NO: 6676 - protein, 451 aa, unidentified; identical to SEQ ID NO: 3061

SEQ ID NO: 6677 - protein, 414 aa, unidentified; identical to SEQ ID NO: 3297

SEQ ID NO: 6678 - protein, 412 aa, unidentified; identical to SEQ ID NO: 4932

SEQ ID NO: 6679 - protein, 348 aa, unidentified
GIDDGGLHVGVALVQKCQTRNKVVFKGAIEQRNDVKHLIDDRRGYRCYHRYHKRYRPARFNNRNSSKREGRIAPSILQKRQATTRVINQLNKWINITNYWLEDVAIDIRALTDGYKPYRWQYQKSNRLDENIRKAVILRDGCKCMECGKSNCRLEVHHIKPRRLKGSSTLDNLITLCTKCHQKTESVEELYMDRYFALLKSSDNKNLNYAQHVMIGKKWLREQLSNLGMLYLTNGGDTANKRIDWDIAKSHSNDAICITDLRPDTCEIKEWAIKPMRRQSKAKTDNVLGIKHRDLVEYTFRNGKTHRGYVTALYPEQNAINFQSPTKHCKKVNAKNVKYFGNILKFTG

SEQ ID NO: 6680 - protein, 420 aa, unidentified
MQYVYVLNKHGEPLMPCSPGKARLLLKQQKACVVKRTPFTIKLLYGSTGYKQPITLGVDAGSKHVGLSASTEKRELYREEFTPRNDVVDLLSTRRQNRRSRRNRKTRYRAPRFDNRVHSKHKGWLAPSVEVKIQEHITVIKRICRILPVTLVRVETAEFDTQRLKAMFTGKPLPVGTDYQLGEMYDEYNVRQYVLKRDNYTCQCCGAHTTAKKTVKLHVHHLESRKIGGNAPSNLITLCTTCHNALHKGKVFLDGKERGKTLRDAAFMGIMRNTLLERLRNELHISVQNTYGYITKLLREQNDIKKSHVNDARCISKHPLAEPCSVCYRTKAIRHHNRQTHKANFSKGGIRKRSQMPYVVEGYRLWDKVLYKGQECFVSGRRASGSFTLKKLDGTRISKGVTFKKLRLLEPATNYLIERM

SEQ ID NO: 6681 - protein, 470 aa, Blautia sp.; identical to SEQ ID NO: 2925

SEQ ID NO: 6682 - protein, 421 aa, unidentified
MRGQPLMPCSPAKARHLLKAGKAVVKRRTPFTIQLRIATGETKQNVTLGVDAGAKHVGLSATTKKEEVFASEVELRQDITGLLAARLSLRRDRRHRKTRYRAPRFLNRVRSKHKGWLAPSVENRIQAHMSRIDAVCRLLPVTKIVIETASFDIQKIKDPSVEGTDYQQGDQLGFWNVREYVLFRDGHVCQHCHGYSKDKILNVHHLESRQTGGDAPNNLITLCETCHKACHAGKIKLKVKRAQSFRAEAFMGIMRWTLLDRMRKAHSGLPVENTYGYLTKNTRITLGLPKTHCVDAYCIAGNLKAVRRGVCLHQRQVRKHNRQIHKCTVLSKTLKDGTKIGYRKLNQTPHLVKSFRLFDKVRCLGQTGFIFGRRSSGYFDVRRLDGVKLSSGISYRKLTLLEKRSTYLTELRKEDGASSPV

SEQ ID NO: 6683 - protein, 408 aa, unidentified
MNTCVCVLSNNGERLMPTFRLGKVRRLLKDGKAKIVKHHPFTIQLLYDSKTNKQPIEICEDVGYNYIGISVKSESHEYVSAQYDTLQDEKEHHDDCRKMRRARRNRLRYRKPRFDNRKRSEGWLAPSLEHKKQLNISLVERYVSVIPITHATVEVGSFDTMLLQAIQKGETKPEGADYQEGPRYNLATLREAVFYRDNYTCQVCGRKITDGAILHMHHMFYWKGRHGYKLDELVTACEKCHTPANHQKGGKLFGFGEDKEFADLSGAAFMNAVRWQIVNALHTTYSKEFVTITYGAMTKEKRIALQLEKSHNNDAYAMGDFHPVHRCGFRHYQKRRRNNRVLEKFYDATYIDARTGNKAKGKELFNGRISRNHKKDSENLHKYRSEKVSKGRRSIRKRRYAIQPYDTV

SEQ ID NO: 6684 - protein, 429 aa, Ktedonobacter sp.; identical to SEQ ID NO: 6420

SEQ ID NO: 6685 - protein, 517 aa, Nocardiopsis sp.
MATFRTGEQTHPGVLPQRRALEFGPADNPGIRDETGPEHRDAVPGTEHVRGETGPASPGGSGVTPDPAGVGEQGREAHTERSEPYVFVPDKNQNPLQPCAPARARKLLGKGRAVVHRRTPCTIRLRDRTVAESKVGGVQVGVDPGSQHTGIAVFTHRAGQRRGRYSIQLNHSDARIRKNMGQRAAYRRRRRSANLRYRPPRFSNRTRPRGWLTPSLRHRVDTTTSRVDRSARWAPVRAVHMERVAFDTHALSPGQPLEGIEYQQGTLHGYEVRGCLLAKFGRACVYCGAAKTPLNLDRVHPRSKGGSDRVSNLVLACVPCNQAKGHRPVAEFAPDRAARILSRAKAPLRDATAAQSTRWALWRTLQERTPPRVGSGGRTKWNRMCNQLPKTHTLDALVAGEADTVTETVGRVLVAGRTGRGSYARTRTDRYGFARLRLPRVKRFFTFATGDLVRAVVPAGKKAGSYTGRVAVRASGRFNITTARGTVQGIGHKHMRLLQRADGYGYTWKGEGVPSRP

SEQ ID NO: 6686 - protein, 375 aa, unidentified
VVRRTPFTIQLTIATGESKQPVSLGVDAGYKHVGLSASTEKAELYASEVELRKDITDLLSARRALRQSRRNRKTRYRAPRFDNRIRTKRKGWLAPSVENRINAHLSRIEAVLRLLPITKITVETASFDMQRLKNPDISGKEYQEGEQLGFWNVREYVLFRDGHVCRHCHGRSKDPVLNVHHLESRRTGSDSPDNLITLCETCHKALHRGEITLKAKRGQSFRAQAFMGIMRREVLNRLKASYPELKVHETYGYLTKHARIANGIVKSHGADAFCIAGNLGAESSANSSSRSRLAETTGRFTNFPSSKGAFESAIRHPLRPKASVFLIRLPAREKKASFSAVDHPGLLMYESSTAPAFQPASAARSCVCWRRDGPI

SEQ ID NO: 6687 - protein, 440 aa, unidentified
  source 1..440: note = Firmicutes bacterium
MQRVLVLDCNKNPLMPCHPARARQMLKDGKAAIYRRYPFIIILKERSGGETQPVALKLDPGSKITGIALVADFQKGKRVIWAAELQHRSERIRELLLVRRAVRRSRRNRKTRYRKPRFLNRRRPEGWLPPSLKSRVDNILTWVMRLREFSPVSSLSQELVRFDAQKLENPEISGIEYQRGTLFGYEVKEYLLEKFGRQCAYCRGRSGDPILEVEHVVPKNPKHGPKGTDRVSNLVIACETCNKAKDNNQPEEWLARLEASADPLDKERAENFPTVIEQLKQPLKDTAAVNATRWAIFQSLKSFGLPVEIGTGGRTKYNRVIQHYRKAHWIDAACVGKSGESVFLSSVHVPLYIKAVGRGSRQFCRMDRHGFPRTSPKRIKRVHGFQTGDIVRATIPLGKYAGIHIGRIAVRASGSFRVGSTDGVSWRCCKILHCSDGYEY

SEQ ID NO: 6688 - protein, 432 aa, Sharpea sp.
MSSARYWHEEKFSERKVSEMTNYAFVLDADNKQLAPTKEQKAWFLIRKKRATLVSKYPMVIQLKKKIQDKEICKDEIRCGIDDGGLHVGVALVQKCQTRNKVIFKGTIEQRNDVKHRMDVRRGFRRYYRYHKRYRPARFNNRKFSKRKERVAPSILQKRQATVRVISQLNKWINITSYWLEDVAIDIRALTDGYKPYQWQYQKSNRLDENIRKAVILRDGCRCMECGKSNCRLEVHHIKPRRLKGSNTLGNLITLCTECHQKTEDAEELYMNRYFALLNSSDNKNFDYAQHVMIGKKWLREQLSNLGMLHLTNGGDTANKRIDWGIAKSHSNDAICITDLQPDTCEIKEWVIKPMRRQSKAKTDNVLGIKHRDLVEYTFRNGETHRGYVTALYPEQNALNFQSPTKHCKKVNARKCKLLWKYSKIYWLDDVD

SEQ ID NO: 6689 - protein, 461 aa, Parasutterella sp.; identical to SEQ ID NO: 3646

SEQ ID NO: 6690 - protein, 473 aa, unidentified
MAVFVIGLTEKRLMPTTERKARILLKQKKAEVFCKNPFTIKLLYQTGGTTQHVTLGVDTGSQHLGFAVAGDNGNIIHEQEVSLRRSMEKRKLLVKCKESRRGRRYRKVRYRHPKWRHHTVRAYIQKGCRKKGAKRYWKKLKVQFSSPRPEGWLPPSLQSKTDHHIRWIHRFLDVLPKNTRMVLEVGRFDAARMKNPEVHGELYQRGPQYDYENVKAYVFDRDGYKCRCCHAKAGTRRKDGTVVKLIAHHIDYRSRGASDNPDALASVCDACHTAANHQPGGVLYDWMVKNKRFKRGQRDTAFMNILRRRLFEAFPDAEYTYGNITAARRKELMLPKSHADDAVAIACTGMDINSIRKRPDHVVYVQQVRKKKRSLHEANPRKWSKTKNRFAVRNSKNTKEVNGVCLFDKVEVIGKGYGWVTGFTGTSCYVLDKNGNYVTTADTYKQVAISRLKVIQHSGNWISGLKCPIGNGS

SEQ ID NO: 6691 - protein, 408 aa, unidentified; identical to SEQ ID NO: 3064

SEQ ID NO: 6692 - protein, 424 aa, unidentified
MRVFVFNMRGRPLMPCSQRKARLLLRENKAMIYKYHPFTIQLTYTTGETKQDCHIGIDTGSKYIGAAVRSEDKVFWKGEIELRQDIRSNLDTKRIYRRSRRNRKTRYRKPRFLNRKRRDEWLPPSLQSRINHTFHWIDTLSSLVPNPILHIEVGKFDVAKMINPEIHGVDYQHGQTYGFFDERYFVFARDNYTCQCCGKSKNKILNTHHIIYRSNGGTNRVDNLITVCTDCHTSQNHRKGGIFYQWQEQHKKVKQYKEPPFMNTLRKRIFVAYPDAEITYGSETTPKRKAMKLDKAHYNDAIVISGINEIKENPEEWLLIKQFRKKKRSLHEATARKGRKKPNRNQTRNSKNTPYYKGFYLNDKVSVFGKSGYITGFTSNAAYIKDENNDYITLPNKTYKQVSINKMKLECHNNNWQYIIKNAV

SEQ ID NO: 6693 - protein, 420 aa, unidentified
MQYAYVLNKRGEPLMPCSPGKARILLKQQKACVVKRTPFTIKLLHGSAGYKQPITLGVDAGSKHVGLSASTEKRELYSEEFTPRNDVVELLSTRRQNRRSRRNRKTRYRAPRFNNRVHSKHKGWLAPSVEVKIQEHITVIKRICRILPVTLVRVETAEFDTQRLKAMLAGKPLPVGTDYQLGEMYDEYNVRQYVLKRDNYTCQCCGAHTTAKKTVKLHVHHLESRKVGGNAPSNLITLCTTCHNNLHKGKITLDGKKRGKTLRDAAFMGIMRNTLLTRLRNELNIPVQNTYGYITKLLREQNDIKKSHVNDARCISKHPLAKPCSVCYRTKAIRHHNRQIHKAKILKGGIRKANQAPYIVKGFRLWDKVLYNEQECFISGRRSSGYFALRKFDGTTITNSISFKKLRLLEPATNYLIERK

SEQ ID NO: 6694 - protein, 424 aa, Moorena sp.
MRVFVLDKNKKPLDPCQPARARILLKQGKARVLKRYPFTIIMPELEVKNCVTHEHQLKIDPGAKTTGLAIVQDNKVVWGAELTHRGFQIRDALISRRRLRRSRRNRKTRYRQPRFLNRKRSVGWLAPSLMSRVHNILTWTKKLSRLCPIVGISQELVRFDTQKMENPEISGVEYQQGTLYGYELREYLLEKWNRQCAYCGAANTPLEIEHIKPLARGGSNRVCNLAIACHKCNQTKGVQEIEQFLSGKPSVLKRVLAQAKKPLANAAAVNSTRWKLYNHLKSTGLPIETGSGGLTKYNRCRQNLPKTHWLDAANVGKVDNLYIESYQPLLITAKGHGTRQMCRTNKFGFPTRYVPRYKEVKGFQTGDIVKAIVTKGKKIGTYTGRVATRQTGSFNISTKPGLVQGISHKYCSVIHRKDGYYYSF

SEQ ID NO: 6695 - protein, 459 aa, unidentified
MPTTRYGKVRRMLKSGQAVAARTKPFTIRLAAVREDGTCLYSAKCGTRNKQVPKLMAERAMHRRASRRGERLARKRLAKKLGTTTKFLNGRTLPGYGKPVMLKDIINTESRFNNRRRPEGWLTPTARQLLQTHLRLIEEVCRILPVTRVAVELNRFAFMAMDNPQVRRWQYQKGPLHGYHGIREALKEIQGGTCLLCGSRSIEHGHHIVPRSRGGSNTLVNIAGLCESCHTKVHNDEDAAARLEKTKAGQNKKYHALSVLNQIMPRLLKELDMKFPGQTFITSGRDTKAYRDGHGIAKDHDADAYCIACSTLEKQAILDVPKDGFHIKQFRRHDRALINNQRERIYKLDGLEVAQNRRKRMDQKGPSLHEWFLGMVKQHGRQIARRMQSQLVVSKSARRHNSPDRMLPGMVFLYEGKQYVMSGQLSGGAYLRACGAGNQNFPASRASILSRNAGLVYVA

SEQ ID NO: 6696 - protein, 485 aa, unidentified
  REGION 1..485: note = Ga0315285_10008303
VRRRSGESQRTDGGVHASSPALSKQVANKSQEVGTVRLHTADLEPREGAQTPCAARKSGREIAAETRHIAQPVFVVDEAGRILAPCHPARARELLGRGVAQAVETCPFAIRLLKSVPDPRVQGTDFKVDTGAAHHGFAVVEKESGRCLLWGQMDLRRDIKERLDWRRICRRNRRNRKTRYRKPRFDNRRRPEGWLPPSLEHRVACLTKFASRLAKFVKVDRIVAETAQFDMHRLMNPEVEGEGYQKGLLYKTDLRRYLFWKFKGKCAYCKKDLDKGWQADHVQPKSRGGSDRPFNRVAACEKCNQVKGNKTAEEFGHPEATDLATRAYAPAAIVTSIRTALVKALARLAPVRETDGALTARNRRKAKLEKSHAADALVALEAPTKITIPEKELRIVVRSCGSRQLVNGQRGEHKIRLNREIKGYRQWDLVEWRGRRCYVKGRRKTGSFLLSDLLGEKIGDGASAKRLHLIRRRTTLQGEYVSMCV

SEQ ID NO: 6697 - protein, 421 aa, unidentified
MLVYVLSKNGQPLMPTHRCGFVRRLLNSQKAKVVRRCPFTIQLQYDTDCKTQPVTLGIDAGSKHIGVSATTESKVLYEADIELRNDIVDLLATRRQMRRARRSRKTRYRKARFDNRKRNDKWLAPSIQHKVNCHLEAVRFVHKLLPISKIIVEVASFDIQKIKNPLITSTDYQNGELLDWKNVREYVLFRDSHICQCCKGKSKDPVLQVHHIESRKTGGNAPNNLITLCKTCHNGYHHGTVKLPAKIKRGMKFNDATFMGIMRWGFYNQLKSLYPDVSLTYGYITKDIRISNGLAKTHFIDARCISGNPLATSDNTVYFLKKRRRHNRQIHKFNILKGGRKKRNQAAYLVKGYRLFDKVNYNRKEYFIFGRRASGFFDIRTLSGEKVNKGSISCKKLKLLEASKGYLTERRNAFLSPLNSV

SEQ ID NO: 6698 - protein, 451 aa, unidentified; identical to SEQ ID NO: 3199

SEQ ID NO: 6699 - protein, 431 aa, Escherichia sp.
MNRVFVLGKTGQALMPCHPARARQLLQSKKARVKRLYPFTIQLTQRSDGYIQPVELKFDPGSKQTGVGLVLHGKNRLSAIYASVLTHRGQEIKSNLDSRRMIRRARRNRKTRYRQERFLNRVRSKHKGWLAPSVHSRVDNIVEWSKRFMRLSHVDFITVESVKFDMQKMESAAVEGLEYQRGTLFDYEVKEYLLEKYHYSCVYCGIKNVPFEKEHVVPRSRGGSNRISNLVLSCRSCNEKKDNLPIEEFLKDNPALLKKIKAQLKSSLKDAAAVNITRKQIVKELSDLNVPVLTGIGAETKYNRVSQGYGKEHYIDALCAGTTGTKVYIPSKLKPLLIKKERRNNRQMCLVDKYGFPRGKAKGSKIVHGFKTGDIVKAVVLKGKKKGVYKGKVAVRSSGSFNINVKQGRIEGIGWKNCVMLHRFDGYSYTY

SEQ ID NO: 6700 - protein, 414 aa, unidentified
MVYVINKQGQALMPTERFGKVRRLLKNSLAHVVCRIPFTIQLDYDTTDYTQPVSLGVDAGSKHIGISATTSEKEMYAADVELRNDIVDKLSTRRELRRTRRSRLRYRKARFNNRVSSKRKGWLAPSVENKIQTHLTVVEKINKFLPITNIVVETASFNIQKINNPSIYGSEYQQGEQLDFFNVREYVLFRDNHTCQHCKGKNKDKVLNVHHIESRKTGGDSPKNLITLCETCHKAYHRGEFELNVKRGKSFRDSAFMGIMRWKLYDRLKNIYPNVSMTFGYITKNTRITNNLPKDHYVDARCISGNPTAKPLGYYFYQKKVRCQNRQIHKANFLKGGRKKLNQAPFLVKGFRLFDLVEYKKELYYIFGRRSNGSFDIRKLDGTKVNKGSINCKYLRLIDKRKSILTEKRTQVNL

SEQ ID NO: 6701 - protein, 420 aa, unidentified; identical to SEQ ID NO: 5988

SEQ ID NO: 6702 - protein, 477 aa, Caldanaerobius sp.; identical to SEQ ID NO: 4554

SEQ ID NO: 6703 - protein, 343 aa, unidentified
DRKGRHWKKKEITFASKRAKGWLPPSLQSKTDHHIWWIKKLQDLLPEGYRLSIELGRFDPARLKDPEIHGELYQKGPQYDYENVRAYVLNRDRYTCQVCGKKGGKLHVHHILYRSHGATDDPQYMATVCSDCHNTENHQQGGILYQWMQKQKKFTRGLRDATFMNILRKRLIEAFPGATFTYGNITKADRERLRLPKSHGNDATAIAIVKTGIMTVKDKEPVIYIQQVRRKKRSLHEETPRKGRKEPNRKASRYDKNTKAVTVTKRKNKKKITITGCLFDRVELNGKKGWISGFTDKSCYVKDENDQYIRTSPKYKQVSLSKLKILHHCGNWAIGARRSLGKG

SEQ ID NO: 6704 - protein, 358 aa, unidentified
CKKDVLCVGIKNKEAKYTNRARLEGWLTPTANQLLQTHINLVKKIQKFLPISDAVLEVNKFAFMRLDNPNIQKWQYQQGPLYQKGSLENAVSEMQEHHCLFCEKPIEHYHHVVPKSENGSNTIANIVGLCAEHHNLVHKDVAWQEKLVEEKTGLNKKYGALSVLNQIIPALTKELSFLFPKHSFMTNGKSTHDYRAAHGISKDHWLDAYCIACSVLPIDVCDSTINNCVPYELKQFRRHDRRALNNENMNRVYTLNDKVVATNRHKATEQEAASLEEFRKEHPNDVCKLKVKEHHPTYRNMNRNYPGSIFLVGKHVHIMQGIAGSKDGKATTYKDSNANSITASKCKFVAKNSGILFV

SEQ ID NO: 6705 - protein, 371 aa, unidentified
LQFYRKEHGIMQYVYVLNKHGEPLMPCSPGKARLLLKQQKACVVKRTPFTIKLLFGSAGYKQPITLGVDAGSKHVGLSASTEKRELYSEEFTPRSDVVELLSTRRQNRRSRRNRKTRYRVPRFDNRVHNKHKGWLAPSVEVKIQEHITVIKHICKILPISLVRVETAEFDTQRLKAMLAGKPLPVGTDYQLGEMYDEYNVRQYVLKRDHYTCQCCGTHNTAKKVVKLHVHHLESRKTGGNAPSNLVTLCTTCHKNLHKGRVTLDGKERGKPLRDAAFMGIMRKTLMVRLKEELPIPVQGTYGYITKMRREQNDIKKSHTNDARCISKHPLAEPCSVCYRTKAIRHHNRQTHKANFSKKGIRKRSQMPYLVE

SEQ ID NO: 6706 - protein, 456 aa, Halomonas sp.; identical to SEQ ID NO: 2773

SEQ ID NO: 6707 - protein, 474 aa, Halomonas sp.
LEDLRHQARKGSIEEGDRMAVFVLGKNKQPLMPCSEKRARLLLERGRAVVVNLTPFVIRLRDRCLSDCALQPTLLGIDPGSKETGLALMRLENNATEEKAPATRHVLCLFQLVHRGFQIRQALEQRAGFRSRRRSKNLRYRQPRFDNRTRKKGWLPPSLQHRVDTTMAWVDKLCRWAPVTHLSMELVRFDLQTMENPEISGVEYQQGTLFGYEVREYLLEKWGRECAYCGTSDTPLEIEHVVAKSRDGSSRVSNLTIACHECNQAKDNQWLVNFFAADKGLKKRLKANGLSATVRLERVQRQLKLPLRDATAVNATRWTLFGIMKATGLPVAVGSGGRTKYNRQRLGIPKTHALDAACVGKFDTLKGWRVPTLVIKAMGRGSYQRTRLDKYGFPRGYLMRQKQVQGFQTGDRVRAVVPSGKKAGTHTGRVAIRKTGSFNIQTEQGAVQGISWRHCTLLQRGDGYGYHPLPTIQH

SEQ ID NO: 6708 - protein, 470 aa, unidentified
MVGGVSQIFQKKEVSVLDTVAVISASGRKLMPTNSYRARRLLKSKRAVIYRYRPVFTIKLADRADGYTQPIEYKCDTGYQNIGISICSDTKEFVNEQRDLLKDEVKRHSNSRKYRRTRRNRLRYRKKRFDNRRGMISRDGFAPSIRNKRDVHVRLYEEYYKVFPITKAVFEMGQFDTQVLKAVEAGLPVPVGTDYQQGEQYGYATLREAVFARDSYTCICCGKSAIKDGVKLRIHHIGYLSGDRSNRMANLGSVCESCHTSKNHKPGGKLYNLKPELKTFKGAAFMTTVRYSMVKQLKAATPDVDIRVTYGAATKLARKALNVKKTHSNDAYCMGEFHPEHRSDFKHYRKCRRNNRVLSRFYDAKYRDLRDGSVKTGSQLSCGRTSRRISRRTELNERIYRGHKISKGKLVVRRQHYQYRPGDTVWAEGKRYTVKGIISNGTRIALNERNPVSVNKIDKTVHTGGWAKAS

SEQ ID NO: 6709 - protein, 457 aa, unidentified; identical to SEQ ID NO: 3236

SEQ ID NO: 6710 - protein, 434 aa, unidentified
VVLMDAWDIIVVLNKRGKPLMPCSPAKARLLLKEKKAIVKRRTPFTIQLTIATGESKQPVSLGVDAGYKHVGLSASTEKAELYASEVELRQDITDLLSARRALRQSRRNRKTRYRAPRFDNRIRTKRKGWLAPSVENRINAHLSRIETVIRLLPVTKISVETTSFDMQLLKNSDIAGKEYQEGEQLGFWNVREYVLFRDGHVCQHCHGRSKDPVLNVHHLESRRTGGDSPGNLITLCETCHKALHRGEITLKAKRGQSFRAETFMGIMRWEVLDRLKASHPKLEVQNTYGYRTKHARISNGIAKSHCADAFCIAGNLGAERLGEFFFQKQTRRNNRQIHKLSILKGGIRKRNQAPFEVNGFRLFDKVACKGEEGFIFGRRSSGYFDVRKLDGTHISAGISYKKLRLLEKRQTYLTEIRKEEALPPLPEGRGLRA

SEQ ID NO: 6711 - protein, 419 aa, Moorena sp.
MQNYVFVIDANKQPLNPIHPKKARRLLDKGKAAVFRMYPFTIILKTAIANPVILPCQIKIDPGSKTAGFALVRDGQVIWGMELEHRGGLIKKKLESRRAVRRGRRNRNTRYRKPRFLNRKRPEGWLPPSLEHRILTTETWVKRLIKFCPVREIWIERVKFDTQKMQNPEISGVEYQQGELVGYEVREYLLEKWGRECTYCGKQNVPLQVEHIHPISKGGSNRVSNLCLACEKCNQRKGNKPIEEFLKKKPSLLQKIKTKTKQPLTDAAAVNATRNKLVKVLKDSRVVVTGTGAQTKYNRTRLGLPKQHWIDAACVGNIESLALKTLQPLLVTCKGQGGRQKAALNKYGYPIRHNPLKPIKGWMTGDIAKHQKLGIGRVIPRSKGSFGFTPLGMKGYKSCFPQDISAIHRKDGYTYGFCK

SEQ ID NO: 6712 - protein, 415 aa, Homo sapiens
MIYVKNKDGKAIMPSERGGRIGYLLRHGKAHVVSRVPFVVQLDYDSTTYTQDVSLGIDAGSKHIGVSASSEKKEMLAAQVELRSDIVNLLSTRRELRRTRRNHKTRYRKSRFDNRKKKDGWLAPSVGQKIESHLKVIRLVHKLLPITKTTIEVAQFDAQKIKNPDINGEDYQQGEQMGFWNVREYVLARDGHKCVHCKGKSKDPILNVHHLESRKTGGNSPSNLVTLCETCHKAYHRGEFELKIKRGTSLRDAAVMNIMRWNVYKRVNAEFRNVHLTYGYVTKHTRIENGIAKTHAADAFCIAKNVHAMRLSSFFMCRCVPRHTRALHVANPKKGGIRRNTIASHKIGKSNFQRFDMVRWMGKECFIFGSTHGRPVLRDIDGIQVANQPSVNIKTIKFLKRLKNNILMEEKTSEI

SEQ ID NO: 6713 - protein, 274 aa, Moorena sp.; identical to SEQ ID NO: 3413

SEQ ID NO: 6714 - protein, 478 aa, Erysipelotrichaceae sp.
MQKNKTVLVIGLNGCGLMPCTPRKARILLTEKKAKVVRRSPFTIRLLYKTGCSTQPTTLGVDTGSQHIGIAIVSDDTVLAKSEYELRSTMEKRKLMEIRKQYRRSRRYRKTRYRHPKFWFHTKRTYVEKPIKRNDHMTHWKKETVSCMSNRPAGWLPPSVQSKCDHHIRIISRYIEALPPSTRAVIEIGRFDMAHMLNPAAHGEEYQHGPQYEFENKKAYLLKLYDYKCPIYGKKFGSVRTDGITVKARLHHVLYRSKGSTNNANVLIPICNHCHTAEAHQGGGTLDKLRKIAEKQQLGIRGLRDATMMNVVAKHIQAAFPDAYYTYGNITKADRDEMCLEKSHANDAVAIAKHLDIRAFRNYTISDCGYTTLYKQVRKKKRSLHEANPRKGRKQPNRTAKRNAKNTKRVKNVCLLDKVVYQHNVGIVIGFSNSSCRAVKADGSYLGANVKYKQPVLPVGQVEVLHHNNNWMEMRLVI

SEQ ID NO: 6715 - protein, 431 aa, unidentified; identical to SEQ ID NO: 6117

SEQ ID NO: 6716 - protein, 424 aa, Tolypothrix sp.
MSNFVFVIDTDKKPCNPIHPVTARKLLSSKKAAVYRTYPFTIILKSVSTKETKPVQIKIDPGSKVTGLALVQDSKVVFGAELSHRGSAIKASLESRKSLRRGRRARHTKYRKPRFSNRARPKGWLAPSLQHRVETVLTWVKKFIKLSPVTGISQELVRFDLQQLENPEISGIEYQQGKLLGYEVREYLLNKWDRKCTYCGIENVALQVEHIHPKAKGGSNKISNLCLACDKCNKKKGTQDIKTFLSKKPELLKKILFSAKRPLKDAAAVNSTRWALFNALNTTCLPVSTGSGGKTKFNRTRLKLSKTHWLDAACVGNVESLEILTTKPLLIKTVGHGSRQSCRTDKYGFPNRYVPSNKIHFGFQTGDIVKAVVTTGKKVGCYVGKVAIRSSGSFNITAKNGLAQGISYKFCKRIHSKDGYSYGQ

SEQ ID NO: 6717 - protein, 428 aa, unidentified
LKVFVLNMRGRPLMPCSPAKARHLLKAGEAVVRRRTPFTIQLRIATGETKQSVTLGVDAGAKHVGLSAATEKEEVFASEVELRQDITGLLAARLSLRRERRQRKTRYRAPRFLNRVRSKHKGWLAPSVENRIQAHMSRIDAICGLLPVTKIVIETASFDIQKIKHPDVEGTDYQQGDQLGFWNVREYVLFRDGHVCQHCHGHAKDKILNVHHLESRQTGGDAPNNLITLCETCHKACHAGKIKLKVKRGQSFRAEAFMGIMRWTLLDRVRKAHPGLPVENTYGYLTKNTRIAMGLPKAHCVDAYCIAGNLKAVRRGVHLYQRPVRKHNRQIHKCTVLSKTLKDGTKIGYRKLNQTPHLVKNFRLFDKVRCLGQTGFIFGRRSSGYFDVRRLDGVKISSCISYRKLTLLEKRGTCLTELRKEDGASSTV

SEQ ID NO: 6718 - protein, 420 aa, unidentified
MQYVYVLNKHGEPLMPCSSGKARLLLKQQKACVVKRTPFTIKLLFGSTGYKQPITLGVDAGSKHVGLSASTEKRELYCEEFTPRNDVVDLLSTRKQNRRSRRNRKTRYRAPRFDNRVHSKHKGWLAPSVEVKIQEHITVIKRICRILPITLVRVETAEFDTQRLKAMLEGKPLPVGTDYQLGEMYDEYNVRQYVLKRDHYTCQCCGAHTTTKKTVKLHVHHLESRKVGGNAPSNLITLCTTCHDALHKGKVSLDGKERGKPLRDAAFMGIMRKTLMARLRDELSIPVQGTYGYITKMRREQNDIKKSHVNDARCISKHPLAEPCSVCYRTKAIRHHNRQIHKANFSKGGIRKRSQMPYVVEGYRLWDKVLYKGQECFVSGRRASGSFTLKKLDGTRISKGVTFKKLRLLEPATNYLIERM

SEQ ID NO: 6719 - protein, 314 aa, unidentified
LFRQGRLIVKEVTYMSTVYVLNKNGKPLMPTTRCGHVRRLLKEQKARAVASKPFTIQLLYETDDVVQPLYLGIDPGRTNIGVAVVKTDGTAVFTAHLETRNKEIPKLMKKRKDSRRARRTNGRRCRRQRRAKANGTLSKKCVKQTTAQNGSVSKRAKKIGVIKRHLPGCEKEALCIGIKNKEAKFNNRTRPEGWLTPTANQLLQTHINLVKKIQKFLPISDVVLEVNKFAFMRLDNPNIQKWQYQQGPLYQKASLEEAVSEMQEHHCLFCKNTIDHYHHVVPQHKNGSNTIDNIVGLCTKHHDLVHKETAWQEK

SEQ ID NO: 6720 - protein, 280 aa, unidentified
VKYKIDAHIRVIDNVCSILPIFRIVIEVAQFDTQKIKNPNISGKEYQEGDQLGFWNTREYVLARDGHKCQYCKGKSKDKILNVHHLESRKTGGDSPSNLITLCETCHKEYHKGNIDLKIKRGSSLRDAAVMGIMKWKLYEELRSRYDRVSMTFGYITKHNRIKYGIEKSHTSDAFVISKNINAKRIGCQYLKRLIRRHNRQIHKMKILKGGKKKNNQAPFEVFGFRLFDKVLYNNKICFVYGRRKSGSFNIRDFNGENSKDVSRKKFKLIRGKMHPIILK

SEQ ID NO: 6721 - protein, 425 aa, unidentified
MFVYVINKHGQPLMPCTPRKARLLLKAGKAKVVHAVPFTLQLLYGSSGYRQDVGLGVDAGTRHIGISATTENEVLFEAEVHPRTDIQALLATRRQFRRVRRSRKTRYRPARYANRKKPKGWLTPSVQHKVESHLKAIRFVGAILPVNRITIEVAQFDMQKIKNPSIAGEEYQHGPQSDFWNTRQYVLWRDEHRCQRCQGKSKDPILNVHHIESSKTGGDSPDNLVTLCETCHTALHKNHLESTLTRRSPSLRDATQVNMMRWQVYEQAKALCSQVCLTYGYQTKQTRIATNLEKSHGIDARCISGHPQACSDGTSYLFKCVRRNNRQVHKATIRKGGMRSRNTAPRYVKGFRLFDQVRYEGKLCFIFGRRSSGYFDLRRLDGTKVHASANYKHLHLVQRSSTCLRERRSGIPPTPEGAGILPLES

SEQ ID NO: 6722 - protein, 426 aa, Lactobacillus sp.; identical to SEQ ID NO: 3294

SEQ ID NO: 6723 - protein, 535 aa, unidentified; identical to SEQ ID NO: 6116

SEQ ID NO: 6724 - protein, 414 aa, unidentified
MPCSPAKARLLLREKKAVVVRRTPFAIQLTIATGESKQPVSLGVDAGYKHVGLSASTEKAELYASEVELRQDITDLLSARRALRQSRRNRKTRYRAPRFDNRIRTKRKGWLAPSVENRINAHLSRIETVLRLLPATKITVETASFDTQLLKNPDISGKEYQEGEQLGFWNVREYVLFRDGHVCQHCHGRSKDPVLNVHHLESRRTGGDSPGNLITLCETCHKALHRGEIALKAKRGQSFRAEAFMGIMRWEVLNRLKASHPELEVHNTYGYWTKNARIANGIAKSHCADAFCIAGNLGAKRLGEFFFQKQTRRNNRQIHKLSILKGGLRKRNQAPFEVKGFRLFDKVACKGEEGFIFGRRSSGSFDVRKLDGTRTSAGINYKKLRLLEKRPTYLTEIRKEEALPPLPAGRGLRA

SEQ ID NO: 6725 - protein, 493 aa, unidentified; identical to SEQ ID NO: 2644

SEQ ID NO: 6726 - protein, 442 aa, unidentified; identical to SEQ ID NO: 2939

SEQ ID NO: 6727 - protein, 443 aa, Anoxybacillus sp.
MVEENMTCFMQRKGENPMVFVLDTNKRPLAPCHEAVARKLLKQGKAAIYRRFPFTIILKKSVDESEIKATYRLKIDYGSRHTGLAILRGQEVVWLGQLDHRTDIKERIDKRRAFRRARRNRKTRYRKPRFLNRKRKEGWLPPSLESRMQNIKTWVERLRKICPIEHISYENAKFDTQLMRNPEINGVEYQQGTLQGYEVREYLLEKFGRKCCYCGKEGVPLEIEHIIPKSRGGTDRVDNLCLACHDCNQRKGSQTAEEFGYPHIQEMVKKTLKDASVVNATRWKVYEVLKQSGCEVECGTGARTKMNRIRLGLPKIHYFDACCVGKSTPLQLHFKTKEVLFIKAKGRGSRSRTNLDRYGFPRGYLARQKYFFGFQTGDMVKANVPKGKYQGVWFGEVACRKTGSFDIKGKDGKRIAQGINYRYVQVIQRFDGYAYGKGVAELA

SEQ ID NO: 6728 - protein, 465 aa, unidentified
MSTCACVLNKNGERLMPTIRLGKVRHLLKDGKAKIIKHHPFTIQLLYDSETNIQPIEICEDVGYNYIGISVKSQSHEYVSAQYDTLQDEKSCHDACRRMRRTRRNRLRYRQKCFDNRKRDKGWLAPSLKHKKELNVNVIKMYCEVVPITHATVEVGSFDTMLVKAIEEGKATPEGADYQKGPRYNLATLREAVFYRDNYTCQVCGREASEGAILHVHHMFYWKGRHDNSLSELITVCEKCHTPANHQKGGKLYGFGEDIKFANLSGAAFMNTVRWQIVNELYAAFGKPFVTFTYGAMTKEKRIALHLEKSHNNDAYAMGEFHPNCRCTFEHYEKVRRNNRILEKFYDSRYIDIRTGEIATGKELFNGRINRSHKKDSENLHKYRGKRIRKGYRALRRKKVALNPGDLVSLNGEILTVHGTHTKKNGSVNVEFKTPSKSGKKSTSLKKLKIIKTISPMRSAWDKVS

SEQ ID NO: 6729 - protein, 408 aa, unidentified
MVYVQDINGKPMMPTTRHGKVRRLLKDKKAIVVNLCPFTIKLMYVTSDYKQEIVLGVDAGTKHVGLSATTKSKELYSSEVILRNDIVDLLSTRRELRRSRRNRLRYRKPRFDNRIKSKRPGWVAPSVKYKVDAHIRVIDNVCSILPISRIVIEVAQFDTQKINNPNISGKEYQEGDQLGFWNVREYVLARDGHKCQHCKGKSKDPVLNVHHIESRKTGGDSPSNLITLCETCHKEYHKGNIDLKIKRGSSLRDAAVMGIMKWRLYEELRSKYNRVSMTFGYVTKYNRIKHGIEKSHVFDAFVISKNFDAIRLGYYYKVRLVRRHNRQIHKQKIPKGGIKRPNQSPFEVFGFRLFDRVMFENSYYFIFARRKTGSFNIRDIDGKNQRDITYKKLKLSRCKRFMVQKEMD

SEQ ID NO: 6730 - protein, 452 aa, unidentified; identical to SEQ ID NO: 3322

SEQ ID NO: 6731 - protein, 407 aa, unidentified
MPCSPAKARLLLKEKKAIVKRRTPFTIQLTIATGEAKQPITLGVDSGYKHIGLSATTEKAELYASQVELRQDITDLLSARLALRRSRRSRKTRYRAPRFNNRVASQRKGWLAPSVENRITAHMSRVEAVMRVLPVTAIAVETAAFDTQLLKNPDIAGAAYQQGEQLGFWNVRKYVLFRDGHVCQHCRGKYKDPILNVHHIESRRTGGDAPNNLITLCETCHKAFHRGEIKLKVKRGKSFKAATFMGIMRWTLFERLKKAHPELSVRNTYGYLTKHTRISHGIAKSHCADAYCIADNLGAKRLNGFFFQKQTRKHNRQIHKLSILKGGLRKKNQAPYEVKGFRLFDKVICKGKEAFIFGRRTSGSFDVRRLDGTRISAGISYKKLRLLEPRTTYLTEFRKEAALPPPA

SEQ ID NO: 6732 - protein, 431 aa, unidentified; identical to SEQ ID NO: 5220

SEQ ID NO: 6733 - protein, 421 aa, unidentified
MRGQPLMPCSPAKARHLLKAGKAVVKRRTPFTIQLRIATGETKQNVTLGVDAGAKHVGLSATTEKEEVFASEVELRQDITGLLAARLSLRRDRRHRKTRYRAPRFLNRVRSKHKGWLAPSVENRIQAHMSRIDAVCRLLPVTKIVIETASFDIQKIKDPSVEGTDYQQGDQLGFWNVREYVLFRDGHVCQHCHGRSKDKILNVHHLESRQTGGDAPNNLITLCETCHKAYHAGKIKLKVKRGQSFRAEAFMGIMRWTLLDRVRKAHPGLPVENTYGYLTKHTRITHGLPKTHCVDAYCIAGNLKAVRRGVYLHQRQMRKHNRQIHKFTVLSKRLEDGTKIGYRKLNQSPYLVHGFRLFDKVRCLGQIGFIFGRRSSGYFDVRRMDGVKLSPSISWRKLTLLEKRSTYLTELRKEDGASSPV

SEQ ID NO: 6734 - protein, 463 aa, unidentified
LAKATKGCLYPLTALNKQKLIRKDFVKRMTKTLTTRTTQACVLDQQGRPLMPTTRLGKVYRLLKTQKAHIVSYEPFTIQLDYEPDTQVIQPMTLGVDSGAIHSGYSLTNEHREYYSAEVVARNDISNRLSDRRMCRQNRRSRKTRYRQPRFNNRKNQKKGWLPPSLEQKVTVQVNEINHIHRYFPIDTIIVETAEFDIQKIKNPDISGIEYQQGTLQGYNIRNYLLEKHGRRCFYCGKAVSDFEVEHMFPKSKGGSNRIDNLTLSCHDCNEKKGTLTVEEFIQQTLPAKKATAKLKQLPQEKRLFKYMAYMNATRWALYDAIKERYPNVKMTYGYITKYNRIQAGLPKAHHIDAKCITGFPTVPSIDQTVVKVKMRRHNRQLHRATFSKGHVRKAACLPTTVFGFQLYDLVLFNNHRYYIKGRRSSGSFALVSVEGLKDENRSYKKLTLLAHTNTYLTNHYVN

SEQ ID NO: 6735 - protein, 453 aa, Anaerotruncus sp.; identical to SEQ ID NO: 6408

SEQ ID NO: 6736 - protein, 470 aa, Thermoanaerobacterium sp.
VWQTQKAEITLARRDYLLIALLVLYRTPKGEFYMVFVLDKHKKPLMPCTEKRARLLLESGRAVIHKINPFVIRLKDVTVDNCIIQPCRIKIDPGSRVTGIAILQGEKVLFLMELYHKQGIKKSLDDRRNHRKFRRNKLRYRKPRFDNRKREEGWLPPSLEARVQQIINTVKKLAKYIPIDSISVEHVKFDTQLMQNPEISGIEYQQGELQGYEVREYLLEKWGRKCAYCGKENVPFEVEHIVPKSRGGTDRVSNLTIACHECNQKKDNMTAEEFGYPNIQKQAKKPLKDAAMINATRWKTYNLLKEMYPVECGTGALTKKNRIDRNLPKEHYYDACCVGKSTPKEFVFKTDYVLEIYAKGRGTRQRTLLNKYGFPRGYLSRQKIFFGFQNGDYIKARIPKGKYKGQYTGYVAVRKTGYFDIRDANGKNIAQGVSYKYCHIIQRYDGYKYGRRKRHIPLHPSYAMDGVSCA

SEQ ID NO: 6737 - protein, 493 aa, unidentified
MAAVYVISASGKPLMPTTRCGHIRGLLNAGKARVVEREPFTIQLKYETPDVTQPLYLGIDPGRTNVGSAVVREDGECVFTAQLTTRNKDVPKLMKARKQFRMAHRRLKRRCKRQRRAKAAETLSQKGEFQRLLPGYEEPILCKGIRNKEARFNNRQRPAGWLTPTANHLLLTHLNMVKKLQKLLPITDVVLEVNRFAFMAMENPSIRRWQYQQGPLYGKGSVEDAVYAQQDGHCLFCGKPIAHYHHVVPQHKNGSETLENRVGLCNEHHDLVHKDRAWDAKMKETKAGLNKKYHALSVLNQIIPALTEQLTAMFPQHAFVTTGKDTADFREDYGISKEHHLDAYCIACSVLAEPTKVAAPTGKPHRLMQFRRHDRQVCHKENIKRVYLSEGKAVATNRHKAIEQKDDSLEEFRKTHTQQEVSALTVKDHQPVYKDMRRFMPGGVFLFNGKVHTLQRSHGRYKGMPFYYIDTDGSKNHAKGCIFLQQNCGLRWV

SEQ ID NO: 6738 - protein, 430 aa, unidentified; identical to SEQ ID NO: 6405

SEQ ID NO: 6739 - protein, 465 aa, unidentified
MSTCVCVLSNSGERLMPTFRLGKVRRLLKDGKAKIIKHHPFTIQLLYDSKTNTQPIEICEDVGYNYIGISVKSQSHEYVSAQYDTLQDEKACHDSCRKLRRTRRNRLRYRKPRFDNRKRGEGWLAPSLKHKKELNVNVVKMYCAVMPITHATVEVGSFDTMLVKAIEEGKATPESADYQKGPRYNLATLREAVFYRDNYICKVCGRKATEGAILHMHHMFYWKGRHGNSLSELITVCEKCHTPANHQKSGKLYGFGENVKFADLSGAAFMNTVRWQIVNELYAAFGKDFVTVTYGAMTKEKRIALHLEKSHNNDAYAMGSFHPVNRCAFEHYEKVKRNNRILEKFYDSQYIDTRTGELTNGKSLFNGRISRSHKKDSENLHKYRGKRICKGHRALRRKKLALNPGDLVSLNGEILVVHGTHTKKNGSVNVEFKTPSRSGKKSASLKKLKIVKTSNLMHSAWTKVA

SEQ ID NO: 6740 - protein, 245 aa, unidentified; identical to SEQ ID NO: 5863

SEQ ID NO: 6741 - protein, 457 aa, unidentified
MDAVAVISASGKPLMPTNPVRARKLIKKGKAVIYKYRPLFTIRLTERTDGDIQTIEYCCDTGYQHIGLSIKSRKHEYVNEQRDLLPNETERHNDSRKYRKARRRRKLRHRACRRDNRHDNQICKDGYAPSIRNKRDQHISLYRSYTEILPVERAVFEMGQFDTQVLKAIEKGEPLPQGKDYQHGERYGYATLREAVFARDDYTCICCGKNSFKDKRILCVHHLGFRIGDRTNRLANLATVCTKCHTPKNHQPKGKLYNLKPELKDFKGATFMTMVRWDMLDKLKVVSKDIQVDVTYGAATKEARRDLKIKKSHANDAYCMGSFHPSHRTDLKRYEKCRRNNRVLSKFYDATYIDIRDGKKKKANALGCNRTKRRESRRSEKNERIYRGEKVSKGRIVLRTKRAVIRPGDIVYVGKKKYIVASSKNLGKQLKLADGSLLTTSKVTKIIHCGGWKTVTL

SEQ ID NO: 6742 - protein, 465 aa, unidentified
MSTCACVLSKNGERLMPTIRLGKVRHLLKDGKAKIIKHHPFTIQLLYDNETNIQPIEICEDVGYNYIGISVKSQSHEYVSVQYDTLQDEKDCHDSCRKMRRIRRNRLRYRKPRFDNRKRNKGWLAPSLEHKKELNVNVIKMYCKVVPITHVTVEVGSFDTMLVKAIQEGKAIPEGADYQKGPRYNLATLREAVFYRDKYTCQVCGRKANEGAILHVHHMFYWKGRHGNSLSELLTVCEKCHTPANHQQGGKLYKFGENIKFANLSGAAFMNTVRWQIVNELYTAFGKLFVTFTYGAMTKEKRIAFYLEKCHNNDAYAMGNFHPVDRCAFEHYKKVKRNNRILEKFHDSQYIDIRTGKVANGRSLFNGRINRSHKKNSENLHKYRGKRTRKGYRALRRKKVALNPGDLVSLNGEILVVHSTHAGKNGYVGVEFKAPSKSGKKSASLKKLKIVKTSNSMRSAWTKVS

SEQ ID NO: 6743 - protein, 424 aa, unidentified; identical to SEQ ID NO: 3351

SEQ ID NO: 6744 - protein, 408 aa, unidentified
MVYVQDIDGKPMMPTTRHGKVRRLLKANKATVVNLCPFTIRLTYATSGYKQEIVLGVDAGTKHVGLSATTKSKEIYSSEVILRSDIVELLSTRRELRRTRRNRLRYRKPRFGNRVKSKHHGWVAPSVRYRIDAHIRVIDNVCSILPISRVIIEIAQFDTQKIKNPDISGNEYQEGDQLGFWNVREYVLARDGHKCQHCKGKSKDPILNVHHIESRKTGGDSPSNLITLCETCHKEYHKGNIDLKVKRGKSLRDAAVMGIMKWKLYEELKSRYPNVSMTFGYITKYNRIKYGIEKYHISDAFVISKNFNALRLEYHYKVRLVRRHNRQIHKQKVLKGGAKKPNQSPFEVFGFRLFDRVMFEGNYYFIFGRRKSGSFNIRDINGGNQRNVTYKKLKLSIGKRFMIQKEMN

SEQ ID NO: 6745 - protein, 533 aa, unidentified
MSNVVYVVDKHGKPLMPTKRFGKVRHLFETGKAVAISNCPFTIRLKYESTHYTQDIYVGIDTGRENIGSGASKEDGTNVYLANTKTHNKSIKKQMSDRACFRRERRRYHRQKKQRKAVSDGNTIQNGDDDTVCTKHACKSVQISYPMAENAVTHKVIRGKEGKFANRKRPDGWITPSARQVVQVTVNELKSITKILPVTHMIMERVSFDFQKLENESIKAWEYGKGPLCGYKTYKDYIFDEQHGKCACCGKPITQYHHIVHRTNGGIDSVKNIIGLCDDCHEEIHTSINAEERLKELKAGVIQKYHVGLLNSVMPTLIEEMAIYCEEQGIVFAITDGKTTSKAREQYDIPKDHCFDAYAISLADRDVENIDIYDIIYQKRRFKKKSNNIINARNKRAYKLDGKVVAYNRHKATDQKDDSLEEFFVKYRDNHSEKEVQQMMHNIKIEPAKRTYTFHKTGQIAPIHPGDVVRYVKHNKIRGNTKTEMLVADNVNMSKDGRVGYGTKNKKLKYCKRIASGCVQIIDVIKAKEHITK

SEQ ID NO: 6746 - protein, 436 aa, unidentified
VQHPRVAAKGETMRVFVKNMRGEPLMPCTQRKARLLLKAGKARICKYHPFTIQLDYATGETKQDCTIGIDTGSKNIGIAVRSEDKVLFKGEVELRQDVKSNLDTRRIYRRSRRNRKTRYRKPRFLNRKRPDTWLPPSLENRIRHTFRWIDVFCLLVPSPCLHIEVGKFDTAKMIDPKIQGVDYQHGQTYGYYDVRYFVFARDHYTCQVCGKSRDKILRTHHIRYRSNGGTDRADNLITVCTDCHTGRNHQKDGILYQWQEENKKVRSYKEPPFMNILRQRIFQRYPYAHITYGSETAQRRKKLCLGKTHYNDAIAISGIQTITEDPEEWLLIRQSRKKKRSLHEANPRKGRKKPNRTQERSSKNTPSYRNLYLNDKVSVLGRTGYISGFTNGGCYVKDTDGQYITLPGKTYKQVGIANVHRICHNNNWQYITKRAL

SEQ ID NO: 6747 - protein, 421 aa, unidentified; identical to SEQ ID NO: 4235

SEQ ID NO: 6748 - protein, 428 aa, unidentified
LKVFVLNMRGQPLMPCSPAKARHLLKAGKAVVKRRTPFTIQLRIATGETKQNVTLGVDAGAKHVGLSAATEKEEVFASEVELRQDITGLLAARLSLRRDRRHRKTRYRAPRFLNRVRSKHKGWLAPSVENRIQAHMSRIDAVCRLLPVTKIVIETASFDIQKIKDPSVEGTDYQQGDQLGFWNVREYVLFRDGHVCQHCHGHAKDKILNVHHLESRQTGGDAPNNLITLCERCHKACHAGKIKLKVKRGQSFREEAFMGIMRWTLLDRVRKAHPGLPVENTYGYLTKNTRITQGLPKAHCVDAYCIAGNLKAVRRGVHLYQRQVRKHNRQIHKCTVLSKTLKDGTKIGYRKLNQTPHLVKNFRLFDKVRCLGQTGFIFGRRSSGYFDVRRLDGVKISSCINYRKLTLLEKRGTCLTELRKEDGASSPV

SEQ ID NO: 6749 - protein, 515 aa, unidentified
VTDVSTIYVLNKDGKPLMPTTRCGHVRYLLKEKVARVAASKPFTIQLLYETNDVVQPLYLCIDPGRTNIGVAVVKTDGTAVFTAHLETRNKEIPKLMQGRKKARRARRTNGRRCRRQRRAKANGTISKKCVKQTTAQNGSVSKRAKEIGVIKRHLPGCEKDVLCIGIKNKEAKFNNRTRPTGWLTPTANQLLQTHINLVKKIQKFLPISDVVLEVNKFAFMQLDNPNIQKWQYQKGPLYQKESLKSAVSEMQEHHCLFCKKKIDHYHHVVPQHKNGSNTIDNIVGLCTQHHDLVHKDATWQKRLAKKKTGLNKKYGALSVLNQIVPVLTKELGSLFLKHFYVTTGKSTYDYRAAHGVSKDHWLDAYCIACSVLPNDVCDSNINSHVPYELKQFRRHDRRALHKENINRVYTLNGKKVATNRHKAIEQTTDSLEEFRQNHPNDVCKLKVKEHHPEYRNPKRNFPGCVFLVGKHTHVMQGTSGSHNGKADGYYDTNGNSYPFGKCKFVAKNEGIVFA

SEQ ID NO: 6750 - protein, 439 aa, Tolypothrix sp.; identical to SEQ ID NO: 2044

SEQ ID NO: 6751 - protein, 412 aa, unidentified
MVYVISSNGQPLMPTENHVKVRILLKNQKAKVIKKCPFTIQLTYNSTNYTQPVSLGVDAGSKHIGLSATTKDKVLFESDVELRNDIVDLLSARRQNRRARRNRKTRYRKPRFSNRRRKDGWLSPSVQNKVDTHLTAVRKVHEILPVSKIIVEVASFDIQKIKNPAISGADYQKGEQMGFWNVREYVLFRDGHECQCCHGRSKDMILNVHHIESRKTGGDAPNNLITLCESCHTGYHKGTVKLPKTIHRGMSFRDACFMGIMRWAFYNKLKELYSNVSLTYGYITKTIRIENDLPKGHCIDARCISGNPLASSDGTVYYQKKVRDHNRQIHKNTILKGGIRKRNQAPYEVMGFRLYDKVRWKGKNCFIFGRRSTGRMDLRLLNGAKVNSSVGYKNLRLLEMRKNMLIELRKVV

SEQ ID NO: 6752 - protein, 429 aa, Parasutterella sp.
LRVFVLNKRGKPLMPCSPAKARHLLKEKKAIVVRRTPFTIQLTIATGESKQPVSLGVDAGYKYVGLSASTEKAELYASEVELRQGITDLLSARRALRRARRNRKTRYRAPRFDNRIRTKRKGWLAPSVENRINAHLSRIETVLRMLPVTKITVETASFDMQLLKDPDISGKEYQEGEQLGFWNVREYVLFRDGHVCQHCHGRLKDPVLNVHHLKSRRTGGDSPGNLITLCETCHKALHRGEITLKAKRGQSFRAETFMGIMRREVLDRLKASHPKLEVQNTYGYRTKHARISNGIAKSHCADAFCIAGNLGAKRLGEFLFQKQTRRNNRQIHKLSILKGSLRKRNQAPFEVKGFRLFDKVAYQGEEGFIFGRRSSGFFDIRRLDGTRISAGINYKKLRLLEKRRTYLTEIRKEEARRPLPEGRGPRAQM

SEQ ID NO: 6753 - protein, 347 aa, unidentified; identical to SEQ ID NO: 4100

SEQ ID NO: 6754 - protein, 386 aa, unidentified
LTIATGESKQPVSLGVDAGYKHVGLSASTEKAELYASEVELRQDITDLLSARRALRQSRRNRKTRYRAPRFDNRIRTKRKGWLAPSVENRINAHLSRIETVIRLLPVTKISVETTSFDMQLLKNSDIAGKEYQESEQLGFWNVREYVLFRDGHVCQHCHGRSKDPVLNVHHLESRRTGGDSPGNLITLCETCHKELHRGEITLKAKRGQSFRAETFMGIMRWEVLDRLKASHPKLEVQNTYGYRTKHARIVNGIAKSHCADAFCIAGNLGAERLGEFLFQKQTRRNNRQIHKLSILKGGIRKRNQVPFEVKGFRLFDKVACKGEEGFVFGRRSSGYFDVRKLDGTRISTGISYKKLRLLEKRQTYLTEIRKEEALPPLPEGRGLRA

SEQ ID NO: 6755 - protein, 464 aa, Actinomadura sp.
MLGASPGVERVTPNPAVGEKVREGHPAVFVLDKHGAPLQSTTPARARKLLKTGRAVVARHTPFVIRVKDRTIAESQVDGVELGVDPGSKHTGIAVFTNTGGNRRGLYGIALAHRGGSIRNKMSQRAAYRRGRRSRNLRYRAPRFSNRTKPRGWLAPSLRHRVETTMAWTARLARWAPVQTVHLERVAFDTHTISAGRPLEGAEYQHGTLHGTEVREYLLAKWGRACAYCGATAVPLNIDHIHPRSKGGSDRVGNLCTACIPCNRAKNNRSVEDFLSTSPKQLARILANAKVPLRDAAAVNATRSALRRALDAAFPAVRTASGGRTKWNRTRTGLPKTHTLDALCVGHLDTIDRIPRTVLIAAATGRGTYTRTRTDRYGFPRLRLPRVKTFFGYQTGDLAHAVVPAGKNAGTHTGRIAVRASGSFNIRTRHGLIQGVRHEHFHLLQRADGYGYTTRPEGVVSDAT

SEQ ID NO: 6756 - protein, 420 aa, unidentified
MQYVYVLNKHGEPLMPCSPGKARLLLKQQKAHVIKRTPFTIKLLYGSTGYKQPITLGVDAGSKHVGLSASTEKRELYREEFTPRNDVVDLLSTRKQNRRSRRNRKTRYRPPRFDNRVHSKHKGWLAPSVEVKIQEHITIIKRICKILPISLVRVETAEFDTQRLKVMLAGKPLPVGTDYQLGEMYDEYNVRQYVLKRDNYTCQCCGAHTTAKKLVKLHVHHLESRKTGGNAPSNLVTLCTTCHKNLHKGKVTLDGKERGKPLRDAAFMGIMRKTLMARLKKELPIPVQGTYGYITKMRREQNDIKKSHTNDARCISKHPLAEPCSVCYRTKAIRHHNRQTHKANFSKGGIRKRSQMPYVVEGYRLWDKVLYKGQECFVSGRRTSGSFTLKKLDGTRISKGVTFKKLRLLEPATNYLIERM

SEQ ID NO: 6757 - protein, 406 aa, unidentified; identical to SEQ ID NO: 6079

SEQ ID NO: 6758 - protein, 512 aa, unidentified; identical to SEQ ID NO: 3870

SEQ ID NO: 6759 - protein, 515 aa, unidentified
MATVYVLNKDGKPLMPTTRCGHIRHLLKEKKARVVRTNPFTIKLVYETDDVVQPLYLGIDPGRTNIGVAVVKVDGTAVFTAHLETRNKEIPKLMVKRKEHRQGRRHYRRCKRQRRAAAHGTLSKKCKKQDTAQGGNISKRAQTIGVFERNLPGCENSVLCIGIKNKEARFNNRVRPARWLTPTANQLLLTHVNFVKKICKFLPISDVVLEINKFAFMALDNPNIQKWQYQQGPLYQKGSLENAVSEQQDHHCLFCEKTIEHYHHVILRSENGSDTIANIVGLCAEHHDLIHKDDKLKEELAKKKQGLNKKYGALSVLNQIIPALTYELGSRFQGHFYVTTGKSTYDYRAAHSVSKDHWLDAYCIACSVLPDGCFDNTINSRVPYELKQFRRHDRQVCQQQNVKRKYYLDKKLVATNRHKAIKQETDSLEEYRNNGGTTDKLVVKEHKPTNKRLNRILPGALMAANGKLNVMVASRGLHNGIPDNYVFDNNSKAKPSKCTLINKNKGIVFVSNSVS

SEQ ID NO: 6760 - protein, 450 aa, unidentified; identical to SEQ ID NO: 2935

SEQ ID NO: 6761 - protein, 406 aa, unidentified; identical to SEQ ID NO: 3415

SEQ ID NO: 6762 - protein, 413 aa, unidentified; identical to SEQ ID NO: 2636

SEQ ID NO: 6763 - protein, 512 aa, unidentified
MSTVYVLNKDGKPLMPTTRGGHVRHLLKEQKARVVRTNPFTIQLLYETDNLVQPLYLGIDPGRTNIGVAVVKTDGTAVFTAHLETRNKEIPKLMQGRKKARRARRTNGRRCRRQRRAKANGTISKKCVKQATAQNGSVSKRANEIGVIKRHLPGCEKEVLCIGIKNKEAKFSNRTRPEGWLTPTANQLLQTHINLVKKIQKFLPISDVVLEINKFAFMRLDNPNVQKWQYQQGPLYQKASLEEAVSEMQEHHCLFCKNTIDHYHHVVPQHKNGSNTIGNVVGLCAKHHNLVHKDTSWQEKLAKKKTGLNKRYGALSVLNQIIPALTKELSSLFPKHFFATNGKSTYDYRAAHGVSKDHWLDAYCIAGSVLPNDACDNNINNRVPYELKQFRRHDRRALHKENMSRVYTLNGKSVATNRHKAIKQTTDSLEEFRQRQPNDVCKLKVKEHHPEYRNPKRNFPGCVFLVGKHTHVMQGTSGSHNGKADGYYDTNGNSYSSGKCKFVVKNEGIVFT

SEQ ID NO: 6764 - protein, 438 aa, Methanosarcina sp.
MIFVLNKNKQPLSPCHSAVARKLLKTGKAVIHKKYPFTIRLKELKTSINKVEFRLKIDYGSRHTGLAILNGSKVIGLAHIHHKTSIKSNMDNRRAMRRTRRNRTTRYRKPRFNNRKRKEHWLPPSLQSRVDNIQNWVNRLQKLCPLTHISYENVKFDTQLMQNPEISGIEYQQGELQGYEVREYLLEKWNRKCAYCGAENVPLEIEHIIPKARHGTSRVSNLTLACRTCNEAKGTKTAEEFGYPEIQKQARKTLKDAALVTATRWKVYNVLSKPALNIECGTGARTKMNRIRLNLPKDHHFDAICVGASTPNKIIFKTNQVLHIKAKGRGSHCRTNLDKYGFPRGYLSRQKSFFGFQTGDIVKAVVPKGKYKGIHFGAVACRKTGYFDIKNKEGVRIVQGINHKYCNILSRADGYEYATEHLEVDGIPPMTKVIGVLP

SEQ ID NO: 6765 - protein, 346 aa, Arthrospira sp.; identical to SEQ ID NO: 2872

SEQ ID NO: 6766 - protein, 328 aa, unidentified
MKVFVLSQEGKPLMPTTPRRARVWLKAKRARLVRQEPFTIRLRFATKAHVQATKVGVDTGSKDVGIAAIANGEVVFQAEVHLRDDITEKLTQRRQFRRNRRARKTRYREARYDNRRRPDGWLPPSLHSKAEATVKAVRFMASFLPVGRVTVEVGRFDTQRMQNPDIAHLEYQQGELQGYFLREYVLAKWQRTCAYCEAREVPLELEHIVPRSRGGSNRASNLTLACHACNRRKGQQTAAEFGFPDVQAKARVPLKDAAHVSSLKSRVVQDLQAVFGESQVSITYGYETTYKRLQVLDLPKSHTNDAVAIACEISEVVKPLKMVIRSAV

SEQ ID NO: 6767 - protein, 439 aa, unidentified
MVFVLNKSKKPLNMITNAEARILLRKKLAVIHKIYPFTIRLRDNSCVNNDKFYTVKIDPGSKTTGVAIVDNTDKVVMLAEIEHRGHIIKKKLDQRRAARSSRRQRHTRYRPARFLNRTKPKGWIAPSVKSRADNVINFIRKYKKLININKVMIEHVSFDVAQMSSDTKIYGVAYQQGPLYQNKLRSFIFSRSGGKCVYCGAKAEEIDHIIPRANGGTNSTYNLVASCRACNQMKSNLTLKAFGKLVGKNFSKIEPKKLPKDAAIVQLARNYMAREITKLVSDTTLHDAWLTKYNRDQLGLPKQHYYDALSVGEVPTKFNFLTDKILLISAKGRGSRQMCRVDKYGFPRTSPKGSKSVEGFQTGDIVKAVVTKGLKQGEYLGKVAVRSKGSFNIQTRTQVIQGVGYKYCHIIQRCDGYLYDYKECDFLSAINNRVSIAKI

SEQ ID NO: 6768 - protein, 453 aa, unidentified
MMSEVQKVNYIYVVDSNGTPLMPTSRLGMVRRWLKSGQARWFGNSRKIIQFVRPVTTNTQELTLGVDAGFHLGLAVVGNKREYYASESLRQSEKDRITSRRELRRTRRNRLRHRQARFDNRRRKASWLAPSMQHRLDFTIKEIKRLYTFLPITNLVIEVTPFDNQKLLNPNIKPWEYTQGKMHGFKTIKDYLLARDNYRDALDGKQYPASQLRVHHLVQRKDGGTNQPDNLVLLSDINHSQANHNNGSLAKLRENRQKALDYRGAYFMSILATRLSDYFDNYTTTQGYLTANLRQKYQLEKSHLNDAFIIAGGTDTTLRTNNVYSRQKLRNNNRVLQKFYDAKYIDNRDNKTKTGKELSSGRTRRSREINYTNLRQFRKIKIKPGRVSIRRSHYQLRPHDVVLNTKTNKIETVTGVQNSGTVIKFQTGKTCSIKTVVSLYHVNGMLEKKIENI

SEQ ID NO: 6769 - protein, 420 aa, unidentified; identical to SEQ ID NO: 2812

SEQ ID NO: 6770 - protein, 424 aa, unidentified; identical to SEQ ID NO: 4676

SEQ ID NO: 6771 - protein, 434 aa, Lactobacillus sp.; identical to SEQ ID NO: 6197

SEQ ID NO: 6772 - protein, 429 aa, unidentified
MSKQNHVLVLDEHKKPLSPCRPVTARKLLKAKKAAVFRLFPFTIILRKVVEETPEPMTIKLDPGSKTTGIALIQGEKVVWGAELTHRGQGIKASLESRRSLRRSRRNRHTRYRQPRFLNRKRSEGWLAPSLQHRVKTILTWVRKLIKLAPIDSIVQELVRFDLQKLENPEISGIEYQQGQLAGYEVREYLLEKWDRKCAYCGVENVPFEVEHIHPKSKGGTDRISNLAIACHNCNQEKGNRDIRDFLSGKPDLLNRILKQAKSPLKDATAVNSTRWALFNKLKEMGLPVLKGSGGLTKFNRTRLNLPKTHWIDASCVGQIESLTLVTNQPILIKATGRGTRQMCGTNKYGFPTRHRSRIQIHKGFQTGDIVTATVTAGKKVGFYLGRVLCRASGSFDIATQNGRVTGISHKYCQSIHKKDGYSYGFQKH

SEQ ID NO: 6773 - protein, 290 aa, unidentified
MPCSPAKARLLLKEKKAIVKRRTPFTIQLTIATGETKQPVSLGVDAGYEHVGLSASTEKAELYASEVELRQDITDLLSARRALRQSRRNRKTRYRAPRFDNRIRTKRKGWLAPSVENRINAHLSRIETVIRLLPVTKISVETTSFDMQLLKNSDIAGKEYQESEQLGFWNVREYVLFRDGHVCQHCHGRSKDPVLNVHHLESRRTGGNSPGNLITLCETCHKALHRGEITLKAKRGQSFRAETFMGIMRWEVLDRLKASHPKLEVQNTYGYWTKHARMLSASPAILAPKG

SEQ ID NO: 6774 - protein, 512 aa, unidentified; identical to SEQ ID NO: 3493

SEQ ID NO: 6775 - protein, 512 aa, unidentified
MSTVYVLNKDGKPLMPTTRCGHVRHLLKEQKARIVTSKPFTIQLLYEADDLVQSLYLGIDPGRTNIGVAVVKADGTAVFTAHLETRNKEIPKLMKKRKESRRARHTNGRRCRRQRRAKANGTISKKCVKHDTAQNGSVSKRAKEIGVIKRHLPGCEKDVLCIGIKNKEAKFSNRTRPEGWLTPTANQLLQTHINLVKKIQKFLPISDVVLEINKFAFMRLDNPNVQKWQYQQGPLYQKANLEETVSEMQEHHCLFCKKKIDHYHHVVPQSENGSDTIGNIVGLCTKHHDLIHKDTAWQKKLAKKKTGLNKKYGALSVLNQIIPALTKELSSLFPKHFFVTNGKSTYDYRAARGVSKDHWLDAYCIACSVLPNDTCDKTINSRVPYELKQFRRHDRRALNNENMSRVYTFNGKMVATNRHKATEQTTDSLEEFRQRQPNDVCNLKVKEHHPTYRNMNRNYPGSVFLVGNQIHVMQGIAGSKDGEATTYKDTNANSIAAGKCKFVAKNSGILFV

SEQ ID NO: 6776 - protein, 502 aa, unidentified
MSEYIYVLGMDGRPQMPTRRKRHIDRLLSTGKAKVVEYVPFTVQLLYENHPVLQPVILAEDPGRTNIGVAAVSQKGELLFSAVVETRNKEITKFMEKRRKARQRLAKRCHTMIKAGQVMRKLPMFGEEKYITCRYIRNTESRFCNRRRKDGWLTPSAEQLVRTHINLVHRIQGFLPVTDVALEVNRFAFMQLEDPYITGVDFQNGPLKGYDDRKAAVYDQQDGQCLLCNKKPIEHYHHIVPVAKRGSDTLANIAGLCCRCHEKVHKDAGAARRLQNKKQGLTKKYGALSVLNQAIPFICKRLEEEFGEHVHYCSGRDTSRLRQSFGFHKTKDEPLHEVDAWCIGVLSLREIPEKCPDFTKVYQIKQFRRQNRRRINHQTERRYYLDGKLVAVNRKKRMGQTGRKDNQTKDSLADWFTKMVHLYREKEAEHLRSRLTVKKSQHSYNDLKREMPGAEFIYENQRYILSGQLTNGKYYRAVGSTQNFPAAKCRIRRHNRGLVFVS

SEQ ID NO: 6777 - protein, 451 aa, unidentified
MSVAVISKTGERLMPTSEYRARKLLKSGKAIKYSYHPFTIQLTERKTGNIQPIELCMDTGYIHIGISVKSEKHEYLTEQIDTLTDERSRHNARRMYRSQRRNRKRYRQPRFNNRKKDKGWIAPSLEHKKNIHVQAISRINNVMPLTDITMEMGNFDTQVLKAKEEGRPLPQGVDYQHGERYSIATLREAVFARDGYKCQCCGRTIKDGAILHVHHIKYRSQGGTNSISNLATVCDKCHTPKNHKPGGKLYGWKPKLPSFKGATFMTTIRWQLYNEAKALFPDIDIHITYGAATKERRRELNIDKSHINDAFVMGQFHPRHRIKAVLYKKKRRNNRCLEKFYDAKYIDSRDGKKRSGQELFNGRINRNHKKDSENLHQYRLQKVTAGKRTVRKQHYSVQPHDIIIYESRKRETTGCHCNGARVMLLPDKKSVSIKKIKIYRYASGYFKSTFN

SEQ ID NO: 6778 - protein, 471 aa, Acidiferrobacter sp.; identical to SEQ ID NO: 6284

SEQ ID NO: 6779 - protein, 544 aa, unidentified; identical to SEQ ID NO: 3572

SEQ ID NO: 6780 - protein, 408 aa, unidentified
MVYVQDIDGKPLMPTTRHGKVRRLLKDSKAVVVNTCPFTIKLMYKTSDYKQEIVLGVDSGTKHIGLSATTKSKELYSSEVILRSDIVDLLSTRRELRRTRRNRLRYRKPRFENRVKSKRLGWVAPSVRHRIDAHIRVIDNICSTLPISRIIVEIAQFDTQKIKNPDISGNEYQEGDQLGFWNVREYILARDGHKCQHCKGKSKDPILNVHHIESRKTGGDSPSNLITLCETCHKEYHKGKIDLRVKRGKSLRDAAVMGIMKWKLYEELRSRYDNVSMTFGYITKYNRIKYGIEKSHISDAFVISKNFNALMLEYHYKVRLIRRHNRQIHKQKVLKGGVKKPNQSSFEVFGFRLFDRVMFEGNCYFIFGRRKSGSFNIRDIDGGNQRDITYKKLKLLRCKRFMIQKETN

SEQ ID NO: 6781 - protein, 427 aa, Nostoc sp.; identical to SEQ ID NO: 2670

SEQ ID NO: 6782 - protein, 426 aa, Actinomadura sp.
VFVLDKHGTPLQPTTPARARKLLNAGRAVVARHTPFVIRLKDRTAERSQIDGVEVGVDPGSRHTGIAVFTARGGERRGRYAIRLDHRGAAITKKLRQRAAYRRGRRTRNLRHRPPRFSDRARPSGWLPPSLRHRVETTVSWIDRLTRWAPVRAVHVERVAFDTHALTAGRPLEGVEYQHGTLHGFEVREYLLAKFGRACVYCDAAGVPVNIDHVHPRSQGGSDRVSNLVLACIPCNRAKSDRPVQEFAPGRAAAIKARAKAPLRDAAAVQSTRWVLWRALDERLPTSVGSGGRTKWNRTRSRLPKSHTLDALAVGTLDSITGTVDTVLVAGCAGRGSYARTRTDRHGFPRLRLPRVKGFFGFQTGDLVRAVVPTGKKAGTHTGRVAVRATGRFNITTGTETVQGIGHRHVRLLQRADGYAYTTRPE

SEQ ID NO: 6783 - protein, 418 aa, unidentified; identical to SEQ ID NO: 4327

SEQ ID NO: 6784 - protein, 418 aa, unidentified
MVYVINKQGQALMPTERFGKVRRLLKNGLAHVVCRIPFTIQLDYDTTDYTQPISLGLDAGSKHIGISATTSEKELYAADVELRNDIVEKLSTRREQRRTRRSRLRYRKARFNNRVSSKRKGWLAPSIENKIQTHLTVVEKIHKFLPITNIIVETASFDIQKIKNPSISGSEYQQGDQLDFFNVRDYVLHRDGHQCQHCKGKSKDKVLNVHHIESRKTGGDSPNNLITLCETCHKAYHRGEFELNVKRGKSFRDAAFMGIMRWSFYDRLKNIYPNVSMTFGYITKNTRITNNLPKEHYVDARCISGNPVAKPLGYYFYQKKVRCQNRQIHKANFLKGGRKKLNQAPFLVKGFRLFDLVEYQNDLYYIFGRRDSGFFDIRKLDGTKVNKGSISCKHLRLIDIRKTILTERRNSGSIPPTN

SEQ ID NO: 6785 - protein, 512 aa, unidentified
MSTIYVLNKDGKPLMPTTRGGHVRHLLKEQKARVVQSNPFTIQLLYETNDVVQPLYLGIDPGRTNIGVAVVKTDGTAVFAAHLETRNKKIPKLMQDRKKARRARRTNGRRCRRQRRAKANGTISKKCVKQATAQNGSVSKRAKEIGVIKRHLPGCKKDVLCVGIKNKEAKYTNRARLEGWLTPTANQLLQTHINLVKKIQKFLPISDAVLEVNKFAFMRLDNPNIQKWQYQQGPLYQKGSLENAVSEMQEHHCLFCEKPIEHYHHVVPKSENGSNTIANIVGLCAEHHNLVHKDVAWQEKLVEEKTGLNKKYGALSVLNQIIPALTKELSFLFPKHSFMTNGKSTHDYRAAHGISKDHWLDAYCIACSVLPIDVCDSTINNCVPYELKQFRRHDRRALNNENMNRVYTLNDKVVATNRHKATEQEAASLEEFCKEHPNDVCKLKVKEHHPTYRNMNRNYPGSIFLVGKHVHIMQGIAGSKDGKATTYKDSNANSITASKCKFVAKNSGILFV

SEQ ID NO: 6786 - protein, 529 aa, unidentified
MSTVYVLNKDGKPLMPTTRGGHVRHLLKEQKARVVRTKPFTIQLLYETNDVVQPLYLGIDPGRTNIGVAVVKTDGTAVFTAHLETRNKEIPKLMKKRKESRRARRTNGRRCRRQRRAKANDTISKKCVKQPTAQNGSISKRAKEIGIIKRRLPGCEKDVLCIGIKNKEARFNNRTRPEGWLTPTANQLLQTHINLVKKIQKFLPISDVVLEVNKFAFMQLDNPNIQKWQYQQGPLYKKESLERAVSEMQEHHCLFCDKPIDHYHHVVPQSENGSNTIANIVGLCAEHHNLVHKDAAWQKKLAEEKVGLNKKYGALSVLNQIIPALTKELSFLFPEHSFVTNGKSTYDYRATHGVSKDHWLDAYCIACSVLPSDVCDSNINNHMPYELKQFRRHDRRVLHKANTSRVYTLNGKKVATNRHKAAKQTADSLEEFRQSHPDDVCKLKVKEHHPAYRNLNRNYPGSVFFVGKQVHVMQGIASSKDGKATKYNDTSATTIAAGKCEFVAKNSGILFVQCKFRKVFSDETTKKLQ

SEQ ID NO: 6787 - protein, 512 aa, unidentified
MSTVYVLNKDGKPLMPTTRCGHVRHLLKEQKARVVASKPFTIQLLYKTNDVVQPLYLGIDPGRTNIGVAVVKADGTAVFTAHLETRNKEIPKLMKKRKDSRRARRTNGRRCRRQRRAKANGTISKKCVKHDTAQNGSVSKRAKEIGVIKRHLPGCEKDILCIGIKNKEAKFSNRTRPEGWLTPTANQLLQTHINLVKKIRKFLPISDAVLEINKFAFMQLDNPNIQKWQYQQGPLYQKANLEEAVSEMQEHHCLFCKKPIAHYHHVVPQSENGSDTIGNIVGLCTKHHDLVHKDTAWQKKLAKKKTGLNKKYGALSVLNQIIPALTKELSSLFPKHFFATNGKSTYDYRSAHGVSKDHWLDAYCIACSVLPNDVCDSGINNRVPYELKQFRRHDRRALNNENMSRVYTLNDNVVATNRHKATKQTTDSLEEFRQNHPDDVCKLKVKEHHPTYKNMNRNYPGSVFLIGKQVHVMQGIAGSKDGEATTYKDTNANSIAAGKCKFVAKNSGILFV

SEQ ID NO: 6788 - protein, 449 aa, Allochromatium sp.
MAVFVLDKQKRPLMPCTEKRARLLLERGRAVVVRLAPFTIRLKDRIGGAIQPLRLKLDPGSRVTGLALVRESEICDPETGAVERLEHGLWFGELAHRGQAIREALEQRRHYRRARRARKTRYRAARFLNRTRRAGWLPPSLQHRLDTTVNWVERLRRLAPISALSQERVSFDTQALQNPEISGVEYQQGELAGYEVREYLLEKWNRRCAYCGARAVALEIEHIVPRARGGSDRVSNLTLACRPCNVSKGHQPIETFLKGRPALLHQIQAQAQAPLKDAAAVNATRWALFNALNATGLPVETGSGGRTKFNRTRLDIPKTHALDAACVGTVDQVRDWNRPVLAIRATGRGAYSRTLTFNNGFPRGYLMREKRIHGFQTGDWVRAEVPKGKKAGVHVGRVAIRRTGSFNVQTPGGTVEGLSHRYCRVLQRADGYGYAFQPKPDTEDARRAA

SEQ ID NO: 6789 - protein, 428 aa, Enterococcus sp.; identical to SEQ ID NO: 4335

SEQ ID NO: 6790 - protein, 428 aa, unidentified; identical to SEQ ID NO: 4442

SEQ ID NO: 6791 - protein, 317 aa, unidentified
MSTTVFVLDKKHRPLMPCRPARARRLLRAGRARVVKRFPFVIRLVDRTVEQSEVQPALIKLDPGSRETGAAVVRDDGKKRHHALAFFVIEHRGGAIRDALKARSAFRRRRRSQNLRCRSPRFLNRVKPKGWLPPSLRHRVETTLSFVRRMCRYLPVSGIATELVKFDSQKLQNPEVSGVEYQQGTLFEYEVREYLLEKFGRKCVYCGAEGVPLNIDHVVPRAKGGSNRVSNLVLACMSCNQKKGARSLEDFLKGKPKVLARVRRELKTPLRDAAAVNATRWVLFNELKATGLPVETGSGALTKLNRHAFGVEKEHWL

SEQ ID NO: 6792 - protein, 426 aa, unidentified
MRIFVMNMRGDPLMPCTQKKARILLKEGKAVIYKYDPFTIQLTYATGETKQDCHIGIDTGSKHIGMAITSENKVLFKGEIELRQDVKSNIDTKHIYRRSRRNRKTRYRQPRFLNRKRSDKWLPPSLQNRVDHTFHWIDTFCSLVSDPILHIEVGKFDTAKMINPEINGVDYQYGQTYGFFEERYFVFARDNYTCQCCGKSKDKILQTHHIIYRSNGGTDRVDNLITVCTDCHTSKNHQKGGILYKWQEQHKKVKQYKEPPFMNAIRKRIFARYPNAHITYGSETTPHRKELGLEKTHYNDAITISGITNIKEDPKEWLLIKQFRKKKRSLHEATARKGRKEPNCFQKRNSKNTPFYRGFYLNDKVKVFGHGQIGYITGFTSGGAYVKNVDGEYITIPNKSYKQVSIKYLKLLSHNNNWQYVVKSAV

SEQ ID NO: 6793 - protein, 442 aa, unidentified; identical to SEQ ID NO: 3161

SEQ ID NO: 6794 - protein, 393 aa, unidentified
AAVFRQYPFTIILKVEVTAIPDPITLKIDPGSKTTGIALVQGEKVVFGAELTHRGQAIKASLESRRSLRRSRRNRHTRYRQARFLNRTRHQGWLAPSLQHRVETTLTWVNKLIKFVPIKGIYQELVRFDLQQLENPEISGVEYQQGELAGYEVREYLLNKWERKCAYCGIENLPLQVEHIQPKAKRGSNRISNLCLACEKCNLKKGTQDIEKFLAKKPDVLKRILSQAKRQLQDATAVNSTRWTLFNRLKETGLPVSTSSGGLTKFNRTRLNLSKTHWLDAACVGQVNCLQVLTNQPLLIKAIGHGTRQMCRTDKFGFPSRYVPRLKFVKGFQTGDIVKAVVTSGKKIGTYIGRVAVRTTGSFNISAASGLIQGIGNKYCSLIHRKDGYLYAT

SEQ ID NO: 6795 - protein, 408 aa, unidentified
MVYVQDINGKPMMPTTRHGKVRRLLKDKKAVVVNLCPFTIKLMYVTSDYKQEIVLGVDAGTKHVGLSATTKSKELYSSEVILRNDIVDLLSTRRELRRSRRNRLRYRKPRFDNRIKSKRPGWVAPSVKYKVDAHIHIIDNVCSILPISRIVIEVAQFDTQKINNPNISGKEYQEGDQLGFWNVREYVLARDGHKCQYCKGKSKDPVLNVHHLESRKTGGDSPSNLITLCETCHKEYHKGNIDLKIKRGSSPRDAAVMGIMKWRLYEELKSKYDNISMTFGYVTKYNRIKHGIEKSHVFDAFVISKNFDAIRLGYYYKVRLVRRHNRQIHKQKIPKGGIKRPNQSPFEVFGFRLFDRVMFENSYYFIFARRKTGSFNIRDIDGKKQRDITYKKLKLSRCKRFMVQKEMD

SEQ ID NO: 6796 - protein, 431 aa, unidentified; identical to SEQ ID NO: 5232

SEQ ID NO: 6797 - protein, 497 aa, unidentified
MRVFVLDKNRKPLDPCHPAKARKLLKSGRAKVLRRYPFTIIIQDLEVENCSTHVHQLKIDPGAKTTGLAIVQGSRVVWGAELTHRGFQIRDTLTSRRQLRRSRRSRKTRYRQPRFLNRKKPKGWLAPSLMSRVHNILTWVNKLIKFCPVTGISQELVRFDTQKMLNPEISGIEYQQGTLYGYELREYLLTKWNRTCAYCGAKNTRLEIEHIKPRSKGGSNRASNLTIACHDCNQAKGNQEIEQFLSRKPSILKRILSQAKKPLADAAAVNATRWKLHDELKLIGLPVEVGSGGLTKYNRCRQNLPKTHWLDAANVGKVDTLYIEDYQPLLIAAKGHGKRQICGTNKYGFPIRHNSRKKIHKSFQTGDIVKAVVTKGKKIGTYVGRIATRKTGSFDITTHLEKFQGLAISTVKLFIAKMDIAINFMADKSVVTALRLRGQCPSATLRRVSGQALRDRGVELQGPRSRSAVSTSSAPPPWSPPVGGKQGGRFPFSREIS

SEQ ID NO: 6798 - protein, 442 aa, Lactobacillus sp.
MKHENANRVFLLNKDGKPLMPCRPRKARQLLKSGKAFVVKKYPFTIQLKYGSYGYKQKVSLGVDTGQRHIGFAVVSQDKVLHQSEVELRQDVHTNLYTRKIYRRGRRNRKTRYRQARFLNRVHGKRDGLWLPPSVKSKVSHNIAWIKRYLAVLPNPDLHIEVGKFDMAKMVNPDISGKQYQEGSLKDWKNYEYYVLARDKYTCQLCHKHGEGVKLVVHHIVYRSQGGTDRVDNLITLCTNCHTTKNHQPGGKLYKWMKAKKKVTKQLKGATFMNILRKRIMTTFPEASFQYGSQTYVDRKNLLLPKGHFMDAIAISGIKSVGQMPETVTMISQFRKKKRSLHEATARKGRKQPNTSSKRNEKNTKYARGLWLNDYVRVIGNNAKGYVKGFKSNGYSVYLTDGLGNYVLNDGRNYVNSKQCQLITHNSSWQKAEQMLSLYEFK

SEQ ID NO: 6799 - protein, 432 aa, unidentified; identical to SEQ ID NO: 6070

SEQ ID NO: 6800 - protein, 392 aa, unidentified
MTSYAFVLDANGKQLAPTKEQKAWFFIRKKRASLVSKYPIVIQLMKEIPEKEICQDEIRCGIDDGGLHVGIALVQKCKTKNKVVFKGTMEQRNDVKHLMEVRRGYRRYHRYHKRYRQARFDNRKSSKREGRIAPSILQKRQATIRVIHWLNKWINITNYWLEDVSVDIRALTDGYQSYRWQYQKSNRLDENIRKAAILRDGGKCMECGKSNCRLEVHHIKPRRRNGSNTLDNLITLCESCHQKTEGQEELYMDRYFSLLKSSDNKNLNYAQHVMIGKMWLRKQLSGLGVLYLTSGGDTANKRIDWNIEKSHANDAVCITDLRPDTCDVKEWTMKPMRRQSKAKTDHVLGIHHRDLVEYTFKNGETHRGYVTALYPEQKAINFQSPTKHCQKS

SEQ ID NO: 6801 - protein, 442 aa, Lactobacillus sp.; identical to SEQ ID NO: 5193

SEQ ID NO: 6802 - protein, 408 aa, unidentified; identical to SEQ ID NO: 4709

SEQ ID NO: 6803 - protein, 414 aa, unidentified
MPCSPAKARLLLKEKKAIVKRRTPFTIQLTIATGESKQPVTLGVDAGYKHVGLSASTEKAELYASEVELRQDVSDLLSARRALRQSRRNRKTRYRAPRFNNRLRTKRKGWLAPSVENRINAHLSRIEAVLRLLPVTKITVETASFDMQLLKNPDISGKEYQEGEQLGFWNVREYVLFRDGHVCQHCHGRSKDPVLNVHHLESRRTGGDSPGNLITLCETCHKALHRSEITLKTKRGQSFRAEAYMGLMRWEVLNRLKTSHPGLEVHNTYGYRTKYTRIVNGIDKSHCADAFCIAGNLGAERLGEFFFQKQTRRNNRQIHKLSILKGGIRKRNQAPFEVNGFRLFDKVACKGEEGFIFGRRSSGYFDVRKLDGTCISAGISYKKLHLLEKRRTYLTEIRKEEALPPLPEGSGLRA

SEQ ID NO: 6804 - protein, 433 aa, unidentified
MPDKVYVISRLGHPLMPCSPAKARHLLDDKKAKVVKRMPFTIRLLYGSTKYIQPIILGVDAGSKTIGLSASTAKEEVFAAEVMPRNDVVENLSTRREFRRARRNRTTRYRKPRSDNRVRSNHERWLAPSVKVKIQEHITSIKRVCTILPISKVVIETAEFDLQLLKAIQEGKPIPEGEDYQKGEMYGSYNVCQYVLWRDNYTCICCGVRGTPKNPVRLHIHHFESRKYGGNAPDNHGTLCDDCHKKFHLGIITDVKLKTRRRQSTRDAAFMGIMRKTLMWRLRTELFIPVAETKGYITKATREKLLVLPKSRTRDALAIAQGRHGFGIKEYAYVEPANHIYTVRPVRHHNRQLHKASILKGGIRKRNQASKYVFGFRLYDKVLYQGKACFVWGRRTSGTFLLRTIDGIKVKDGVSYRNLIYLNKAAITLLRKQ

SEQ ID NO: 6805 - protein, 414 aa, unidentified; identical to SEQ ID NO: 2588

SEQ ID NO: 6806 - protein, 420 aa, unidentified
MQYVYVLNKHGEPLMPCSPGKARLLLKQQKACVVKRTPFTIKLLFGSAGYKQPITLGVDAGSKHVGLSASTEKRELYSEEFTPRSDVVELLSTRRQNRRSRRNRKTRYRVPRFDNRVHSKHKGWLAPSVEVKIQEHITVIKHICKILPISLVRVETAEFDTQRLKAMLAGKPLPVGTDYQLGEMYDEYNVRQYVLKRDHYTCQCCGTHNTAKKVVKLHVHHLESRKTGGNAPSNLVTLCTTCHKNLHKGRVTIDGKERGKPLRDAAFMGIMRKTLMVRLKEELPIPVQGTYGYITKMRREQNDIKKSHTNDARCISKHPLAEPCSVCYRTKAIRHHNRQTHKANFSKKGIRKRSQMPYLVEGFRLWDKVLYKGQECFVSGRRSSGSFALKKLDGTSISKGVTFKKLRLLEPATNYLIERM

SEQ ID NO: 6807 - protein, 413 aa, unidentified; identical to SEQ ID NO: 2636

SEQ ID NO: 6808 - protein, 421 aa, unidentified
MIYVRSKDGKALMPSERGGRIGYLLRHGKAHVVSRVPFVVQLDYESTTYTQEVSLGIDAGSKHIGVSASSVKRELLAAQVELRSDVTKLLSSRRELRRTRRNRKTRYRKSRFDNRKRKDGWLAPSVEQKVESHLKVIHLAHKLLPITKTTIEVAQFDAQEIKNPDINGKEYQQGEQMGFWNVREYVLARDGHKCIHCKGKSKDPILNVHHLESRKTGGNSPGNLVTLCETCHKAYHRGEFDLKIKRGTTLRDAAVMNIMRWSVYERAKAEFGNVYLTYGYITKHTRIENDIEKTHAADAFCIAKNVHARRSRTFFMCRCVPRHTRALHVANPKKGGIRRSCIASHKIGKSRFQRFDMVWWKGKECFIFGSTHGRPILRDVEGKQIAGQPSVNIKTIKFLKRLRNNILVEERTSESWIENES

SEQ ID NO: 6809 - protein, 442 aa, unidentified
MSTSVFVLDKKHRPLMPCRPARARRLLRAGRARVVKRFPFVIRLVDRTVEQSEVQPVLIKLDPGSRETGAAVVRDDGKKRHHALAFFVIEHRGGAIRDALKARSAFRRRRRSQNFRCRSPRFLNRVKPKGWLPPSLRHRVETTLSFVRRMCRYLPVSGIAAELVKFDSQKLQTPEVSGIEYQQGTLFEYEVREYLLEKFGRKCVYCGAEGVPLNIDHVVPRAKGGSNRVSNLVLACVSCNQKKGARSLEDFLKGKPEVLARVRRELKTPLRDAAAVNATRWVLFNELKATGLPVETGSGALTKFNRHAFGVEKEHWLDALCVGRLNGAVTRKGLNVLEIRCMGRGSRQRTRLTKYGFPRGYLMRQKCVHGFATGDMVEANVPKGKKAGLWRGRVAVRVSGSFNIQTPKGVIQGVGWKHCRLISHNDGYGYAWLGHAPHSSPA

SEQ ID NO: 6810 - protein, 443 aa, Anoxybacillus sp.; identical to SEQ ID NO: 2800

SEQ ID NO: 6811 - protein, 417 aa, unidentified; identical to SEQ ID NO: 5046

SEQ ID NO: 6812 - protein, 293 aa, Parasutterella sp.
HLSRIKAVLRLLPVTKITVETASFDLQLLKNPDISGKEYQEGEQLGFWNIREYVLCRDGHVCQHCYGRSKDPVLNVHHLESRRTGGDSPGNLITLCETCHKALHRGEITLKAKRGQSFRAEAFVGIMRWEVHNRLRALHPGIEVSNTYGYRTKHARIANGIAKSHCADAFCIAGNLGAERLCEFFFQKQTRRNNRQIHKLSILKGGIRKRNQAPFEVKGFRLFDKVACQGEEGFIFGRRSSGFFDVRKLDGTRISAGISCKKLHLLEKRRTYLTEIRKEEALPPLPEGRGLRA

SEQ ID NO: 6813 - protein, 424 aa, unidentified
MASMQYVYVLNKHGEPLMPCSPGKARLLLKQQKAHVVKRTPFTIKLLYGGAGYKQPITLGVDAGSKHVGLSASTEKRELYREEFTPRNDVVELLSTRRQNRRSRRNRKTRYRAPRFDNRVHSKHKGWLAPSVEVKIQEHITVIKRICRILPITLVRVETAEFDTQRLKAMLKGKPLPVGTDYQLGEMYDEYNVRQYVLKRDNYTCQCCGAHPTEKKPIRLHVHHIESRHVGGNAPNNLITLCVACHKALHEGKITLDKGKKRGKPLRDAAFMGIMRNTLLARLKDELNIPVKQTYGYITKLLREKNKIPKSHVNDARCIAKAPNAKPCDTMLYTRALRHHNRQIHKAKILKGGIRKKNQAPYLVKGFRLWDKVRYNGEECFITGRRSSGYFALKKYDGTVISNSASYKKLMLLEAATNYITERS

SEQ ID NO: 6814 - protein, 423 aa, unidentified
MSNYVFLIDSNQTPLNPVHPKQARKLLDAGTAAVFRRYPFTLRLKRVIDNPNVYPLTLKIDPGSKFTGIALVTNQGNVIWGMELQHRGKQIKNALLARKAVRRGRRNRNTRYRQARFLNRKRPNGWLAPSLKHRVLTTQTWVKRIQKFASISSIVQELVKFDTQAVQNPEISGIEYQQGTLKGYECREYLLEKWNRQCAYCGVKDVPLEIEHIEPKSKGGSDRISNLCLACHKCNQCKGNKDIKDFLKGKSELLNRVLKQAKTSLKDAASVNSTRWALFNTLKSFGLPVSTGTGGQTKFNRMRFDLPKAHWIDAACVGSVETIKLVTTKIIKVKATGFGGRQRCQTNKFGYPQKHRPLRPIQGFCTGDIVRADVPKGKYKGTFTARVCPMSHGYGELVIDKKRRSIKLDYLTSIHQKDGYDYP

SEQ ID NO: 6815 - protein, 425 aa, Moorena sp.
  VARIANT 425: note = X can be any naturally occurring amino acid
MRVFVLDKNLKTLDPCRPARARLLLKQGRAKVFRRYPFTIILSDLEVENCTTHHHQLKIDPGAKTTGLAIRQNNTVIWGAEITHRGFQIRDALTSRRQLRRSRRNRKTRYRKPRFLNRKRPERWLAPSLMSRVHNILTWVKKLIRFCPIAGISQELVRFDTQKTENPEISGTEYQQGTLYGYEIREYLLEKWNRKCAYCGTTDTKLEIEHIKPKSLGGSDRVSNLAIACHDCNQAKGNQEIQQFLSGKPDVLRRILSQAKRPLADAAAVNATRWKLYKELKSIGNPLETGSGGRTKYNRCRFNLPKTHWLDAACVGNVQSIYVENYQPLLIEAKGHGTRQICRTDKFGFPKRYCSRTKIHKGFQTGDIVKAVVTKGKKIGTYVGRVATRKTGSFNISTANGLIQGISHKYCQPIHKKDGYAYTIX

SEQ ID NO: 6816 - protein, 420 aa, unidentified
MQYVYVLNKHGEPLMPCSPGKARLLLKQQKACVVRRTPFTIKLLYGSAGYKQPITLGVDAGSKHVGLSASTEKRELYREEFTPRNDVVELLSTRRQNRRSRRNRKTRYRAPRFDNRVHSKHKGWLAPSVEVKIQEHITIIKRICKILPISLVRVETAEFDTQRLKAMLAGKPLPVGTDYQLGEMYDEYNVRQYVLKRDNYTCQCCGAHTTAKKLVKLHVHHLESRKTGGNAPSNLVTLCTTCHKNLHKGKVTLDGKERGKPLRDAAFMGIMRKTLMARLKEELPIPVQGTYGYITKMRREQNDIKKGHTNDARCISKHPLAEPCSVCYRTKAIRHHNRQTHKANFSKKGIRKRSQMPYLVEGYRLWDKVLYKEQECFVSGRRSSGSFTLKKLDGTSVSKGVTFKKLRLLEPATNYLIERM

SEQ ID NO: 6817 - protein, 431 aa, unidentified
MPNKVYVINKHGRPLMPCSPAKARHLLDDGKAKVKKRAPFTIQLVYGSSGYTQEVILGVDAGSKTIGMSASTTKEELLSAEVKPRNDVVDLLSTRREFRRARRNRKTRYRKPRFDNRVRSKHKGWLAPSVEVKIQEHITSIKRVCRILPVSKVVIETAEFDLQLLKAIEEGKPVPQGEDYQQGEMYGHYNVRQYVLWRDGYTCQCCGAHATKKKEVRLHVHHLESRKVDGDAPDNQVTLCESCHEKLHKGLIAEKDFKKRKRKSTRDATFMGIMRKTLMQRLCSELPIPVIETRGYITKATREKLLVLPKSHTNDALAIAQGKQGFNVGYLPGIVQINKIYTIRPVRHHNRQLHKATILKGGIRKSNQTEKYVFGYCLFDKVQFNGQDCFIWGRRTTGIFTIKTINGKMIKDGISFKKLKLVEKSTSYLIA

SEQ ID NO: 6818 - protein, 373 aa, Moorena sp.; identical to SEQ ID NO: 6300

SEQ ID NO: 6819 - protein, 460 aa, Streptomyces sp.
VYTGGVGSGRIFVLSKEGHPLMPCHPARARELLGKGRAVVARYVPFTIRLKDRALAGSEVDGVQLRIDPGSKGTGLHLTDEKEEINERGATGTVRRGLVSVELQHRGDQIRGCMQQRAGYRRRRRSANCRYRAPRSGNRTRRESWLPPSLRHRVDTVFAQAARLCRYAPVAEIHVESGGFDTHSTGTQGTLAGTDARAYLHARWNSACSYCGVTGVRLNIEHVRPRSRGGSSRISNLVLACVPCNRRKGTLPVEVFLAASPDRLARILQQGETPLHDAAAMNATRWPLREALSRLDRPVFGWPGGLTKRNRAAMGLEKSHTLDALSVGHLDHESGDAIVRFPSRVLVVKATGRGSYARTTPDRFGFPRLRRARTKQHFGYVTGDLVRATVPTGKWTGTWTGRVCVRARGQHSLSTPKGRINVSHRNLRLLQRGDGYGYGTRPEPRRQYPGKPVDRRPTGS

SEQ ID NO: 6820 - protein, 425 aa, unidentified; identical to SEQ ID NO: 3889

SEQ ID NO: 6821 - protein, 423 aa, Arthrospira sp.
MSNHIFVLDTNRKPLTPCKPGVARSLLKAGKASVFRRYPFTIILNKEVDANPEPLELKLDPGSKVTGIALKQGNHIIFAAELQHRGQQIKEALLSRRQLRRSRRNRKTRYRPARFLNRTRPEGWLAPSWQHRVDTLMTWVHRFRRLAPVGRITQELVRFDLQLMENPEISGVEYQQGELQGYEVREYLLFKWGRTCAYCGAQNVPLEVEHIQPRSKGGSDRVSNLTMACHSCNQAKGNGDIRDFLSGQPDVLSRLLRQAKSPLKDAAAVNSTRWALFKALKATGLPVTTGTGGQTKFNRLRLNLPKAHWLDAACVGPVESLEVLTSKPLLILAKGHGTRQMCGTNKYGFPTRHRSRRQIHKGFQTGDMVTALVTAGKKIGSYLGRVLCRASGSFDITTASVRVAGISHKYCQPIHRKDGYAYA

SEQ ID NO: 6822 - protein, 442 aa, unidentified; identical to SEQ ID NO: 2834

SEQ ID NO: 6823 - protein, 466 aa, Solobacterium sp.
LSIKPLINIGEGVIYSSICTGLSLQTYQKRKEVPYMVYVLDIDGQPLMPTTRHGKVRRLLNSHLAKVVKRCPFTIQLLYQSTKETQPVSLGVDAGSKHIGMAATTEKKVVYQEELSPRNDVVKLLSARRTLRRTRRNRKTRYRKPRFNNRAHSKHKGWLAPSVEVKIQEHITAIKRICQILPISEIHVETAEFDLQRLKAMDEGSPLPVGIDYQLGEQYDFYNTRQYVLHRDGYTCQCCGTHDNNIKLHVHHIESRQTGGDAPNNLIILCEHCHKALHEGKLELPKGKKRGKSYRDATFMGVMRKTLLERLKKEIDVPVEGTYGYITKYWRERAGLEKSHIHDAVCISKYPYAKPLDIYYLTKTVRHHNRQIHKSNFSKGGIRKRNQAPYLVKGFRLFDKVLYQGKEYFIFGRRATGYFDIRTLDGTKVNKGSISYKKLRIQDTAKAYLKEARAIPHMNKFTCVLA

SEQ ID NO: 6824 - protein, 442 aa, unidentified; identical to SEQ ID NO: 3161

SEQ ID NO: 6825 - protein, 448 aa, unidentified
MSTGLRAVQAEPAGIRKGDALKVFVLNMRGRPLMPCSPARARHLLKAGKAVVRRRTPFTIQLRIATGETKQSVTLGVDAGAKHVGLSAATEKEEVFASEVELRQDITGLLAARLSLRRDRRHRKTRYRAPRFLNRVRSKHKGWLAPSVENRIQAHMSRIDAVCRLLPVTRIVIETASFDVQKIRNPEVEGTGYQQGDQLGFWNVREYVLFRDGHVCQHCHGHSKDKILNVHHLESRQTGGDAPNNLITLCETCHKACHAGKIKLKVKRAQSFRAEAFMGIMRWTLLDRMRKAHSGLPVENTYGYLTKNTRITLGLPKTHCVDAYCIAGNLKAVRRGVCLHQRQVRKHNRQIHKCTVLSKTLKDGTKIGYRKLNQTPHLVKSFRLFDKVRCLGQTGFIFGRRSSGYFDVRRLDGVKLSPSISWRKLTLLEKRSTYLTELRKEDGASSPV

SEQ ID NO: 6826 - protein, 460 aa, unidentified
MDDVRVLVLDNQKQPLMPCSSARARQLLRDDKASVFRRYPFTIILKHRAGGDLQPVSLNIDPGSKTTGVALVADYPRGTCAVWALHIGHRGQQIKSALDSRRGIRRSRRNRKTRYRAPRFLNRTRTKGWLPPSLMSRVYNVETWVKRLLQFTPIASANVETVRFDMQMMENPAIAGTDYQQGSLFGWELREYLLYRHKHTCAYCDGLTGDPVLEKEHVIPRALGGSNRLANHVISCRTCNQDKGSLHPSAWAQLCAKHGGTLNIKRDRNMRRILAGYRPALKDAAAVNATRYAVGDVVKRLIANTQFWSGGRTKKNRSEQGYPKDHWIDAACVGKKGSSVILLCDTVLIAHAKGHGSRQMCRVDKYGFPRTSAKTFSIVNGFKTGDMVLASVPSGKKQGMHMGRVAVRSSGSFNIQTKTGVVQGISHKHCRIIQRNDGYNFNYGAAIPLCAKAQSILAGT

SEQ ID NO: 6827 - protein, 401 aa, unidentified
MPTTPCKARKLLKQGKAKVVKREPFTIQLLYATGETKQDITLGVDAGSKIIGLSATTDKQELFSAEVELRNDIVDLLSTRREFRRTRRNRLRYRKPRFLNRVYSKNKGWLAPSVENKIQTHLKIISKIHEILPISKIIIEVASFDIQKIKNPDIEGEQYQQGEQLGFWNVREYVLWRDGYKCQGKKGCKNKILNVHHIESRKTGGNSPSNLITLCESCHKDYHAGKLKLNLKRGQSFKDATFMGIMRWTFYNRLKEVYPNVKITYGYITKNTRIQNNLPKEHRIDALCISGNPNVKRLDYWYYIKQVRRHNRQIHKAKILKGGIRKLNQAPYLVKGLRLFDKVKYKGQECFIFGRRSSGYFDLRKLDGTVIHRSASYKDLQLLSKRKTLLWERREGVSSPT

SEQ ID NO: 6828 - protein, 421 aa, unidentified
MPKVYVLNRHGRPLMPCTPAKARHLLDAGKAKVRHRTPFTIQLLYGSTGYTQEVILGVDAGSKTIGLSAATETEELFSAEVKPRNDVVELMSARRQFRRARRNRTTRYRKPRFDNRVRSKHKGWLAPSVEVKIQEHMTAIRRACAILPVSKVVVETAEFDLQLLKAVAEGKPVPQGEDYQKGEMYGHYNVRQYVLWRDSYTCCICGVHGSVRKGVPLHVHHLESRRVGGDAPDNLVTLCTACHDKLHKGIIMAADIKKRKRRSTRDATFMGIMRMTLLRRLREQLPVPVVETRGYITKATRENLLVLPKSHTNDALAIAHGPQGFRAEYLPNTRQADRLYTIRPVRHHNRQLHKATILKGGVRKANQAEKYICGFRLYDKVLYNGIECFVWGRRTSGSFLLRQLNGEKVKDGVSYKHLKLL

SEQ ID NO: 6829 - protein, 415 aa, Bacillus sp.; identical to SEQ ID NO: 5533

SEQ ID NO: 6830 - protein, 442 aa, unidentified; identical to SEQ ID NO: 3333

SEQ ID NO: 6831 - protein, 383 aa, Sutterella sp.
MSTGLQAEQAEPAGIRKGDTLKVFVLNMRGKSLMPCSPAKARHMLKAGKAVVVSRTPFTIKLTIATGETKQDVTLGVDAGARHVGIATTTEKEEVFASEVKLRQDITGLLADRLAFRRARRNRKTRYRSPRFNNRVRSKHKGWLAPSVENRIQAHMSRIDAVCRLLPVTKIVITTASFDVQKIKNPTIEGTDYQQGDQLGFWNVREYVLFRDGHVCQHCHGRSRDRILNVHHLESRKTGGDAPNNLITLCETCHKAYHAGKIKLKIKLKVKCGQSFRAEAFMGIMRWTLLDRVRKTHPELPVENTYGYLTKHKRIALGLPKTHCADAFCIAGNLKALEEEISSSNNRRESTTDRYTGVRFSKAECENSIRRHSSSRGSAYSTR

SEQ ID NO: 6832 - protein, 434 aa, unidentified
MVYVLNKQGKPLMPCKEAKARKLLKQNKAKIVKHEPFTIQLLFDCENQTQDISLGIDAGSKHIGVSATTEKQVLYEADVELRNDIVNKLSSRSEARRIRRNRLRYRPARFNNRVHSKHKGWLAPSIEQKINAHIQVIRHLYEILPITKLIVETAQFDIQKINNPEISGEEYQQGNQLGFWNVREYVLFRDNHECQCCHGKSKDNVLNVHHIESRKTGGNAPNNLITLCETCHQAYHKGEVTLKFKRGNSYRGAAFMGIMRKTLFSRLCALYPNVNETYGYITKNIRVENNLPKEHYIDARCISGNPKANPLEYYIYQKCVRRQNRQIHKNNFLKGGYKKNNQLIGNVFGFDLFDTVEYQNKHYFVFGKRKSGFLDIRNLDGDKVNNGSISYKKLKRIKHNSVKLTERRRQFLRTPKGDAVPLPKILWRNKYVLL

SEQ ID NO: 6833 - protein, 420 aa, unidentified
MQYVYVLNKHGEPLMPCSPGKARLLLKQQKACVVKRTPFTIKLLFGSAGYKQPITLGVDAGSKHVGLSASTEKRELYSEEFTPRSDVVELLSTRRQNRRSRRNRKTRYRVPRFDNRVHSKHKGWLAPSVEVKIQEHITVIKHTCKILPISLVRVETAEFDTQRLKAMLAGKPLPVGTDYQLGEMYDEYNVRQYVLKRDHYTCQCCGTHNTAKKVVKLHVHHLESRKTGGNAPSNLVTLCTTCHKNLHKGRVTIDGKERGKPLRDAAFMGIMRKTLMVRLKEELPIPVQGTYGYITKMRREQNDIKKSHTNDARCISKHPLAEPCSVCYRTKAIRHHNRQTHKANFSKKGIRKRSQMPYLVEGFRLWDKVLYKGQECFVSGRRSSGSFALKKLDGTSISKGVTFKKLRLLEPATNYLIERM

SEQ ID NO: 6834 - protein, 421 aa, unidentified
LWYKTGCATQEGSIGIDTGSQHIGVGVTCGDKVILKDEHELRSSMEKRSLMETRATMRRGRRYRKVRYRKPKWRHHTKRMYFEKANRKGQHWRKVKTTTQSPRPESWLPPSLQSKCDHHFRIIDRYLKYLPDSITKNLVIEVGRFDMARMNDPTIHSEMYQRGPMYDTENLRAYIFARDGYKCACCKAKAGSIRKKDGTSVKLIAHHIQFRSRGATDNPKYMISVCDHCHTTKAHQPGGILYSWMEKNKKVTRGLRDATFMNILRRRLFDRFPQAAFTYGNITAADRKRLLLPKGHANDAVAISLFGKDVSVINGICQTMHYKQVRKSKRSLHEATPRKGRKEPNTKAIRNKKNTTHVNGFKLWDSVLANGQKLFICGFTGSSAYLVDQDGRYVSPPGKTYKQWTLSKLSRLHPNGNWMMA

SEQ ID NO: 6835 - protein, 418 aa, unidentified
MVYVLGQDGHPLMPTCRHGKVKRMLKSGMAKVVKKCPFTIQLQYESTTHTQKINLGIDAGSKTIGVSATTESKVLYESEVVLRNDIVELLSGRRALRRSRRNRKTRYRKPRLDNRRRPDGWLAPSIRQKIKTHVTVVENVMKILPVTKIIVETASFDIQKIKNPKIEGAEYQYGEQLDFWNVREYVLFRDGHTCQCCKGKSKDNILNVHHIESRKTGGNAPNNLITLCETCHKAYHKGVITLPKEIHRGMRFRDAAFMGIMRWAFYDRLKELYTPFGVEVINTYGYITKNTRIEHGLPKEHYVDARCISGNPAAKPLGHYYFQKKVRCHNRQIHKNTILKGGIRKRNQAAYLVNGYRLFDKVKYQNQEYFIFGRRSSGFFDIRTLDGTKVNKGSISCKKLQLVEKSKHYLTEQRKVAA

SEQ ID NO: 6836 - protein, 420 aa, unidentified
MQYVYVLNKHGEPLMPCSPGKARLLLKQQKAHVVKRTPFTIKLLYGSTGYKQPITLGVDAGNKHVGLSASTEKREFYCEEFTPRNDVVDLLSTRKQSRRSRRNRKTRYRAPRFDNRVHSKHKGWLAPSVEVKIQEHITVIKRICRILPVALVRVETAEFDTQRLKAMLEGKPLPVGTDYQLGEMYDEYNVRQYVLKRDHYTCQCCGAHTTTKKTVKLHVHHLESRKVGGNAPSNLITLCTTCHDALHKGKVSLDGKERGKPLRDAAFMGIMRKALMARLREELPIPVQGTYGYITKMRREQNDIKKSHVNDARCISKHPLAEPCSVCYRTKAIRHHNRQTHKANFSKGGIRKRSQMPYVVEGYRLWDKVLYKGQECFVSGRRASGSFTLKKLDGTRISKGVTFKKLRLLEPATNYLIERM

SEQ ID NO: 6837 - protein, 408 aa, unidentified; identical to SEQ ID NO: 5302

SEQ ID NO: 6838 - protein, 414 aa, unidentified
MPCSPAKARLLLKEKKAIVVRRTPFTIQLTIATGETKQPVSLGVDAGYKHVGLSASTEKAELYASEVELRQDITDLLSARRALRQSRRNRKTRYRAPRFDNRIRTKRKGWLAPSVENRINAHLSRIEAVLRLLPVTKITVETASFDLQLLKNPDISGKEYQEGEQLGFWNIREYVLCRDGHVCQHCYGRSKDPVLNVHHLESRRTGGDSPGNLITLCETCHKALHRSEITLKTKRGQSFRAEAFMGIMRWEVLNRLKASHSELKVHNTYGYLTKHARIENGIAKSHGADAFCIAGNLGAERLGEFFFQKQTRRNNRQIHKLSILKGDIRKRNQAPFEVNGFRLFDKVACKGEEGFIFGRRSSGFFDVRKLDGTRISAGISCKKLHLLEKRRTYLTEIRKEEALPPLPEGRGLRA

SEQ ID NO: 6839 - protein, 480 aa, unidentified
LYTKPLDNIGEGSLPPSGEINLKGMTFMVYVKSIDGKALMPTSNAKARKLLKQKKAKVVSLRPFVVKLTYKTKTEYTQKLNLGVDSGYSNIGFSVIDAKQEYIAGEVKLLEGMKKRLLEKASYRRIRRSRLRYRKARWNNRVKSKKKGWLAPSLKHKLDTHIKFIDYLKNILPIGKITVEVANFDIQKMKDDLISGIDYQSGDMFGFWNVREFVLHRDGHKCQNPNCKHKDKKEQILKVHHIRYRSEGGSDRPENLITLCSKCHTPVNHKKGKFLYDWCVNGKKVRGFKDATFMSMIRWYLVNELKSKHNNVSITYGYITKNHRIQNGIEKSHLNDAFAIAKGTNQARTKDRFLVIQDRLKNRSLEKFYDSKIIDIRTEKKVSGGDLNCGRSTRNKNLNTENLRKYRGIRISKGQRRIRKQKYFYQPNDLVKYDGKVYTVKGTQNEGKYIALKEIKKVPKVELLIPYVFKKGLNWSYGLC

SEQ ID NO: 6840 - protein, 465 aa, unidentified
MSTCVCVLSNSGERLMPTIRLGKVRRLLKDGKAKIIKHHPFTIQLLYDSKANTQPIEICEDVGYNYIGISVKSQSHEYVSAQYDTLQDEKACHDSCRKLRRTRRNRLRYRKPRFDNRKRGEGWLAPSLEHKKQLNIRLIERYVSVIPITHATVEVGSFDTMLVKAIEEGKATPESADYQKGPRYNLATLREAVFYRDNYICKVCGRKATEGAILHMHHMFYWKGRHGNSLSELITVCEKCHTPANHQKSGKLYGFGENVKFADLSGAAFMNTVRWQIVNELYAAFGKDFVTVTYGAMTKEKRIALHLEKSHNNDAYAMGSFHPVNRCAFEHYEKVKRNNRILEKFYDSQYIDTRTGELTNGKSLFNGRISRSHKKDSENLHKYRGKRICKGHRALRRKKLALNPGDLVSLNGEILVVHGTHTKKNGSVNVEFKTPSRGGKKSASLKKLKIVKTSNLMHSAWTKVS

SEQ ID NO: 6841 - protein, 494 aa, unidentified
MTKVYVQNKDGKPLMPTTRYCYVRLLLKEKKARVVSTTPFTIQLNYDTPDITQDLILGIDPGRTNIGVAVVKEDGQCVFSAHLETRNKDVPLLMQKRAGFRRQHRTLDRRRKRQRRAKAAGTNIAAGSVERLLPGYEKPIVCHYIRNKKARFNNRKRPQGWLTPTANHLLQTHINLIAKVAKFLPITKVVVELNRFAFMAMDNPNIHRWEYQQGPLYGLGSVEDAVYAQQDGRCLFCKKPIDHYHHVVPRHKGGSETLANRCGLCREHHALVHTDKVWADKLVTRKEGVNKKYHALSVLNQIIPHLMEYLGSETRYDVYATDGRSTKGFRVAKNVPKEHYTDAYCIACSILDTDIEVSTPVEPFELKQFRRHDRQACHQQRVDRKYYLNGKQVATNRHKAIEQKSDSLQEFRESYGDTAVSQLAVKPHSPQYKDMTRIMQGAVMDFGGTVGVFQGSDGFHNGKPDYYKSAKGARVLTKRCVLLAQNTGIVFIPA

SEQ ID NO: 6842 - protein, 420 aa, Clostridium sp.
MLKLEYCLNPKWQKWLIQKPFTIKLLYNSKKFIQSVTLGIDSGYLNIGFSAITNRKELISGEVKLLKGMSERLKEKAMYRRQRRSHLRYRKPCFDNRKRSNGWLAPSIQHKYDSHIRFINKLKMLLPITNIIIEVANFDTHKLKNPSIEGADYQNGEQKDFYNLREYIFHRDGHKCKNPNCKNKDKNPILQVHHIGFWKKDRSDRPGNLITLCDKCHIPKNHNKNGFLYGWQPKVKAFKEATFMSMIRWLLVNTLSCKYTYGYITKFNRIALKLEKTHYNDAFCIAGGSSQSRVKPLIFEQIKRNSRSLEKFYDAKVIDIRTNTKVSGAELFNGRRTRNKNLNSENLRKYRGVKVSKGQRRIRTKRYFYQPGDLVKYEDKVYTVKGTQNKGKYIALKELRKVPKVELLTPYKYRKGLVCI

SEQ ID NO: 6843 - protein, 415 aa, unidentified
MVYVLANDGQPLMPTERHGKVCRMLKSGIAKVVKKCPFTIQLQYESERNVQPVALGIDAGSKHVGVSATTKAKVLYESDVELRDDIVKLLATRRQLRRRRRSRKTRYRPARFDNRRRKEGWLAPSIRQKIESHLTVVANVCKILPVSQIIVETASFDIQKIKNPDIQGIEYQQGEQMDFWNIREYVLFRDGHTCQCCKGKSKDKVLNVHHIESRKTGGNAPNNLITLCETCHKGYHNGTVTLPKNIKRGMKFKDAAFMGIMRWTFYNTLKEQYEPDIPVHYTYGYITKNTRINHNLPKGHCIDARCISGNPDAVSDSTYYYQKKVRCHNRQIHKQTILKGGIRKSNQAEYLVRGFRLFDKVRYQGREYFIFGRRKSGFFDIRTLSGEKVNKGSINVKRLTFVDTRKNYLTERRTV

SEQ ID NO: 6844 - protein, 418 aa, unidentified
MPCSPAKARLLLKEKKAIVKRRTPFTIQLTIATGETKQPVVLGVDAGYKHVGLSASTDKAELYASQVELRQDITDLLSARRALRRARRNRKTRYRAPRFDNRIRTKRKGWLAPSVENRINAHLSRIEAVLRLLPVTKITVETASFNMQLLKNPDISGKEYQEGEQLGFWNVREYVLFRDGHVCQHCYGRSKDPVLNVHHLESRRTGGDSPGNLITLCETCHEALHRGEIALKTKRGHSFRAEAFMGIMRWEVLNRLKALHSELEVHNTYGYRTKHVRIANGIAKSHCADAFCIAGNLGAERLGEFLFQKQTRRNNRQIHKLSILKGAQRKRNQAPFEVKGFRLFDKVACKGEEGFIFGRRSSGSFDVRKLDGASISAGISYKKLHLLEKRQTYLTEIRKEEALPPLPEAGVSAPKCDE

SEQ ID NO: 6845 - protein, 363 aa, unidentified
MTMVYVQNKDGKPLMPTTRYCYVRLLLKEKKARVVCTTPFTIRLNYDTPNITQDLILGIDPGRTNIGVAVVKEDGSCVFSAHLETRNKEVPLLMKKRAAFRRQHRTQDRRRKRQRRAIAAGTTVESNTIERLLPGYEKPIVCHHIRNKEARFNNRSRPAGWLTPTANHLLQAHINLIAKAAKFLPITKVVVELNRFAFMAMDNPNIRRWEYQQGPLYGLGSVKDAVYAQQDGHCLFCKKPIDHYHHVVPRHKGGSETLANRCGLCEKHHALVHKDKAWAEKLVTRKGGMNKKYHALSVLNQIIPHLMEYLGSETPYDVYATDGKSTKGFRIAKNVPKEHYTDAYCIACSILDADTKVSACRTF

SEQ ID NO: 6846 - protein, 429 aa, Moorena sp.; identical to SEQ ID NO: 3068

SEQ ID NO: 6847 - protein, 434 aa, Solobacterium sp.
MKVFVLNKHGNPLMPCNPKKARLLLKQQKAVVAKQMPFTIRLLYGSSGYKQPVSLGVDAGSKHIGIAATTEKEVLFAEELTPRNDVVNLMSVRRQNRRSRRNRKTRYRKVRFDNRVHAKRKGWLAPSVEVKIQEHITAIKHVQQILPITEVHVETAEFDTQRMKAVEEGRPLPVGTDYQLGEMYDSYNVRQYVLKRDNYTCQCCGKHGDGVQFHVHHLESRKTGGNAPGNLITLCEDCHKAIHAGAKTLHARKAKRSTKSLRDAAFMGIMRKTMLERLRAEPGIPVNGTYGYITKLYRDLYRIEKSHINDAIVISKHFTAVPDDVWYFAKAVRRHNRQIHKNKILKGGIRKRNQAPHVVKGCRLFDSVKYARNTYFIFGRRASGQMDIRTLDGVKVSGGSLSFRKFSVQHCNAGALLERRKAIPPTNESVGFLA

SEQ ID NO: 6848 - protein, 473 aa, unidentified; identical to SEQ ID NO: 3562
  source 1..473: note = uncultured beta proteobacterium

SEQ ID NO: 6849 - protein, 410 aa, unidentified
LRVYVLNQRKEPLMPTTPSKARKLLKQGKAKVIKREPFTIQLLTATGETKQDITLGVDAGSKAIGLSVTTDKDELFSAEVELRNDIVDLLSTRRQNRRTRRNRLRYRKPRFLNRVGSKNKGWLAPSIENKINTHLKVISKIYEILPISKTIVEVASFDIQKIKNPDIQGKEYQQGEQLDFWNVREYVLFRDGHKCQGRKGCKNKILNVHHIESRKIGGDSPNNLITLCENCHEDYHDGRLKLNLKRGQSFRDATFMGIMRWSFYNRLKEIYPNVQMTYGYITKNTRIVNGLPKEHRIDALCISGNLSVKQSEYWYYIKQIRKHNRQIHKANILKGGKKKLNQAPYEVKGFRLFDKVKYKGQECFIFGRRSSGYFDLRKLDKVVVHRSASYKDLELIQKSNSLLIERRSAG

SEQ ID NO: 6850 - protein, 453 aa, unidentified
MTAVYVISADGQKLMPTLRNGKVRHLLKEGKAKICKYRPFTIQLTYDTPNQVQPIEIGMDSGYQHIGLSVKTEKKEIFSAEFTLLTDEKKRHDDCRKYRRTRRNRLRYRKPRWLNRTKTIPEGWLAPSLLHKAEAHIKLVKDICSVAPITNVTTEAGEFDPALLKAMHEGKEPPQGTDYQQGPLYFADSLRKAVFQRDNYTCKICHKSALKDKNVILKIHHALYWKNRHGNNLSELITVCDRCHTSANHAPNGKLYGLEPKVARLESAAYMNIVRWYIINTLKKELPNIQVNFCYGALTARKRKDLELEKSHTNDAFCIGNFLPSLRSVATEYFKKKRRNSRILEKFYDAKYIDIRDGKIKKGAELSTGRTNRSIPRNNENNLRKFRSEKKSKGRRQIRKTRYSFQQNDFVFYKKRLYKVIGMQNLGKYISLQGFKPVPISQVQLYKHANAWT

SEQ ID NO: 6851 - protein, 505 aa, unidentified; identical to SEQ ID NO: 4960

SEQ ID NO: 6852 - protein, 442 aa, Lactobacillus sp.; identical to SEQ ID NO: 5262

SEQ ID NO: 6853 - protein, 426 aa, unidentified
LAKDLYRSIDREETNLRVYVLNKRGEPLMPCSAAKARILLKEKKAVVKRRTPFTIQLTIATGETKQSVTLGVDAGYKHIGLSASTEKAELYASEIELRQDVSELLAGRSALRQARRSRKTRHRAPRFDNRKREKGWLAPSVENRIGAHVSRVEAVLRILPVTKIIVETASFDVQRLKNPDMQGVEYQQGEQLGFWNVREYVLFRDGHECQHCHGKSKDKVLNVHHIESRRTGGDAPNNLITLCETCHKAFHRGEIELKVKRGRSFQAETFMGVMRRTFFERLRASHPEIEVRNTYGYLTKDTRIANKIEKSHCADAFCIAGNLKAKRLGYYFFQKQTRRHNRQIHKLTILKGGVRKRHQTPYEIKGFRLYDKVLYRGKVAFIFSRRSSGYFDIRTLDGERIAASGSYKKLRLLEKRRTFLIELRRN

SEQ ID NO: 6854 - protein, 560 aa, Streptomyces sp.
MTTFPAGEQTHRAVLPQQPALESARADTPGSRDETAHGHPATARGTGGEHGRGEIDGYGTGTRRRHAKNVATAANTAENGSGDAPPHDRKSKAGTGNGRVFVLSRDGHPLMPCHPARARELLRRGRAVVARHVPFTIRLKNRTLAGSEVVGVQLRIDPGSQGTGLVLTDEKQHITEDGIAITARRGLVSVELRHRGAQIHSTMLRRAGYRHRRRSANCRYRSPRAKNRLQPEGWLPPSLRHRVDTTFSVARRLCRWAPVSEVHVERSAFDTHSMSAGRPLYGAEYTRGPLVGTTARAYLRTRWHNACAYCGATGVPLNVEHVRPRSRRGSHRVANLVLSCVPCNKAKGSRSVETFLAHRPELLAEILGQTKAPLRDAAAMNAIQTRLVQALQTLGKPVHAWPGAVTKANRDATGLGKTHTLDALSVGPLGHESGNGIVRIPDGVLVVKATGRGTYARTTPDRYGFPRLPRTRRKQHFGYSTGDLVRAVVPSGRWKGTWTGRISVRARGQHSLAVPGGRVNVSHRHLRLLQRGDGYGYGIRPEAVPSAFPKKTVEPAPATS

SEQ ID NO: 6855 - protein, 427 aa, unidentified
MKQGNRVFILNMRGEPLMPCSQRKARILLKEGKAVINKYNPFTIQLTYATGETKQECHIGVDTGAKHIGIAVTSEGKVFYKAEVELRQDVSSNLGSKRIYRRSRRNRRCRYRKPRFLNRMRAKKWLPPSLQNRINHTFNWIDKFSALVPDPILHIEAGKFDTAKMINPDINGVDYQHGQTYGFFDERYFVFARDNYTCQVCGKSKGKILQTHHVIYRSNGGTDRVDNLITVCTDCHTSANHKKGGILYKWQAEHKKVKQYKEPPFMNALRRRIFDKYPDAIITYGSETTPKRKEIGLKKTHYNDAIVISGIEAIKENPNEWLLIKQFRKKKRSLHEATARKGRKEPNRTQKRNSKNTPYYKGFWLNDKVSVLGQVGYITGFTSGNAYIKNKNDKYITLPSKSYKQVGITSLRLLSHNNNWQYIRNVA

SEQ ID NO: 6856 - protein, 514 aa, Nocardiopsis sp.
MATFRTGQQTHPPVLPQQVALESESVDTPRIGHETRLRHHPTVVPGTDHVRGETGTASPDGSGVTTQPLAGEKPRERHPSVFVLDQHHTPLQPCHPARARQLLAKGRAVVARHTPFTIRLKDRSIAESEVDGVQVGIDPGSKHTGFAVFTHQAGERRGRYAIQLDHRGGRIRKKMGQRSAYRRRRRAANLRHRAPRFSNRTRPPGWLSPSLRHRVETTTAWVDRLTRWAPVTAVHVERVAFDTHSLSAGRPLEGVEYQQGTLAGYEVREYLLAKFDRTCAYCGATDTPLNLDHVHPRSRGGSDRVSNLVLACVACNQAKNDRPVEEFVTDPKTLARVLARAKAPLRDAAAVQSTRWALWRSLNERLPTRVGSGGRTKWNRTRNRLPKSHTLDALAVGEAETITQTTDRVLVAACAGRGSYSRTRPDKHGFPRLRLPRTKGFFGFATGDLVRAVVPQGKKAGVHTGRVAVRASGSFNITTAHGTVQGIGYKNMRLLQRADGYGYTWKGEGVSSRP

SEQ ID NO: 6857 - protein, 456 aa, unidentified
MSTCVCVLSNSGERLMPTFRLGKVRRLLKDGKAKIVKHHPFTIQLLYDSKTNTQPIEICEDVGYNYIGISVKSQSHEYVSAQYDTLQDEKACHDSCRKLRRTRRNRLRYRKPRFDNRKRGEGWLVPSLRHKKELNVNVVKMYCAVMPITHATVEVGSFDTMLLQAIQKGESKPEGVDYQKGPRYNLATLREAVFYRDNYTCQVCGRKIADGAILHMHHMFYWKGRHGYQLDELVTACEKCHTPANHQKGGKLFGFGEDKEFANLSGAAFMNAVRWQIVNALYATYGKEFVTITYGAMTKEKRIALQLEKTHSNDAYAMGDYYLAHRCVFRHYQKRRRNNRVLEKFYDATYIDARTGNKAKGKELFNGRINRNHKKDSENFHKYRSKKVSKGRRSIRRQRYAIQPYDTVRLEGKTYITSGCHNKGTRLLIPANGKSKSVAISKVQVVCHAGAWIQII

SEQ ID NO: 6858 - protein, 447 aa, unidentified; identical to SEQ ID NO: 5316

SEQ ID NO: 6859 - protein, 442 aa, unidentified
MVTVQQSTHHLPFGRVFIRRNLFMVYVISQDSKPLMPCSNPIARLLLKQGKAKVKRREPFTIKLIYETTGYTQDLTLGVDTGSGTIGTAVSKDNGDIVYMSEVVVRNDITDKMTQRAKYRRNRRNRKTRYRKARWLNRSNSIKKDRFSPTMQSKLHSHVREIEYIQSILPITEMVFETGQFDMHLMKNPSLANPKVRPWGYQKGTNYGFENTKAMVLNRDNYTCQCCKGKHKDSKLEVHHIVFRSQGGSDEESNLITLCHTCHKDLHSGKINLKLSGKVKGNLKYATQMNSIRKQLFRLYPNAIETFGYVTKANRLHLGVDKEHYYDACTIATQGNAFNVKSNLYKKKCISDGDFQKTKGIRSEQAIVTDKICGFRKFDKVRYFGNDYFIKGRMSAGYAILMDIDGNKIDFSTMPRGYKTPKLSNCKRITARSTVMTQVKVV

SEQ ID NO: 6860 - protein, 267 aa, unidentified
VETAEFDTQRLKAMLEGKPLPVGTDYQLGEMYDEYNVRQYVLKRDHYTCQCCGAHTTTKKTVKLHVHHLESRKVGGNAPSSLITLCTTCHDALHKGKVSLDGKERGKPLRDAAFMGIMRKTLMARLRDELSIPVQGTYGYITKMRREQNDIKKSHVNDARCISKHPLAEPCSVCYRTKAIRHHNRQIHKANFSKGGIRKRSQMPYVVEGYRLWDKVLYKGQECFVSGRRASGSFTLKKLDGTRISKGVTFKKLRLLEPATNYLIERM

SEQ ID NO: 6861 - protein, 428 aa, unidentified
LKVFVLNMRGQPLMPCSPAKARHLLKAGKAVVRRRTPFTIQLRIATGETKQSVTLGVDAGAKHVGLSAATEKEEVFASEVELRQDITGLLAARLSLRRDRRHRKTRYRAPRFLNRVRSKHKGWLAPSVENRIQAHMSRIDAICGLLPVTKIVIETASFDIQKIKHPNVEGTDYQQGDQLGFWNVREYVLFRDGHVCQHCHGHSKDKILNVHHLESRQTGGDAPNNLITLCETCHKACHAGKIKLKVKRGQSFRAEAFMGIMRWTLLDRVRKAHPGLPVENTYGYLTKNTRITLGLPKAHCVDAYCIAGNLKAVRRGVHLYQRQVRKHNRQIHKCTVLSKTLKDGTKIGYRKLNQTPHLVKNFRLFDKVRCLGQTGFIFGRRSSGYFDVRRLDGVKFSSGISYRKLTLLEKRSTYLTELRKEDGASSPV

SEQ ID NO: 6862 - protein, 434 aa, unidentified
MLVYVLKQDGQQLMPTSRFGKVRRLLKEGKAKVVRREPFTIRLLYESETDVVQECYCGVDTGSKHVGVAVLGNDKVLYQSQTELRSTIKKKMDSRRIYRRNRRFRKTRYRKCRFLNKRNSIREDRLPPSVRHKVQAHIDEIEFCKKILPVSDLILEVSQFDTALMKNPSLINETIKRWGYQKGFNYGYSCRREVILHRDGYTCQCCGKKNCRLEVHHIVFRSDGGTDDERNLITLCEDCHKKIHKGKIVLTKKPKKMNLKDATHMNIIRSWLLRIYPQAIETFGFVTSENRNHLQLPKGHYIDACVIASGGLEFKPSDTVYYKRRVAKGDYQLCKGPCGEKKIPVGKIQGFRKFDKVKYLEKEYFIKGRQSKGGYVFLMDIFNGQIDFSCMPRGHKIPKLLDCERVSARSSALCIRMKYRTEYVEGMKYIEMLE

SEQ ID NO: 6863 - protein, 456 aa, unidentified
MSTCVCVLSNSGERLMPTIRLGKVRRLLKDGKAKIVKHHPFTIQLLYDSKTNTQPIEICEDVGYNYIGISVKSQSHEYASAQYDTLQDEKACHDSCRKLRRTRRNRLRYRKPRFDNRKRSEGWLAPSLEHKKQLNIRLIERYVSVIPITRATVEVGSFDTMLLQAIQKGESKPEGVDYQKGPRYNLATLREAVFYRDDYTCQVCGRKITDGAILHMHHMFYWKGRHGYQLDELVAVCEKCHTPANHQKGGKLYGFGKDKKFANLSGAAFMNAVRWQIVNALYATYGKEFVTITYGAMTKEKRIILGIEKTHNNDAYAMGDYHPAHRCVFRHYQKRRRNNRVLEKFYDATYIDARTGNKAKGKELFNGRINRNHKKDSENFHKYRSKKVSKGRRSIRRQRYAIQPYDTVHLEGKTYITSGCHNKGTRLLIPVNGKSKSVAISKVQVVCHAGAWIQII

SEQ ID NO: 6864 - protein, 411 aa, unidentified; identical to SEQ ID NO: 4578

SEQ ID NO: 6865 - protein, 442 aa, unidentified; identical to SEQ ID NO: 2903

SEQ ID NO: 6866 - protein, 456 aa, unidentified
MSTCVCVLSNSGERLMPTFRLGKVRRLLKDGKAKIVKHHPFTIQLLYDGKTNTQPIEICEDVGYNYIGISVKSESHEYVSAQYDTLQDEKEHHDDCRKYRRTRRNRLRYRKPRFDNRKRGEGWLAPSLRHKKELNVNVVKMYCAVMPITHATVEVGSFDTMLVKAIQEGKAIPEGADYQKGPRYNLATLREAVFYRDNYVCKVCGRKATEGAILHVHHMFYWKGRHGNSLSELITVCEKCHTPANHQKSGKLYGFGENVKFADLSGAAFVNTVRWQIVNELYAAFGKDFVTVTYGAMTKEKRIALQLEKTHSNDAYAMGNCHPAHRCEFGHYQKRCRNNRVLEKFYDATYIDARTGNKAKGKELFNGRISRNHKKDSEDLHKYRCKKVSKGRRSIRRQRYAIQPYDTVRLESKTYITSGCHNKGTRLLIPANGKSKSVAISKVQVVCHAGAWIQII

SEQ ID NO: 6867 - protein, 448 aa, unidentified; identical to SEQ ID NO: 5196

SEQ ID NO: 6868 - protein, 421 aa, unidentified; identical to SEQ ID NO: 5881

SEQ ID NO: 6869 - protein, 469 aa, unidentified
GVSCMNTCVCVLSNNGERLMPTFRLGKVRRLLKDGKAKIVKHHPFTIQLLYDSKTNKQPIEICEDVGYNYIGISVKSESHEYVSAQYDTLQDEKEHHDDCRKMRRARRNRLRYRKPRFDNRKRSEGWLAPSLKHKKELNVNVVKMYCAVMPITHATVEVGSFDTMLVKAIQEGKAIPEGADYQKGPRYNLATLREAVFYRDNYVCKVCGRKATEGAILHMHHMFYWKGRHGNSLNELLTVCEKCHTPANHQKSGKLYGFGEDVKFADLSGAAFMNTVRWQIVNELYAAFGKPFVTITYGAMTKEKRIALQLEKSHNNDAYAMGEFHPNHRCAFEHYEKVRRNNRILEKFYDSQYIDIRTGEIATGKELFNGRINRNHKKDSENLHKYRGKRTYAGHRALLRKKVNLNPGDLVSLNGEPLVVLGTHTRKNGAVNVEFETPSKSGRKSASLKKLKIVKAADSIHPAWEKVS

SEQ ID NO: 6870 - protein, 427 aa, unidentified
MVYVQDINGKPLMPTTRHGKVRRLLKDKKAVVVNLCPFTIKLMYVTSDYKQEIVLGVDAGTKHVGLSATTKSKELYSSEVILRNDIVDLLSTRRELRRARRNRLRYRKPRFNNRIKSKRPGWIAPSVKYKIDAHIRVVENVCSILPISRIVIEVAQFDTQKIKNPNISGKEYQEGDQLGFWNTREYVLARDGHKCQYCKGKSKDKILNVHHIESRKTGGDSPSNFITLCETCHKEYHKGNIDLKIKRGKSLRDAAVMGIMKWRLYEEIKSKYDRVSMTFGYVTKYNRINHGFEKSHVSDAFVISKNFNAIRLGYYYKVRLVRRHNRQIHKQKIQKGGIKRLNQSPFEVFGFRLFDRVMFENSYYFIFGRRKTGSFDIRYIDGKNQKNVTYKKLKLSRCKRFMIQMELNKKKTRTCFENERNSDRDAA

SEQ ID NO: 6871 - protein, 423 aa, unidentified; identical to SEQ ID NO: 3951

SEQ ID NO: 6872 - protein, 480 aa, unidentified
LYTKPLDNIGEGSLPPSGEINLKGMTFMVYVKSIDGKVLMPTSNAKARKLLKQKKAKVVSLRPFVVKLTYKTKTEYIQKLNLGVDSGYSNIGFSVIDAKQEYIAGEVKLLEGMKKRLLEKASYRRIRRSRLRYRKARWNNRVKSKKKGWLAPSLKHKLDTHIKFIDYLKNILPIEKITIEVANFDIQKMKDDLISGIDYQNGDMFGFWNVREFVLHRDGHKCQNPNCKHKDKKEQILKVHHIRYRSEGGSDRPENLITLCSKCHIPANHKKGKFLYDWCVNGKKVRGFKDATFMSMIRWYLVNELKSKHNNVSITYGYITKNHRIQNSIEKSHLNDAFAITKGTNQARTKDRFLVIQDRLKNRSLEKFYDSKIIDIRTGKKVSGGDLSCGRSTRNKNLNTENLRKYRGAKISKGQRRIRKQKYFYQSNDLVKYDGKVYTVKGTQNEGKYIALKEIKKVPKAELLIPYVFKKGLNWSYGLC

SEQ ID NO: 6873 - protein, 491 aa, Pseudomonas sp.
MLAKGKTPKIPTAATAGAGCRHSRGERAARLRHQARKGTVQRRIAVAVYVLDKTGTPLMPCSEKRARLLLERGRARIHRQVPFVIRLVDRRQADSALQSLTLKFDPGSKFTGIALVRQKGQRVSVLSLMELAHRGAAIRQAMQQRAAFRRRRRGQNLRHRAPRFDNRTRPEGWLPPSLRHRLDTTLGWVGRMRNWAPISDLAVERVKFDMQAIQNPEISGVQYQQGELAGYDVREYLLEKWGRCCAYCDAENTPLEIEHIVPRSAGGSDRVPNLTLACRPCNQRKGNQPVEVFLKARPELLARIKAKAKAPLRDAAAVNATRNALFRGLLDTGLSVTTGTGAQTKYNRRRLDLPKTHALDAACVGEIRAIEHWHRPTLAIKATGRGDYQRTRLTTHGFPRGYLTRQKRHFGFQTGDQVRAEVPTGKKAGTHQGRVAVRKTGSFNIQTPDGVVQGIHHRHCTLIQRADGYAYSDTPTDSAQPQKEAARAGAR

SEQ ID NO: 6874 - protein, 414 aa, unidentified
MPCSPAKARLLLKEKKAIVKRRTPFTIQLTIATGETKQPVGLGVDAGYKHVGLSASTDKAELYASQVELRQDITDLLSARRALRRARRNRKTRYRAPRFNNRIRTKRKGWLAPSVENRINAHLSRIEAVLRLLPVTKITVETASFDMLLLKNPDIAGKEYQEGEQLGFWNVRECVLFRDGHVCQHCYGRSKDPVLNVHHLESRRTGGDSPGNLITLCETCHEALHRGEIALKTKRGHSFRAEAFMGMMRWEVLNRLKASHSELEVNNTYGYRTKHARIVNGIDKSHCADAFCIAGNLGAERLCEFFFQKQTRRNNRQIHKLSILKGGIRKRNQAPFEIKGFRLFDKVACKGEESFIFGRRSSGYFDVRKLDGTRISAGISYKKLRLLEKRRTYLTEIRKEEALPPLPEGRGLRA

SEQ ID NO: 6875 - protein, 512 aa, unidentified
MSTVYVLNKDGKPLMPTTRGGHVRHLLKEQKARVVRTKPFTIQLLYETDDVVQLLYLGIDPGRTNIGVAVVKTDGTAVFTAHLETRNKEIPKLMKKRKNSRRARRTNGRRCRRQRRAKANGTISKKCVKQDTAQNGSVSKRAKKIGVIKRHLPGCEKEVLCIGIKNKEAKFSNRVRPEGWLTPTANQLLQTHINLVKKIQKFLPISDVVLEVNKFAFMQLDNPNIQKWQYQQGPLYQKANLEEAVSEMQEHHCLFCKKPIAHYHHVVPQSENGSDTIGNIVGLCTKHHDLVHKDTEWQKKLAKKKTGLNKKYGALSVLNQIIPALTKELSSLFPKHFFATNGKSTYDYRAAHGVSKDHWLDAYCIACSVLADDVCDNNINSHVPYELKQFRRHDRRALHKENMSRVYTLNGKSVATNRHKATEQTTDSLEEFRQCQPDDVCKLKVKEHYPEYRNPKRNFPGCVFLVGKHTHVMQGTSGSHNGKADGYYDTNGNSYSSGECKFVAKNEGIVFA

SEQ ID NO: 6876 - protein, 394 aa, unidentified; identical to SEQ ID NO: 3896

SEQ ID NO: 6877 - protein, 469 aa, Streptomyces sp.
VREETVGGSPAADGDTFRPAEAGETPRERHPSVFVLDRHGAPLQPCHPARARKILGKGRAVVARHTPFVIRLKDRTIAESTVEGVELGIDPGSRHTGIAVFTATGGERRGRFAVRLDHRGAQIRRKLQQKSDFRRGRRTRNLRYRAPRHDNRARREGWLAPSLRHRVDTTVAWVDRLARWAPVTAVHVESVAFDTHAISSGGPLEGAEYQHGTLHGTEVREYLRTKWKRACGYCGATGAPLNVDHVRPTSRGGSDRVSNLVLACVPCNQEKTNRPVEEFARAKTRAARILAQAKVPLRDAAAVNATRWALRRALEARLPTHGASGGRTRWNRIRNHLPKTHTLDALAVGELGAVTETVNRVLIAGCTGRGTHARTRSDAYGFPRLRLPRRKRFFGFMTGDLVRACVPDGKNAGTHTGRVAVRASGSFAVRTQSGLFTARHTRFRLLQRADGYAYQATSEGRPGYLVPRP

SEQ ID NO: 6878 - protein, 440 aa, Ktedonobacter sp.
LSNVFVLDTNKQALNPVHPGRARRLLSLGQAAVFKRYPFTIILKSAASSPHVWPLRVKLDPGSKTTGLAIVNDASGEVVFAASLIHRGDAIRERLEKRRAARRSRRQRKSRYRQSRFDNRGTKKKGWIAPSVQSRVCNVITWVKRLVRLCPITAISQELVKFDLQQMDHPEISGVNYQQGTLSGYEVREYLLDKWGRQCAYCGAKDVPLEVEHINPRSKSGDDRVCNLTLACEPCNTRKGTQDIRVFLAHQPELLAKLLAQAKSPLKDAAAVNITRWVLHAQLKAFGLPLECGSGGRTKFNRITRGLEKTHWCDAACVGASTPEVLHIGQVRPLSIAAYGHGRRQMCLMNKSGFPRTNPKQKKFKHGFRTGDLVKAVVPPHLKHAGTHVGRMSAKASGAFTIATAGGTVTDIGKKYCRMLQRADGYGYTQKGELAFPPVP

SEQ ID NO: 6879 - protein, 442 aa, Lactobacillus sp.; identical to SEQ ID NO: 4549

SEQ ID NO: 6880 - protein, 427 aa, unidentified; identical to SEQ ID NO: 4977

SEQ ID NO: 6881 - protein, 465 aa, unidentified; identical to SEQ ID NO: 4783

SEQ ID NO: 6882 - protein, 544 aa, unidentified
MKQKKQKVMVYILNKKGKPLMPTTRCGHVRKLLDSKKAVVVNSNPFTIRLKYDTPNGIQDVFAGIDSGRENIGSGASNEDGDCLYLGELKTSNKSIKIKMAERTGFRRERRRHDRQSKQRKAKKDHTEIQNGNDDICRTTISCKSVQISYPVAEESVTHKIIRGKEGKFANRHRDEGWITPSARQLVQMHMNDLKSMCKILPISHVTLERVAFDFQKLENENIKVWEYGKGKLYGYDSPEEYIHDVQDGKCLVCGKPHIDYLHHIIPRSKGGSDKVSNIAGLCYDCHYGPMGVHNCQDTQNRLPELKNEANKQYKVSLLNSVMTVLIEEMDKFCKANSIIFSICEGHDTAKVRDMYDLQKDHCFDGFAISLVGRNVESVDVIPDRIYQKQRYKKKSKNIIQKRNCREYYDGKKLVAVNRHKGTDQKADSLEEYMNTYAETHTADECKNQFESLTVKPARRTYTFHKEGRICPFHIGDKVRYEKKNKIKGNTKVDTFICEGIYFSKDENKAEVEHNKTKSKKMKFCRTIESGCIPYIDYRKLALI

SEQ ID NO: 6883 - protein, 415 aa, unidentified
MENKIEYCFVIDKNNKPLAPTKINKGWYLIRKGRAKLKSKYPMVIQLEKEVKSDEDDESHMVCGIDDGSTHVGLAIVQKCLTKNKVVFKGTIEQRQDVKHLMDVRRGYRRYHRYHKRYRQARFNNRSSSKRTCRLAPSIKQKKDAILRVLYQLNSWIDIQEYYLEDVCIDIRAMTDDYKPYRWQYQKSNRLDENLRKATILRDGCRCQECGKSNCILEVHHIRARRYGGANTIGNLITLCKKCHDKTESREKDFEERYFNMIKSKPKRFDYAMHVMQGKTYLREKISELGILHLTNGGETANKRIEWNIVKSHSNDAICIADGIPDTCDIKEWIIKPMRRKSKAKTDNVLGIKHRDLVSYTYKSGETHTGYVTALYPEQLALNFQSKTKHCKKVNARKCRLLWKFNKIYWLEQCV

SEQ ID NO: 6884 - protein, 476 aa, unidentified
LAASGTEGVSHPGLPGKYKHKGGQLMSVAVISKTGERLMPTSEYRARKLLKSGKAIKHSYHPFTIQLTERKTGDIQPIELCMDTGYIHIGISVKSEKHEYLAEQIDTLTDERSRHDACRMYRRQRRNRKRYRQPRFNNRKKDKGWIAPSLEHKKNIHIQAISRINNVMPLTDITMEMGNFDTQVLKAKEEGNPLPQGADYQHGERYGIATLREAVFTRDDYKCQCCGRTIKDGAILHVHHIKYRSQGGTNSMSNLATVCDKCHTPKNHKPEGKLYNWKPKLPSFKGATFMTTIRWQLYNEVKTLFPDIDIHITYGAATKERRRELNIDKSHINDAFVMGQFHPRHRIKAVLYKKKRRNNRCLEKFYDAKYIDSRDGKKRSGQELFNGRINRNHKKDSENLHQYRLQKVTAGKRTVRKQHYSVQPHDIIIYESRKRETTGCHCNGARVMLLPDKKSVSIKKIKIYRYASGYFKSTFN

SEQ ID NO: 6885 - protein, 434 aa, unidentified
MSTTVFVLDKKHRPLMPCRPARARRLLRAGRARVVKRFPFVIRLVDRTVEQSEVQPALIKLDPGSRETGAAVVRDDGKKRHHALAFFVIEHRGGAIRDAPKARSAFRRRRRSQNLRCRSPRFLNRVKPKGWLPPSLRHRVETTLSFVRRMCRYLPVSGIATELVKFDSQKLQNPEVSGVEYQQGTLFEYEVREYLLEKFGRKCVYCGAEGVPLNIDHVVPRAKGGSNRVSNLVLACMSCNQKKGARSLEDFLKGKPKVLARVRRELKTPLRDAAAVNATRWVLFNELKATGLPVETGSGALTKLNRHAFGVEKEHWLDALCVGRLNGVVTRKGLNVLEIRCMGRGSRQRTRLTKYGFPRGYLMRQKCVHGFATGDMVEANVPKGKKAGLWRGRVAVRVSGSFNIQTPKGVIQGVGWKHCRLISHNDGYGYAWLG

SEQ ID NO: 6886 - protein, 420 aa, unidentified
MQYVYVLNKHGEPLMPCSPGKARLLLKQQKACVVKRTPFTIKLLHGSAGYKQPVTLGVDAGSKHVGLSASTETHELYCEEFTPRNDVVELLSTRRQNRRSRRNRKTRYRAPRFNNRVHSKHKGWLAPSVEVKIQEHITVIKRICRILPVTLVRVETAEFDTQRLKAMLAGKPLPVGTDYQLGEMYDEYNVRQYVLKRDNYTCQCCGAHTTAKKAVKLHVHHLESRKVGGNAPSNLITLCIACHNNLHKGKVTLDGKKRGKTLRDAAFMGIMRNTLLIRLRNELNIPVQNTYGYITKLLREQNDIKKSHINDARCISKHPLAVPCSVCYCTKAIRHHNRQIYKAKILKGGVRKANQATYIVKGFRLWDKVLYNGQECFISGRRSSGYFALKKLDGTTITNSISFKKLRLLEPATNYLIERK

SEQ ID NO: 6887 - protein, 424 aa, unidentified; identical to SEQ ID NO: 4955

SEQ ID NO: 6888 - protein, 431 aa, unidentified
MPNKVYVINKHGRPLMPCSPAKARHLLDEGKAKVKKRTPFTIQLVYGSSGYTQEVILGVDAGSKTIGMSASTTKEELLSAEVKPRNDVVDLLSTRREFRRARRNRKTRYRKPRFDNRVRSKHKGWLAPSVEVKIQEHITAIRRVCGILPVSKVVIETAEFDLQLLKAIEEGKPVPQGEDYQQGEMYGHYNVRQYVLWRDGYTCQCCGAHATKKKEVRLHVHHLESRKVDGDAPDNQVTLCESCHEKLHKGLIAEKDFKKRKRKSTRDATFMGIMRKTLMQRLCSELPIPVIETRGYITKATREKLLVLPKSHTNDALAIAQGKQGFNVGYLPEIAQIDKIYTIRPVRHHNRQLYKATILKGGIRKSNQTEKYVFGYCLFDKVQFNGQDCFIWGRRTTGIFTIKTINGKMIKDGISFKKLKLAEKSTSYLIA

SEQ ID NO: 6889 - protein, 427 aa, unidentified; identical to SEQ ID NO: 5762

SEQ ID NO: 6890 - protein, 470 aa, Blautia sp.; identical to SEQ ID NO: 2925

SEQ ID NO: 6891 - protein, 432 aa, unidentified
MQRVLVVSPEKIPLSPCRPARARWLLTQKRAAILRRYPFTIILKQPPSEYVTPPLRVKIDPGSQTTGIVMVNDATGEVIWAAELAHRGRQVKEALDTRQAQRRGRRHRHTRYRQPRFDNRRRPEGWLPPSLLSRIQNVVTWVERLRRYAPITNISYELVRFDTQLIERPDISGIEYQQGTLAGWEAREYLLLKWGYRCAYCGVQAIRWEVDHITPRSRGGSNRISNLALSCHNCNQEKGDCTAAEYGHPDVQIEAKKPLKDAAAVNSTRWALYERLQQTRLPVETGTGGRTKWNRTNRAIPKTHWLDASCIGQSTPEHLHWRHVCPLLIQAAGRHSRQMRKVNKHGFPIGSPKGTSTVLGWHTGDMVRAVVTKGKPAGTYVGRVAVKKDGYFKITGGFGVIEGVHARYCTPIHRNDGYGYTFRKEAALPPHA

SEQ ID NO: 6892 - protein, 413 aa, unidentified; identical to SEQ ID NO: 6529

SEQ ID NO: 6893 - protein, 431 aa, unidentified; identical to SEQ ID NO: 5232

SEQ ID NO: 6894 - protein, 412 aa, unidentified
MFVDMVYVQDIDGKPMMPTTRHGKVRRLLKDKKAVVVNLCPFTIRLTYVTSDYKQEIVLGVDAGTKHVGLSATTKSKELYSSEVILRNDIVDLLSTRRELRRTRRNRLRYRKHRFNNRIKSRRPGWVAPSVRYKIDAHIRVIDNVCSILPISRIVIEVAQFDTQKINNPNISGKEYQEGNKLGFWNVREYVLARDGHKCQYCKGKSKSKILNVHHLESRKTGGDSPSNLITLCETCHKEYHKGNIDLKIRRGKSLRDAAVMGIMKWRLYEKLKSKYGCVSMTFGYVTKYNRIHNNIEKSHVSDAFVISKNFNAIRLGYYYKIRLVRRHNRQIHKQKIQKGGIKRLNQSPFEVFGFRLFDRIMFENSYYFIFGRRKIGRFNIRDIDGKSQRDITYSKLKLSRCKRFMIQKEMN

SEQ ID NO: 6895 - protein, 470 aa, Anaerostipes sp.; identical to SEQ ID NO: 2825

SEQ ID NO: 6896 - protein, 431 aa, Enterobacter sp.; identical to SEQ ID NO: 3801

SEQ ID NO: 6897 - protein, 406 aa, unidentified
MVYIQDINGKPMMPTTRHGKVRRLLKDKKAVVVNLCPFTIKLMYVTSDYKQEIVLGVDAGTKHVGLSATTKSKELYSSEVILRNDIVDLLSTRRELRRTRRSRLRYRKPRFNNRIKSKKREWIAPSVKYKIDAHIRVVEKVYSILPVSHIIIEVAQFDTQKIKNPDISGKEYQEGDQLGFWNVREYVLARDGHKCQHCKGKSKDAILNVHHLESRKTGGNSPSNLITLCETCHKEYHKGNIKLKVKRGTSLRDAAAMGIMKWKLLDKLKSLFPNVSMTFGYITKHNRIKHEIKKSHISDAFVISKNFEAKRLGYYFKEKLVRRHNRQIHKTKILKGGKKKMNQAPFKVFGFRLFDKVEFQGNEYFIYARRLSGYFNIRDINSENKKDVTYKKLNHIGYGLISVETE

SEQ ID NO: 6898 - protein, 406 aa, unidentified; identical to SEQ ID NO: 3976

SEQ ID NO: 6899 - protein, 442 aa, Anaerostipes sp.; identical to SEQ ID NO: 2903

SEQ ID NO: 6900 - protein, 441 aa, unidentified
LAKVSYGLYDAGLPQKIIQKERSTYMVYVLSQNGQPLMPTIRHGKVRRLLKEGKANVVKKCPFTIRLTYPSGDQTQEISLGIDSGSKYIGISATTQKKVLYEAEVELRNDISKLLAARRQNRRSRRSRKTRYRKPRFDNRKRKEGWLAPSVQQKVDCHLKVVEDVCKLLPVTRIIAEVASFDIQKIKDPKIHGTDYQQGDQLGFWNVREYVLFRDGHTCQCCKGKSKDKILNVHHIESRQTGGNAPNNLITLCETCHKGYHKGQVKLPKKIKRGMTFKDAAFMGIMRWAFYDRLKEIYLPLGIDVSLTYGYLTKNTRIAHQLPKTHYLDARCISGHPDAISDGIYYHQKKIRCHNRQLHKANTLKGGIRKRNQAEYLVHGFRLFDKVRYQGKDYFIFGRRKSGYFDIRDLNGEKVNKGSISYKKLRLVETRRSYLTERRLA

SEQ ID NO: 6901 - protein, 411 aa, unidentified
MVYVQDIDGKPMMPTTRHGKVRRLLKDNKAVVVNTCPFTIKLTYKTSDYKQEIVLGVDSGTKHVGLSATTKSKELYASEVILRSDVVDLLSTRRGLRRTRRSRLRYRKQRFNNRVKSKKDGWIAPSVRHKIDSHIRIISFVYSILPVSKLIVEVAQFDTQKIKNPEISGKEYQEGEQLGFWNVREYVLARDGHKCQHCKGKSKDPILNIHHIESRKIGGDSPSNLITLCETCHKEFHKGNIKLKVSRGKSLRDAAVMGIMKWKLYEELKSRYDNVSMTFGYITKYNRINHGIEKSHVSDAFVISRNFNSCRLGYYYKRKLVRRHNRQIHKMKILKGGIRKRNQAPFKVFGFRLFDKVMFQGEEHFIYARRLSGQFNIRDINGENKKDVSCKKLKYVSHGLVSVKTNLFLSQ

SEQ ID NO: 6902 - protein, 386 aa, unidentified
MQYVYVLNKHGEPLMPCSPGKARLLLKQQKAHVIKRTPFTIKLLYGSTGYKQPITLGVDAGSKHVGLSASTEKRELYREEFTPRNDVVDLLSTRKQNRRSRRNRKTRYRPPRFDNRVHSKHKGWLAPSVEVKIQEHITVIKRICRILPITLVRVETAEFDTQRLKAMLEGKPLPVGTDYQLGEMYDEYNVRQYVLKRDNYTCQCCGAHTTAKKAVKLHVHHLESRKMGGNAPGNLITLCITCHDALHKGKVSLDNKKRGKPMRDAAFMGIMRRTLMSRLREELPITVQGTYGYITKMQREQNDIKKSHVNDARCISKHPLAEPCSVCYRTKAIVPRSSGLLSFEYFFGKRLQRHFFGCLFAADIFAETHRIFRRVQLRKPVQCRIP

SEQ ID NO: 6903 - protein, 431 aa, unidentified
MPNKVYVINKHGRPLMPCSPAKARHLLDEGKAKIKKRTPFTIQLVYGSSGYTQEVILGVDAGSKTIGMSASTTKEELLSAEVKPRNDVVDLQSTRREFRRARRNRKTRYRKPRFDNRVRSKHKGWLAPSVEVKIQEHITSIKMVCRILPVSKVVIETAEFDLQLLKAIADGKPVPQGEDYQKGEMYGHYNVRQYVLWRDNYTCQCCGAHATKKKEVRLHVHHLESRKVGGDAPDNQVTLCESCHEKLHKGLITEKDFKKRKRRSTRDATFMGIMRKTLMQRLCSELPIPVVKTRDYITKATREKLLVLPKSHTNDALAIAQGKQGFNVGYLPEILQIDKIYTIRPVRHHNRQLHKAAILKGGIRKSNQAGKYVFGYRLFDKVQFNEQDCFIWGRRTTGIFTIKTINGKMIKDGISFKKLKLVEKSTGYLIA

SEQ ID NO: 6904 - protein, 426 aa, unidentified
MQNYVFVIDADKRPLNPTSPKKARRLLDKGKAAVLRMYPFTIILKTAIANPTILPCKIKIDPGSKTTGFALVQDNQVIWAMELEHRGGLIKKKLESRGAVRRGRRNRNTRYRKPRFLNRKRPEGWIAPSLEHRVSTTETWVKRLIKFCPVDEIWIERVKFDTQKMQNPEVNGTEYQQGELAGYEVREYLLEKWGRECAYCGKQNIPLQIEHIHPKSKGGRDSAKPTLRERVSNLCLACEKCNQKKGNKPIEEFLNKKPDLLRKIKTKARQPLTDAAVVNTTRNKIVKALKAIKPVVTGTGAQTKYNRTRLGFPKQHWVDAACVGEIETLVLRTSQPLLVTCKGQGGRQKAALNKYGYPIRHNPLKPIRGWATGDIAKHQKLGIGKVTPRSKGSFGFTPLGAKGYKSCRPQDISAIHRKDGYTYSFC

SEQ ID NO: 6905 - protein, 424 aa, unidentified; identical to SEQ ID NO: 3351

SEQ ID NO: 6906 - protein, 423 aa, unidentified; identical to SEQ ID NO: 6814

SEQ ID NO: 6907 - protein, 475 aa, unidentified; identical to SEQ ID NO: 4985

SEQ ID NO: 6908 - protein, 419 aa, Solobacterium sp.
  source 1..419: note = isolate UBA636
MVYVISNENKPLMPCSNVVARLLLKQGKAKVKKREPFTIKLTYETTSYTQDLTLGVDTGSGAIGTAVSKDNGDIVYMSEVAVRNDITDKMTQRTKYRRNRRNRKTRYRKERWLNRANSIKTDRFSPTMRSKLHSHVREIEHIKSILPITELVLETGQFDTHIMKNPSLSNPKIRNWGYQKGVNYGFENTKAMVLNRDDYTCQCCKGKRKDSKFEVHHIVYRSHGGSNEADNLITLCRTCHKKIHSGDIKLNIKGNMKGTLKYATQMNSIRKQLFKVYPSAIETFGYVTKANRLNLDVEKQHYNDACVIASQGKPFKVECELYKKKCIPKGDFQKTKGIRSEQPITTGKICGFRKFDKVKYLGKEYFIKGRMSTGYAILMDIDGNKADFSKMPKGFKTPKLSNCKRVASRKSVMVTRITI

SEQ ID NO: 6909 - protein, 461 aa, unidentified
VQPLYLGIDPGRTNIGVAAVKANGTAVFTAHLETRNKEIPKLMQDRKKARRARRTNGRRCRRQRRAKANGTISKKCVKQTTAQNGSVSKRAKDIGVIKRRLPGCEKDVLCIGIKNKETKFTNRTRPEGWLTPTANQLLQTHINLVKKIQKFLPISDVVLEVNKFAFMRLDNPNIQKWQYQQGPLYKKESLESAVSEIQEHHCLFCKKPIDHYHHVVPQHKNGSNTIGNIVGLCAKHHDLVHKDSAWEKKLAKKSTGLYKKYGALGVLNQIIPTLTNELSSLFPKHSFVTNGKSTYDYRAAHGVSKDHWLDAYCIACSVLPSNVCDSNINNHMPYELKQFRRHDRRVLNNENMNRVYTLNNKAVAINRHKAKDQKTVSLEEFRKEHPDDVCKLKVKEHHPTYRNMNRNFPGSVFLVGKQIHVMQGIASSKDGKATKYNDTSATAIAAGKCKFVAKNTGILFV

SEQ ID NO: 6910 - protein, 431 aa, unidentified
MPNKVYIINKHGRPLMPCSPAKARHLLDEGKAKVKKRTPFTIQLVYGSSGYTQEVILGVDAGSKTIGMSASTTKEELLSAEVKPRNDVVDLLSTRREFRRARRNRKTRYRKPRFDNRVRSKHKGWLAPSVEVKIQEHITSIRRVCRILPVSKVVIETAEFDLQLLKAIEEGKPVPQGEDYQQGEMYGHYNVRQYVLWRDGYTCQCCGAHATKKKEVRLHVHHLESRKVGGDAPDNQVTLCESCHEKLHKGLIAEKDFKKRKRRSTRDATFMGIMRKTLMQRLCSELPIPVIETRGYITKATREKLLVLPKSHTNDALAIAQGKQGFNVGYLPGIVQINKIYTIRPVRHHNRQLHKATILKGGIRKSNQAEKYVFGYRLFDKVQFNGQDCFIWGRRTTGIFTIKTINGKMIKDGISFKKLKLVEKSTSYLIA

SEQ ID NO: 6911 - protein, 302 aa, unidentified
VKVKIQEHITSIKRVRTILPISKVVIETAEFDLQLLKAIQEGKPIPEGEDYQKGEMYGSYNVCQYVLWRDNYTCICCGVRGTPKNPVRLHVHHFESRKYGGNAPDNHGTLCDDCHKKFHLGIITDVKLKTRRRQSTRDAAFMGIMRKTLMWRLRTELFIPVAETKGYITKATREKLLVLPKSHTRDALAIAQGRHGFGIKEYAYVEPANHIYTVRPVRHHNRQLHKASILKGGIRKRNQASKYIFGFRLYDKVLYQGKACFVWGRRTSGTFLLRTIDGIKVKDGVSYRNLTLLERSSNYLIA

SEQ ID NO: 6912 - protein, 425 aa, unidentified
  source 1..425: note = Microcoleaceae bacterium UBA9251
MSNYALVIDANKQPLSPCHPSVARKLLGSVNAAVFRMYPFTIILKKSCPEVIVAPIQLKLDPGSKTTGIALVQGNKVIWGAELTHRGQAIKASLESRRSIRRSRRNRHTRYRRARFLNRTRSKGWLAPSLQHRFETTLTWVNKLIRFAPIGSIVQELVRFDLQQLENPEISGIEYQQGELVGYEVREYLLNKWDRKCAYCGVENVPLQIEHIHPKAKGGSDRISNLGLACEKCNLKKGTQDVEQFLAKKPDVQKCILAQAKHPLKDAAAVNSTRWTLFSRLKETGLPVSTGSGGLTKFNRTRLKLPKTHWLDAACVGQVEELSVLTNKPLLIKATGHGTRQMCRTDKFGFPSRYVPRFKNVLGFQTGDIVKAIVTKGKKIGTYIGRVAVRTTGSFNISTWAGLIQGINHKNCKPIQRKDGYSYVE

SEQ ID NO: 6913 - protein, 412 aa, unidentified
MENEVAYCFVVDKNSRPLAPTKVNKGWYLVRKGRAKIKSRYPMVIQLEKEVEYDKYDESRMIVGIDDGSAHVGLAIVQKCPTKNKVVFKGTIEQRQDVKHLMDVRRGYRRYHRYHKRYRQARFDNRYSSKRSGRLAPSIKQKKDAILRVLYQLNRWIDIQEYCLEDVCIDIRAMTDGYKPNKWQYQKSNRLDENLRKAAIIRDGCKCQECGRSNCVLEVHHIRARKYGGADTIGNLITLCSGCHQKTEGMEREFEDRYFKIIGSKPKRFDYAMHVMQGKNYLRRKISELGPLYLTNGGETANKRIDWNIEKSHSNDAICITDCVPDTCDVKEWIIRPMRRKSKAKTNNVLGIKHRDLVSYTYKNGEIHTGYVTALYPEQLALNFQSENKHCKKVNARKCRLLWRFNKIYWLE

SEQ ID NO: 6914 - protein, 414 aa, Homo sapiens
MVYVINKQGQALMPTERFGKVRRLLKNSLAHVVCRIPFTIQLDYDTTDYTQPVSLGVDAGSKHIGISATTSEKEMYAADVELRNDIVDKLSTRREQRRTRRSRLRYRKARFNNRVSSKRKGWLAPSVENKIQTHLTVVEKIHKFLPITNIVVETASFDIQKINNPSISGVEYQQGEQLDFFNVREYVLFRDNHTCQHCKGKSKDKVLNVHHIESRKTGGDSPNNLITLCETCHKAYHRGEFELNVKRGKSFRDSVFMGIMRWSFYDRLKNIYPNVSMTFGYITKNTRITNNLPKEHYVDARCISGNPTAKPLGYYFYQKKVRCQNRQIHKANFLKGGRKKLNQAPFLVKGFRLFDLVEYKKELYYIFGRRSSGSFDIRKLDGTKVNKGSINCKYLRLVDKRKSILIEKRMQVNL

SEQ ID NO: 6915 - protein, 457 aa, Lactobacillus sp.; identical to SEQ ID NO: 6126

SEQ ID NO: 6916 - protein, 430 aa, unidentified
MLVYVLKQNGQPFMPTARFGKIRRLLKAKKAKVVRREPFTIKLLYEPETDVVQECYCGVDTGSRHIGVAVVGNDKVLYQSQTELRNDIKRKMDARRAYRRNRRSRKTRYRKPRFLDRGNSTKSDRLPPSVKHKVQAHIDEIEFCKKILPISDSNLIIEVSQFDTALMKDPSLISEKIKHWGYQQGFNYGYSSRREAILHRDNYTCQCCGKKNCRLEVHHVKFKSNGGTDDEENLITLCEECHKGVHAGTVVLDKKPKKSKNLKYATHMSVIRSRLLKKYPDAIETFGFVTAENRNHLNLPKDHYIDACVIASGGLEFKELEVIFYKNRVSKGDYQLTKGIRGEQKLPTGKICGFRKFDRVEYLGNKYFIKGRMSSGFATLMDIFENQIDFSYMPRGMKTPKLSNCKRILARSSCLCISQIKKGKAIHVLS

SEQ ID NO: 6917 - protein, 323 aa, Oscillochloris sp.
MSFVFVLSSDDQPLDPCHPARARQLLDHGKAAVWRRYPFTIRLNARTAAASVTHPHRLKFDPGSKTTGIAVVAETTGRVVWAGELTHRGQAIRDALLSRRASRRSRRQRKTRYRQPRFLNRRRPEGWLAPSLPHRVDTTLTWVNRLRRFAPVTAISTELVRFDTQLRENAEISGLEYQQGMLAGYEVRQYLLEKWGRRCAYCGAKDTPLQIEHIVPRARGGSHRIPNLTLACAPCNQQKGSQTAEEFGHPEIQAQARRPMKDAAAVNTTRWAMYQRLVATGLPVEVGTGGRTKFNRTRLGLEKAHWHDTACVGDSTPEGCARC

SEQ ID NO: 6918 - protein, 456 aa, unidentified
MNTCVCVLSNSGERLMPTFRLGKVRRLLKDGKAKIVKHHPFTIQLLYDSKTNTQPIETCEDVGYNYIGISVKSESHEYVSAQYDTLQDEKEHHDDCRKYRRTRRNRLRYRKSRFDNRKRDKGWLAPSLEHKKQLNISLIERYVSVIPITHVTVEVGSFDTMLVKAIQEGKVIPEGADYQKGPRYNLATLREAVFYRDNYVCKVCGRKATEGAILHMHHMFYWKGRHGYQLDELVTVCEKCHTPANHQKGGKLYGFGKDKKFANLSGAAFMNAVRWQIVNALYATYGKEFVTITYGAMTKEKRIALQLEKTHNNDAYAMGDYHPARRCKFRHYQKRRRNNRVLEKFYDATYVDTRTGNKAKGKELFNGRISRNHKKDCENLHKYRSKKVSKGRRSIRRQHYAIQPYDTVRLEGKTYITSGCHNKGTRLLIPVNGKSKSVAISKVQVVCHAGAWIQII

SEQ ID NO: 6919 - protein, 557 aa, unidentified
MIYNLVSTRERSFMKQKKQKVMVYILNKKGKPLMPTTRCGHVRKLLNSKKAVVVNSNPFTIRLKYDTPNGVQDVFAGIDSGRENIGSGASNEDGDCLYLGELKTSNKSIKLKMTERAGFRKERRRHDRQNKQRKARKDHTEIQNGNADICRTTISCKSVQISYPAAEKSVTHKIIRGKEGKFANRHRDEGWITPSARQLVQMHMNDLKSMCKILPISHVTLERVAFDFQKLENENIKVWEYGKGKLYGYDSPEEYIHDVQNGKCLVCGKPHIDYLHHIIPRSKGGSDKVSNIAGLCYDCHYGPMGVHNCQNTQDRLPELKSEANKQYKVSLLNSVMPVLIEEMDKFCKANSIMFSICEGHDTAKVRDMYDLQKDHCIDGFAISLVDRNVKSVDVMPDRIYQKQRYKKKSKNIIQKRNCREYYDDKKLVAVNRHKGTDQKADSLEEYMNTYAETHTTDECKKHFDSLVVKPARRTYTFHKEWRICPFHIGDKVRYEKKNKIKGNTKVDTFICEGIRFVKDENKAEVKHNKTKSKKMKFCRVLESGCTPYVDYRKLALM

SEQ ID NO: 6920 - protein, 436 aa, unidentified; identical to SEQ ID NO: 4716

SEQ ID NO: 6921 - protein, 414 aa, unidentified
MPCSPAKARLLLKEKKAIVKRRTPFTIQLTIATGETKQPVGLGVDAGYKHVGLSASTDKAELYASQVELRQDITDLLSARRALRRARRNRKTRYRAPRFNNRIRTKRKGWLAPSVENRINAHLSRIEAVLRLLPVTKITVETASFDMLLLKNPDIAGKEYQEGEQLGFWNVREYVLFRDGHVCQHCYGRSKDPVLNVHHLESRRTGGDSPGNLITLCETCHEALHRGEIALKTKRGHSFRAEAFMGMMRWEVLNRLKASHSELEVNNTYGYRTKHARIVNGIDKSHCADAFCIAGNLGAERLCEFFFQKQTRRNNRQIHKLSILKGGIRKRNQAPFEIKGFRLFDKVACKGEESFIFGRRSSGYFDVRKLDGTRISAGISYKKLRLLEKRRTYLTEIRKEEALPPLSEGRGLRA

SEQ ID NO: 6922 - protein, 390 aa, unidentified
MLTYVLAADGSPLMPTYNISKVRRMLKDGRAVIAGHKPGFTIRLTYALPDQKTPHTQKIELCEDTGYQHIGVSVKSKKHEYVHLQVDTLADEKNHHDAQRRYRRNRRNRLRYRAPRFDNRTHSKKPGWIAPSLQHKADIHVRLVSTFQKVLPICDVYLEVGTFDTQVLEAKEKGLPIPEGSDYQHGTRYGIATLREAVFYRDGYKCQCCGKGIKDGRILRVHHIGYWKTPSDHTDRMGNLITVCTKCHTAANHKKGGKMNTVRWKIVQAVKDLDSNLTVHATYGADTKLSRRDHSITKTHANDAYCMGMFQPGHRAPEQLLKKKRRNNRVLSKFYDAKYIDSRDGVKKSGSDLSCGRTNRSEPRNGEQNLRIFHGKKVSKGRISVRRQRY

SEQ ID NO: 6923 - protein, 416 aa, unidentified
VSEMTSYSFVLDANGKQLAPTKEPKAWFLIRKKRAALVSKYPMVIQLKKKIQENEICKDEIRCGIDDGGLHVGIALVQKCKSKNKVVFKGTIEQRNDVKHLMEVRRNYRRYHRYHKRYRQARFDNRKSSKRKGRIAPSILQKRQATIRVINRLNKWINITNYWLEDVSIDIRVLTDGYKSYSWQYQKSNRLDENIRKATILRDGGKCMECGKSNCRLEVHHIKPRRRNGSNTLDNLITLCESCHQKTEGQEELYMDRYFSLLKSSDNKNLNYAQHVMIGKMWLRKQLSGLGVLYLTSGGDTANKRIDWNIEKSHTNDAVCITDLQPDTCDIKEWAIKPMRRQSKAKTDHVLGIHHRDLVEYTFKNGETHRGYVTALYPDQKAINFQSQTKHCKKVNARKCKLLWNYSKIYWFENAS

SEQ ID NO: 6924 - protein, 452 aa, unidentified
MTPKKRKEASRMSEYIYVLGMDGDPQMPTKRKRHVEKLLQAGRARVFRQIPFTIQLTYENKPVLQPVTIAEDPGRSNIGMAVVSLSGELLSAAVVQTRNKEIVKLMEKRKQHRRASRNGERKARQRLAKKCHTMIKTGFLMRKLPMYGKDKRVRCNVIKNTEAKFCNRKREDGWLTPSAEHLVRTHINLIHKMQKFLPITDVAIEINRFAFLSLEDPSISGVDFQNGPLKGYDDLNVAIEDLQDGHCLMCNSPIEHRHHIVPRSMQGSNTIGNIAGLCCKCHERVHKDARFEDRLKKKKAGLNKRYAAVSVLNQAIPFICKRLEQEFGKEHVHYCSGRDTSMVRRSLGYHKTKEEQLHEVDAWCIAVLSLQHVPEKAPEFDHVHEILQFRRQDRSRIKAQTSRAYYHEGKKIAKNRKKAEGQKDDSLQGWRKRQVERYGEEQTRKMISQLKV

SEQ ID NO: 6925 - protein, 415 aa, Eubacterium sp.
MVYIIDQYGRPLMPTERYGKVRRLLKNSKAKVIKRCPFTIQLMYDSTAYTQDIMLGIDAGSKHIGVSATTADKELYAADIELRNDIVELLSTRRESRRTRRNRKTRYRKPRFNNRKRGDSWLAPSVRAKVNTHLKVVSDIYKFLPISKIIVEVASFDIQKIKHPDISGTEYQQGKQLGFWNVREYVLYRDNHTCQCCKGKSNDKVLNVHHIESRKTGGDAPNNLVTLCETCHKGYHNGTVKLPKTIKRGMSFRDATFMGVMRWAFYNRLKELYPDVKLTYGYITKNTRIENNLSKEHYVDVRCISGNPLAEPLGYVYYQKKVRCHNRQIHKYKINKGGVRKRNQADYLVKGFRLFDKVKYNNKEYFIFGRRTSGFFDIRDLQGNKVNKGSISCKRLKYLYTPNTYLTERRFTGSA

SEQ ID NO: 6926 - protein, 431 aa, Escherichia sp.
MNRVFVLGKTGQALMPCHPARARQLLQSKKARVKRLYPFTIQLTQRSDGYIQPVELKFDPGSKQTGVGLVLHGKNRLSAIYAAVLTHRGQEIKSNLDSRRMIRRARRNRKTRYRQERFLNRVRSKHKGWLAPSVHSRVDNIVEWSKRFMRLSHVDFITVESVKFDMQKMESAAVEGLEYQRGTLFDYEVKEYLLEKYHYSCVYCGIKNVPFEKEHVVPRSRGGSNRISNLVLSCRSCNEKKDNLPIEEFLKDNPALLKKIKAQLKSSLKDAAAVNITRKQIVKELSDLNVPVLTGIGAEMKYNRVSQGYGKEHYIDALCAGTTGTKVYIPSKLKPLLIKKERRNNRQMCLVDKYGFPRGKAKGSKIVHGFKTGDIVKAVVLKGKKKGVYKGKVAVRSSGSFNINVKQGRIEGIGWKNCVMLHRFDGYSYTY

SEQ ID NO: 6927 - protein, 422 aa, unidentified; identical to SEQ ID NO: 6184

SEQ ID NO: 6928 - protein, 447 aa, unidentified; identical to SEQ ID NO: 5316

SEQ ID NO: 6929 - protein, 471 aa, unidentified
MSVFVVGLNGCRLMPTSERKARLLLKQGKAFVEQKVPFTIRLNYKTGSTTQLGYLGIDTGSQHIGVSVVREDGTVLHKEEIGLRDSMSKRKLLEAKASLRRGRRYRKTRYRHPKWRPKTKRVYCEVPDRKGRHWQKKEDHVHIEKTERMATAIPAVKNRSSYPMESKNYRIFFRKDTSLSIELGRFDPARMKNPEIHGDLYQKGPQYDYENVRAYVLDRDRYTCQICKKKGGKLHVHHILYRSHGATDDPQYMVTVCSDCHSAQNHLPGGILYQWMQEQKRFSRGLRDATFMNILRKRLIRAFPEAVFTYGNVTKVDREKLKLPKSHGNDATAIALVKTGITAVKDKESVICIQQVRRKKRSLHEETPRKGRKEPNRTAARNNKNTKAVTVTKRQNKKKVSMTGCLFDRVELNGKKGWISGFTGKSCYVKDADDQYLSTSPKYKQVSLSKLRILHHCGNWIIGAKKTLGKG

SEQ ID NO: 6930 - protein, 419 aa, unidentified
MLVYVLKQNGQPFMPTERFGKVRRLLKEGKAKVVRREPFTIRLLYEPETDVVQECYCGVDTGSKHVGVAVIGNDKVMYQSQTELRSDIKKKMDRRCTFRQNRRFRKTRYRKSRFLNRRNSIREDRLPPSVKHKVQAHIDEIEFCKKILPISDLILEVSQFDTALMKNPNLINERIRHWGYQKGFNYGYSSRRSAILHRDNYTCQCCGKKNCRLEVHHIKFKSNGGTDDEENLITLCKECHDGVHAGTVVLNKKPKKSKGLKHATNMSIIRSRLLKKYPDAIETFGFVTSENRNHLNLPKDHYIDACVIASGGLEFKQSDVIYYKRRMSKGEYQLTRKSGSKEYICKGKIFGFKSFDKVEYLGIKCFIGSRRSSGFATLVDIFRNTLDFSYLPKGRKTSKMELLKRISSRKTTAVSIVNV

SEQ ID NO: 6931 - protein, 430 aa, unidentified
MVTVQQSTHHLPFGRVFIRRNLFMVYVISQDGKPLMPCSDPIARLLLKQGKAKVKKREPFTIKLTYEAPNYTQDLTLGVDTGSGTIGTAVSKDNGDIVYMSEVIVRNDITDKMTQRVKYRRNRRNRKIRYRKARWLNRANSIKNDRFSPTMQSKLHSHVKEIEYIKSILPITEMVFETGQFDTHFMKNPSLANPKVKHWGYQKGTNYGFENTKAMVLNRDSYTCQCCKGKHKDSKLEVHHIVFRSQGGSDEESNLITLCHTCHKDLHSGKINPKLSGKVKGNLKYATQMNSIRKQLFRLYPNAIETFGYVTKANRLHLGVNKEHYYDACTIATQGNAFNVKSNLYKKKCVSDGDFQKTKGVCSEQPIVTDKICGFRKFDKVRYFGNDYFIKGRMSTGYAILMDIDGDKVDFSAMPKGYKTPKMVNWIGYN

SEQ ID NO: 6932 - protein, 461 aa, Parasutterella sp.; identical to SEQ ID NO: 3646

SEQ ID NO: 6933 - protein, 423 aa, Moorena sp.
MRVFVLNKNRQPLDPCKPARARILLSAGKAKVYRRYPFTIILTEEIKNPVTHEHQLKIDPGAKTTGLAIIQGQRVIWGAELTHRGFQIRDNLTSRRQLRRSRRSRKTRYRKPRFSNRTRPKGWLAPSLTSRVQNILTWVKKLIRFCPVTGISQELVRFDTQKLQNPEISGIEYQQGTLYGYELREYLLEKWNRKCAYCGATGTQLEIEHIKPKSRGGSNRVSNLTIACHSCNQAKSNQDIELFLSKKPSLLKRILRQAKRPLADAASVNITRWKLYYDLKSIGLPVEVGSGGLTKFNRCRQSLPKAHWLDAANVGKVETLIIEVTLPLLITAKGHGTRQLCRTNKYGFPIRHCSRIKFHKGFQTGDIVHAVVTKGKKVGTYVGRVATRKSGSFNISTKLGLVQGISHKYCQFIHRKDGYAYGI

SEQ ID NO: 6934 - protein, 424 aa, unidentified
MSNFVFVIDTNKRPLNPIHPCLARLLLTQGKAAVYRRFPFAIILKTTSIEATHPLQLKIDPGSQTTGLALVSNEAVIWGAELTHRGQAIKNSLESRLAIRRNRRHRKTRYRQPRFLNRTRKKGWLAPSLEHRVKTTLTWVNRLRKFAPITGISQELVRFDLQQIDRPEISGIEYQQGELFGYEVREYLLEKWERTCAYCNKKDVPLEVEHITPKSKGGTNRISNLCIACHDCNQKKGAADIKDFLNNQPEKLKKILAQSKGPLKDAAAVNSTRWELYRRLLATGLPVEVGTGGRTKFNRTKLGIPKSHWLDAACVGIVEKLKIVCAKPLLMTAKGWGNRQLCITNKHGFPIRHRTRQKAFFGFQTGDLVRAILPVGKEAGTHVGRLTVRATGVFEMVTPLGKVSPVRAKYCRGVHRVDGYSYVA

SEQ ID NO: 6935 - protein, 442 aa, unidentified; identical to SEQ ID NO: 4843

SEQ ID NO: 6936 - protein, 424 aa, unidentified
LVWNKRGKPLMPCSPAKARLLLKEKKAIVVRRTPFTIQLTIATGETKQPVSLGVDAGYKHVGLSASTEKAELYASEIELRQDITDLLSARRELRRARRNRKTRYRAPRFDNRIRTKRKGWLAPSVENRINAHLSRIEAVLRLLPVTKITVETASFDMQLLKNPDISGKEYQEGEQLGFWNVREYVLFRDGHVCQHCHGGSKDPVLNVHHLESRRTGGDSPGNLITLCETCHKALHRGEITLKAKRGQSFRAETFMGIMRWEVLDRLKASHPKLEVQNTYGYRTKHARIVNGIAKSHCADAFCIAGNLGAERLGEFFFQKQTRRNNRQIHKLSILKGGIRKRNQAPFEAKGFRLFDKVACQGEEGFIFGRRSSGFFDVRKLDGTRISAGISYKKLHLLEKRQTYITEIRKEKALPPLPEGRGLRA

SEQ ID NO: 6937 - protein, 424 aa, Moorena sp.; identical to SEQ ID NO: 2651

SEQ ID NO: 6938 - protein, 423 aa, unidentified; identical to SEQ ID NO: 3951

SEQ ID NO: 6939 - protein, 414 aa, unidentified
MVVYVLNIDNKPLMPTTRFGKVRRLLRDKKAKVIRRTPFTIKLLYETNNCIQDITLGIDSGSKYIGLSASTENKEIFSAEYELRNDIVKKLSSRRECRRTRRNRLRHRKARFNNRVSSKKKGWLAPSIRHKVNSHLKIISDVCSIIPIKKIIVEVASFDMQKIKNPDISGVEYQQGEQLGFWNIREYILFRDNHTCQHCKGKSKDPILNVHHIESRQTGGNSPNNLITLCESCHNAYHKGKIKLNIKRGKSFKDSAFMGIMRWALFNRLKEIYDDVALTYGYVTKNTRIENNLPKEHKIDAFCIANNLSAKLSDTTFYFKKVRCHNRQIHKANYFKGSIKKNNQASYLVQGFRLFDRVKYQDKEYFIFGRRSSGHFDIRDLSGNKVNKGSISCKKLEFIEPRKNVLIERRVAGN

SEQ ID NO: 6940 - protein, 420 aa, unidentified
MQYVYVLNKHGEPLMPCSQRKARLLLKQKKACVIKRTPFTVKLLHGSAGYKQPVTLGVDAGSKHIGISATTEKHELYREEATPRNDVVDLLSARRAFRRSRRNRKTRYRAPRFNNRVHSKHKGWLAPSVEVKIQEHITLIKHVFRILPVTLVRVETAEFDTQRLKAMLEGKPLPVGTDYQLGEMYDEYNVRQYVLKRDNYTCQCCGAHSTKTKGVKLHVHHIETRRTGGNAPNNLITLCKACHKALHAEKVTLDGKKRGKPLKDAAFMGIMRKTLMERLRKELKIPVQGTYGYITKYLREKNGIPKSHTNDARCISKNPLAIPCDTCYYTKAVRHHNRQLHKATILKGGIRKANQAPYIVKGYRLWDKVAYNGTECFITGRRTSGYFALKELDDTVVSNSISYKKLRLLEAATNYIIERK

SEQ ID NO: 6941 - protein, 442 aa, Anaerostipes sp.; identical to SEQ ID NO: 2903

SEQ ID NO: 6942 - protein, 415 aa, unidentified
MVYVLDKNGQPLMPTDRHRKVRLMLQSGQAKVIKRCPFTIQLNYDSGHQTQEISLGIDAGSKHIGVSATTKIKVLYEVDVELRNDIVDLLSSRRELRRGRRNRKTRYRQAKFNNRRRGNGWLAPSIRQKIGTHLTVVENICKILPISRIMVETASFDIQKIKNPDIQGAEYQQGDQLEFWNVREYVLFRDGHICQCCKGKSKDKILNVHHIESRKTGGNAPNNLITLCETCHTGYHKGTVQLPKAIKRGMRFKDAAFMGIMRWAFYEALKQQYEPVALVHNTYGYITKHTRIAYNLPKEHYVDARCISGNPEASSNGEYYYQKKVRCHNRQIHKLTVLKGGIRKQNQATYLVKGYRLFDKVSYQGKGYFVFGRRQSGFFDIRTLSGEKVNKGSLNCKKLKFIATRTYYLTERRAV

SEQ ID NO: 6943 - protein, 406 aa, unidentified
MVYVQDIYGRPLMPITRHGKVRRLLKSKKATVVNLCPFTIRLLYDTTGYKQEITLGVDTGTKHVGLSATTKSKELYASEVILRSDVVDLLSTRRELRKIRRYRLRYRKPRFMNRIKSKKRGWIAPSIRQKIDPHIRIIGFVYSILPVSKLIIEVAQFDTQKIKNPEISGKEYQEGEQLGFWNVREYVLARDEHKCQHCKGKSKDPVLNVHHIESRKTGGDSPSNLITLCKTCHKEFHKGNIKLKVNRGESLRDAAVMSIMKWELYDELKSLYPNVKMTFGYITKYNRINHGIEKSHVSDAFVISRNFDSERLGYYYKRKLVRRHNRQIHKMKAPKGGNKRMNQSPFKVFGFRLFDKVMFQGKERFIYARRLRGIFNIRDINGENKKDISYKKLEYVSHGLISIVAG

SEQ ID NO: 6944 - protein, 413 aa, unidentified; identical to SEQ ID NO: 2605

SEQ ID NO: 6945 - protein, 444 aa, Trichococcus sp.; identical to SEQ ID NO: 6645

SEQ ID NO: 6946 - protein, 419 aa, unidentified; identical to SEQ ID NO: 4877

SEQ ID NO: 6947 - protein, 456 aa, unidentified; identical to SEQ ID NO: 4609

SEQ ID NO: 6948 - protein, 418 aa, Moorena sp.
MQNYVFVIDTNKQPLNPIPPKKARRLLNKGKAAVFRMYPFTIILKTAINNPTISPCQIKIDPGSKVTGFALVQNNQVIWGMELEHRGGLIKKKLESRSAVRRRRRNRNTRYRKPRFLNRKRPEGWLPPSLEHRILTIQTWVKRLIKFCPVNEIWVERVKFDTQKMQNPEISGIQYQQGELAGYEVREYLLEKWGRECTYCGKQSVPLQIEHIHPRSLGGSDRVSNLCLACKKCNQRKGNKPIEDFLKKKPSLLQKIKSKAKQPLKDATAVNATRNKLVKVLQLIKVVVTGTGAQTKYNRTRLELPKQHWIDAACVGDIETLVLRTSQPLLVTCKGPGGRQKAALNKYGYPIRHNPLKPIKGWVTGDIAQHPLLGIGKVTPRSKGSFGFTPLGTKGYKSCKPQDISAIYRKDGYTYSFC

SEQ ID NO: 6949 - protein, 414 aa, unidentified
MVYVINKQGQALMPTERFGKVRRLLKNSLAHVVCRIPFTIQLDYDTTDYTQPVSLGVDAGSKHIGISATTSEKELYAADVELRNDIVDKLSTRRELRRTRRSRLRYRKARFNNRVSSKRKGWLAPSVENKIQTHLTVVEKIHKFLPITNIVVETASFDIQKINNPSISGSEYQQGEQLDFFNVREYVLFRDNHICQHCKGKSKDKVLNVHHIESRKTGGDSPNNLITLCETCHKAYHRGEFKLNVKRGKSFRNAAFMGIMRWSFYDRLKNIYPNVSMTFGYITKNTRITNNLPKDHYVDARCISGNPMSKPLGYYFYQKKVRCQNRQIHKANFLKGGRKKLNQAPFLVKGFRLFDLVEYKKELYYIFGRRSSGSFDIRKLDGTKVNKGSINCKYLRLIATRKSILTEKRMQVNL

SEQ ID NO: 6950 - protein, 512 aa, unidentified; identical to SEQ ID NO: 4216

SEQ ID NO: 6951 - protein, 418 aa, unidentified; identical to SEQ ID NO: 4327

SEQ ID NO: 6952 - protein, 406 aa, unidentified
MVYVQDIYGRPLMPTTRHGKVRRLLKSKKATVVNLCPFTIRLLYDTTGYKQEITLGVDTGTKHVGLSATTKSKELYASEVILRSDVVDLLSTRRELRKIRRYRLRYRKPRFMNRIKSKKRGWIAPSIRQKIDSHIRIIGFVYSILPVSKLIIEVAQFDTQKIKNPEISGKEYQEGEQLGFWNVREYVLARDEHKCQHCKGKSKDPVLNVHHIESRKTGGDSPSNLITLCKTCHKEFHKGNIKLKVNRGESLRDAAVMSIMKWELYDELKSLYPNVKMTFGYITKYNRINHGIEKSHVSDAFVISRNFNSCRLGYYYKRKLVRRHNRKIHKMKILKGGIRKRNQAPFKVFGFRLFDKVEFQGNEYFIYARRLSGYFNIRDINSENKKDVTYKKLTYIGHGLISVETE

SEQ ID NO: 6953 - protein, 477 aa, unidentified
MIIALDKYKRPLGFLTERRCRILMERKRAVLYRVFPTVVILMDVDARTIPSLPSFRIKIDPGSKYTGIAIIRNDTDEFVYAMQIEHRGDAVRAALNKRKNARRNRRSRETGYRRAKWGNRCLSEKDKRSYDSSREDGWLPPSIRSAADNVISWVRRLGRWINLTECSFEAVRFDTQLMEDPDIEGEEYQHGTLFGLEIKEYLMEKFGHTCQYCGGKSGDPVLEWEHMRPKSRGGSDRVKNALLSCSSCNKDKGNRTPEEWLELIKARLPREKGKRKELDEERVELIQKVIDGKPQGGALRYAAWVSSSRRYLEKALFGIFGNVECSSGGRTKYNRTELGYPKEHHYDALCVGTVPEKGYHDRTNGYYLYAKAAGRGTRLRGHLNKCGVIVAKWTDRKKGFFGFQTGDIVVAEVPHKTPKPYKYEGRFVGRVMVRATGSFDIKTTDGKLVTVKEQYCRLLQANSGYQYTMKRAIPLGH

SEQ ID NO: 6954 - protein, 419 aa, unidentified
MVYVISQDGKPLMPCSNSIARLLLKQSKAKVKKREPFTIKLTYETTNYTQDLTLGVDTGSGTIGTSVSKDNGDIIYMSEVVIRNDITGKMTQRAKYRRNRRNRKARYRKARWLNRANSIKNDRFSPTMQSKLHSHVKEIKYIKFILPITEMVFETGQFDTHLMKNPNLANPKIKHWGYQKGINYGFENTKAMVLNRDNYTCQYCKGKHKDSKLEVHHILFRSQGGSDEESNLITLCHTCHKDLHSGKINPKLSGKVKGNLKYATQMNSIRKQLFKLYPDAVETFGYVTKANRLLLGIDKEHYYDACTIATQGNIFTVKSNLYKKKCISDGDFQKTKGIRSEQPIITDKICGFRKFDKVRYFGNKYFIKGRMSTGYAVLMDIDGNKVDFSAMPKGYKTPKLSNCKRIMARSTEMIQTLVI

SEQ ID NO: 6955 - protein, 426 aa, unidentified; identical to SEQ ID NO: 3614

SEQ ID NO: 6956 - protein, 480 aa, unidentified; identical to SEQ ID NO: 2726

SEQ ID NO: 6957 - protein, 518 aa, unidentified
MANLKLIDELLEKTEYIYVLGIDGKPQMPTNRKVRVRKLFKLGMAKIVDTVPFTMRLLYKNEPVLQPITIAEDPGRTNIGTAVLTQLGDLVFSAVVETRNKSIKKLMADRKAHRQASRRGERKARQRLAKRHGSMIKAGMIMRKLPQYAADKFVTCKIIKNTEARFCNRKRMPDWLTPTVNHLVQTHINLIKKIEKYLPITDVAIEVNRFAFMQMENPNISGVNFQNGPLKGFDDVKAAIREQQHGKCLMCKNDIEHFHHIIPRSKGGSDTIQNQAGLCKKCHTKIHADVEFQAKLKDKKNGLIKKYGALSALNQAVPFICKELIKIYGAEHVHFCTGKDTSLIRSSLGYEKTKDNQMHEVDAYCICLAAIGADKAKRPNFNNVFKIKQFRRQDRSIVNYQRERTYYLEGKKIATNRKPRFEQKGDALSGWYSEQVKLKDKKYADKLTGRITVKKSTRGYNSKNRVMPGTVFYYNGKRLVLTGQLTGGKYYRAYGDTKINYPVNKCQIYKHNEGLVFV

SEQ ID NO: 6958 - protein, 429 aa, Parasutterella sp.; identical to SEQ ID NO: 4241

SEQ ID NO: 6959 - protein, 512 aa, unidentified
MYTVYVLNKDGKPLMPTTRGGHVRHLLKEQKARVVRTNPFTIQLLYETDDVVQPLYLGIDPGRTNIGVAVVKTDGTAVFTAHLETRNKEIPKLMQGRKKARRARRTNGRRCRRQRRAKANGTISKKCVKQTTAQNGSVSKRAKKIGVIKRHLPGCEKEVLCIGIKNKEAKFSNRTRPEGWLTPTANQLLQTHINLVKKIQKFLPISDVVLEINKFAFMRLDNPNVQKWQYQQGPLYQKASLEEAVSEMQEHHCLFCKKPIAHYHHVVPQSENGSDTIGNIVGLCTKHHDLVHKDTAWQKKLTKKKTGLNKKYGALSVLNQIIPALMKELSSLFPKRFFATNGKSTYDYRAAHGVSKDHWLDAYCIACSVLPSNVCDSNINNHMPYELKQFRRHDRRVLHKANMSRVYTLNSKAVATNRHKAIKQTTDSLEEFRQSHPDDVYKLNVKEHHPAYRNLNRNYPGSIFLVGEQAHVMQSIVASRDGKATKYKDINVNKIAARQCRFVAKNEGIVFT

SEQ ID NO: 6960 - protein, 453 aa, unidentified
MYVAVIGSTGKKLQPTSSYRARKLLNSKRAKIYSYRPIFTIRLLDREDGTTQPIELKMDTGYQHIGVSICSKKHEYVNRQYDMLPDEAERHNDCRKYRRTRRNKKRYREARWNNRKSSLVAKGKYAPSIRHKKDIHVDLYKRFQKVIPITTVVIEAGQFDTQVLKAVEEGNPLPQGTDYQQGERYGFATLKEAVLSRDNYQCICCGKGIKESKILSVHHLGYRKGDRSNRMSNLATVCTDCHTSKNHQPDGKLYDLKPRLKNFKSATFMSTVRWDMVNEFKNINPTVKIIVTYGAMTKLKRADLNIKKTHSNDAYAMGNFHPKHRTDFEHYQKCRRNNRILCKFYDAKYTDVRDNSIKTGKQIGCNRTNRRELRNSDKNERIYRGHKLKKGRNSIRQQHYSYRPGDIILYQEQKYTVAGINNKGKTVTLKEIKKVPSVKKVQLVKHVGGWRQI

SEQ ID NO: 6961 - protein, 456 aa, unidentified; identical to SEQ ID NO: 6138

SEQ ID NO: 6962 - protein, 415 aa, unidentified
MVYVLDKNGQPLMPTDRHRKVRLMLQSGQAKVIKRCPFTIQLNYDSGHQTQEISLGIDAGSKHIGVSATTKIKVLYEADVELRNDIVNLLSSRRELRRGRRNRKTRYRQAKFNNRRRGNGWLAPSIRQKIGTHLTVVENICKMLPISRIMVETASFDIQKIKNPDIQGAEYQQGDQLEFWNVREYVLFRDGHICQCCKGKSKDKILNVHHIESRKTGGNAPNNLITLCETCHTGYHKGTVQLPKAIKRGMRFKDAAFMGIMRWAFYEALKQQYEPVALVHNTYGYITKHTRIAYNLPKEHYVDARCISGNPEASSNGEYYYQKKVRCHNRQIHKLTVLKGGIRKQNQATYLVKGYRLFDKVSYQGKGYFVFGRRQSGFFDIRTLSGEKVNKGSLSCKKLKFIATRTYYLTERRAV

SEQ ID NO: 6963 - protein, 413 aa, unidentified; identical to SEQ ID NO: 2636

SEQ ID NO: 6964 - protein, 426 aa, unidentified
MVYVISQDGKPLMPCSDPIARLLLKQGKAKVKKRDPFTIKLTYETTNYTQGLTLGVDTGSGTIGTAVSKDNGDIVYMSEVVVRNDITDKMTQRAKYRRNRRNRKTRYRKARWLNRASSIKKDRFSPTMQSKLHSHVREIEYIQSILPITEMVFETGQFDMQLMKNPSLANPKVRPWGYQKGANYGFENTKAMVLNRDNYTCQCCKGKHKDSKLEVHHIVFRSQGGSDEESNLLTLCHTCHKDLHSGKINPKLSGKVKGNLKYATQMNSIRKQLFRFYPNAIETFGYVTKANRLHLGVDKEHYYDACTIATQGNAFNVKSNLYKKKCVSDGDFQKTKGIRSEEPIVTDKICGFRKFDKVRYFGNDYFIKGRMSTGYAILMDIDGNKIDFSTMPRGYKTPKLSNCKRITARKMVLFSILTVAADMQAK

SEQ ID NO: 6965 - protein, 420 aa, unidentified; identical to SEQ ID NO: 5662

SEQ ID NO: 6966 - protein, 492 aa, unidentified; identical to SEQ ID NO: 4486

SEQ ID NO: 6967 - protein, 425 aa, Aphanothece sp.; identical to SEQ ID NO: 6227

SEQ ID NO: 6968 - protein, 442 aa, unidentified
MVTVQQSTHHLPFGRVFIRRNLFMVYVISQDGKPLMPCSDPIARLLLKQGKAKVKKREPFTIKLTYETTNYTQGLTLGVDTGSGTIGTAVSKDNGDIVYMSEVVVRNDITDKMTQRTKYRRNRRNRKTRYRKARWLNRASSIKKDRFSPTMQSKLHSHVREIEYIQSILPVTEMVFETGQFDMHLMKNPSLANPKVRPWGYQKGANYGFENTKAMVLNRDNYTCQCCKGKHKDSKLEVHHIVFRSQGGSDEESNLLTLCHTCHKDLHSGKINPKLSGKVKGNLKYATQMNSIRKQLFRFYPNAIETFGYVTKANRLHLGVDKEHYYDACTIATQGNAFDVKSNLYKKKCVSDGDFQKTKGIRSEQPIVTDKICGFRKFDKVRYFGNDYFIKGRMSTGYAILMDIDGNKIDFSTMPRGYKTPKLSNCKRITARSTVMTQVKIV

SEQ ID NO: 6969 - protein, 442 aa, unidentified; identical to SEQ ID NO: 3161

SEQ ID NO: 6970 - protein, 426 aa, Pseudoflavonifractor sp.; identical to SEQ ID NO: 2797

SEQ ID NO: 6971 - protein, 431 aa, unidentified; identical to SEQ ID NO: 6230

SEQ ID NO: 6972 - protein, 451 aa, unidentified
MSVAVINKTGERLMPTSEHRARKLLKSGKAIKHNYHPFTIQLTERESGDVQPIELCMDTGYIHVGTSVKSEKHEYLAEQIDTLTDEKARHDACRMYRRQRRSRKRYRHPRFNNRKRNDRWIAPSLEHKKSIHIQAILRICKVMPVTDITLEMGNFDTQVLKAREEGKPLPHGADYQHGERYGIATLREAVFTRDDYKCQCCGMTIKDGAILHVHHIKYRSQGGTNRMSNLITVCDKCHTPANHKQGGKLYNWKPKIASFKGATYMTTIRWKLYNEVKALFPDIDIHITYGAETKERRRALDIDKSHVNDAFVMGQFHPKHRSKPICYKKKRRNNRCLEKFYDAKYIDSRDGKKRSGQELFNGRISRNHKKDSENLHQYRLQKVTPGRRAIRRQHYPIQPHDIIVYNGNKIEVSGCQHKGTRVVFSKTKKSVQISKIKLFKYAGGYSKSVFN

SEQ ID NO: 6973 - protein, 412 aa, unidentified
  source 1..412: note = Lachnospiraceae bacterium UBA2727
MVYVLSKTGQPLMPTENHAKVRILLKQGKAKVVHSCPFTIQLLYSSTNYTQKVTLGVDSGSKHIGLSATTKDKVLFESDVELRNDIVDLLSTRRELRRSRRSRKLRHRKPRFNNRRHSDGWLAPSVKQKVDSHITMIAKVHKILPISNIVVEVASFDIQKIKDPTISGTDYQQGEQLGFWNVREYVLFRDGHKCQCCKGKSKDKILNVHHIESRKTGGDAPNNLITLCETCHTGYHKGIVKLPKTIHRGMSFKDATFMGIMRWALYDKLKTIYPDVKLTYGYITKNTRIKNGLPKDHYIDARCISDNPNAIGNGDVYYYKKVRCHNRQIHKNTILKGGYRKRNQAPYEVKGFRLYDKVLWKGCKCFIFGRRSTGQMDLRLLDGTHINASVGYKNLKLLKMRGSYLVEQRKVG

SEQ ID NO: 6974 - protein, 426 aa, Lactobacillus sp.; identical to SEQ ID NO: 3294

SEQ ID NO: 6975 - protein, 438 aa, unidentified
LKDGKAKIVKHHPFTIQLLYDSKTNTQPIEICEDVGYNYIGISVKSQSHEYVSAQYDTLQDEKACHDSCRKLRRSRRNRLRYRKPRFDNRKRGEGWLAPSLRHKKELNVNVVKMYCAVMPITHATVEVGSFDTMLVKAIQEGKAIPEGADYQKGPRYNLATLREAVFYRDNYTCQVCGRKVADGAILHMHHMFYWKGRHGDSLDELLTVCEKCHTPANHQKSGKLYGFGENVKFADLSGAAFMNTVRWQIVNELYAAFGKGFVTITYGAMTKEKRIALQLEKTHSNDAYAMGEFHPNHRCTFEHYEKVRRNNRTIEKFYDSRYIDIRTGEIATGKELFNGRINRNHKKDSENLHRYRGKRTYAGHRALLRKKVNLNPGDLVSLNGEVLVVHGTHTNKKGAVNVEFKVPAKNGQKSASLKKLKIVKTTDSMHSAWEKIS

SEQ ID NO: 6976 - protein, 420 aa, unidentified
MQYVYVLSKHGEPLMPCSPGKARLLLKEKKARVVRRTPFTIKLLYGSAGYKQSITLGVDAGSKHVGLSASTEKRELYREEFTPRNDVVKLLSKRKQYRRSRRNRKTRYRAPRFNNRVHSKHKGWLAPSVEVKIQEHITVIKRICRIIPISLVRVETAEFDTQRLKAMLEGKSLPVGTDYQLGEMYDEYNVRQYVLKRDNYTCQCCGAHTTKKKTVKLHVHHLEGRQVGGNAPNNLITLCVDCHKALHAGKVKLDGKKRGKSFKDAAFMGIMRKTLMARLRDELPIPVQGTYGYITKMRREQNDIKKSHVNDARCISKHPLAEPCSVCYRTKAIRYHNRQTHKANFSKGSIRKRSQMPYVVEGYRLWDKVLYKGQECFVSGRRASGSFTLKKLDGTRISKGVTFKKLRLLEPATNYLIERM

SEQ ID NO: 6977 - protein, 420 aa, unidentified
MQYVYVLNKHGEPLMPCSPRKARLLLKQKKACVVKRTPFTIKLLYGSTGYKQPITLGVDAGSKHIGISAATEKYELYCEEATPRNDVVDLLSARRAFRRSRRNRKTRYRAPRFNNRVHSKHKGGLAPSVEVKIQEHITLIKRVCRILPVTFVRVETAEFDTQRLKAMLEGKPLPVGTDYQLGEMYDEYNVRQYVLKRDNYTCQCCGVHPTKTKAVKLHVHHIETRRTGGNAPNNLITLCTACHKALHAGKVTLDGKKRGRSLKDAAFMGVMRKTLMERLLKELKIPVQGTYGYITKYLREKHSIPKSHTNDARCISKNPLAIPCDTCYYTKAIRHHNRQLHKATILKGGIRKANQAPYTVKGYRLWDKVSYNGSECLITGRRTSGYFALKKLDGTVVSNSASYKKMRLLEVATNYITERR

SEQ ID NO: 6978 - protein, 420 aa, unidentified; identical to SEQ ID NO: 4369

SEQ ID NO: 6979 - protein, 461 aa, unidentified; identical to SEQ ID NO: 3893

SEQ ID NO: 6980 - protein, 462 aa, unidentified
MSVLVIGSNGRALMPTNPRKARLLLKKKTASVVCRHPFTIQLLYKTGCATQEGCIGIDTGSQHIGVGVTCGDRVILKEEHELRSSMEKRSLLVARAAMRRGRRYRKVRYRKPKWRHHTKRMYFEKPNRRGQHWRKVKTTTQSPRPKGWLPPSLQSKCDHHFRIIDRYLKYLPDSITRNLVIEVGRFDMARMNDPMIHGEMYQRGPMYDAENLRAYIFARDGYQCACCKAKAGTTRKADGTTVKLVAHHILFRSRGATDNPKYMVSVCDHCHTTKAHQPGGILYSWMENNKKVTRGLRDAAFMNILRQRLFARYPQAAFTYGNITATDRKQLRLPKSHANDAVAISLFGKEASAVRDTCQTVHYKQVRKSKRSLHEAIPRKGRKNPNTKAVRNKKNTTQVNGFKLWDSVLADGKKLFICSFTGTSAYLVDKNGCYVSQPGKTYKQWPLSKLKRLHPNGNWLVT

SEQ ID NO: 6981 - protein, 420 aa, unidentified
MQYVYVLNKHGEPLMPCSPRKARLLLKQKKAYVIKRTPFTVKLLYGSAGYKQPVTLGVDAGSKHIGISATTEKHELYREEATPRNDVVDLLSARRAFRRSRRNRKTRYRAPRFNNRVHSKHKGWLAPSVEVKIQEHITLIKHACRILPVTLVRVETAEFDTQRLKAMLEGKPLPVGTDYQLGEMYDEYNVRQYVLKRDNYTCQCCGAHSTKTKAVKLHVHHIETRRTGGNAPNNLITLCKACHKALHAEKVTLDGKKRGKPLKDAAFMGIMRKTLIERLRKELKIPVQGTYGYITKYLREKNGIPKSHTNDARCISKNPLAIPCDTCYYTKAVRHHNRQLHKATILKGGIRKANQAPYIVKGYRLWDKVAYNGTECFITGRRTSGYFALKKLDGTVVSNSISYKKMRLLEAATNYIIERK

SEQ ID NO: 6982 - protein, 458 aa, Scytonema sp.
MMITNSVFVLSKNGKILKPTTPARARILQSQGKGKKLKLFPFTLILDKDVDENVEPYLELRCDPGSKFTGISLVDLNKNEVIWAMELEHRGARIKMELMKRAGVRRSRRTRRLRYRKKRFDRKKPLGWLAPSLRHRLLTIETWIKRLLKLAPIKSIAIESVKFDLQKMETPDIEGIEYQQGTLAGYTLREALLEHWGRECVYCGQTDVPLQIEHINARSQGGSDSFSNLTLSCEKCNQKKGNKPVEQFLQDKPEILKKIKSHQKQSLSDAAAVNSTRKAIFEMAHQFGLPVISGDGASTKMIRIQSGLPKAHWIDSACVGTDQIVKLRICQPLRVTCKGHGTRQVQRMNAKGFPAIASIKKNPMTGKKEVKLVAKNQKYTHATAGDYVVCTLLKHRKHIQSGIYRARVKTPTPKGVEVLISGHRISLDRQYIKLIHRADGYEYSFTTINQDLLRFKPI

SEQ ID NO: 6983 - protein, 427 aa, Nostoc sp.
MCKVFIIDSEKRPLNPIHPAQARQLLRKGKAAVFKRFPFTIIVKESSTDATVSPLRLKLDPGAKYTGIALVSDANGEVVFAAELKHRGFAIRDALTSRRQLRRSRRNRKTRYRQPRSLNRTRPQGWLTPSLQSRIENIKTWVSRLRKVAPITAISQELVKFDMQLIRKPEIEGKEYQQGTLAGYETRQYLLEKWHRECAYCGIKDVPLQIEHIHPRSKGGSNSITNLTLSCEKCNLKKGTKNIRDFLKKDKSRLEKILALTKKPLADAAAVNTTRFVLLEVLKLTVLPVETGSGGLTKFNRTQQALNKSHWLDACCVGVSTPILKIKGIKPLLITANGHGTRQSCRTDKYGFPVRHCSRYKFHFGFQTGDIVKAVVNKGKKFGTYIGRIATRATGSFNISTTQGLIQGISYKYCKTIHKKDGYAYVM

SEQ ID NO: 6984 - protein, 431 aa, unidentified
MPNKVYVINKHGRPLMPCSPAKARHLLDAGKAKVKKRTPFTIQLVYGSSGYTQEVILGVDAGSKTIGMSVSTTKEELLSAEVKPRNDVVDLLSTRREFRRARRNRKTRYRKPRFDNRVRSKHKGWLAPSVEVKIQEHITSIKRVCRILPVSKVVIETAEFDLQLLKAIADGKPVPQGEDYQKGEMYGHYNVRQYVLWRDDYTCQCCGAHATKKKEVRLHVHHLESRKVGGDAPDNQVTLCESCHEKLHKGLIAEKDFKKRKRRSTRDATFMGIMRKTLMQRLCSELPIPVVKTRGYITKATREKLLVLPKSHTNDALAIAQGKRGFNVGYLPEIAQIDKIYTIRPVRHHNRQLHKAAILKGGIRKSNQAGKYVFGYRLFDKVQFNGQDCFIWGRRTTGIFTIKTINGKMIKDGISFKKLKPVEKSTSYLIA

SEQ ID NO: 6985 - protein, 403 aa, unidentified
MPTTPCKARKLLKQGKAKVVKREPFTIQLLYATGETKQDITLGIDAGSKIIGLSATTDKQELFSAEVELRNDIVDLLSTRREFRRTRRNRLRYRKPRFLNRVYSKNKGWLAPSVENKIQTHLKIISKIHEILPISKIIIEVASFDIQKIKNPDIEGERYQQGEQLGFWNVREYVFWRDGYKCQGKKGCKNKILNVHHIESRKTGGNSPSNLITLCESCHKDYHAGKLKLNLKRGQSFKDAAFMGIMRWTFYNRLKEIYSNVKITYGYIIKNTRIQNNLPKEHRIDALCISGNPNVKRLDYWYYIKQVRRHNRQIHKANILKGGKKKLNQAPYLVKGFRLFDKVKYKGEECFIFGRRSSGYFDLRKLDGTVIHRSANCKDLKLISKAKTLLWERRIDVAVSSHD

SEQ ID NO: 6986 - protein, 414 aa, unidentified
MPCSPAKARLLLKEKKAIVKRRTPFTIQLTIATGETKQPVGLGVDAGYKHVGLSASTDKAELYASQVELRQDITDLLSARRALRRARRNRKTRYRAPRFNNRIRTKRKGWLAPSVENRINAHLSRIEAVLRLLPITKITVETASFDMQRLKNPDISGKEYQEGEQLGFWNVREYVLFRDGHVCRHCHGRSKDPVLNVHHLESRRTGSDSPDNLITLCETCHKALHRGEITLKAKRGQSFRAQAFMGIMRREVLNRLKASYPELKVHETYGYLTKHARIANGIVKSHGADAFCIAGNLGAERLGEFFFQKQTRRNNRQIHKLSILKGGIRKRNQAPFEAKGFRLFDKVACQGEEGFIFGRRSSGSFDVRKLDGTRISAGISCKKLRLLEKRRTYLTEIRKEEALPPLPEGRGLRA

SEQ ID NO: 6987 - protein, 419 aa, unidentified
MVYVISQDGKPLMPCSDPIARLLLKQGKAKVKKREPFTIKLTYETTNYTQGLTLGVDTGSGTIGTAVSKDNGDIVYMSEVVVRNDITDKMTQRAKYRRNRRNRKTRYRKARWLNRASSIKKDRFSPTMQSKLHSHVREIEYIQSILPVTEMVFETGQFDMQLMKNPSLANPKVRPWGYQKGANYGFENTKAMVLNRDNYTCQCCKGKHKDSKLEVHHIVFRSQGGSDEESNLLTLCHTCHKDLHSGKINPKLSGKVKGNLKYATQMNSIRKQLFRFYPNAIETFGYVTKANRLHLGVDKEHYYDACTIATQGNAFNVKSNLYKKKCVSDGDFQKTKGIRSEQPIVTDKICGFRKFDKVRYFGNDYFIKGRMSTGYAILMDIDGNKIDFSTMPRGYKTPKLSNCKRITARSTVMTQVKVV

SEQ ID NO: 6988 - protein, 420 aa, unidentified; identical to SEQ ID NO: 3288

SEQ ID NO: 6989 - protein, 415 aa, unidentified
MVYVLANDGQPLMPTERHGKVCRMLKSGIAKVVKKCPFTIQLQYESERNVQPVALGIDAGSKHVGVSATTKAKVLYESDVELRDDIVKLLATRRQLRRSRRSRKTRYRPVRFDNRKRKEGWLAPSIRQKIGSHLTVVANACKILPINQIIVETASFDIQKIKDPEIQGIEYQQGEQMDFWNIREYVLFRDGHICQCCKGRFKDKILNVHHIESRKTGGNAPNNLITLCETCHKGYHNGTVTLPKNIKRGMQFKDAAFMGIMRWTFYNTLKEQYEPDIPVSMTYGYLTKNTRIEHGLPKEHYIDARCISGNPDAVSDGTYYYQKKVRCHNRQIHKQTILKGGIRKSNQAEYLVKGYRLFDKVRYQGREYFIFGRRKSGFFDIRTLSGEKVNKGSINVKRLTFVDTRKNYLTERRTV

SEQ ID NO: 6990 - protein, 456 aa, unidentified
MSTCVCVLSNNGERLMPTFRLGKVRRLLKDGKAKIVKHHPFTIQLLYDSKTNTQPIEICEDVGYNYIGISAKSKSHEYVSAQYDTLQDEKEHHDDCRKMRRTRRNRLRYRKPRFDNRKCDKGWLAPSLEHKKQLNISLIERYVSVIPITHATVEVGSFDTMLLQAIQKGKAKPESADYQKGPHYNLATLREAVFYRDNYTCQVCKRKIADGAILHMHHMFYWKGRHGYQLDELATVCEKCHTPANHQKGGKLFGFGEGKEFADLSGAAFMNTVRWQIVDALYTTYDKEFVTITYGAMTKEKRIALQLEKTHNNDAYAMGDYHPACRCKFRHYQKRRRNNRVLEKFYDATYIDARTGNKAKGKELFNGRINRNHKKDSENLHKYRSKKVSKGRRSIRRRRYAIQSYDTVRLEGKTYITSGCHNKGTRLLIPVNGKSKSVAISKVQVVCHAGAWIQIS

SEQ ID NO: 6991 - protein, 423 aa, unidentified
  source 1..423: note = Microcoleaceae bacterium UBA10368
MSNFVFVLDTRKRPLNPIRPGMARKLLNNGKAAVFKRYPFTLILKVEVTATQKPITLKIDPGSRTSGIALVQGENVIFGAELTHRGQTIKASLESRRSLRRGRRNRHTRYRQARFLNRTRPKGWLAPSLQHRVETTLTWVTRLMKLSPIASIIQELVRFDLQQLENPEISGIEYQQGVLCGYEVREYLLNKWDRKCAYCGVTNTPLQVEHIHPKAKGGSNRISNFCLACDACNKKKGTQGIEQFLSKKPEILKQILSQAHRPLKDATAVNSTRWALFNRLKETGLPVSTGSGGLTKFNRTRLNLGKSHWLDAACVGNVDSLEILTNKPLLIKATGHGTRQMCRTDKFGFPSRYVPRFKFVKGFQTGDIVKAIVTSGKKIGKYVGRVAVRTSGSFNISASELVSGISHKYCSVVHRKDGYSYAA

SEQ ID NO: 6992 - protein, 489 aa, unidentified
MAMVYVQNKDGKPLMPTTRYCYVRLLLKENKARVVSTTPFTIQLNYDTPDITQDLILGIDPGRTNIGVAVVKEDGQCVFSAHLETRNKDIPLLMKKRAGFRRQHRTLDRRRKRQRRARATGTTIAEGSVERLLPGYEKPVVCHYIRNKAARFNNRSRPAGWLTPTANHLLQTHINLIAKVAKFLPITKVVVELNRFAFMAMDNPNIHRWEYQQGPLYGLGSVEDAVYAQQDGHCLFCKKPIDHYHHVIPRHKGGSETLANRCGLCAKHHDLVHKDKAWADKLVTRKEGMNKKYHALSVLNQIIPFLMEYLGSETLYDVYAIDGRSIKGFRIAKNVPKEHYTDAYCIACSILDTDNKVSAPVEPFELKQFRRHDRQACIRQMVDRKYLLHGKVVAANRHKAFEQKSDSLQEFREAYSDVAVSQLTVKPHPPQYKDMSRIMPGAVMDFDGIVGVMQSSIVGQFYKSTKGHKATPKRCVLLSQNAGMVFIPT

SEQ ID NO: 6993 - protein, 499 aa, unidentified
MRYVYVLDVDGKPLMPTCRYGKVRRMLKSGQAKTVDTLPFTIQLTYQTKTKILQPVTAGQDPGRTNIGLAAAREDGTDLYRSHCETRNKEIPKLMAERLAHRRASRRGERLARKRLAKKFGTIAKKLNGRLLPGYKEPLAVKDIINTEAKFNARLRPEGWLTPTATQLLRTHLNLLERVSRILPVTDVAIEINRFAFMELADPDKKHSEIDFQHGALFGTGGLEQAIREQQQDRCLLCGKRDIEHFHHIIPRTKRGSNTIANLAGLCEECHTLVHQSEEAKSRLEEKKQGLLKQYGGTSVLNQIIPSLVKELEIRYPGHLYVTTGKDTKAFREKHGLEKDHDVDAYCIAASRMENIKPKIQTEPFEIQQFRKHNRANIHHQTERTYKLDGKVIAKNRKKRMDQKTDSLEDWFATMTEQYGLEKAMRLRARLTVKKSTRHYNTKDRIMPGLVFRYGTKRYVMTGQITGGRYYRAYGAGNQNFPAQKVTMLKQNTGLVYVA

SEQ ID NO: 6994 - protein, 427 aa, unidentified; identical to SEQ ID NO: 4946

SEQ ID NO: 6995 - protein, 418 aa, unidentified
MVYVLSQHGQPLMPTENHAKVRALLKHGKAKVIQRCPFTIQLLYESTTHTQKINLGIDAGSKTIGVSATTESKVLYESEVVLRNDIVELLSGRRALRRSRRNRKTRYRKPRLDNRRRPDGWLAPSIRQKIKTHVTVVENVMKILPVTKIIVETASFDIQKIKNPKIEGAEYQYGEQLDFWNVREYVLFRDGHTCQCCKGKSKDNILNVHHIESRKTGGNAPNNLITLCETCHKAYHKGVITLPKEIHRGMRFRDAAFMGIMRWAFYDRLKELYTPFGVEVINTYGYITKNTRIEHGLPKEHYVDARCISGNPAAKPLGHYYFQKKVRCHNRQIHKNTILKGGIRKRNQAAYLVNGYRLFDKVKYQNQEYFIFGRRSSGFFDIRTLDGTKVNKGSISCKKLQLVEKSKHYLTEQRKVAA

SEQ ID NO: 6996 - protein, 450 aa, unidentified
MSVAVISKTGVRLMPTSEYRARKLLDSGKAIIYGYRPFTIQLTERETGDVQPVELCVDTGYIHIGVSVKSEKHEYLGLQVDTLTDEKTKHDDRRMYRRQRRNRKRYRKPRFDNRKRETGWLAPSLEHKKEIHLQIITAVCEVYPIADIALEMGNFDTQVLKAQEEGKPLPQGTDYQHGERYGIATLREAVFTRDGYKCQCCNRGIKEGAILHVHHIQYRSQGGTNRMSNLITLCEKCHTPANHKPGGKLYGWKPKVASFKGATYMTAVRWQLYDKVKEISECGVHITYGAETKERRRSLDIGKSHANDAFVMGRFHPKHRSTPVLYKKKRRNNRCLEKFYDAKYIDSRNGKKRSGQELFNGRISRNHKKDSEDLHRYRKKKVSRGKRTIRVQRYKIQPHDIVLFDGKKYETTGCHNKGSRAILLPEKKSKSVEKLKIYKYAGGYYPSKFT

SEQ ID NO: 6997 - protein, 406 aa, unidentified; identical to SEQ ID NO: 3475

SEQ ID NO: 6998 - protein, 469 aa, unidentified
MQKVFVLDKNKQPLMPCHPARAREMLKKGKAAVFRRYPFTIILKEREGGAVQPLQTKIDPGSQTTGIALIGDFTRGKQVIWGAELHHRGKTIKKTLTDRLAIRRSRRNRKTRYRKARFNNRHPAKCVCCGRNAKHGSRYCGPCQKTRNYVDNGYRQRCLPPSLQSRVENTLTWVKRICRFAPATALSLELVRFDTQKLQNPEISGIEYQQGELAGYEIREYLLEKWGRKCAYCGKEGVPLEIEHIVPKSRGGTDRISNLTLACHECNQKKGNQFIEEFLAYDPGKLKRIKTKLKEPLKDAAAVNTVRWYLFNRLQKEGLPLECGTGGRTKYNRIKLGFPKEHWIDAAYVGESGQDVQLNLSMQALQITASGYGTRQMCNTDKYGFPRSHRQRTRMFLGFKTGDTVLAVIPKGKYKGIHIGRIAIRHRPSFKLNGFDVHPKYLKLLQRNDGYEYQIFNRKEECGNFSWKC

SEQ ID NO: 6999 - protein, 247 aa, unidentified
LKVFVLNMRGRPLMPCSPARARHLLKAGKAVVRRRTPFTIQLRIATGETKQSVTLGVDAGAKHVGLSATTEKEEVFASEVELRQDITGLLAARLSLRRDRRHRKTRYRAPRFLNRVRSKHKGWLAPSVENRIQAHMSRIDAVCRLLPVTKIVIETASFDIQKIKDPSVEGTDYQQGDQLGFWNVREYVLFRDGHVCQHCHGHAKDKILNVHHLESRQTGGDAPNNLITLCETCHKACHAGKIKLKVK

SEQ ID NO: 7000 - protein, 463 aa, unidentified
LNGCRLMPTSEREARLLLKHGKASVYRKVPFTIKLNYKTGSTTQPGYLGIDTGSQHIGVSVVREDGTVLHKEEIGLRDSMSKRKLMESRSSLRRGRRHRKTRYRHPKWRLKAKRVYYETPDRKGRHWKKQKITFASKRPQGWLPPSLQSKTDHHIQWIKKLQDLLPDGYRLSIELGRFDPARMKDTEIHGDLYQKGPQYDYENVRAYVLDRDRYTCQVCGKKGGKLHIHHILYRSHGATDNPQYMATICSDCHSTENHQPGGILYQWMQEQKKFTRGLRDATFMNILRKRLMKAFPKATFTYGNITKADREKLKIPKSHGNDATAIAIVKTGIMTVKDNEPVIYIQQVRRKKRSLHEETPRKGRKEPNRKASRYNKNTKAVTVTKRKNKKRISITGCLFDRVELNGKKGWISGFTDKSCYIKDENDQYIRISPKYKQVSLSKLKILHHCGNWVIGARRSLGKG

SEQ ID NO: 7001 - protein, 480 aa, unidentified
LYTKPLDNIGEGSLPPSGEINLKGMTFMVYVKSIDGKALMPTSNAKARKLLKQKKAKVVSLRPFVVKLTYKTKTEYTQKLNLGVDSGYSNIGFSVIDAKQEYIAGEVKLLEGMKKRLLEKASYRRIRRSRLRYRKARWNNRVKSKKKGWLAPSLKHKLDTHIKFIDYLKNILPIGKITVEVANFDIQKMKDDLISGIDYQNGDMFGFWNMREFVLHRDGHKCQNPNCKHKDKKEQILKVHHIRYRSEGGSDRPENLITLCSKCHTPVNHKKGKFLYDWCVNGKKVRGFKDATFMSMIRWYLVNELKSKHNNVSITYGYITKNHRIQNGIEKSHLNDAFAIAKGTNQARTKDRFLVIQDRLKNRSLEKFYDSKIIDIRIGKKVSGGDLNCGRSTRNKNLNTENLRKYRGIRISKGQRRIRKQKYFYQPNDLVKYDGKVYTVKGTQNEGKYIALKEIKKVPKVELLIPYVFKKGLNWSYGLC

SEQ ID NO: 7002 - protein, 346 aa, unidentified; identical to SEQ ID NO: 4983

SEQ ID NO: 7003 - protein, 556 aa, unidentified
LYIKMTSCTCTVFPACNHAKASSSQGKHNLLFRQERLIVKEVAYMPTVYVLNKDGKPLMPTTRGGHVRHLLKEQKARVVRAKPFTIQLLYETDDAVQLLYLGIDPGRTNIGVAVVKANGTAVFTAHLETRNKEIPKLMQDRKKARRARRTNGRRCRRQRRAKANGTISKKCVKQTTAQNGSVSKRAKDIGVIKRRLPGCEKDVLCIGIKNKETKFTNRTRPEGWLTPTANQLLQTHINLVKKIQKFLPISDVVLEVNKFAFMRLDNPDIQKWQYQQGPLYQKGSLENAVSEMQEHHCLLCDKPIDHYHHVVLQSENGSNTIANIVGLCSEHHNLVHKDAAWQKKLAEEKVGLNKKYGALSVLNQIIPALTNKLSVLFPKHFFVTTGKSTHDYRESHSVSKDHWLDAYCIACSVLPSNVCDSNINNHVPYELKQFRRHDRRALHKENMSRVYTLNGKAVATNRHKAIKQTTDSLEEFRQSHPGDVCKLKVKEHHPAYRNLNRNHPGSVFFVGEQAHVMQSIVASKDGKATRYKDTNVNKIAAGQCRFVAKNEGIVFT

SEQ ID NO: 7004 - protein, 442 aa, unidentified; identical to SEQ ID NO: 2903

SEQ ID NO: 7005 - protein, 447 aa, unidentified; identical to SEQ ID NO: 4762

SEQ ID NO: 7006 - protein, 518 aa, unidentified
MTPKKRKEASRMSEYIYVIGVDGDPQMPTKRKRHVEKLLQAGRARVFRQIPFTIQLTYENKPVLQPITIAEDPGRSNIGMAVVSLSGELLSAAVVQTRNKEIVKLMEKRKQHRRASRNGERKARQRLAKKCHTMIKAGSLMRKLPMYGKDKRVQCNVIRNTEARFCNRKREDGWLTPSAEHLVQTHINLIHKMQKFLPITDVAFEINRFAFLSLEDPSISGVDFQNGPLKGYDDLNAAIEDLQDGHCLMCNSPIEHRHHIVPRSMQGSNTIGNIAGLCCKCHERVHKDARFEDRLKKKKAGLNKRYAAVSALNQAIPFICKRLEQEFGKEHVHYCSGRDTAMARRSFGYHKTKEEQLHVVDAWCIAVLALQHVPEKAPEFDHVHEILQFRRQDRSRIKAQTSRAYYHEGKKIAKNRKKAEGQREDSLQEWRKRQVERYGEEQTRKMISQLKVKKSIRRYNRLDRLMPGAVFYYQGVRYVMRGQHSNGQYLQAVGMGSKDFPAKKCKIVAHNQGLVFVS

SEQ ID NO: 7007 - protein, 413 aa, unidentified
LKVFVLNMRGKPLMPCSPAKARHMLKAGKAVVVRRTPFTIKLTIATGETKQDVTLGVDAGARHVGISATTEKEEVFASEVALRQDITGLLADRLAFRRARRNRKTRYRAPRFNNRVRSKHKGWLAPSVENRIQAHMSRIEAVCRLLPVTKIVIETASFDIQKIRNPEVEGTGYQQGDQLGFWNVREYVLFRDSHICQHCRGRSKDPILNVHHLESRKTGGDAPNNLITLCETCHKAYHAGKIKLKVKRGQSFRAEAFMGIMRWTLLDRVRKTHPKLPVENTYGYLTKHKRIALGLPKTHCADAFCIAGNLKALRRGDFLFQQQTRKHNRQIHKCSILKGGVRKLNQAPFLVKGFRLFDKVRIGGQIGFVFGRRVRGTFNIRRLDKTVIGTDINCKKLSLLETRKTFLTELRKE

SEQ ID NO: 7008 - protein, 412 aa, unidentified
MADRQKSRQASRRGERKARQRLAKRYGSMVKSGMVMRKLPMYAADKFVTCKFIRNTQARFCNRKRCPDWITPTVQHLVQTHLNIIRKISRYLPVTDIAFEVNRFAFMHMENPKAMGVDFQNGPLKGYDDVKEAICTQQHGKCLMCKKPISHFHHIVPRSRGGSDTIQNLAGLCPECHTKVHTDTTFRKDFDRKKSGQLKKYGALSALNQAVPFICKKLLEEYGEEHVHFCGGLDTSLIRTAFGFEKTKKNQMHEVDAYCIGLAALEVNEVGTPAFDHTFQIRQFRRQDRSIIHHQTGRSYYQGKEKVAQNRKPGFEQKTTALSQWYKEQIRIHGEKEAEKLRSQLRVEKSCRHYNDMDRFLPGTVFLYEGKRYVLSGRITNGKYLRACGQGMKNFPAAECTFIRHNAGLVFI

SEQ ID NO: 7009 - protein, 430 aa, unidentified
  source 1..430: note = Cyanobacteria bacterium UBA11372
MSNFVFVLDANKQNQDPVPPGQARRLLSQGKAAVYRHYPFTIILKYAVQEPHTQPCQIKIDPGAKVTGLAVVQGDKVIWGAQLVHRGEQIKNDLLKRRAIRRSRRNRKTRYRKPRFLNRTRKPGWLPPSLESRVENIVSWVNRIRRYVPTAGLSQELVKFDTQAMQNPEISGISYQQGELAGYEVRQYLLEKWGRKCAYCGAENTRLEVEHIHPKSKGGSSRVSNLTIACRNCNQDKGDRDIKDFLAQKPDVLSRILKQARLPLKDAASVNSTSWALFHQLKQTGLPVETGTGGRTKYNRFRLGIPKTHWLDAACVGEVEKLKVLTSQPLLITAKGWGNRQMCTPNKYGFPSKHRTRCKTFKGFQTGDMARAVLPTGKFAGTHVGRLIVRESGVFEMITAKGKISPVRHKYCRSIHRNDGYMYAFSSFVS

SEQ ID NO: 7010 - protein, 408 aa, unidentified
KARLLLKEKKAIVVRRTPFTIQLTIATGESKQPVSLGVDAGYKHVGLSASTEKAELYASEVELRPDVSDLLSARRTLRQSRRNRKTRYRAPRFDNRIRTKRKGWLAPSVENRINAHLSRIGAILRLLPVTKITVETASFDTQLLKNPDISGKEYQEGEQLGFWNVREYVLFRDGHACQHCHGRSKDPVLNVHHLESRRTGGDSPGNLLTLCETCHKALHRREIKLKTKRGQSFRAEAFMGIMRWEVLNRLKASHPELEVHNTYGYRTKHTRIVNGIDKSHCADAFCIAGNLGAKRLGEFFFQKQTRRNNRQIHKLSILKHGLRKRNQAPFEIKGFRLFDKVACKGEEGFIFGRRSSGYFDVRKLDGTRISAGISYKKLHLLEKRQTYITEIRKEKALPPLPEGRGLRA

SEQ ID NO: 7011 - protein, 420 aa, unidentified
MQYVYVLNKHGEPLMPCSPGKARLLLKQQKAHVIKRTPFTIKLLYGSTGYKQPITLGVDAGSKHVGLSASTEKRELYREEFTPRNDVVDLLSTRKQNRRSRRNRKTRYRPPRFDNRVHSKHKGWLAPSVEVKIQEHITVIKRICRILPITLVRVETAEFDTQRLKAMLEGKPLPVGTDYQLGEMYDEYNVRQYVLKRDNYTCQCCGAHTTAKKAVKLHVHHLESRKMGGNAPGNLITLCITCHDALHKGKVSLDNKKRGKPMRDAAFMGIMRRTLMSRLREELPITVQGTYGYITKMQREQNDIKKSHVNDARCISKHPLAEPCSVCYRTKAIRHHNRQTHKANFSKGGIRKRSQMPYVVEGYRLWDKVLYKGQECFVSGRRASGSFTLKKLDGTRISKGVTFKKLRLLEPATNYLIERM

SEQ ID NO: 7012 - protein, 494 aa, unidentified
MLPQSRALEAADADNREGQDETVGGKGAIPKPVANIPEGRRVERSALRPKGQCNVRFDGGFVQVFVLDKKKKPLMPCHPARARELLREGRAVVHRIAPFTIRLKDRIGGETQPIRVKLDPGSKTTGLAVVREEETDGEKTAHVLFQAEIHHRGSAIKKRLDQRRAFRRRRRSQLRDRTPRFDNRTRPDGWLPPSLRHRIDTTLAWVERLRRLVPVSELSQELVRFDMQKIENPEISGAEYQQGTLAGYEVREYLLEKWGRTCAYCGSENVPLEIDHIHPRSLGGSDRVSNLTLACRSCNLKKGNRPVGEFLAKTPERLSTILARAKAPLKDAAAVNTTRWALFQALKATGLPVETASGGRTKWNRTRLLLPKTHALDAACVGKVDRIEGWNRPCLSVKATGRGSYRRTRLDAFGFPRGSLTRTKAHFGFQTGDRVMAIVTKGKKNRNLCRTGGSEKLRQFQHPNRLRSGAGDFLQGLSASPAGRRVRIFYPSDH

SEQ ID NO: 7013 - protein, 414 aa, unidentified
MPCSPAKARLLLKEKKAIVVRRTPFTIQLTIATGETKQPVSLGVDAGYKHVGLSASTEKAELYASEVELRQDITDLLSARRALRQSRRNRKTRYRAPRFDNRIRTKRKGWLAPSVENRINAHLSRIEAVLRLLPVTKITVETASFDMQLLKNPDISGKEYQEGEQLGFWNIREYVLCRDGHVCQHCYGRSKDPVLNVHHLESRRTGGDSPGNLITLCETCHKALHRGEITLKAKRGQSFRAEAFMGIMRWEVLNRLKASHPELEVNNTYGYRTKHARIANDIAKSHCADAFCIAGNLGAERLGEFFFQKQTRRNNRQIHKLSILKGGIRKRNQAPFEVNGFRLFDKVACQGEEGFIFGRRSSGFFDVRKLDGTRISAGISYKKLHLLEKRRTYLTEIRKEEVLPPLPEGRGLRA

SEQ ID NO: 7014 - protein, 431 aa, unidentified; identical to SEQ ID NO: 4463

SEQ ID NO: 7015 - protein, 430 aa, unidentified; identical to SEQ ID NO: 4817

SEQ ID NO: 7016 - protein, 412 aa, unidentified; identical to SEQ ID NO: 6973
  source 1..412: note = Lachnospiraceae bacterium UBA7287

SEQ ID NO: 7017 - protein, 512 aa, unidentified
MSTIYVLNKDGKPLMPTTRGGHVRHLLKEQKARVVQSNPFTIQLLYETNDVVQPLYLGIDPGRTNIGVAVVKTDGTAVFAAHLETRNKKIPKLMQDRKKARRARRTNGRRCRRQRRAKANGTISKKCVKQATAQNGSVSKRAKEIGVIKRHLPGCKKDVLCVGIKNKEAKYTNRARLEGWLTPTANQLLQTHINLVKKIQKFLPISDAVLEVNKFAFMRLDNPNIQKWQYQQGPLYQKGSLENAVSEMQEHHCLFCEKPIEHYHHVVPKSENGSNTIANIVGLCAEHHNLVHKDVAWQEKLVEEKTGLNKKYGALSVLNQIIPALTKELSFLFPKHSFMTNGKSTHDYRAAHGISKDHWLDAYCIACSVLPIDVCDSTINNCVPYELKQFRRHDRRALNNENMNRVYTLNDKVVATNRHKATEQEAASLEEFRKEHPNDVCKLKVKEHHPTYRNMNRNYPGSVFLVGKQIHVMQGIASSKDGKATKYNDTRATTIAAGKCKFVAKNSGILFV

SEQ ID NO: 7018 - protein, 501 aa, unidentified
LPTFPRGDGQKCPRHESRKGRLQEGSDLAVFVLDKRKRPLMPCSEKRARLLLERGRARVHRLVPFTIRLVDRTVEESVLQPMRIKLDPGSKTTGVALVRESEEVDGETGEVREVRKAAHVVFLAELSHRGQAIREALTARRAFRRRRRSANLRYRACRFANRRKPKGWLAPSLRHRVETTLSWVNRLCRWVPVTAISQELARFDTQAMQNPEISGVDYQRGSLFGYEVREYLLEKWKRKCAYCDAQDVPLEIDHIHPRSKGGSHRVSNLALACRTCNQKKGNRDVAAFLARDPQRLARIEAQAQAPLGDASAVNSTRWALYAALKGTGLPVEVGTGGRTKFNRVRFGIPKTHALDAVCVGHVEAVYGWSVPTLGIQCTGRGSHQRTRLTKYGFPRGYLTRRKRHFGFQTGDVVRAVVTTGRKMGTYVGRVAIRASGRFNLQTRNGLVQGIHHRFCTLIQRADGYGYAWNRTAFVKGEAGTGAACAAALSLSVLKGGVSRAI

SEQ ID NO: 7019 - protein, 442 aa, unidentified; identical to SEQ ID NO: 2903

SEQ ID NO: 7020 - protein, 582 aa, unidentified
MYLDGVFGHLKDAGTCRYSSSLQHRRVYAKSRKTIPGQCLGLQPMRKNRFFVGRYCPTLIRRQHLANLKLIDTLLEKTEYIYVLGADGKPQMPTNRKVRVRSLFKSGLAKIVDTVPFTIRLLYENNAVLQPITLAEDPGRTNIGVAVLTQFGDLVFSAVVETRNKDIKKLMSDRKAHRQASRRGERKARQRLAKKHGSMIKSGMIMRKLPRYAADKFVTCKFIKNTEARFCNRKRIPDWLTPTVNHLVETHINIIRKISKYIPVTDIAVEVNRFAFMQMENPETTGIDFQNGPLKGFNDVKAALRVQQHGKCLMCKNDISDFHHIVPRSKGGSDNIQNQVGLCPKCHKKAHTNENFKQKLADKKVGLLKKYGALSALNQAVPFICKSLLEIYGKDHVHFCTGKDTSLIRTGLGYEKTKDNQMHEVDAYCIGLAAVGADIVNLPKFENIYKIKQFRRQDRSIINYQRERTYYLDGKKIATNRKPRFEQKKDAFSDWYSKRVKSDGKEQADKLTGRVTVKKSIRGYNSKNRLMSGTIFYYNGKRLVLTGQLTGGKYYRAYGDSKTNYPAAKCQVYKQNEGLVFV

SEQ ID NO: 7021 - protein, 420 aa, unidentified; identical to SEQ ID NO: 3685

SEQ ID NO: 7022 - protein, 451 aa, unidentified
MSVAVISNIGERLMPTSEYRARKLLKSGKAVKCSYHPFTIQLTERKAGDVQPIELCMDTGYIHIGISVKSEKHEYLAEQIDTLTNERTRHDACRMYRRQRRGRKRYRQPQFNNRKRDKGWIAPSLEHKKDIHIQAISRINKVMPLTDITMEMGNFDTQVLRAKEEGKPLPQGADYQHGERYGTATLREAVFSRDNYKCQCCGRTISDGAILHVHHIKYRSHGGTNSMVNLATVCDKCHTPKNHKPGGKLYDWKPKLPDFKGTTFMTTIRWQLYSEVKSLFPDVNIHVTYGAATKEQRRELSIGKSHVNDAFAMGKFHPKHRINAVLYKKKRRNNRCLEKFYDAKYIDSRDGSKKTGQELFNGRINRNHKKDSENLHQYRLQKTTAGKRTVRKKHYSIQPHDIVIYENRKRETSGCHCNGTRVILLPDKKTATIKKVKIYKYAGGYFKSAFN

SEQ ID NO: 7023 - protein, 447 aa, unidentified
VPAYRFKHITKKEVPYMVYVLDIDGQPLMPTSRHGKVRRLLNSHLAKVVKRCPFTIQLLYQSTKETQPVSLGVDAGSRHVGLSATTEREVVYQEELVPRNDIVKLLSARRALRRSRRNRKTRYRRVRFNNRVHSKHKGWLAPSVEVKIQEHITATKRICQILPIFDIHVETAEFDLQRLKAMEEGRLLPAGTDYQLGEQYDFYNTRQYVLHRDEYTCQCCGTHDNNVKLHVHHVESRQTGGEAPNNLITLCEHCHKSIHAGKMMLPKGKKRGKSYRDAAFMGIMRNTLLERLRKEVNVPVTMTYGYITKYWREKAGLEKSHINDAICISKHPYARPLETYYLTKAVRHHNRQIHKTKFSKGGIRKRNQAPYLVKGFCLFDKVLYQGESYFIFGRRITGYFDIRTLDGTKVNKGSTSYKKLRIQDTAEAYLTEVRAIPHMNEFTCVLA

SEQ ID NO: 7024 - protein, 424 aa, Microcoleus sp.
MSNFVFVIDTNKRPLNPVHPGLARLLLTQRKAAVFRHFPFTIILKTASAEITGPIQLKIDPGSKTTGLALLSNDAVIWGAELTHRGQAIKDSLESRRAIRRNRRHRKTRYRQPRFLNRTRKKGWLAPTLEHRVKTTLTWVNRLIKWAPITGISQELVRFDTQALMNPEISGTEYHRGELAGFEVKEYLLAKWGRKCAYCGVENTSLEIEHILASSKGGTNRVSNLTLACHDCNQKKGNDPIEKFLSKKPDVLRRILAASKSPLKDAAAVNSTRWALYQRLQETGLPVSLGTGGRTKFNRVKLGVQKRHYLDAACVGVVEKLSIKITKPLLITAKGWGTRRMCTTNKYGFPIRHRTRQKAFFGFQTGDIIRAILPTGKFAGTHVGRLTVRATGVFEMVTQVGKVSPVRAKYCLAVHRVDGYSYAA

SEQ ID NO: 7025 - protein, 419 aa, unidentified
RPLMPCSPAKARHLLDEGKAKIKKRTPFTIQLVYGSSGYTQEVILGVDAGSKTIGMSASTTKEELLSAEVKPRNDVVDLLSTRREFRRARRNRKTRYRKPRFDNRVRSKHKGWLAPSVEVKIQEHITAIRRVCGILPVSKVVIETAEFDLQLLKAIADGKPVPQGEDYQQGEMYGHYNVRQYVLWRDGYTCQCCGAHATKKKEVRLHVHHLESRKVDGDAPDNQVTLCESCHEKLHKGLIAEKDFKKRKRKSTRDATFMGIMRKTLMQRLCSELPIPVIETRGYITKATREKLLVLPKSHTNDALAIAQGKQGFNVGYLPGIVQINKIYTIRPVRHHNRQLHKATILKGGIRKSNQTEKYVFGYCLFDKVQFNGQDCFIWGRRTTGIFTIKTINGKMIKDGISFKKLKPVEKSTGYLIA

SEQ ID NO: 7026 - protein, 431 aa, unidentified; identical to SEQ ID NO: 2933

SEQ ID NO: 7027 - protein, 426 aa, unidentified
MVFVLDKSKKPLDMISHAKARILLKNRLAVVHKIYPFTIRLRDNSCVGNDKTYTVKFDPGSKHTGVAITDNKDSVVMLAEIEHRGHLIKKDLTSRRMIRRHRRNRKTRYREARFQNRTKPEDWLAPSVKSRANNVINFIKKYKKILNINKVLIERVSFDVAQMTSDTKLWGVAYQQGPLYQTKLKSYLFKKCNGRCIYCGNKAEEIEHIIPKSKGGTNSPYNLVIACKKCNKLKGKSSLKEFGELMNKDYSHLEPKKLPRDASIVQAARNYMVKEITKLVSDTTLHDAWLTKYNRDELGLPKEHYYDALSVGEVPSKFNFLTDKILLISAKGRGSRQMCRVDKYGFPRTSPKGSKSVKGFQTGDMVKAIVPKGLKQGEYLGKVAVRSSGKFDIQTKTKTIEGINHKYCHLIQRGDGYLYSYKEREF

SEQ ID NO: 7028 - protein, 428 aa, Enterococcus sp.; identical to SEQ ID NO: 4335

SEQ ID NO: 7029 - protein, 428 aa, unidentified
MQRVFVLSNAKKPLMPCNPARARRLLKRGKAKVFRRIPFTILLTERKNGETQKLELKFDPGSKTTGIAIVSHGKQISKCIWAANLEHRGNSVRNALESKRASRRSRRGRKTRYRKPRFLNRIRPKGWLAPSLMSRVNNVNTWRNRIQSWCPVTSLTMELVKFDTQKMQNAEISGVEYQQGELSGYEVREYLLEKFGRKCVYCDAKDIPLEIEHVIPKSKGGSDRVSNLTIACNKCNQKKNNKPVEEFLKDKPNVLNRLSTQLKSSLKDTAAVNSTIFKTLEVLKSDGLKVSCSTGSRTKYNRIKQDYPKAHWVDAACVSESGENIFISKKHKPLLIKAMGRGSRQMCRVDKYGFPRTTAKKQKMVKGFQTGDIVLANVPSGKKKGVYQGRVAVRTSGSFNIKTNDTTVQGIGYRYCKLIQRTDGYLYN

SEQ ID NO: 7030 - protein, 427 aa, Enterococcus sp.; identical to SEQ ID NO: 2410

SEQ ID NO: 7031 - protein, 428 aa, unidentified; identical to SEQ ID NO: 7029

SEQ ID NO: 7032 - protein, 418 aa, unidentified
MKVSEMTSYTFVLDADGKQLAPTKEQKAWFLIRKKRATLVSKYPMVIRLKKKIPDKETCKDEIRCGIDDGSLHVGIALVQKCQTRNKVVFMGTIEHRNDVKRLMDAKRGYRHYHRYHKRYRPARFNNRNSSKREERIAPSILQKRQAIIRVINQLNKWINITNYWLEDVAIDIRALTDGYKSYRWQYQKSNRLDENIRKAVILRDGCKCMECGKSNCKLEVHHIKPRRLKGSNTLSNLITLCKKCHQKTEGIEELYMDRYFALLNSSDNKNLNYAQHVMIGKKWLREQLSNLGMLYLTNGGDTANKRIDWNIEKSHSNDAICITNLRPDTCEIKEWTIKPMRRQSKAKTNDIFGIKHRDLVEYTFMNGETHRGYVTALYPEQNALNFQSPTKHCKKVNARKCRLLWKYSKIYWLDNVS

SEQ ID NO: 7033 - protein, 436 aa, unidentified
  REGION 1..436: note = Ga0315285_10005533
MQKLKEKNTYTPTVIPQDCSNCGLSLNSPEGRGSVAGLKTSFNSSDAALTGFRSSGTELESICRKNSFVVYVLNQRGEPLMPCSPGKAKMLLKEGKAKVVKRSPFTIQLTTSTGKAKQDIALGVDCGYSHVGLSAVSRKQELFSAEVNLRDDMVKLNSERRQYRRSRRSRKTWHRKPRFLNRKKDSGWLAPSIQHKLNSSFKLTGKVKEILPITKINVEVAAFDIQKIKDPEIEGEGYQNGVQKNFWNTREYVIFRDNHICQGCKGKSKDPVLEVHHLESRQTGGDIPDNLITLCNTCHRKVSKGKLELSLKLPEGFKAETFMNTVRWKLVNELRELGNSVSHTYGYITKSKRIELGLAKSHSNDAFIIAGGNSQKRTSGYLIQQVRKCNRKLFKGNRSHIRKILLIDLSVAFRDTIRCCGKVLSVLYLVEEKLVF

SEQ ID NO: 7034 - protein, 443 aa, Anoxybacillus sp.; identical to SEQ ID NO: 4812

SEQ ID NO: 7035 - protein, 426 aa, Lactobacillus sp.; identical to SEQ ID NO: 3294

SEQ ID NO: 7036 - protein, 413 aa, unidentified
MVYVLNENGQPLMPTENHVKVRVLLKRSKAKVVNSCPFTIQLLYSSTNYTQPVTLGVDAGSKHIGLSATTENKELYAADVELRNDIARFLAARRESRRSRRNRKTRYRKPRFNNRKQGKGWLAPSIREKTGTHLKAVDDTCKLLPVSKIIVETASFDIQKIKNPDVKGADYQQGEQLGFWNVREYVLFRDGHVCQCCKGKSKDPVLQAHHIESRKTGGNAPNNLITLCKTCHSGYHQGTVKLPAKIKRGMKFNDAMFMGIMRWSFYNQLKARYSDVSLTYGYITKNTRIENGLPKEHYVDARCISGHPLARPLGTVFYIKKVRCHNRQIHKFNILKGGRRKRNQAEYEVYGFRLYDKVSWKGQICFVFSRKSTGYITLRLLDGTCVKESVSYKKIKLLRMRSGYLIELRSVIF

SEQ ID NO: 7037 - protein, 398 aa, Geobacillus sp.
LFVYIINKHGKPLMPCSPRKARLLLKQKKAKVVRRTPFTIQLLYGSSGYKQPVSLGVDMGTRHVGISATTKKDVLFEAEAQLRTDIVELLAIRRQFRRSRRNRKTRYREARFLNRRKPEGWLPPSIQHKINSHIKLIDLVHNILPVTSVTIEVAAFDTQKLKNLNIRGVEYQQGEQMGFWNVREYVLYRDNHTCQYCKGKKKDPVLQVHHIESRKTGGDSPDNLITLCKTCHHEIHEKGLEHIFQRKRPPMRDASQMTAMRWAMFSRIREKYSHANITYGYITKCIRIANGLSKSHMVDARCISGNPLAKPSGTVYLLKFVRKNNRQLHKATILKGGKRKSNKAPRFVKGFQLFDKVVYERKECFIFGRRSSGYFDLRLLDGTKVHASASWKSMLVHC

SEQ ID NO: 7038 - protein, 488 aa, unidentified
MTAKGKAPKVLIAARKGRSRLLTFPRGDTPQSVRYKTRKGIYWSFWKMVFVLDKRKRPLMPCSEKRARKLLDSGRARVHLLMPFCIRLTDRLAEKSEFQTLRVKLDPGSKTTGVALVRETADNGVAVINLFELVHRGKQISEALTARRGHRRMRRSHLRYRAPRFLNRCKQKSGWLAPSLQHRVDTSMAWVNRIQRYAPVSAISSELVRFDMQAMQNPEISGVEYQQGTLAGFEVKEYLLAKWDHCCAYCGDNENSLEVEHIHPKARGGSNRISNLSLACTHCNTKKGAKSIEDFLSHDPKRLAKVLAQAKRPLKDAAAVNATRWALVNALKTTGLVVETASGGRTKFNRKQFCVPKTHALDAACVGELASITGWQKPTLCIKAMGRGSYQRTRLDKYGCVRGYLTRLKSIEGFQTGDLVKAVVTKGKKTGRYTGRVAVRASGNFNIQTGTGLVQGVAHRYCTVVQRGDGYGYSLVAKKDGGRIATAA

SEQ ID NO: 7039 - protein, 442 aa, unidentified; identical to SEQ ID NO: 2903

SEQ ID NO: 7040 - protein, 416 aa, unidentified
MVYVLDKNGQPLMPTDRHRKVRLMLQSGQAKVIKRCPFTIQLNYDSGHQTQEISLGIDAGSKHIGVSATTKIKVLYEADVELRNDIVDLLSSRRELRRGRRNRKTRYRQAKFNNRRRGNGWLAPSIRQKIGTHLTVVENICKILPISRIMVETASFDIQKIKNTDIQGAEYQQGDQLGFWNIREYVLFRDNHTCQCCKGKSKDKILNVHHIGSRKTGGNAPNNLITLCETCHTGYHKGTVQLPKAIKRGMRFKDAAFMGIMRWAFYEALKQQYEPVGTPVHNTYGYITKHTRIEHNLPKEHYVDARCISGNPEASSNGEYYYQKKVRCHNRQIHKLTVLKGGIRKQNQATYLVKGYRLFDKVSYQGKGYFVFGRRQSGFFDIRTLSGEKVNKGSLSCKKLKFIATRTYYLTERRAV

SEQ ID NO: 7041 - protein, 456 aa, unidentified
MSTCVCVLTNNGERLMPTFRLGKVRHLLKDGKAKIVKHHPFTIQLLYDSKTNTQPIETCEDVGYNYIGISVKSESHEYVSAQYDTLQDEKEHHDDCRKYRRTRRNRLRYRKSRFDNRKRDKGWLAPSLEHKKHLNISLIERYVSVIPITHVTVEVGSFDTMLLQSIQKGEAKPEGADYQKGPRYNLATLREAVFYRDNYTCQVCKRKIADGAILHMHHMFYWKGRHGYQLDELVTVCEKCHTPANHQKGGKLYGFGKDKKFANLSGAAFMNAVRWQIVNALYATYGKEFVTITYGAMTKEKRIALQLEKTHNNDAYAMGDYHPACRCKFIHYQKRRRNNRVLEKFYDATYIDTRTGNKAKGKELFNGRISRNHKKDCKNLHKYRSKKVSKGRRSIRRQHYAIQPYDTVRLEGKTYITSGCHNKGTRLLIPVNGKSKSVAISKVQVVCHAGAWIQII

SEQ ID NO: 7042 - protein, 465 aa, unidentified
MSTCVCVLSNNGERLMPTIRLGRVRHLLKDGKAKIIKHHPFTIQLLYDSKTNTQPIEICEDVGYNYIGISVKSKSHEYVSAQYDTLQDEKEHHDDCRMHRRTRRNRLRYRKPRFDNRKRGEGWLAPSLIHKKELNVNVVKMYCAVMSITHATVEVGSFDTMLVKAIQEGKVIPEGADYQKGPRYNLATLREAVFYRDNYVCKICGRKATEGAILHMHHMFYWKGRHGNSLDELLTVCEKCHTPANHQKGGKLYGFGEDVKFADLSGAAFMNTVRWQIVNELYVAFGKPFVTITYGAMTKEKRIALQLEKSHNNDAYAMGEFHPNLRCMFEHYEKARRNNRILEKFYDSRYIDIRTGEIATGKELFNGRINRNHKKDSENLHKYRGKRTYAGHRALLRKKVNLNPGDLVSLNGENLIVHSTHTKKNGAVNVEFETPAKSGQKSASLKKLKIVKAANSIHPAWKKIS

SEQ ID NO: 7043 - protein, 447 aa, unidentified
VSLEELPTLNKVEANLTCKKDAAMQNYVFVIDQNKQPLNLIPPARARELLTKQKAAVFRMYPFTIILKHAVANPLPKPLTIKIDPGSKVTGIAIFDGENVIWVAELEHRGGQIKNALLSRRSLRRSRRNRKTRYRPARFDNRKRKEGWLPPSLMHRVLTVETWVKRLCRYAPITQVVMELVRFDTQKMQNPEIDGVEYQQGELAGYEVREYLLEKWGHNCVYCDKQDVPLQIEHIYPRAKGGSNRVSNLTLSCEKCNSLKGILLIDEFLKKDLTRLERIKRQSKTPLKDAAAVNSTRWKLYNTLKEMLPITTGTGGQTKFNRIRFGLKKQHWIDAVCVGNIEAIKLLTQQPLRIKCTGWGTRKMCSTDEYGFPIRHRDSNQVHFGFRTGNIVKAIVTSGKKVGEYVGRVLCRKTGSFDIATKTGRVTGISHRFCTSIHKKDGYSYVF

SEQ ID NO: 7044 - protein, 431 aa, unidentified
MPNKVYVINKHGRPLMPCSPAKARHLLDEGKAKIKKRTPFTIQLVYGSSGYTQEVILGVDAGSKTIGVSASTKKEELFAANVIPRNDVVDLLSTRREFRRARRNRKTRYRKPRFDNRVRSKHKGWLAPSVEVKIQEHITSIKRVCRILPVSKVVVETAEFDLQLLKAIADGKPVPQGEDYQKGEMYGHYNVRQYVLWRDDYTCQCCGAHATKKKEVRLHVHHLESRKVGGDAPDNQVTLCESCHEKLHKGLITEDDFKKRKRKSTRDATFMGIMRKTLMQRLCSELPIPVVETRGYITKATREKLLVLPKSHTNDALAIAQGKQGFNVGYLPGIIQTDKIYTIRPVRHHNRQLHKAAILKGGIRKSNQAGKYVFGYRLFDKVQFNGQDCFIWGRRTTGIFTIKTINGKMIKDGISFKKLKPVEKSTSYLIA

SEQ ID NO: 7045 - protein, 421 aa, unidentified
MQYVYVLNMHGEPLMPCSPQKARLLLKEGKACVVKRTPFVIKLLYGSAGYKQPVVLGVDSGSRHIGLSACTESRELYKEELEPRNDVVELLSARRQYRLSRRNRKTRYRAPRFDNRVHSKHKGWLAPSVEVKIQEHITAIKRVFRILPIVLVRVETAEFDTQRLKAMLEGRPLPVGIDYQRGEMYNEYNVRQYVLKRDRYVCQHCGAHPTPEKPVRLHVHHLETRHTSGNAPNNLIVLCEHCHKELHEGKIKLDKGKKRGKSLRDAAFMGIMRNTLLARLETELSVPVQQTYGYITKLLREENHIEKSHTNDARCIAGFPEASPCDTLYCTRAIRHHNRQIHKAKILKGGIRKKNQAPYLTNGFRLWDKVRYNGEECFIAGRRSSGYFALKKYDGTVISSGASYKKLTLLEAAANYITERS

SEQ ID NO: 7046 - protein, 431 aa, unidentified
MPNKVYVINKHGRPLMPCSPAKARHLLDDGKAKVKKRAPFTIQLVYGSSGYTQEVILGVDAGSKTIGMSASTTKEELLSAEVKPRNDVVDLLSTRREFRRARRNRKTRYRKPRFDNRVRSKHKGWLAPSVEVKIQEHITAIRRVCGILPVSKVVIETAEFDLQLLKAIADGKPVPQGEDYQQGEMYGHYNVRQYVLWRDGYTCQCCGAHATKKKEVRLHVHHLESRKVDGDAPDNQVTLCESCHEKLHKGLIAEKDFKKRKRRSTRDATFMGIMRKTLMQRLCSELPIPVIETRGYITKATREKLLVLPKSHTNDALAIAQGKQGFNVGYLPEIAQIDKIYTIRPVRHHNRQLYKATILKGGIRKSNQTKKYVFGYRLFDKVQFNGQDCFIWGRRTTGIFTIKTINGKMIKDGISFKKLKLAEKSTSYLIA

SEQ ID NO: 7047 - protein, 458 aa, Lactobacillus sp.
LKGVGMMSEIKKVDYIYIVDSNGTPLMPTSRLGMVRRWLKTGQAKWFGNSRNTIQFVRPVTTNTQELTLGVDAGFHLGLSVVGNNREYYVSESLRKSEKDRITSRRELRRTRRNRLRYRKARFNNRRRKDGWLAPSIQHRLDFTIKEIKRLYKFLPITNLVVEVTPFDNQKLLNPDIQGWQYQKGKMYGFKTIKDYLLARDNYRDALDGKQYPASQLRVHHLVQRKDGGSNQPDNLVLLSDINHNQSNHNNGILAKLRENRQKTLDYRGAYFMSILATRLSNYFEHYTTTQGYLTANLRQKYEIKKSHLNDAFIIAGGTDTTLRTNNVYSRQKLRNNNRVLQKFYDAKYIDSRDGKKKTGKELSSGRTRRSRELNYTNLRQFRKEKVKKGRVSIRRGHYQLRPHDVVLNTRTNRIETVKGVQNSGTVIKFQTGKTCSIKSVVSLYHVNGILEKKMKNI

SEQ ID NO: 7048 - protein, 502 aa, unidentified; identical to SEQ ID NO: 6049

SEQ ID NO: 7049 - protein, 451 aa, unidentified; identical to SEQ ID NO: 6777

SEQ ID NO: 7050 - protein, 416 aa, Lactobacillus sp.
QARWFGNSRKIIQFVRPVTTNTQELTLGVDAGFHLGLSVVGNKREYYASESLRKSEKDRITSRRELRRTRRNRLRYRQARFDNRRRKESWLAPSVQHRLDFTIREIKRLYTFLPIAKLVVEVTPFDNQKLVNPNIKPWEYTQGKLHGFKTIKDYLLARDNYRDALDGKQYPANQLRIHHLVQRKDGGTNQPDNLVLLSDINHSQANHNNGILAKLRENRQKVLDYRGAYFMSILATRLGDYFDEYTTTQGYLTANLRQKYQLEKSHLNDAFIIAGGTDTTLRTNNVYSRQKLRNNNRVLQKFYDAKYIDNRDNKTKTGKELSSGRTRRSRELNYINLRQFRKTKIKKGRVSIRRKHYQLRPHDVVLNTKTNKIEIVKGVQNSGTVIKFQTGKTCSIKNVVSLYHVNGMLEKKIEAI

SEQ ID NO: 7051 - protein, 433 aa, unidentified
MYVYVYVVNKNGNPLMPCKPAKARHLLDDGRAKVVRRTPFVIQLLWDCEENVQPIELGIDSGYSYIGYSATTMIDGDRRKKELISGKVILRNDIPKKLIERRQYRRNRRSRLWHREPRFLNRTHSEKKKGKGWIPPSLQHKINSHIRIIELLRNILPIAEENITIEIASFDTQKMKNPEIKGVEYQQGELQGYEVREYLLEKWGRKCAYCGKTNVPLEVEHIIPKSRGGSDRVSNLTISCHRCNQKKGNKTAEEFGYPNIQKKSKESLKATAFMNNVRRKLVDVLGCKSTYGYITKHDRIKAGLEKSHANDAFVIAGGGKSKSKGEEDRAISYIVTQRRRNNRSIQMNRKGHKPSIRRIRYDMQPGDLVRFNGKEIKKGEEIKKGLLYEVKGVFNYGKWIRLVNEIGDVINTNIKNVEMVKYGKGLQFKLKVG

SEQ ID NO: 7052 - protein, 434 aa, Lactobacillus sp.; identical to SEQ ID NO: 6197

SEQ ID NO: 7053 - protein, 431 aa, unidentified
MPNKVYIINKHGRPLMPCSPAKARHLLDAGKAKVKKRTPFTIQLVYGSSGYTQEVILGVDAGSKTIGMSASTTKEELLSAEVKPRNDVVDLLSTRREFRRARRNRKTRYRKPRFDNRVRSKHRGWLAPSVEVKIQEHITAIRRVCGILPVSKVVIETAEFDLQLLKAIEESKPVPQGEDYQQGEMYGHYNVRQYVLWRDGYTCQCCGAHTTKKKEVRLHVHHLESRKVGGDAPDNQVTLCESCHEKLHKGLIAEKDFKKRKRKSTRDATFMGIMRKTLMQRLCSELPIPVIETRGYITKATREKLLVLPKSHTNDALAIAQGKQGFNVGYLPEIAQIDKIYTIRPVRHHNRQLYKATILKGGIRKSNQTGKYVFGYRLFDKVQFNGQDCFIWGRRTTGIFTIKTINGKMIKDGISFKKLKLAEKSTSYLIA

SEQ ID NO: 7054 - protein, 521 aa, unidentified
MNYIDFVFVTDKDSLPCNPINEGYAGKLLRTGKAKIVNHDPLVIKRLDDYSSKNENRHTITLKVDTGFGNIGFSASDDKHEYIAGQVELLSGISDRLVTKKGYRTQRRSRLRYRRNKNIDYKTVNNPTYKNGNKDGWLAPSVIHKIESHVRVIDRIASWIPIDKVIIETANFDIQKIKATLNGTAINGIDYQKGEMYGFENAKQYVRERDNYTCQICKEKLTDKRHVVIEVHHIIPRSKGGSNKPDNMISLCHCCHKKVHENNNDNKLFRELRQRKIINTYKDATFMNTMRWELYNRLKENYDVSMSFGYITRMNRKNAGLEKYHYTDAVCISEYHKITLTKNIYLVEQKRCNDRCMESFFDAKYIDSRDGKVKKGSELCKSRVATASSKRSTKKEDIDNKRIYRQEKVSKGKRRYENHSYCLKPGDLIYINYGNHKGNIAEVTTMQKNPNGTYKIVFSYANPKCKIPSINIKEKEYVELTHNQCEKIKIVRTRRGMIWRKVNRLEFEENTTEQIDRKVKK

SEQ ID NO: 7055 - protein, 425 aa, unidentified
MSVFVLDKRGKPLMPCSEKRARLLLERSRARVHRVVPFVIRLTDRLAVHSEFQPLLLKIEPGSKKTGFALVRKTEAGAAVLNLFELVHRGRQISEALAARKNFRRRRRSANLRYRSPRFHNAGRQEGWLAPSLKHRVDSTMSWVTRLSRWAHISRLASELVRFDMQVIHALEIAGTAYQHGELSAHEVREYLLEKWGHRCAYCEAEGVPFQLHRIVSQAQGGTNRVSNLTLACAPCATSCSQDTEGVTGEIRREHLLRRAKAPYTDAAVINGTRRALVERLKHTGLPVDLSSGARTKWNRVRLNIPKSQALDAACVGSVESVSGWQRPTLQIRCMGRGSYQRTRLTAQGFPRGYLTRSKRVHGFQTGDRVMAKVSAGKKAGIHVGRVAVRATGSFNIQTPQGVVQGVSHRHCVILQRADGYNYSM

SEQ ID NO: 7056 - protein, 469 aa, unidentified
MVFVLDKHKKPLMPCTEKRTRLLLQRGSAVIHRMAPFTIRLKDRTLEESQLQPLRLKLDPGAKITGFAVLREDSSDRSTALILGEIRHKPGIKDRLDKRRALRRSRRSRKTRYREPKELKGRGKEGRLAPSLEARVSQTMSAVQKLCRSLPISAISTEHVKFDIQLMQNPEISGIEYQQGTLFGYEVKEYLLEKWNYRCAYCGAENVPLEVEHVIPKRPKHGPKGTDRISNLVMACRECNEAKDNRQPEEWLEKLRESKKVIDQRRAENLPKVLQQLKEPLKDTAMMNATRWRLYERLKGTSLPVECGTGARTKKQRLEHGFSKTHYYDACCVGASTPADIVINQRYVHVWSAVGRGTRKMCNTDAHGFPIGHRERKKSIFGFQTGDLVIADIPKGKYAGRWIGRVAVRASGYFDIKDGLGKRICQGISHKYMKVLQRGDGWQHEKIRVEKGGSGASSPGVNAGASGAA

SEQ ID NO: 7057 - protein, 431 aa, unidentified
MPDKVYVISRLGHPLMPCSPAKARHLLDDKKAKVVKRMPFTIRLLYGSTKYIQPIILGVDAGSKTIGLSASTAKGEVFAAEVMPRNDVVENLSTRREFRRARRNRTTRYRKPRSDNRVRSNHERWLAPSVKVKIQEHITSIKGVCTILPISKVVIETAEFDLQLLKAIQEGKPIPEGEDYQKGEMYGSYNVCQYVLWRDNYTCICCGVRGTPKNPVRLHVHHFESRKYGGNAPDNHGTLCDDCHKKFHLGIIADVKLKTRRRQSTRDAAFMGIMRKTLMWRLRTELFIPVAETKGYITKATREKLLVLPKSHTRDALAIAQGRHGFSIKEYAYVEPANHIYTVRPVRHHNRQLHKASILKGGIRKRNQASKYVFGFRLYDKVLYQGKACFVWGRRTSGTFLLRTIDGIKVKDGVSYRNLTLLERSSNYLIA

SEQ ID NO: 7058 - protein, 450 aa, unidentified; identical to SEQ ID NO: 2935

SEQ ID NO: 7059 - protein, 512 aa, unidentified
MSTVYVLNKNGKPLMPTTRCGHVRRLLKEQKARAVASKPFTIQLLYETDDVVQPLYLGIDPGRTNIGVAVVKADGTAVFTAHLETRNKEIPKLMKKRKDSRRARRTNGRRCRRQRRAKANGTLSKKCVKQTTAQNGSVSKRAKKIGVIKRHLPGCEKEALCIGIKNKEAKFNNRTRPEGWLTPTANQLLQTHINLVKKIQKFLPISDVVLEVNKFAFMRLDNPNIQKWQYQQGPLYQKVSLEEAVSEMQEHHCLFCKNTIDHYHHVVPQHKNGSNTIDNIVGLCTKHHDLVHKETAWQEKLAKKKTGLNKKYGALSVLNQIILALTKGLSFLFPKHFFVTTGKNTYDYRTAHSVSKDHWLDAYCIACSVLPNDVCDSSINSHVPYELKQFRRHDRRALHKENMSRVYTLNGKKVATNRHKAIEQTTDSLEEFRQRQPNDVYKLKVKEHHPEYRNPKRNFPGCVFLVGKRTHVMQGTSGSHNGKADGYYDTNGNSYSSGKCKFVAKNEGIVFA

SEQ ID NO: 7060 - protein, 420 aa, unidentified; identical to SEQ ID NO: 6017

SEQ ID NO: 7061 - protein, 435 aa, unidentified
MTKTLTTRTTQACVLDQQGRPLMPTTRLGKVYRLLKTQKAHIVSYEPFTIQLDYEPDTQVIQPMTPGVDSGAIHSGYSLTNEHREYYSAEVVARNDISNRLSDRRMCRQNRRSRKTRYRQPRFNNRKNQKKGWLPPSLEQKVTVQVNEINHIHRYFPIDTIIVETAEFDIQKIKNPDISGIEYQQGTLQGYNIRNYLLEKHGRRCFYCGKAVSDFEVEHMFPKSKGGSNRIDNLTLSCHDCNEKKGTLTAEEFIQQTLPAKKATAKLKQLPQEKRLFKYMAYMNATRWALYDAIKERYPNVKMTYGYITKYNRIQAGLPKAHHIDAKCITGFPTVPSIDQTVVKVKMRRHNRQLHRATFSKGHVRKAACLPTTVFGFQLYDLVLFNNHRYYIKGRRSSGSFALVSVEGLKDENRSYKKLTLLAHTNTYLTNHYVN

SEQ ID NO: 7062 - protein, 458 aa, Lactobacillus sp.
LKGVGMMSEIKKVDYIYVVDSNGTPLMPTSRLGMVRRWLKTGQAKWFGNSRNTIQFVRLVTTNTQELTLGVDAGFHLGLSVVGNNREYYVSESLRKSEKDRITSRRELRRTRRNRLRYRKARFNNRRRKDGWLAPSIQHRLDFTIKEIKRLYKFLPITNLVVEVTPFDNQKLLNPDIQGWQYQEGKMYGFKTIKDYLLARDNYRDALDGKQYPASQLRVHHLVQRKDGGSNQPDNLVLLSDINHNQANHNNGILAKLKENRQKTLDYRGAYFMSILATRLSNYFDNYTITQGYLTANLRQKYEIKKSHLNDAFIIAGGTDTTLRTNNVYSRQKLRNNNRVLQKFYDAKYIDSRDGKKKTGKELSSGRTRRSQELNYDNLRQFRKEKVKKGRVSIRRGHYQLRPHDVVLNTRTNRIETVKGVQNSGTVIKFQTGKTCSIKSVVSLYHVNGILEKKMKNI

SEQ ID NO: 7063 - protein, 422 aa, unidentified
LNKRGKPLMPCSPAKARLLLKEKKAIVVRRTPFTIQLTIATGESKQPVSLGVDAGYKHVGLSASTEKAELYASEVELRKDITDLLSARRALRQSRRNRKTRYRAPRFDNRIRTKRKGWLAPSVENRINAHLSRIEAVLRLLPITKITVETASFDMQRLKNPDISGKEYQEGEQLGFWNVREYVLFRDGHVCRHCHGRSKDPVLNVHHLESRRPGSDSPDNLITLCVTCHKALHRGEITLKAKRGQSFRAQAFMGIMRREVLNRLKASYPELKVHETYGYLTKHARIANGIVKSHGADAFCIAGNLGAERLGEFFFQKQTRRNNRQIHKLSILKGGIRKRNQAPFEAKGFRLFDKVACQGEEGFIFGRRSSGSFDVRKLDGTRISAGISCKKLRLLEKRRTYLTEIRKEEALPPLPEGRGLRA

SEQ ID NO: 7064 - protein, 427 aa, Parasutterella sp.
LRVFVLNKRGKPLMPCSPAKARLLLKEKKAIVVRRTPFTIQLTIATGESKQPVSLGVDAGYKHVGLSASTEKAELYASEVELRPDVSDLLSARRTLRQSRRNRKTRYRAPRFDNRIRTKRKGWLAPSVENRINAHLSRIGAILRLLPVTKITVETASFDTQLLKNPDISGKEYQEGEQLGFWNVREYVLFRDGHACQHCHGRSKDPVLNVHHLESRRTGGDSPGNLLTLCETCHKALHRREIKLKTKRGQSFRAEAFMGIMRWEVLNRLKASHPELEVHNTYGYRTKHTRIVNGIDKSHCADAFCIAGNLGAKRLGEFFFQKQTRRNNRQIHKLSILKHGLRKRNQAPFEVKGFRLFDKVVCQGEEGFIFGRRSSGSFDVRKLDGTRISAGISYKKLRLLEKRRTYLKEIRKEEALPPLPEGRSLRA

SEQ ID NO: 7065 - protein, 433 aa, Anabaena sp.; identical to SEQ ID NO: 3939

SEQ ID NO: 7066 - protein, 768 aa, unidentified
MSTGLRAVQAEPAGIRKGDALKVFVLNMRGRPVMPCSPARARHLLKAGKAVVRHRTPFTIQLRIATGETKQSVTLGVDAGAKHVGLSVATEKEEVFASEVELRQDITGLLAARLSLRRDRRHRKTRYRAPRFLNRVRSKHKGWLAPSVENRIQAHMSRIDAVCRLLPVTKIVIETASFDIQKIKDPSVEGTDYQQGDQLGFWNVREYVLFRDGHVCQHCHGHSKDKILNVHHLESRQTGGDAPNNLITLCERCHKACHAGKIKLKVKRAQSFRAEAFMGIMRWTLLDRMRKAHSGLPVENTYGYLTKNTRITPGLPKTHCVDAYCIAGNLKAVRRGVYLHQRQVRKHNRQIHKCTVLSKTLKDGTKIGYRKLNQTPHLVKNFRLFDKVRCLGQTGFIFGRRSSGCFDVRRLDGVKLSSGISYRITLLEKRGTHLTELIKEDGASSSVRRQRFLRRVSMNKPCTYLLSALMASAVLAPVAASAADKSELEVRMEAAQKVLADRSYYERWSPEAALKTVEDAKAANEAGSARQKEIDGALDVMKDWCHTRFLVNACIKDARDLHHEREKEIRSVRLKADEMIRLDRVEQRRARQESQKQNVKQPMKLGGSTESPESRSESRAEEVKTKQSRAEERRALEEANVRAYEEKQARAARKAEERHDPIRVKSRVKAPSSPIEGHLGRTAADVEAGRAEAAERMAQEDANIAAFNAKQAEAKKRLEEAEATAAERKASREARQANFNKTLEERRAAQKRYEESRENKDSGLKKYF

SEQ ID NO: 7067 - protein, 440 aa, Lactobacillus sp.
MKGKKAMQNRVFVINKHGKALMPCKPRKARILLRDGKAKVLKKEPFTIQLLYGSTGYKQDISVGIDSGQRYIGLAVTSQNKVLFQGEVELRQDVKKLIDTRRTYRRSRRNRKTRYRKSRFLNRIAKKKDNWLPPSVASKVNHNINWIKRLLSVLPKADLHIEVGKFDMQKMKNPEINGEGYQQGDLYGYQTVKQFVLARDNYTCQVCKKKGGKFKIHHIIYRSLGGTNTVNNLTTVCSNCHTTKNHQTGILAKWCKDKMKVNKSYKGATFMNILKRRLFLAFPQAKFQYGSWTILQRVDLDLTKSHYNDAVAISGIRKVKAKPTSIMMFKQFRKKKRSLHEATARKGRKTPNITSKRNAKNTKYAKGFWLNDYVKIKDSNKKGYISGFMSKGTNVRLRDIFGEYVSNSDKSYTSTKNISLINHSNNWQKQVITEKQYIMG

SEQ ID NO: 7068 - protein, 422 aa, unidentified; identical to SEQ ID NO: 3542

SEQ ID NO: 7069 - protein, 442 aa, unidentified; identical to SEQ ID NO: 3791

SEQ ID NO: 7070 - protein, 443 aa, Anoxybacillus sp.
MVEENMTCFMQRKGENPMVFVLDTNKCPLAPCHEAVARKLLKQGKAAIYKRYPFTIILKEIVDNFRPKTPYRLKIDHGSKHTGLAILRGQEVVWLGQLDHRTDIKERMDKRRAFRRARRNRKTRYRKPRFLNRRRKDGWLPPSLESRVQNIQTWVNRLKKLCPIGYISYENAKFDTQLMRNPEISGIEYQQGTLQGYEVREYLLEKFGRKCCYCGKENVPLEVEHIIPKSRGGTDRVDNLCLACHDCNQRKGSKTAEEFGYPHIQKQVKESLKDASAVNSTRWKVYEVLKQSGCEVECGTGARTKMNRIRLDLPKTHYFDACCVGESTPNHLYFKTKEVLFIRAKGRGSRSRTNLDRYGFPRGYLARQKFFFGFQTGDMVKAVIPRGKYQGVWFGEVACRKTGSFDIKGKDGKRIAQGINYRYVQVIQRFDGYAYGKGVAELA

SEQ ID NO: 7071 - protein, 490 aa, unidentified
MYVVYVLDHQGKPLMPTKRFGHVRRMLKTGKAKAISTKPFVIQLQYESTDFVQPLYGGTDPGRTNIGEAVLNNKGEVVYAAYVITRNKEIPKLMADRATHRRASRRGERLRRKRRAKANGTMTCFPEGRKLSGYKDGVLKLKGIINTESRFNNRKRPTGWLTPTARQCVQTHLNMVQNICKILPVTDWTLEYNRFAFMRLEDDSVRGWDFQNGRLKGYASKEDYIYALQGGVCICCGASIEHYHHIKPRHKGGSDTPENLVGLCSVCHTEIHTGKRSLDKIGKYKEYAETSIVNIAIPFIWDGIVKMFGDKAHICEGQETAELRKANSIPKEHFADAVCIAGIGSGIIPQYDDNQPFELRQFRCHNRSSINAQVERTYLEGKTIVAKNRKPRFEQKGDALSDLQSKMTKEHGELAARRVVSKFVVKKSYRRYNASERIKPSAVFVFNNKKYLLSGQLTNGMYYRAFGEGTKNFPSRNCELVSFGCSLTYM

SEQ ID NO: 7072 - protein, 430 aa, unidentified
LETRNKEIPKLMQDRKKARRARRTNGRRCRRQRRAKANGTISKKCVKQTTAQNGSVSKRAKDIGVIKRRLPGCEKDVLCIGIKNKETKFTNRTRPEGWLTPTANQLLQTHINLVKKIQKFLPISDVVLEVNKFAFMRLDNPDIQKWQYQQGPLYKKESLESAVSEIQEHHCLFCKKPIDHYHHVVPQHKNGSNTIGNIVGLCAKHHDLVHKDSAWEKKLAKKSTGLYKKYGALGVLNQIIPTLTNELSSLFPKHSFVTNGKSTYDYRAAHGVSKDHWLDAYCIACSVLPSNVCDSNINNHMPYVLKQFRRHDRRVLNNENMNRVYTLNNKAVAINRHKAKDQKTVSLEEFRKEHPDDVCKLKVKEHHPTYRNMNRNFPGSVFLVGKQIHVMQGIASSKDGKATKYNDTSATAIAARKCKFVAKNTGILFV

SEQ ID NO: 7073 - protein, 425 aa, Moorena sp.; identical to SEQ ID NO: 4593

SEQ ID NO: 7074 - protein, 441 aa, unidentified
MLFERSKLMVYVISKSGKPLMPTKRYAKVRILLKEKKAKVVQRKPFTIQLLYETKEYTQPISLGIDSGYTYIGFSAITEKEELISGEVELLSGISERLKQRAMYRRQRRSRLRYRKPRFDNRIRPEGWLAPSIQHKYDTHIRFIEKLKKILPITDITIEVANFDTHKLKNPNISGIDYQEGEQQGFFNLREYILHRDGHKCQVCGAEDVPLEVHHVGYWKRDRSNRPANLVAVCTKCHLPKNHQRNGKLWGLKPINKGFKEATFMSTIRWRLVNEFDCKHTYGYITKSRRIELGLDKSHANDAFVIAGGENQERADMINFKQIRRNNRSLEKFYDAKYLDTRIGKKASGKELSSGRKVRNKSFNDENLRQYRGHKISKGRRSIRTKRYFYQPNDLVKYDGKIYIVKGTHNKGTRVILKETGKSVKADKLEPYKFMSGLVAI

SEQ ID NO: 7075 - protein, 442 aa, unidentified; identical to SEQ ID NO: 3234

SEQ ID NO: 7076 - protein, 423 aa, unidentified; identical to SEQ ID NO: 3538

SEQ ID NO: 7077 - protein, 468 aa, unidentified; identical to SEQ ID NO: 3693

SEQ ID NO: 7078 - protein, 420 aa, unidentified
MLLREKKAAVHRKSPFTIILKDRTDGDTQPVEFKVDPGSKVTGIVVVADYGKRGKTVIWAEELQHRGQTIKDALDSSRAIRRSRRNRKTRYRAPRFDNRTRPAGWLPPSLMSRVHNVTTWALRLQRFAPLASIAVETVRFDMQKMVSPEISGVEYQQGTLAGYELKEYLLEKWGRKCAYCNKKNLPLHVEHVIPKTRGGTDRVSNLTLSCEGCNHKKDNLTAAEFGHPEVQKPALAPLKDAAAVNTTRYAIGNALKSLGLPVSFWSGGRTKFNRTQQGYPKAHWIDAACVGETGEHVKLDSSAQMIQVKATGHGSHQMCRMDRFGFPRTSAKTTRVVNGFRTGDIVRAVVPYGQKTGTYDGKIAVRASGSFNVSTATGVVQGISYKYCSVVHRADGYSYLTNTGAPLGNELPSIRAQELS

SEQ ID NO: 7079 - protein, 415 aa, unidentified
MVYVLNICMDPLMPCKEAKARKLLKSGKAKIIKRNPFTIQLLFECENVTQDIVLGVDAGSKHIGLSATTDKKELYAAEVELRNDIVDLLSTRRENRRTRRNRKTRYRKPRFENRMRNAGWLAPSVQNKVDTHLTVVRRLHEILPITRIIVEVAAFDIQKIKNPDIDGTEYQQGEQLGFWNVREYVFFRDGHTCQCCKGKSKDKILNVHHIESRKTGGNAPNNLVTLCETCHKGYHEGKVKLSKNIKRGMSFRDAAFMVIMRWAFYNQLKKLYPNVSLTYGYLTKNARIRNELPKTHCVDARCISGHPLVEPLGYYFYQKKVRCHNRQIHKNTILKGGYRKRNQAPYTVKGFRLFDKVLYNNQECFIFGRRSSGYFDLRKLDGTKIHASASYRKLKLLETRKTMLCERRLAIPPTV

SEQ ID NO: 7080 - protein, 435 aa, Moorena sp.
MQNYVFVIDTNKQPLNPISPKKARRLLDKGKAAVFRMYPFAIILKTAIENPVVTSCQLKIDPGSKVTGFALVQNNQVIWGMELEHRGGLIKKKLESRRAVRHRRRNRNTRYRKPRFLNRRRKEGWLAPSLEHRVLTIETWVKRLIKFCPVNEVWVERVKFDTQKMQNPEINGVEYQQGELAGYEVREYLLEKWGRECTYCGKQSVPLQIEHIHPKSFGGSDSAKPTLRERVSNLCLACEKCNQRKGNKPIEKFLKKKPSLLQKIKTKAKQPLKDAAAVNATRNKLLKVLYNIKSVITGTGAQTKYNRTKLGFPKEHWIDAACVGDIETLVLRTSQPLLVTCKGPGGRQKAALNKYGYPIRHNPLKPIKGWVTGDIAKHQKLGIGKVTPRSKGSFGFTPLGMKGYKSCKPQDISAIHRKDGYIYSFCKYLPEFARE

SEQ ID NO: 7081 - protein, 429 aa, Ktedonobacter sp.; identical to SEQ ID NO: 6384

SEQ ID NO: 7082 - protein, 428 aa, Enterococcus sp.; identical to SEQ ID NO: 4335

SEQ ID NO: 7083 - protein, 533 aa, unidentified
MPSLWRHCESRKQCGTVVYSHLLTRTLRKETAMPANIYVLNHDGTPLMPSHSHGRVKRMLHTGKARIAGTKPFTIRLTYQIDTPVIQPVILGMDPGRTNIGNCAVETSGKVLYASLVETRNKEIPKLMGERKGHRQMSRRGERKRLQRRAIRADKTGMARATEYWRMLTGQKKPIRCKVIRNQEVKFQNRKRPIGWLTPTAEQLARTHLNVVRKIQKILPVSAVVIEINRFDFARMENPDIENWEYQQGRLAGYADVREAVSRQQKGKCLLCGRKQIEHYHHIVPKSRGGSESIDNYAGLCMTCHEKVHQDEIARGKLQSKKKGIQKKYHALSVLNQIMPVLLRELPKLVPAFITTGYETHRIRDSVGLQEKQKDDDTHYMDAWCIAMSIVGTYETEPDFSGLYRMKQFRRHDRAKIKAQKERTYYHNGKAVAKNRHKRTGQADAKVPFPSLAEYLQEHPEHKGRLTVRKSTRSYNNIKRNLPGTVYTECGNPFVLRATQSNGTRLYGMGEGMDYHKTVRCKLSHHNAGLVYI

SEQ ID NO: 7084 - protein, 427 aa, Fischerella sp.; identical to SEQ ID NO: 3596

SEQ ID NO: 7085 - protein, 419 aa, unidentified; identical to SEQ ID NO: 4877

SEQ ID NO: 7086 - protein, 420 aa, unidentified
MQYAYVLNKRGEPLMPCSPGKARILLKQQKACVVKRTPFTIKLLHGSAGYKQPITLGVDAGSKHVGLSASTEKRELYSEEFTPRNDVVELLSTRRQNRRSRRNRKTRYRAPRFNNRVHSKHKGWLAPSVEVKIQEHITVIKRICRILPVTLVRVETAEFDMQRLKAMLAGKPLPVGTDYQLGEMYDEYNVRQYVLKRDNYTCQCCGAHTTAKKAVKLHVHHLESRKVGGNAPSNLITLCTTCHNNLHKGKITLDGKKRGKTLRDAAFMGIMRNTLLTRLRNELHIPVQNTYGYITKLLREQNDIKKSHVNDARCISKHPLAEPCSICYRTKAIRHHNRQIHKAKILKYGIRKANQAPYIVKGFRLWDKVLYNGQECFISGRRTSGYFALRKLDGTTITNSISFKKLRLLEPATNYLIERK

SEQ ID NO: 7087 - protein, 353 aa, Arthrospira sp.; identical to SEQ ID NO: 3451

SEQ ID NO: 7088 - protein, 492 aa, unidentified; identical to SEQ ID NO: 4486

SEQ ID NO: 7089 - protein, 442 aa, Anaerostipes sp.; identical to SEQ ID NO: 2903

SEQ ID NO: 7090 - protein, 456 aa, unidentified; identical to SEQ ID NO: 3342
  REGION 1..456: note = Ga0315284_10003977

SEQ ID NO: 7091 - protein, 419 aa, Anoxybacillus sp.; identical to SEQ ID NO: 5328

SEQ ID NO: 7092 - protein, 442 aa, unidentified; identical to SEQ ID NO: 2903

SEQ ID NO: 7093 - protein, 449 aa, unidentified
MSTTLARGESGGSMAGEVIHQRRHKVMAYVAVLSASGKSLMPTTAYKARKLLKSGRAKIYSYRPLFTIQMQDREEGTTQPIEMKVDTGAQYIGVSVCSEKHEYWNRRYDMLPNEKEMHDEARKNRRNRRQKLRYRAPRFDNRTHGHNRKEDKWFTPSLKHRENIHIQLAAKICAVVPVTDAYFEMGQFDIQVLKAYEAGKPIPVGDDYQKDERYGYATLREAIFARDNYTCQVCGAKLDDKHHPILRMHHIGYWKHDHSNRMGNLMTVCIKCHTAANHKPGGKLYGLEPELPTFKGAAFMNTVRWNMFTQLKKTLPNVKCHITYGAMTKLKRSELNTRKTHSNDAYCMGTLHPKWRTDFQHYQKVRRNNRVLSKFYDAQYIDTRDGEKMSGSQLSCGRTKRSESRHSIKNLRGYRGHRATSKGKKPNQHRRHCNRPRQEADGFWHTALR

SEQ ID NO: 7094 - protein, 443 aa, Anoxybacillus sp.; identical to SEQ ID NO: 4812

SEQ ID NO: 7095 - protein, 442 aa, Lactobacillus sp.
MKHENANRVFLLNKDGKPLMPCRPRKARLLLKSGKAFVVKKYPFTIQLKYGSYGYKQKVSIGVDTGQRHIGFAIVSQNKVLHQSEVELRQDVHKNLYTRKIYRRSKRNRKTRYRQARFLNRVHGKRDGLWLPPSIKGKVSHNIAWIKRYLAVLPNPDLHIEVGKFDMAKMVNPRISGKQYQEGSLKDWKNYEYYVLARDEYTCQLCHKHGEGVKLVVHHIVYRSQGGTDRVDNLITLCTNCHTTKNHQPGGKLYKWMKAKKKVIKQLKGATFMNILRKRIMTAFPEASFQYGSQTYVDRKNLLLPKGHFMDAIAISGIKSVGQLSDTVTMISQFRKKKRSLHEATARKGRKQPNTSSKRNEKNTKHARGLWLNDYVRVIGNHAKGYVKGFKSNGYYVYLTDGLGNYVLNNGKNYINGQQCRLIMHNGNWQKAEQKLSLYEFK

SEQ ID NO: 7096 - protein, 457 aa, Scytonema sp.; identical to SEQ ID NO: 2701

SEQ ID NO: 7097 - protein, 442 aa, unidentified; identical to SEQ ID NO: 2903

SEQ ID NO: 7098 - protein, 413 aa, unidentified
MVYVLNIEGKPLMPCIPAKARHLLKDGKAKVVKREPFTIQLLFVCDNITQPVTLGIDAGSRHIGISASTEKKELYAADVELRNDIVELIATRRQYRRTRRSRLRYRKPRFNNRKKGDGWVSPSIEQKIQCHLKVVADVHKILPITKIVVETASFDMQKIVNPAIEGEQYQEGPQLGFWNTRKYVLWRDNYTCQHCKGKSKDPVLEVHHIESRKTGGNSPGNLVTLCRTCHEKHHREGMPLHIERGKSMRDGAFMGIMRWTFYNRLKEIYTDVHMTFGYITKNTRITKGLPKEHCIDAYCIAGNLNAERTDSYYYLKKIRCHNRQIHKVNLLKGGRKKLNQAPYNVLGFRLFDKVRLGKEECFIFGRRSSGYYDVRKLDGTRVHNAISFRKLKLIEQRKGYLQERRQAAFLSTL

SEQ ID NO: 7099 - protein, 413 aa, unidentified
MTNYVFVLDANGKHLSPTKEQKAWFFIRKKRATLVSKYPMVIQLNKEIPDDKICKDEIRCGIDDGGLHTGIALVQKCQTKNKVLFKGVIEQRNDVKHLMDVRRGYRRYHRYHKRYRPARFNNRSSSKKEGKIAPSILQKRQATIRAVAQLNKWINITDYWLEDVAIDIRALTDGFKPYKWQYQKSNRLDENIRKAVILRDGCQCVECGRTNCKLEVHHIKPRRLNGSNALSNLITLCERCHQNTEGREELFMDKYFALLNSSDNKYLNYAQHVMIGKKWLREQLSSLGILHLTNGGDTANKRIDWNIEKFHSNDAICITNLQPDTCDVKEWTIKPMCRQSKAKADNVLGIKHRDLVEYTFKSGETHRGYVTALYPKQNAINFQSPTKHCKKVSAKKCRLLWKFNKIYWLDDVS

SEQ ID NO: 7100 - protein, 426 aa, unidentified; identical to SEQ ID NO: 3294

SEQ ID NO: 7101 - protein, 426 aa, Parasutterella sp.; identical to SEQ ID NO: 3045

SEQ ID NO: 7102 - protein, 515 aa, unidentified
VTDVSTIYVLNKDGKPLMPTTRCGHVRYLLKEKKARVAASKPFTIQLLYETDDIVQPLYLGIDPGRTNIGVAVVKTDGTAVFTAHLETRNKEIPKLMKKRKDSRRARRTNGRRCRRQRRAKANDTISKKCVKQDTAQSGSVSKRAKEIGVIKRHLPGCEKDVLCIGIKNKEAKFNNRTRPTGWLTPTANQLLQTHVNLAKKIQKFLPISDVVLEVNKFAFMQLDNPNIQKWQYQQGPLYRKANLEEAVSEMQEHHCLFCKKKIDHYHHVVPQHKNGSNTIDNIVGLCTEHHDLVHKETAWQEKLAKKKTGLNKKYGALSALNQIVPVLTKELGSLFLKHFYVTTGKSTYDYRAAHGVSKDHWLDAYCIACSVLPNDVCDSNINSHVPYELKQFRRHDRRALHKENINRVYTLNGKKVATNRHKAIEQTTDSLEEFRQNHPNDVCKLKVKEHHPEYRNPKRNFPGCVFLVGKHTHVMQGTSGSHNGKADGYYDTNGNSYPFGKCKFVAKNEGIVFA

SEQ ID NO: 7103 - protein, 411 aa, unidentified
MVYVQDIDGKPMMPTTRHGKVRRLLKDNKAVVVNTCPFTIKLTYKTSDYKQEIVLGVDAGTKHVGLSATTKSKELYSGEVILRNDIVELLSTRRESRRTRRNRLRYRKPRFENRVKSKRLGWVAPSVRHRIDAHIRVIDNVCSILPVSRVIIEVAQFDTQKIKNPEISGKEYQEGDQLGFWNVREYVLARDGHKCQHCKGKSKDPILNIHHIESRKTGGDSPSNLITLCETCHKEFHKGNIKLKVKRGKSLRDAAVMGIMKWRLYDKLKSLYPNVRMTFGYITKHDRINHGIEKSHVSDAFVISRNFDSERLGYYYKLKLVRRHNRQIHKMKIPKGGKKRMNQSPFKVFGFKLFDKVMFQGEERFIYARRLSGQFKIKDIDGNNERNISYKKLRYVSHGLISIKTNLFLSQ

SEQ ID NO: 7104 - protein, 442 aa, Lactobacillus sp.; identical to SEQ ID NO: 7095

SEQ ID NO: 7105 - protein, 442 aa, unidentified; identical to SEQ ID NO: 2903

SEQ ID NO: 7106 - protein, 414 aa, unidentified; identical to SEQ ID NO: 4252

SEQ ID NO: 7107 - protein, 414 aa, unidentified
MVYVLNMDGQPLMPTNRCGKVRHLLKDGMAEVVKRCPFTIKLLYRSTNYTQPVTLGVDAGSKHIGLSATTEDKELFASDVELRNDIVDLLSTRRQNRRGRRSRKTRYRKPRFLNRTGNRKSGWVAPSIENKIQTHLTVVDKVCRMLPVSKIVVETASFDIQKIKNPDICGTEYQQGEQLNFWNVREYVLFRDGHKCQCCKGKSKDKILNVHHIESRKTGGDAPNNLITLCETCHTGYHKGTVKLPKTIHRGMVFRDAAFIGIMRWAFYNELKRRYPNVSHTYGYITKNIRIENNLPKYHYIDARCISGHPLAEPSEEVFYQKKVRCHNRQIHKNTIGKGGYRKRNQAEYIVKGFRLFDKVSYKGQECFIFGRRSSGSFDIRLLDGTKISAGVTYKKLRLSQTRGSFLIERRLVG

SEQ ID NO: 7108 - protein, 504 aa, unidentified; identical to SEQ ID NO: 3854

SEQ ID NO: 7109 - protein, 462 aa, unidentified
MSVLVIGQNGRALMPTTTRKARLLLKENKASVVCRHPFTIHLWYKTGCATQEGRIGIDTGSQHIGVGVTCGDKVILKDEHELRSSMEKRSLMETRATMRRGRRYRKVRYRKPKWRHHTKRMYFEKANRKGQHWRKVKTTTQSPRPKGWLPPSLQSKCDHHFRIIDRYLKYLPDSITKNLVIEVGRFDMARMNDPTIHSEMYQRGPMYDTENLRAYIFARDGYKCACCKAKAGSIRKKDGTSVKLVAHHILFRSRGATDNPKYMISVCDHCHTTKAHQPGGILYSWMENNKKVTRGLRDATFMNILRRRLFDRYPQAAFTYGNITAVDRKRLLLPKSHANDAVAISLFGKDVSDINATCQTLRYKQVRKSKRSLHEATPRKGRKEPNVRAIRNKKNTTHVNGFKLWDSVLANGQKLFICGFTGSSAYLVDQDGHYVSPPGKTYKQWTLSNLSRLHPNGNWLMV

SEQ ID NO: 7110 - protein, 442 aa, Deinococcus sp.; identical to SEQ ID NO: 5259

SEQ ID NO: 7111 - protein, 442 aa, unidentified
MSTSVFVLDKRHRPLMPCRPARARRLLRAGRARVVKRFPFVIRLVDRTVEQSEVQPVLIKLDPGSRETGAAVVRDDEKKRHHALAFFVIKHRGGAIRDSLKARSAFRRRRRSQNFRCRSPRFLNRVKPKGWLPPSLRHRVETTLSFVRRMCRYLPVSGIATELVKFDSQKLQNPEVSGVKYQQGTLFEYEVREYLLEKFGRKCVYCGAEGVPLNIDHVVPRAKGGSNRVSNLVLACVSCNQKKGARSLEDFLKGKPEVLARVRRELKTPLRDAAAVNATRWVLFNELKATGLPVETGSGALTKLNRHAFGVEKEHWLDALCVGRLNGVVTRKGLNVLEIRCMGRGSRQRTRLTKYGFPRGYLMRQKCVHGFATGDMVEANVPKGKKAGLWRGRVAVRVSGSFNIQTPKGVIQGVGWKHCRLISHNDGYGYAWLGHAPHSSPA

SEQ ID NO: 7112 - protein, 431 aa, unidentified
MPNKVYVLNKHGRPLMPCSPAKARHLLDAGKAKVKKRTPFTIQLVYGSSGYTQEVILGVDAGSKTIGMSASTTKEELLSAEVKPRNDVVDLMSTRREFRRARRNRKIRYRKPRFDNRVRSKHRGWLAPSVEVKIQEHITSIKRVCRILPVSKVVVETAEFDLQLLKAIADGKPVPQDEDYQQGEMYGHYNVRQYVLWRDGYTCKCCGAHTTKKKEVRLHVHHLESRKVGGDAPDNQVTLCESCHEKLHKGLIAEKDFKKRKRKSTRDATFMGIMRKTLMQRLCSELPIPVVETRGYITKTTREKLLVLPKSHTNDALAIAQGKQGFNVGYLPGIVQIDKICTIRPVRHHNRQLHKAAILKGGIRKSNQAEKYVFGYRLFDKVQFNGQDCFIWGRRTTGIFTIKTINGKMIKDGISFKKLKLVEKSTGYLIA

SEQ ID NO: 7113 - protein, 354 aa, Parasutterella sp.
  VARIANT 303: note = X can be any naturally occurring amino acid
MPCSPAKARLLLKEKKAIVVRRTPFTIQLTIATGESKQPVSLDVDAGYKHVGLSASTEKAELYASEVELRQDITDLLSARRALRESRRNRKTRYRAPRFDNRIRTKRKGWLAPSVENRINAHLSRIESVLRLLPVTKITVETASFDTQLLKNPDISGKEYQEGEQLGFWNIREYVLCRDRHVCQHCYGRSKDPVLNVHHLESRRTGGDSPGNLITLCETCHKALHRGEITLKAKRGQSFRAEAFMGIMRSEVPNRLKASHPELEVNNTYGYRTKHARIANDIAKSHCADAFCIAGNLGAERLXFRLAAAEESRHFRERIPGGRTARLLEHPRVCSLQRRACLPALLRQIERPGA

SEQ ID NO: 7114 - protein, 414 aa, unidentified
MPCSPAKARLLLKEKKAIVKRRTPFTIQLTIATGESKQPVTLGVDAGYKHVGLSASTEKAELYASEVELRQDVSDLLSARRALRQSRCNRKTRYRAPRFNNRLRTKRKGWLAPSVENRINAHLSRIEAVLRLLPVTKITVETASFDMQLLKNPDIAGKEYQEGEQLGFWNVREYVLFRDGHVCQHCYGRSKDPVLNVHHLESRRTGGDSPGNLITLCETCHKALHRGDITLKAKRGKSFRAEAFMGIMRWEVHNRLRALHPGIEVSNTYGYRTKHARIANGIAKSHCADAFCIAGNLGAERLCEFFFQKQTRRNNRQIHKLSILKGGIRKRNQAPFEVKGFRLFDKVACQGEESFIFGRRSSGFFDVRKLDGTRISAGISCKKLHLLEKRRTYLTEIRKEEALPPLPEGRGLRA

SEQ ID NO: 7115 - protein, 423 aa, Oscillatoria sp.; identical to SEQ ID NO: 5719

SEQ ID NO: 7116 - protein, 471 aa, Acidiferrobacter sp.; identical to SEQ ID NO: 6483

SEQ ID NO: 7117 - protein, 465 aa, unidentified
MSTCVCVLSNSGERLMPTIRLGKVRRLLKDGKAKIIKHHPFTIQLLYDSKANTQPIEICEDVGYNYIGISVKSQSHEYVSAQYDTLQDEKACHDSCRKLRRTRRNRLRYRKPRFDNRKRGEGWLAPSLKHKKELNVNVVKMYCAVMPITHATVEVGSFDTMLVKAIQEGKAIPEGADYQKGPRYNLATLREAVFYRDNYVCKVCGRKATEGAILHVHHMFYWKGRHGNSLSELITVCEKCHTPANHQKSGKLYGFGENVKFADLSGAAFMNTVRWQIVNELYAAFGKDFVTVTYGAMTKEKRIALHLEKSHNNDAYAMGSFHPVNRCAFEHYEKVKRNNRILEKFYDSQYIDTRTGELTNGKSLFNGRISRSHKKDSENLHKYRGKRICKGHRALRRKKLALNPGDLVFLNGEILVVHGTHTKKNGSVNVEFKTPSRGGKKSASLKKLKIVKTSNLMHSAWTKVS

SEQ ID NO: 7118 - protein, 421 aa, unidentified; identical to SEQ ID NO: 4235

SEQ ID NO: 7119 - protein, 427 aa, unidentified; identical to SEQ ID NO: 3216

SEQ ID NO: 7120 - protein, 413 aa, unidentified
MTNYVFVLDANGKHLSPTKEQKAWFFIRKKRATLVSKYPMVIQLNKEIPDDKICKDEIRCGIDDGGLHTGIALVQKCQTKNKVLFKGVIEQRNDVKHLMDVRRGYRRYHRYHKRYRPARFNNRSSSKKEGKIAPSILQKRQATIRAVAQLNKWINITNYWLEDVAIDIRALTDGFKPYKWQYQKSNRLDENIRKAVILRDGCQCVECGRTNCKLEVHHIKPRRSNGSNALSNLITLCERCHQNTEGREELFMDKYFALLNSSDNKYLNYAQHVMIGKKWLREQLSSLGILHLTNGGDTANKRIDWNIEKFHSNDAICITNLQPDTCDVKEWTIKPMRRQSKAKADNVLGIKHRDLVEYTFKSGETHRGYVTALYPKQNAINFQSPTKHCKKVSAKKCRLLWKFNKIYWLDDVS

SEQ ID NO: 7121 - protein, 414 aa, unidentified; identical to SEQ ID NO: 4924

SEQ ID NO: 7122 - protein, 425 aa, Moorena sp.; identical to SEQ ID NO: 3008

SEQ ID NO: 7123 - protein, 453 aa, Anaerotruncus sp.
MSVAVISNTGIRLMPTSEYRARHLLKAGKAVIEQYRPIFTIRLTDREKGKIQPIEYACDTGYQHVGVSIKSEKHEFVHAQYDMLSNETERHNDRRKYRRTRRNRKRYRKPRFDNRSRKNQEMAPSLRHRRENQINLFESFCKVMPITSATFEMGKFDTQLLQAIADGKPLPEGKDYQQGSKYLFQTEREAVFSRDHYTCQVCGKSIKDGVILHTHHIGYWKGYRSNRISNLLTVCEHCHTAKNHKPIGALWGLEPQSTNLAAATYMSTVRWAIYRELVLKYPEIDIHIQYGAKTSVTRKSLHLAKTHANDAYCVGSLHPRHRTAELIYQKKRRNNRILEKFYDAKYIDIRDGKKKSGSLLSCGRTNRRESRRSDKNQRIYRGKKCSSGRTSVRKNRYAYQPGDTIVFHSQTFVVNGSHCKGARVILGTGKSVKATDLTCIKKEGGWHFLPAQA

SEQ ID NO: 7124 - protein, 396 aa, unidentified
MSKVFVLDTNFTPLNPIHSAQARQLLRTKKAAIFRQFPFTIILKKSRPDSPVSSLRLHIDPGAKFTGMALVNDSTGKVVFAAELKHRGFAIRDALTSRKQLRHSRRARKTRYRQPRFLNRTRPEGWLAPSLQSRVENIKTWVERLRKLAPIEAISQELVRFDMQLMANPDIQSKEYQQGTLAGYETREYLLEKWGRQCAYCGVKDVPFQVEHIHPRAKGGSNSITNLTLSCEKCNTKKGTKDIKDFLKKDPSKLEKILKQAKRPLADAAAVNTTRTALLEVLKATGLPVETGSGGLTKFNRNQQKLEKTHWIDAACVGQSTPILNIKGVKPLLITANGHGSRQSCRTDKYGFPNRHVPREKIHFGFQTGDIAKAVVTNLPPTLYIITQIQYYATNN

SEQ ID NO: 7125 - protein, 417 aa, unidentified
MPCSPAKARLLLKEKKAIVKRRTPFTIQLTIATGEAKQPVALGVDSGYKHIGLSATTEKAELYASEVELRQDITDLLSARLALRRSRRSRKTRYRAPRFDNRVASKRKGWLAPSVENRIAAHMSRVEAVMRVLPVTAITVETAAFDTQLLKNPDIAGEAYQQGEQLGFWNVREYVLFRDGHVCQHCRGKSKDPILNVHHIESRRTGGDAPNNLITLCETCHKAFHRGEIKLKVKRGKSFKAETFMGIMRWTLFERLKKAHPELRVRNTYGYLTKHKRISHGIAKSHCADAYCIADNLGAKRLEGFFFQKQTRKHNRQIHKLSILKGGLRKKNQAPYEVKGFRLFDKVICKGEEAFIFGRRTSGSFDVRRLDGTRISAGISCKKLRLLEPRTTYLTEFRKEAALPPLHECSGSRAEFR

SEQ ID NO: 7126 - protein, 509 aa, unidentified
VYALNKDGKPLMPTTRCGHVRYLLKEKKARVVKTKPFTIQLLYETNDVVQPLYLGIDPGRTNIGVAVVKADGTAVFTAHLETRNKEIPKLMKKRKDSRRARRTNGRRCRRQRRAKANGTISKKCVKQATAQNGSASKRTKKIGVIKRHLPGCEKEVLCIGIKNKEAKFNNRTRPAGWLTPTANQLLQTHINLIKKIQKLLPISDVVLEINKFAFMQLDNPNIQKWQYQQGPLYQKANLEEAVSEMQEHHCLFCKKKIDHYHHVVPQHKNGSNTIDNIVGLCTKHHDLVHKDTAWHEKLTKKKTGLNKKYGALSVLNQIIPALTKELSSIFPKHFFVTTGKSTYDYRAAHGVSKDHWLDAYCIACSVLPNDVCDSSINNRVPYELKQFRRHDRRALHKENMSRVYTLNGKKVATNRHKATEQTADSLEEFRQNHPDDVCKLKVKEHHSEYRNPKRNFPGYVFLVGKRTHVMQGTSGSHNGKADGYYDTNGNSYSSGKCKFVAKNEGIIFA

SEQ ID NO: 7127 - protein, 442 aa, unidentified; identical to SEQ ID NO: 2903

SEQ ID NO: 7128 - protein, 450 aa, unidentified; identical to SEQ ID NO: 2437

SEQ ID NO: 7129 - protein, 447 aa, unidentified; identical to SEQ ID NO: 3915

SEQ ID NO: 7130 - protein, 424 aa, unidentified; identical to SEQ ID NO: 3434

SEQ ID NO: 7131 - protein, 431 aa, unidentified
MDAWDIIVVLNKRGKPLMPCSPAKARLLLKEKKAIVKRRTPFTIQLTIATGETKQPVSLGVDAGYKHVGLSASTEKAELYASEVELRQDITDLLSARRALRQSRRNCKTRYRAPRFDNRIRTKRKGWLAPSVENRINAHLSRIEAVLRLLPVTKITVETASFDMQLLKNPDISGKEYQEGEQLGFWNVREYVLFRDGHVCQHCHGRSKDPVLNVHHLESRRTGGDSPGNLITLCETCHKALHRGEITLKTKRGQSFRAEAFMGIMRWEVQNRLKASHPELEVNNTYGYRTKHARIANDIAKSHCADAFCIAGNLGAERLCEFFFQKQTRRNHRQIHKLSILKGGIRKRNQAPFEVNGFRLFDKVACKGEEGFIFGRRSSGFFDVRKLDGTRISAGISYKKLHLLEKRRTYLTEIRKEEALPPLPEGRGLRA

SEQ ID NO: 7132 - protein, 411 aa, unidentified
VRNLRVFVKNLRGQSLMPCSQRKARLLLKNKKAKIYSYHPFTIQLFYASGETIQMCHIGVDTGSRHIGLAITSENKVLLKGEIDLRQDVKSNLDTRRTYRRNRRNRKTRYRKARFFNRVKSKQKNWLPPSIESKIHHTFHWMNKLENLVADSNLHIEVGKFDMAKMIRPDIQGKEYSQGQCYGYFDTRYFVFARDDYTCQCCKKKNKILRTHHIRYRSNGGTDRADNLITVCTDCHTSKNHKKGGILYEWQQRHKKGKPYKEPPFMNIIRKRIYQKYPDAVISYGSQTTPKRKERNLDKTHYNDAIIISGIEDIKENPKEWLRIKQFRKKKRSLHEAAARKGRKEHNRTQKRNRKNTSYDKGWYLNDYVEVFGKKGYISGFTNSGVYIKNTNDDYITMPDKKYKQVSHHNL

SEQ ID NO: 7133 - protein, 461 aa, Parasutterella sp.; identical to SEQ ID NO: 3646

SEQ ID NO: 7134 - protein, 420 aa, unidentified
MQYVYVLNKHGEPLMPCSPGKARILLKQQKACVVKRTPFTIKLLYGSAGYKQPITLGVDAGSKHVGLSASTEKRELYSEEFTPRNDVVELLSTRRQNRRSRRNRKTRYRAPRFNNRIHSKHKGWLAPSVEVKIQEHITVIKRICRILPITLVRVETAEFDTQRLKAMLSGKPLPVGTDYQLGEMYDEYNARQYVLRRDNYTCQRCGAHTTKKKTVKLHVHHLESRKTGGNAPSNLITLCVDCHKAFHAGKVKLDGKKRGKSLKDAAFMGAMRNTLLTRLRNELNIPVQNTYGYITKLLREQNDIKKSHVNDARCISKHPLAEPCSVCYRTKAIRHHNRQTHKANFSKGGIRKRSQMPYVVEGYRLWDKVLYKGQECFVSGRRASGSFTLKKLDGTRISKGVTFKKLRLLEPATNYLIERM

SEQ ID NO: 7135 - protein, 322 aa, Parasutterella sp.
RYRAPRFDNRIRTKRKGWLAPSVENRINAHLSRIEAVLRLLPVTKITVETASFDMQLLKNPDISGKEYQEGEQLGFWNIREYVLCRDGHVCQHCYGRSKDPVLNVHHLESRRTGGDSPGNLITLCETCHKALHRGEITLKAKRGQSFRAEAFMGIMRWEVQNRLKASHPELEVNNTYGYRTKHARIANDIAKSHCADAFCIAGNLGAERLGEFFFQKQTRRNNRQSHKLSILKGGIRKRNQAPFEVNGFRLFDKVACKGEEGFIFGRRSSGFFDVRKLDGTRISAGISYKKLHLLEKRRTYLTEIRKEEVLPPLPEGRGLRA

SEQ ID NO: 7136 - protein, 414 aa, unidentified
MPCSPAKARLLLKEKKAIVKRRTPFTIQLTIATGESKQPVSLGVDAGYKHVGLSASTEKAELYASEVELRQDITDLLSARRALRQSRRNRKTRYRAPRFDNRIRTKRKGWLAPSVENRINAHLSRIEAVLRLLPVTKITVETASFDLQLLKNPDISGKEYQEGEQLGFWNIREYVLCRDGHVCQHCYGRSKDPVLNVHHLESRRTGGDSPDNLLTLCETCHKALHRGEITLKTKRGQSFRAETFMGIMRWEVLNRLKASHSELKVHNTYGYLTKHARIENGIAKSHGADAFCIAGNLGAERLGEFFFQKQTRRNNRQIHKLSILKGALRKRNQAPFEVKGFRLFDKVACQGEEGFIFGRRSSGFFDVRKLDGTRISAGISYKKLHLLEKRQTYLIEIRKEEAFPPLPEGRGLRA

SEQ ID NO: 7137 - protein, 406 aa, unidentified; identical to SEQ ID NO: 6176

SEQ ID NO: 7138 - protein, 452 aa, Petrotoga sp.
MEKKSVQRVFVLDKNKQPLMPSHPARARELLKKGKAAVFRYHPFTIILKDRAGGDTQPIQVKIDPGSKITGVALVADFKNGKKVIWSAEIHHRGQNVKKALDSRRSLRRSRRNRKTRYRKARFDNRKRSKDWLPPSLMSRVENILTWIKRIRHFAPITGISMELVRFDTQKLQNPEIKGIEYQRGTLYGYEIKEYLLEKWSRKCVYCGKENVPLEIEHIIPKSKGGSDRISNLTLACHECNQKKGNQSIEEFLDNNPERLNQIKSESKKTLKDTAAVNATRWYLFNQLQKEGLPLEVGTGGRTKYNRETQRYPKKHWIDAACVGESGQNVQIEPEMQVLEITAMGHGTRKMCNVDKYGFPRSHRRSENAPNGVKGRTYMGYKTGDIVLAVIPKGKNAGIHIGRIAIRQQPNFKLNGLDGVNPKYLKLLQRNDGYGYQISRKEGEKLLHSSHR

SEQ ID NO: 7139 - protein, 490 aa, unidentified
MNYVYVLDKKGKPLMPTTRYGKVRRMLKSGQAKPVQNLPFTIQLTYIPKTTVCQPVIVGFDPGRTNIGISAVREDGTCLNLTHCETRNREIPKLMQKRKEHRQTSRRGERLVRKRLAKRHGTVSSKPLERILPGCEKPLKVKDIINTESRFNNRLRSEGWLTPTATQLLRTHVNLLKRMCQILPATDVVMEVNRFAFMQLDQSNVKKCGIDFQHGPLFGTDGIKEAVSIQQDGRCLLCEKRTIEHYHHIVPRAYRGSDTAENIAGLCAGCHKLVHTSREASNKLKHKKDGINKKYGGISVLNQVIPFLFMEFEQMFPGHTYATNGWNTKQFREKYRLAKDHSVDAYCIAASILPEPKVELPEDTHEIVQYRRHDRARIKRQTERTYCLGKKGVCKNRHKRFEQKTDSLEEYVEKYPNFLSNLTVKKSQRSYNDLKRVLPGAVILYQGKRYILSGRSSGGKQYRMLGYGNQNFTASKCTIVQQNTGLVYVS

SEQ ID NO: 7140 - protein, 433 aa, Clostridium sp.
MVYVISNLDKPLMPTKRYAKVRILLKNKQAKVVNTKPFTIKLLYDTSNYTQPVTLGIDSGYTYIGFSAVTDTKELICGEVTLLKGMSERLKERSMYRKQRRSRLRYRKPRFDNRKRSDGWFAPSIQYKLDSHLRFIDNLKKILPITKIVVEVANFDIQKIKNPNIEGEEYQNGEQKGFYNLREYIFHRDDHTCKLCGRDDLPLQVHHIGFYKGDRSNRPGNLISLCIKCHTPKNHKEGQVLYGWKPNLKSLKEATFMSSVRWKLKNILGCEHTYGYDTKSKRIVLNLEKTHYNDAFCIAEGNTHDRVTPIYFEQIRRNNRSLEKFYDAKYIDLRTNNKASGQDLFSGRRTRNKNLNSENLHKYRGEKLSKGKRTIRKERYFYQPNDLVKYQNRIYAVKGTHNKGARVMLKENNKSIKIGDLVPYKFRKGIVAV

SEQ ID NO: 7141 - protein, 420 aa, unidentified
MQYVYVLNKHGEPLMPCSPRKARLLLKQKKACVIKRTPFTVKLLHGSAGYKQPVTLGVDAGSKHIGISATTEKHELYREEATPRNDVVDLLSARRAFRRSRRNRKTRYRAPRFNNRVHSKHKGWLAPSVEVKIQEHITLIKHVFRILPVTLVRVETAEFDTQRLKAMLEGKPLPVGTDYQLGEMYDEYNVRQYVLKRDNYTCQCCGAHSTKTKGVKLHVHHIETRRTGGNAPNNLITLCKACHKALHAEKVTLDGKKRGKPLKDAAFMGIMRKTLMERLRKELKIPVQGTYGYITKYLREKKGIPKSHTNDARCISKNPLAIPCDTCYYTKAVRHHNRQLHKATILKGGIRKANQAPYIVKGYRLWDKVAYNGTECFITGRRTSGYFALKELDGTVVSNSISYKKLRLLEAATNYIIERK

SEQ ID NO: 7142 - protein, 421 aa, unidentified
MQYVYVLNMHGEPLMPCSPRKARLLLRGGKARVVKRTPFVIKLLHGSAGYKQSVVLGVDAGSKHVGLSACTKSIELYKEEMMPRNDVVGLLSARRQYRHSRRNRKTRYRAPRFDNRVHSKHKGWLAPSVEVKIQEHITAIKRVCRILPIVLVRVETAEFDTQRLKAMLEGRPLPVGIDYQRGEMYNEYNVRQYVLKRDRYVCQHCGAHPTSEKPVRLHVHHLESRHTGGNAPNNLIILCEHCHRALHEGKIKLRNDKKRGKSLRDAAFMGIMRDALLMRLRYKLSVPIERTYGYITKLLREENKIAKSHTNDARCIAGFPKATPCDTLYRTRAIRHHNRQIHKAKILKGGIRKRNQSPYLVNGFRLWDKVRYNGEECFISGRRSSGYFAIKKYDGAVVSNSASYKKLTLIETATNYITERG

SEQ ID NO: 7143 - protein, 422 aa, unidentified
LNKRGKPLMPCSPAKARLLLKEKKAIVVRRTPFTIQLTIATGESKQPVSLGVDAGYKHVGLSASTEKAELYASEVELRKDITDLLSARRALRQSRRNCKTRYRAPRFDNRIRTKRKGWLAPSVENRINAHLSRIEAVLRLLPITKITVETASFDMQRLKNPDISGKEYQEGEQLGFWNVREYVLFRDGHVCRHCHGRSKDPVLNVHHLESRRTGSDSPDNLITLCVTCHKALHRGEITLKAKRGQTFRAQAFMGIMRREVLNRLKASYPELKVHETYGYLTKHARIANGIVKSHGADAFCIAGNLGAERLGEFFFQKQTRRNNRQIHKLSILKGGIRKRNQAPFEAKGFRLFDKVACQGEEGFIFGRRSSGSFDVRKLDGTRISAGISCKKLRLLEKRRTYLTEIRKEEALPPLPEGRGLRA

SEQ ID NO: 7144 - protein, 434 aa, unidentified
MSESIMLVYVLKQNGQPFMPTERFGKVRRLLKEGKAKVVRREPFTIRLLYEPETDIVQECYCGVDTGSKHIGVAVVGNDRVLYQSQTELRSDIKKKMDARRAFRRNRRNRKTRYRKKRFLNRKNSIRENRLPPSVKHKVQAHIDEIEFCKKILPVSDLILEVSQFDTALMKTSSLINEKIKRWGYQQGFNYGYSSRREAVLHRDNYTCQCCGKKNCRLEVHHIKFRRNGGTDDEENLITLCEDCHKGVHASTVVLNKKPKKSKNLKHTTHMSIIRSQLLKKYPNAIETFGFVTSENRHHLNLQKNHYIDACVIASGGLEFKKLDVIYRKRRVSVQDRVLTKGVRGERRLPTGKVHGFKRYDKVRYLGEVCFVKGRRVRDGFVLMDIENSSIDFRDKGGKQNPSYKSIKRVNARKSILCISQRIEREERLIPILN

SEQ ID NO: 7145 - protein, 465 aa, unidentified
MSTCVCVLSNSGERLMPTFRLGKVRRLLKDGKAKIVKHHPFTIQLLYDSKTNTQPIEICEDVGYNYIGISVKSQSHEYVSAQYDTLQDEKACHDSCRKLRRSRRNRLRYRQKRFNNRKHDKGWLAPSLRHKKELNVNVVKMYCAVMPITHATVEVGSFDTMLVKAIQEGKAIPEGADYQKGPRYNLATLREAVFYRDNYTCQVCGRKANEGAILHVHHMFYWKGRHGNSLSELVTVCEKCHTPANHQKGGKLYGFGEDIKFANLSGAAFMNTVRWQIVNELYAAFGKPFVTFTYGAMTKEKRIALHLEKSHNNDAYAMGSFHPVDRCAFEHYEKMKRNNRILEKFYVSRYINIRTGEVASGKELFNGRINRNHKKDSENLHKYRGKRIRKGYRALRRKKVALNPGDLVSLNGEILTVHGTHTKKNGSVNVKFKTPSKSGKKSVSLKKLKIIKTISPMRSAWDKVS

SEQ ID NO: 7146 - protein, 427 aa, unidentified
  source 1..427: note = Sutterellaceae bacterium UBA7131
LRVFILNKRGKPLMPCSPAKARLLLKEKKAVVVRRTPFTIQLTIATGETKQPVSLGVDAGYKHVGLSASTEKAELYASEVELRQDVSDLLSARRALRQSRRNRKTRYRAPRFDNRIRTKRKGWLAPSVENRINAHLSRIETVLRLLPVTKITVETASFDMQLLKNPDIAEKEYQEGEQLGFWNVREYVLFRDGHVCQYCHGRSKDPVLNVHHLESRRTGGDSPGNLITLCETCHKALHRGEIKLRAKRGQSFRAETFMGIMRWEVLNRLKASHSKLEVNNTYGYLTKHARIKSGITKSHCSDAFCIAGNLGAKRLGEFLFQKQTRRNNRQIHKLSILKGGIRKRNQAPFEINGFRLFDKVACKGEEGFIFGRRSSGSFDVRKLDGTRISAGISYKKLRLLQKRQTYLTEIRKEEALPPLPEGRDLRA

SEQ ID NO: 7147 - protein, 323 aa, unidentified
VTTILKTCFAAFNLAKVVVLMDAWDIIVVLNKRGKPLMPCSPAKARLLLKEKKAIVKRRTPFTIQLTIATGEAKQPVSLGIDAGYKHVGLSASTEKAELYASEVELRQDITDLLSARRALRQSRRNRKTRYRAPRFDNRISTKRKGWLAPSVENRINAHLSRIEAVLRLLPVTKITVETASFDLQLLKNPDISGKEYQEGEQLGFWNIREYVLCRDGHVCQHCYGRSKDPVLNVHHLESRRTGGDSPDNLLTLCETCHKALHRGEITLKAKRGQSFRAEAFMGIMRWEVLGRLKASHPELEVNNTYGYRTKHARIANDIAKSH

SEQ ID NO: 7148 - protein, 443 aa, Anoxybacillus sp.
MVEENMTCFMQRKGENPMVFVLDTNKRPLAPCHEAVARKLLKQGKAAIYRRFPFTIILKKSVDESEIKATYRLKIDYGSRHTGLAILRGQEVVWLGQLDHRTDIKERIDKRRAFRRARRNRKTRYRKPRFLNRKRKEGWLPSSLESRVQNIQTWVNRLKKLCPIGYISYENAKFDTQLMRNPEINGVEYQQGTLQGYEVREYLLEKFGRKCCYCGKENVPLEVEHIIPKSRGGTDRVDNLCLACHDCNQRKGSKTAEEFGYPHIQKQVKESLKDASAVNSTRWKVYEVLKQSGCEVECGTGARTKMNRIRLDLPKTHYFDACCVGESTPNHLYFKTKEVLFIRAKGRGSRSRTNLDRYGFPRGYLARQKFFFGFQTGDMVKAVVPRGKYQGVWFGEVACRKTGSFDIKGKDGKRIAQGINYRYVQVIQRFDGYAYGKGVAELA

SEQ ID NO: 7149 - protein, 420 aa, unidentified; identical to SEQ ID NO: 2951

SEQ ID NO: 7150 - protein, 406 aa, unidentified; identical to SEQ ID NO: 6072

SEQ ID NO: 7151 - protein, 454 aa, unidentified
LDTVAVISASGRKLMPTNSYRARRLLKSRRAVIYRYRPVFTIKLADRTDGYIQPIEYKCDTGYQNIGISICSDTKEFVNEQRDLLKDEVKQHSNSRKYRRTRRNRLRYRKKRFDNRRGMISRDGFAPSIRNKRDVHVRLYEEYYKVFPITKAVFEMGQFDTQVLKAVEAGLPVPEGTDYQRGEQYGYATLREAVFARDSYTCICCGKSAIKDGVKLRIHHIGYLSGDRSNRMANLGSVCESCHTSKNHKPGGKLYNLKPKLKTFKGATFMTTVRYSMVKKLKVTTPDVDIKVTYGAATKLARKTLNVKKTHSNDAYCMGEFHPKHRSDFKHYRKCRRNSRVLSKFYDAKYMDLRDGSVKTGSQLSCGRTNRRIPRHTELNERIYRGHKISKGKLVVRRQHYQYRPGDTVWAEGKRCTVKGIISNGTRIALNERNPVSVNKIDKTVHTGGWAKAS

SEQ ID NO: 7152 - protein, 350 aa, Aphanizomenon sp.
MSKVFVLDTNFTPLNPIHSAQARQLLRNKKAAIFRQFPFTIILKKSRPDSRISSLRLKIDPGAKFTGMALVNDSTGEVVFAAELKHRGFAIRDALTSRRQLRRSRRARKTRYRQPRFLNRTRLEGWLAPSLQSRVDNIKTWVKKLLNFAPIQAISQELVRFDMQLMANPDIQGQEYQQGTLAGYETREYLLEKWGRQCAYCGVKDVPFQVEHIHPRAKGGSNSITNLTLSCEKCNTKKGTKDIKDFLKKDFSKPLLITANGHGSRQSCRIDKYGFPNRHVPREKIHFGFQTGDIAKAVVTAGKKIGTYVGKVAIRSTGSFNISNKNGLIQGISHKFCKRIHAKDGYSYAV

SEQ ID NO: 7153 - protein, 512 aa, unidentified
MSTVYVLNKDGKPLMPTTRGGHVRHLLKEQKARVVRTKPFTIQLLYETDDVVQPLYLGIDPGRTNIGVAVVKTDGTAVFTAHLETRNKEIPKLMKKRKDSRRARRTNGRRCRRQRRAKANGTISKKCVKQTTAQNGSVSKRAKEIGVIKRHLPGCEKEVLCIGIKNKEAKFSNRVRPEGWLTPTANQLLQTHINLVKKIQKFLPISDVVLEVNKFAFMQLDNPNIQKWQYQQGPLYQKASLEEAVSEMQEHHCLFCKKPIDHYHHVVPQHKNGSNTIGNIVGLCAKHHDLVHKDTTWQKKLAKKKTGLNKKYGALSVLNQIIPALTKELSSLFSKHFFATNGKSTYDYRAAHGVSKDHWLDAYCIACSVLPNDVCDSDINNRVPYELKQFRRHDRRALHKENMSRVYTLNGKSVATNRHKATEQTTDSLEEFRQCQPDDVCKLKVKEHHPEYRNPKRNFPGCVFLVGKHTHVIQGTSGSHNGKADGYYDTNGNSYSSGKCKFVAKNEGIVFT

SEQ ID NO: 7154 - protein, 465 aa, unidentified
MSTCVCVLSNNGERLMPTIRLGKVRHLLKDGKAKIIKHHPFTIQLLYDSETNIQPIEICEDVGYNYIGISVKSQSHEYVSAQYDTLQDEKSCHDACRRMRRTRRNRLRYRQKRFDNRKRDKGWLAPSLKHKKELNVNVIKMYCEVVPITHATVEVGSFDTMLVKAIEEGKATPEGADYQKGPRYKLATLREAVFYRDNYTCQVCGREASEGAILHVHHMFYWKGRHDNSLSELITVCEKCHTPANHQKGGKLYGFGEDIKFANLSGAAFMNTVRWQIVNELYAAFGKPFVTFTYGAMTKEKRIALHLEKSHNNDAYAMGEFHPNCRCTFEHYEKVRRNNRILEKFYDSRYIDIRTGEIATGKELFNGRINRSHKKDSENLHKYRGKRIRKDYRALRRKKVALNPGDLVSLNGEILTVHGTHTKKNGSVNVEFKTPSKSGKKSTSLKKLKIIKTISPMRSAWDKVS

SEQ ID NO: 7155 - protein, 413 aa, unidentified
LKVFVLNMRGKPLMPCSPAKARHMLKAGKAVVVRRTPFTIKLTIATGETKQDVTLGVDAGARHVGISATTEKEEVFASEVALRQDITGLLADRLAFRRARRNRKTRYRAPRFNNRVRSKHKGWLAPSVENRIQAHISRIEAVCRLLPVTKIVIETASFDIQKIRNPEVEGTGYQQGDQLGFWNVREYVLFRDGHVCQHCHGRSRDKILNVHHLESRKTGGDAPNNLITLCETCHKAYHAGKIKLKARRGTSFRAEAFMGIMRWTLLDRVRRAHPELPVENTYGYLTKHNRIALALPKTHCADAFCIAGNLNALRRGDFLFQRQTRKHNRQIHKCSILKGGVRKLNQAPFLVKGFRLFDKVRIGGHIGFVFGRRVRGIFNIRRLDRTVIGTDINSKKLSLLETRKTFLTELRKE

SEQ ID NO: 7156 - protein, 507 aa, unidentified
MHCKSKICEQQIKDLLQLSSNFKSLKGVKDGELDVKSLYGWKSKVSPSQKSKIFEDNISEEAKHFVTKKSEQDLRVPAYVFVLNMRGNPLMPTKPQKARKLLKEGKAKVVKRIPFTIQLLYPTGEARQDIILKVDAGYSFVGISATTDTRELFAEEVELRGNIPRLIEKRRMYRRNRRGRLWHRKPRFLNRTGSKKKGWFAPSIQHKLDTHIRLVDNTKKILPISRTIIEVVSFDTQKMQNPEIEGIEYQQGGLQGYAAREYLLEKWGRKCAYCGKTDIPLEIEHIIPKSRGGSNRISNLTISCHECNQEKGNKTAEEFGHPNIQKKAKKPLKAAAFMNIVRQKLVEILDCESTYGYITKYNRIKAGLEKSHINDAFSLEDGSQHDQKRTGQIFIAKQVRRQNRSLFKANLLKGGRKKRNTVREVNGFRRFDKVLYKSKDGKNKKECFIYGLRKSGYFDVRSINGEKIDASVKSKKLKLLEKAKGIILEVNRQFLPSLTEEVSLPIR

SEQ ID NO: 7157 - protein, 430 aa, unidentified
LETRNKEIPKLMQDRKKARRARRTNGRRCRRQRRAKANGTISKKCVKQTTAQNGSVSKRAKDIGVIKRRLPGCEKDVLCIGIKNKETKFTNRTRPEGWLTPTANQLLQTHINLVKKIQKFLPISDVVLEVNKFAFMRLNNPNIQKWQYQQGPLYKKESLESAVSEIQEHHCLFCKKPIDHYHHVVPQHKNGSNTIGNIVGLCAKHHDLVHKDSAWEKKLAKKSTGLYKKYGALGVLNQIIPALTNKLSVLFPKHFFVTAGKSTHDYRAAHGVSKDHWLDAYCIACSVLPSNVCDSNINNHMPYVLKQFRRHDRRVLNNENMNRVYTLNNKAVAINRHKAKDQKTVSLEEFRKEHPDDVCKLKVKEHHPTYRNMNRNFPGSVFLVGKQIHVMQGIASSKDGKATKYNDTSATAIAAGKCKFVAKNTGILFV

SEQ ID NO: 7158 - protein, 405 aa, unidentified
GRRCRRQRRAKANGTISKKCVKQDTAQSKNPSKRAKEIGIIKRRLPGYKKDVLCIGIKNKEAKYTNRTRPEGWLTPTANQLLQTHINLVRKMQKFLPISDVVLEVNKFAFMRLDNPDIQKWQYQQGPLYQKGSLENAVSEMQEHHCLFCDKPIDHYHHVVPQSENGSNTIANIVGLCAEHHNLVHKDAAWQKKLAEEKVGLNKKYGALSVLNQIIPALTNKLSVLFPKHFFVTAGKSTHDYRAAHGVSKDHWLDAYCIACSVLPSNVCDSNINNHMPYELKQFRRHDRRVLNNENMNRVYTLDNKAVAINRHKATEQEAASLEEFRKEHPNDVCKLKVKEHHPTYRNMNRNYPGSIFLVGKHVHIMQGIAGSKDGKATTYKDFNANSITASKCKFVAKNSGILFV

SEQ ID NO: 7159 - protein, 441 aa, unidentified
MTKTATQKVTQVCVLDQNGQPLMPTQRLGKVYRLLKTKKAHIVAYEPFTIKLNYEPKTHIIQPMTLGVDSGAIHSGYSLANEHREYYSAEVIARDNISKNISDKRMYRRNRRSRKTRYRKPRFNNRKNKGKGWIPPSLEQKVTVQVNEIKHLHQYFPIKDIIIEVAEFDIQKIENPEISGKEYQQGTLQGYNIRNYLLEKYNHKCFYCDKEVSTFEVEHMIPRARRGSNRIDNLTLACHDCNQKKGTLTAEEFIKQTLTPQKAAQKIRQIPKMKQLLKYMAHMNATRWVLYNTIKETYESVSLTYGYITKHNRINACLPKAHHIDAKCITGFSTVPSFDITVVKTKMRRHNRQLHRATFSKGHKRRAATLSKYVHGFQLYDIVLFNNHRYYIKSRRSFGSFKLASLEGLKDEERSYKKLTFLTHTNAYLTNHYVNDKSVNG

SEQ ID NO: 7160 - protein, 451 aa, unidentified; identical to SEQ ID NO: 2424

SEQ ID NO: 7161 - protein, 557 aa, unidentified
VCREGVGQLSHIHRQNRVGNGVFRTVLVIKRKECAMGAVFVVDKNGKPLMPTYSKPKVRRMLKDGRAEIFRHEPFTIQLTQRAGGYTQPVHYDTDSGYQYAGVSVKSEKHEFLHMQADMLEDKKGRYDDRRKYRCTRRNRLRHRPPRFDNRRKGEGWIAPSLAHRLENQVRLFQTMCGVCPITEAHIEVGRFDAQALDAVEKGLPLPEGIDYQHGPRYAFDTIREAVFARDQHTCQCCGASPSKKPGTILVVHHALYWKGDHTDRLPGLLTLCTNCHTSANHQKGGKLRGLAPNAATANKAPAAFMNVVRWMMRDRFQADGVPTTITYGAATKRERLSRNVAKTHANDAYCIGEFRPKHRSLEIHIAKRRRNDRRLEKFRDATYIDARDGSIKSGKELSSGRTKRKEPRHGAKDLRRFRLKQLTKGCNAVRRKRYEIRPDDLVRTTDGRVYTVNGTQNRGATLQLRTTKTVLLTALVPKTGKEKELLPVETGQKLALKGRKEKHEVLSVDLASGKAVMRWYMGVKPENVTLLTGTYGGWTVVPAQAVNTCKKGETEK

SEQ ID NO: 7162 - protein, 427 aa, unidentified
MSNFVFLIDSNKTPINPIHPAHAKKLLESNKAAVFRYYPFTLIMNRVVENIVTYPITLKIDPGSKTTGIALVNNRDEVIWGMELHHRSAAIKDSLETRKGVRRGRRARHTRYRQARFINRKRPNGRLNAPSLWHRVQTVETWVKRLCRFAPITAIVQELVRFDLQQLENPEISDVEYQQGELQGYEVREYLLNKWERKCAYCGAENIPLQVEHIKPKAKGGTNRISNLCLACQKCNEKKGTQDIEKFLAKKPEVLKRILAQAKRSLKDAAAVNTTRWALFHTLKASGLPVSTGSGGRTKFNRTRLQLPKTHWIDAACVGSVDKLQLVTSKVLEVKATGHGCRRFCRINKYGFPCTAPKQTFKHSTTGDFVKVTITKDRKNVASGIYAGRVKTPTEKGCEIVINGFRVTFSNMTDVKTIHRNDGFSYV

SEQ ID NO: 7163 - protein, 544 aa, unidentified
MKQKKQKVMVYILNKKGKPLMPTTRCGHVRKLLDSKKAVVVNSNPFTIRLKYDTPNGIQDVFAGIDSGRENIGSGASNEDGDCLYLGELKTSNKSIKLKMTERAGFRKERRRHDRQNKQRKARKDHTEIQNGKDDICRATISCKSVQISYPTAEESVTHKIIRGKEGKFANRHRDGDWITPSARQLVQMHMNDLKSICKILPISHVTLERVAFDFQKLENENIKAWEYGKGKLYGYDSPEEYIHDVQDGKCLVCGKPHIDYLHHIIPRSKGGSDKVSNIAGLCYDCHYGPIGVHNCQDTQDRLPELKNEVNKQYKVSLLNSVMPVLIEEIDKFCKANSIMFSICEGHDTAKVRDMYDLQKDHCLDGFAISLVGRNVKSVDVMPDRIHQKQRYKKKSKNIIQKRNYREYYDDKKLVAINRHKGTDQKADSLEEYMNTYAETHTTDECKKHFDSLVVKPARRTYTFHKEWRICPFHIGDKVRYEKKNKIKGNTKVDTFICEGIYFSKDENKAKVEHNKTKSKKMKFCRAIESGCIPYIDYIKLALI

SEQ ID NO: 7164 - protein, 423 aa, unidentified; identical to SEQ ID NO: 3951

SEQ ID NO: 7165 - protein, 409 aa, unidentified
  REGION 1..409: note = Ga0315281_10079981
MPCSNKKARLLLEQKKARITCYEPFTIQLLTVGGETKQEVILGVDAGSKKIGLSAVTEKEELFSAEVRLRTNIVELIATRSQLRRARRSRKTRYRKVKFLNRKKPIGWLAPSIDNKINTHLRIINKIYQILPITKIIVEVASFDIQKIKNPSIEGIGYQRGEQLDFWNVREYVLFRDGHKCQGRKGCKNKELSVHHIESRKIGGDAPNNLITFCTKCHNDYHKGLLKLNLKRGISFRDAVFMGVMRWSLYNRLKDLYSNVSLTYGYITKNIRIVNGLSKEHRIDALCITGNPLVKRLKNWLMIKQVRKKKRSLHETIPRKGRKESNVISKRNSKNTKEIIVKGKKWCLFDKVKIGEKTGYISGFSNNLVYMQDIEGNYLQNSSKYKQISVENIDLISRNNNWIYKNVFK

SEQ ID NO: 7166 - protein, 406 aa, unidentified
MVYVQDINGKPMMPTTRHGKVRRLLKDKKAVVVNLCPFTIKLMYVTSDYKQEIVLGVDAGTKHVGLSATTKSKELYSSEVILRNDIVDLLSTRRELRRARRNRLRYRKPRFNNRIKSKRPGWTAPSVKYKIDAHIRVIDNVYSILPIFRIVIEVAQFDTQKIKNPEISGKGYQEGDQLEFWNTREYVLARDGHKCQYCKGKSKDSILNVHHIESRKTGGDSPSNLITLCETCHKEYHKGNIDLKIRRGKSLRDAAVMGIMKWRLYEELKSRYDRVFMTFGYITKHNRIKYGIEKSHTSDAFVISKNINAKRIERQYLKRLIRRHNRQIHKMKILKGGKKKNNQAPFEVFGFRLFDKVLYNNKIFFVYGRRKSGSFNIRDFNGENSKDVSRKKFKLIRGKSHPIILK

SEQ ID NO: 7167 - protein, 262 aa, unidentified
MVYVLDKNGQPLMPTDRHRKVRLMLQSGQAKVIKRCPFTIQLNYDSGHQTQEISLGIDAGSKHIGVSTTTKIKVLYEVDVELRNDIVDLLSSRRELRRGRRNRKTRYRQAKFNNRRRGNGWLAPSIRQKIGTHLTVVENICKMLPISRIMVETASFDIQKIKNPDIQGAEYQQGDQLEFWNVREYVLFRDGHTCQCCKGKSKDKILNVHHIESRKTGGNAPNNLITLCEICHTGYHKGAVQLPKTVKRGMRFKDAAFMGIMR

SEQ ID NO: 7168 - protein, 420 aa, unidentified
MQYAYVLNKHGEPLMPCSPGKARILLKQQKACVVKRTPFTIKLLHGSAGYKQPITLGVDAGSKHVGLSASTEKRELYSEEFTPRNDVVELLSTRRQNRRSRRYRKTRYRAPRFNNRVHSKHNGWLAPSVEVKIQEHITVIKRICRILPITLVRVETAEFDTQRLKAMLAGKPLPVGTDYQLGKMYDEYNVRQYVLKRDNYTCQCCGAHTTAKKTVKLHVHHLESRKVGGNAPSNLITLCTTCHNNLHKGKITLDGKKRGKTLRDAAFMGIMRNTLLTRLRNELHIPVQNTYGYITKLLREQNDIKKSHVNDARCISKHPLAEPCSICYRTKAIRHHNRQIHKAKILKYGIRKANQAPYIVKGFRLWDKVLYNGQECFISGRRTSGYFALRKLDGTTITNSISFKKLRLLEPATNYLIERK

SEQ ID NO: 7169 - protein, 434 aa, Moorena sp.
MRVFVLDKNLKPLDPCRPARARLLLKQGRAKVFRRYPFTIILPDLEVENCTTHNHQLKIDPGAKTTGLAIRQGNTVIWGAEITHRGFQIRDALTSRRQLRSFRRNRKTRYRKARFLNRKRSEGWLAPSLMSRVHNILTWVKKLVRFCPITGISQELVRFDTKKMENPEISGTEYQQGTLYGYEIREYLLEKWNRKCAYCGTTNVQLEIEHIKPKSLGGSDRVSNLAIACRDCNQAKGNQEIKQFLSGKPDILKRILSQAKRSLADAAAVNSTRWKLYNELKLTGLPVKTGSGGQTKYNRRRFSLPKTHWLDAACVGDVQSIFVEDYQILSIVAKGHGTRQICRTDKFGFPKRYCSRTKIHKGFQTGDIVKAVVTKGKKIGTYVGRVATRKTGSFNILTTNGLIQGISHKYCIPIHKKDGYAYQINTLSSLSSHR

SEQ ID NO: 7170 - protein, 495 aa, unidentified
LVGNPFRRKTGRKQAPRDVDPSPALCGLRLKALRGRSGASDNKPLPTLAKDHHRPQGREDGTCEVSRYPSKENTLKVFVLNMRGQPLMPCSPPKARKLLRAGKAVPVRRTPFVIQLTVPTGETKQPITLGVDAGYKHVGLSATTAKEELLASEVELRQDVTDLLSDRLALRRARRNRKTRYRAPRFDNRVRSKHKGWLAPSVENRIQAHISRIEAVCRVLPITNIVIETASFDIQKIKNPEVEGTDYQQGEQLGFWNVREYVLFRDGHVCQACKGRSKDLILNVHHIESRKTGGDAPGNLITLCEACHKAYHAGKLKQFSPRRGASFRAETFMGIMRWTVLNRLRERHPELPVTNTYGYLTKHKRIVAGLPKTHCADAFCIAGVLDAKRRGEYLFQKQMRRHNRQIHKLTILKGGVRKRHQAPYLVHGFRLFDKVLSKGEVGFIFGRRSSGAFDVRRLDGTKISAGISYKKLSLLEKRKTFLTELRKEDGDSSRV

SEQ ID NO: 7171 - protein, 469 aa, Desulfobacter sp.; identical to SEQ ID NO: 2403

SEQ ID NO: 7172 - protein, 442 aa, unidentified; identical to SEQ ID NO: 2903

SEQ ID NO: 7173 - protein, 431 aa, unidentified
MPDKVYVISRLGHPLMPCSPAKARHLLDDKKAKVVKRMPFTIRLLYGSTKYIQPIILGVDAGSKTIGLSASTAKEEVFAAEVMPRNDVVENLSTQREFRRARRNRTTRYRKPRSDNRVRSNHERWLAPSVKVKIQEHITSIKRVCTILPISKVVIETAEFDLQLLKAIQEGKPIPEGEDYQKGEMYGSYNVCQYVLWRDNYTCICCGVRGTPKNPVRLHVHHFESRKYGGNAPDNHGTLCDDCHKKFHLGIITDVKLKTRRRQSTRDAAFMGIMRKTLMWRLRTELFIPVAETKGYITKATREKLLVLPKSHTRDALAIAQGRHGFGIKEYAYVEPANHIYTVRPVRHHNRQLHKAFILKGGIRKRNQASKYVFGFRLYDKVLYQGKACFVWGRRTSGTFLLRTIDGIKVKDGVSYRNLTLLERSSNYLIA

SEQ ID NO: 7174 - protein, 514 aa, unidentified; identical to SEQ ID NO: 6277

SEQ ID NO: 7175 - protein, 238 aa, unidentified
MYDEYNVRQYVLKRDNYTCQCCGAHPTEKKPVRLHVHHLESRHVGGNAPNNLITLCVACHKALHEGKITLDKGKKRGKPLRDAAFMGIMRNTLLARLKDELNIPVKQTYGYITKLLREKNKIPKSHVNDARCIAKAPNAKPCDTMLYTRALRHHNRQIHKAKILNGGIRKKNQAPYLVKGFRLWDKVRYNGEECFITGRRSSGYFALKKYDGTVISNSASYKKLMLLEAATNYITERS

SEQ ID NO: 7176 - protein, 544 aa, unidentified
MKQKKQKVMVYILNKKGKPLMPTTRCGHVRKLLNSKKAVVVNSNPFTIRLKYDTPNGVQDVFAGIDSGRENIGSGASNEDGDCLYLGELKTSNKSIKLKMTERAGFRKERRRHDRQNKQRKARKDHTEIQNGNADICRTTISCKSVQISYPAAEKSVTHKIIRGKEGKFANRHRDEGWITPSARQLVQMHMNDLRSICKILPISHVTLERVAFDFQKLENENIKVWEYGKGKLYGYDSPEEYIHDVQNGKCLVCGKPHIDYLHHIIPRSKGGSDNVSNIAGLCYDCHYGPMGVHNCQDTQDRLPELKNEANKQYKVSLLNSVMPVLIEEMDKFCEANSIIFSICEGHDTAKVRDMYDLQKDHCLDGFAISLVGRNVKSVDVMPDRIYQKQRYKKKSKNIIQKRNCREYYDGKKLVAVNRHKGTDQKADSLEEYMNTYAETHTTDECKKHFDSLVVKPARRTYTFHKEWRICPFHIGDKVRYEKKNKIKGNTKVDTFICEGIRFVKDENKAEVKHNKTKSKKMKFCRVLEAGCTPYIDYRKLALM

SEQ ID NO: 7177 - protein, 386 aa, unidentified
LTIATGETKQPVSLGVDAGYKHVGLSASTEKAELYASEVELRQDITDLLSARRALRQSRRNRKTRYRAPRFDNRIRTKRKGWLAPSVENRINAHLSRIEAVLRLLPITKITVETASFDMQRLKNPDISGKEYQEGEQLGFWNVREYVLFRDGHVCRHCHGRSKDPVLNVHHLESRRTGSDSPDNLITLCETCHKALHRGEITLKAKRGQSFRAQAFMGIMRREVLNRLKASYPELKVHETYGYLTKHARIANGIVKSHGADAFCIAGNLGAERLGEFFFQKQTRRNNRQIHKLSILKGGIRKRNQAPFEAKGFRLFDKVACQGEEGFIFGRRSSGSFDVRKLDGTRISAGISCKKLRLLEKRRTYLTEIRKEEALPPLPEGRGLRA

SEQ ID NO: 7178 - protein, 406 aa, unidentified; identical to SEQ ID NO: 3415

SEQ ID NO: 7179 - protein, 346 aa, unidentified
LFVYMVNCHGQPLMPCSPRKARLLLKAGKAKIVKMVPFTLQLLYGSSGYKQEVALGIDAGTQHIGVCATTEKTVLFEAEVQPRTDIQELLATRRQFRRARRKRKTRYRQARFQNRKKPQGWLAPSVRHKVDAHLKVIKLVHKLLPVRRITIEVAQFDIQKIRNPDIEGEGYQQGPQLGFWNVREYVLFRDGHACQWCKGKSKDRILNVHHIESRKTGGDRPDNLITLCETCHDLIHRTHQEYKITRKRHGFRDATQMGIIRWKIYEQARASFPHVHLTYGYITKQTRIEHGLEKSHVVDARCISGHPLAASDGTWHLVKFIRRNNRQLHKATIRKGGKRQRNTAPK

SEQ ID NO: 7180 - protein, 428 aa, unidentified; identical to SEQ ID NO: 3484

SEQ ID NO: 7181 - protein, 470 aa, unidentified
MSVFVVGLNGCRLMPVSERKARLLLKGGKASVYRKVPFTIKLNYKTGSTVQPGYLGIDTGSQHIGVSVVRKDGTVLHKEEIGLRDSMSKRKLLESRASSRRGRRYRKTRYRHPKWKPKTKRIYNEKADRKGRHWKKQKNTFTSKRQAGWLPPSLQSKTDHHIQWIRKLLDLLPEGYRLSIELGRFDPARMRDPEIHGELYQKGPQYDYENVRAYVLARDGYTCRVCKKKGGKLHVHHILYRSRGASDNPKYMAAVCSKCHTTENHLPGGILYQWMQDQKKFTRGLRDATFMNILKKRLRKAFPDAVFTYGNITKADREKLELPKSHGNDATAIALVKTEVKSVKDEEPVIHIQQVRRKKRSLHEETPRKGRKEPNRTASRSDKNTKSVTVAKGSGEKKASMTACLFDRVELDGKKGWITGFTGTSCYVKDKEDNYICTSSKYKQVSISRLRILHHCGNWAIGAEKPLGKG

SEQ ID NO: 7182 - protein, 469 aa, unidentified; identical to SEQ ID NO: 6998

SEQ ID NO: 7183 - protein, 423 aa, Moorena sp.
MRVFVLNKNRQPLDPCKPVRARILLSSGKAKVYRRYPFTIILTEEIKQPITHKHQLKIDPGTKTSGLAIIQGKRVIWGAELTHRGFQIRDSLTSRRQLRRSRRNRKTRYRKPRFLNRTRPEGWLAPSLMSRVQNILTWVERLSRLCPITGISQELVRFDTQKLQNPEISGIEYQQGTLYGYELREYLLEKWNRKCAYCGTTGTQLEIEHIKPKSKGGSDRVSNLAIACHPCNQAKSNQNIELFLSKKPSILRRILSQAKRPLADAASVNTTRWKLYHDLKSTGLPVEVGSGGLTKFNRCRQNLPKTHWLDAANVGKVETLIIEVTNPLIITAKGHGTRQLCRTNKYGFPTRHCSRIKFHKGFQTGDIVRAVVTKGKKIGTYIGRVATRKSGFFNISTKSGLVQGISHKYCQFIHRKDGYAYRT

SEQ ID NO: 7184 - protein, 414 aa, unidentified; identical to SEQ ID NO: 4347

SEQ ID NO: 7185 - protein, 512 aa, unidentified
MSTVYVLNKDGKPLMPTTRGGHVRHLLKEQKARVVRTNPFTIQLLYETDNLVQPLYLGIDPGRTNIGVAVVKTDGTAVFTAHLETRNKEIPKLMQGRKKARRARRTNGRRCRRQRRAKANGTISKKCVKQATAQNGSVSKRANEIGVIKRHLPGCEKEVLCIGIKNKEAKFSNRTRPEGWLTPTANQLLQTHINLVKKIQKFLPISDVVLEVNKFAFMQLDNPNIQKWQYQQGPLYQKASFEEAVSEMQEHHCLFCKNTIDHYHHVVPQSENGSNTIGNIVGLCTKHHDLVHKDTSWQEKLAKKKTGLNKRYGALSVLNQIIPALTKELSSLFPKHFFATNGKSTYDYRAAHGVSKDHWLDAYCIACSVLPNDVCDSDINNRVPYELKQFRRHDRRALHKENMSRVYTLNGKSVATNRHKATEQTTDSLEEFRQCQPDDVCKLKVKEHHPEYRNPKRNFPGCVFLVGKHTHVIQGTSGSHNGKADGYYDTNGNSYSSGKCKFVAKNEGIVFT

SEQ ID NO: 7186 - protein, 414 aa, unidentified
MPCSPAKARLLLKEKKAIVVRRTPFTIQLTIATGETKQPVSLGVDAGYNHVGLSASTEKAELYASEIELRQDITDLLSARRALRQSRRNRKTRYRAPRFDNRIRTKRKGWLAPSVENRINAHLSRIEAVLRLLPVTKITVETASFDLQLLKNPNISGKEYQEGEQLGFWNIREYVLFRDGHVCQHCHGRSKDPVLNVHHLENRRTGGDSPGNLITLCETCHKELHRGEITLKAKRGQSFRAETFMGIMRWEVLDRLKASHPKLEVQNTYGYRTKHARIVNGIAKSHCADAFCIAGNLGAERLGEFLFQKQTRRNNRQIHKLSILKGGIRKRNQVPFEVKGFRLFDKVACKGEEGFIFGRRSSGFFDVRKLDGTRISAGISYKKLHLLEKRQTYITEIRKEKALPPLPEGRGLRA

SEQ ID NO: 7187 - protein, 491 aa, unidentified
MPTKRKRHILKLLNTGKTRIAEKVPFTIQLKYENIPVLQPVTLAEDPGRTNIGVAVLSPLGNLMFAAVIETRNKEIKKLMADRKAHRQASRRGERRARQRLAKKYGTIIKAGMAMRKLPQYAADKFVACKFIRNTEARFCNRKRRTDWLTPTVNHLVQTHLNVIKKISRYLPVTDIAIEVNRFAFMQMENPNASGVDFQNGPLRGFDDVKAAIREQQNGKCLMCKNDIEHFHHMVPLSKGSSDTIQNQVGLCPKCHAKVHTDTSFRKKLEDKKSGLLKKYGALNALNQAIPFICKDLLAEYGKEHVHFCTGKETSLIRTSLGYEKTKDNQMHEVDAYCIGLASLELEDIKSQSFVNTYKIKQFRRQDRSIIHHQTERSYYLDEQKIATNRKPRFEQTGNALSDWYKKQVKACDKAKADKMLSTLKVKKSSRSYNSEGRLMPGAVFSYNGQRHVMSGQLTGGRYLRAYGDTKTNYPVSKCNILRSNEGLVFI

SEQ ID NO: 7188 - protein, 458 aa, unidentified
LTKDENRPSGRTTGLRAEQAEPAGIRKGDTLKVFVLNMRGKPLMPCSPAKARHMLKAGKAFVVRRTPFTIKLTIATGETKQDVTLGVDAGARHVGISATTEKEEVFASEVALRQDITGLLADRLAFRRARRNRKTRYRAPRFNNRVRSKHKGWLAPSVENRIQAHISRIEAVCRLLPVTKIVIETASFDIQKIRNPEVEGTGYQQGDQLGFWNVREYVLFRDSHICQHCRGRSKDPILNVHHLESRKTGGDAPNNLITLCETCHKAYHAGKIKLKVKRGQSFRAEAFMGIMRWTMLDRVRKAQPDLPVENTYGYLTKNTRITLGLPKTHCIDAYCIAGNLNARRRGVYLYQRQMRKHNRQIHKCKVLSKTLKDGTKVGYRKLNQTPYLVKNFRLFDKVRCFGQTGFIFGRRTSGHFDVRTLNRTRLSDCVNSKKLTLLEKRRTFLTELRKEDGASSPV

SEQ ID NO: 7189 - protein, 415 aa, unidentified; identical to SEQ ID NO: 2674

SEQ ID NO: 7190 - protein, 442 aa, unidentified
LEVRRAVFYRHYPAVIILKDVDARNIYKLPSYRIKIDPGAVHTGIAIVCNETNEVMYFLQIEHRGSEVKKALITRKQTRRNRRSRETRYRRCKFKNGGDFDSSRKNGWLPPSVKSTADNVIHWVEKLCRYINITECSFEAVRFDSQLMDNPEIGGEEYQQGTLSGYELREYLMEHFRHTCQYCGGESGDPVLEWEHKIPRSRGGSDSVKNASLACSCCNRDKGNRTLEEYLEDSKHISPKGKSEKALNEARISHISGILEKGTIYGSNRYSAWVNSTRRYIEKYLFLMFDDVECCSGGRTKYNRIKLKLPKDHHYDALCVGSVPKEGYTDRTNSYVLYVKATGRGTRFRGQCNSCGVITVKYKNNSKRKFGFQTGDIVQLNKPKGKDTGQYTGKVAVRSSGSFDLIRKGCKRITANYKYFRMMQYSDGYEYLGPLRPIPHSA

SEQ ID NO: 7191 - protein, 424 aa, Enterococcus sp.
MRVFVRNMQGKPLMPCSNRKARLLLKEGKAKIYQYNPFIIQLCYASREYVQECHIGIDTGAKHIGMAVTSEDKVLFKGEIELRQDVKSNLDTRRSYRRDRRNRKTRYRKARFLNRKKKESWLPPSIENRINHTFKWINKLVALLPNPKLHIEVGKFDVAKMINPNVQGVDYQHGQTYGFYNVRYFVFARDNYTCQCCKKSKNKILQTHHIIYRSNGGSNRADNLITVCTDCHTYENHQKGGILYQWQENHKKTKQYKEPPFMNVLRKRIFTQYPNAIITYGSETTPKRKELGLEKTHYNDAIVISGITKIKGNPNEWLLIKQFRKKKRSLHEATARKGRKEPNRLQKRNAKNTPYYKGFCLNDKVRVFNQVGHITGFTSSGAYIKNSKNEYITLPNKSYKQIGISNIRLLHHNNNWQYIHKHIA

SEQ ID NO: 7192 - protein, 438 aa, unidentified
MRVFVLNKNRQPLDPCKPARARILLRTGKAKVLRRYPLTIILTEEVSEPITHNHQLKIDPGAKITGLAIVQSNRIIWGAELTHRGFQIRDSLTKRRTLRRSRRNRKTRYRQPRFLNRKRSSGWLPPSLMSRIQNILTWVKKLTQLCPITGISQELVRFDTQKLENPEISGVEYQQGTLFGYEIREYLLEKWHRKCAYCGATDTQLEIEHIVPKSKGGSNRVSNLAISCHSCNQAKSNQEIEQFLSRKPNVLQRILSQAKKPLADAAAVNATRWKLYNELKLTELPVEVGSGGLTKFNRCSQNLPKTHWLDAACVGISTPERLIIKEVKKPLIVIATGHGSRQMCRTDKYGFPVRYVPRFKFIKGYQTGDIVKAIVTKGKKQGVYVGRVAVRTTGSFNIKTKNGLVQGISHKYCQHIHKKDGYAYVYGSKTSPFKAQYF

SEQ ID NO: 7193 - protein, 431 aa, unidentified; identical to SEQ ID NO: 4306

SEQ ID NO: 7194 - protein, 441 aa, unidentified
MSKVFVVDANKHPLNPVHPGYARLLLKQGKAAVLRHYPFVLILHAEVEMPQLEPLRVKLDPGSKTTGLALVKDATGEVIFAAEITHRGAEIKHALDGRRGVRRGRRQRDTRYRKPRFLNRRRPKGWLPPSLESRVCNVVTWVKRLRRLCPLAAISQELVRFDLQAMENPEIAGIAYQQGTLAGYEAREYLLEKWGRKCCYCGATRLPLQIEHIQCRAKGGSDRISNLCLACGPCNLKKGTVDIQVFLAKKPDLLKRILARARAPLADAAAVNSTRWALYERLQALGLPVECGSGGRTKFNRASRGLEKTHWHDAACVGASTPEILHLQGIVPLLITAQGYGCRQMCNVNEIGFPCSKPKGAKKVKGFQTGDIVRAIVTSGTKQGTYMGRVLVRATGSFDIRTKDGRVQGISHRFCTPIHRRDGYSYKQGADHAAHPTQSTR

SEQ ID NO: 7195 - protein, 465 aa, unidentified
MSTCVCVLSNSGERLMPTFRLGKVRRLLKDGKAKIVKHNPFTIQLLYDSKTNTQPIEICEDVGYNYIGISVKSQSHEYVSAQYDTLQDEKACHDSCRKLRRTRRNRLRYRKPRFDNRKRGEGWLVPSLRHKKELNVNVVKMYCAVMPITHATVEVGSFDTMLLQAIQKGESKPEGVDYQKGPRYNLATLREAVFYRDNYVCKVCGRKATEGAILHMHHMFYWKGRHGNSLDELLTVCEKCHTPANHQKSGKLYGFGENVKFADLSGAAFMNTVRWQIVNELYAAFGKDFVTVTYGAMTKEKRIALHLEKSHNNDAYAMGEFHPNCRCTFEHYEKVRRNNRILEKFYDSRYIDIRTGEIATGKELFNGRINRNHKKDSENLHKYRGKRLYKGHRALVRKKVNFNPGDLVSLNGEVLVVHGTHTNKKGTVNVEFKTPAKNGRKSANLKKLKIVKAAGSIHPAWEKVS

SEQ ID NO: 7196 - protein, 415 aa, Bacillus sp.
MLVYVINRHGKPLMPCKPRKARILLTEKKAKVVKLTPFTIQLLYGSSGYRQPVSLGVDAGTKHIGLSATTEKGVLFEAEVQLRTDIQDLLSTRREFRRARRNRKTRYRKAKFLNRKKPDGWLAPSIQHKVDSHIRIIEKVRRILPVKSITVEVAQFDSQKIKNPGIQGEEYQQGEQLGFWNVREYVLFRDKHTCQHCKGKSRDKILNVHHIESRKTGGDSPDNLITLCETCHHYIHQNGLEHLFTRKSATLRDTSQMTVMRWFIFNGLKKVFEGANITYGYITKNTRIRSGLGKSHLVDARCISGNPLAIPSHHTYFIKQVRKNNRQLHKATILKGGKRKSNKAERWVKGFQLFDKVEFVGSACFIFGRRTSGYFDLRQLDGTVIHRSACYKKLKPLERASTWLIQRREGQFLPA

SEQ ID NO: 7197 - protein, 422 aa, unidentified; identical to SEQ ID NO: 5333

SEQ ID NO: 7198 - protein, 441 aa, unidentified
LAKVSYGLYDAGLPQKIIQKERSTYMVYVLSQNGQPLMPTIRHGKVRRLLKEGKANVVKKCPFTIRLTYPSGDQTQEISLGIDSGSKYIGISATTQKKVLYEAEVELRNDISKLLAARRQNRRSRRSRKTRYRKPRFDNRKRKEGWLAPSVQQKVDCHLKVVEDVCKLLPVTRIIAEVASFDIQKIKDPKIHGTDYQQGDQLGFWNVREYVLFRDGHTCQCCKGKSKDKILNVHHIESRQTGGNAPNNLITLCETCHKGYHKGQVKLPKKIKRGMTFKDAAFMGIMRWAFYDRLKEIYLPLGIDVSLTYGYLTKNTRIAHQLPKTHYLDARCISGHPDAVSDGIYYHQKKIRCHNRQLHKANTLKGGIRKRNQAEYLVHGFRLFDKVRYQGKDYFIFGRRKSGYFDIRDLNGEKVNKGSISYKKLRLVETRRSYLTERRLA

SEQ ID NO: 7199 - protein, 438 aa, unidentified; identical to SEQ ID NO: 4848

SEQ ID NO: 7200 - protein, 430 aa, unidentified; identical to SEQ ID NO: 4002

SEQ ID NO: 7201 - protein, 453 aa, unidentified; identical to SEQ ID NO: 2687

SEQ ID NO: 7202 - protein, 424 aa, Tolypothrix sp.; identical to SEQ ID NO: 6304

SEQ ID NO: 7203 - protein, 326 aa, unidentified
VFKGTIQLRQDVKHLMDVRRGYRRYKRSHKRYRPARFDNRASSKRKSRIAPSIKQKKDSILRVVNKLDKITPISNIVLEDVAIDIRAMTEGYKPYRWQYQKSNRLDENLRKAAILRDGNRCMMCGKTNCILEVHHIQPRRLKGSDTLGNLITLCSGCHEKVSDEELNYQNYFYSLINGKNTRFDYAQHVMQGKTYLREELSKIAPLEHTVGGDTSNRRIDWDIEKSHSNDALCITGLQPSSTDVKDWNIKPMRRKSKAKTESLNEFKHRDIVRYTKKTGESYVGYITALYPEKNQCNITTLEGKVLKRYGIKSLDIVWRFSRIYWT

SEQ ID NO: 7204 - protein, 431 aa, unidentified; identical to SEQ ID NO: 2933

SEQ ID NO: 7205 - protein, 488 aa, Streptomyces sp.
VAREAENGSGDAPTHNPSSYEGGVGASRVFVLSKDGQPLMPCHPARARELLGKGRAVVARQVPFAIRCKDRTRAESAVDGVQLRIDPGSKGTGFALTDEKKETGSKGTAVTIRRGLISVELQHRGDQIHAGMQRRAGYRHRRRSANCRYRKPRSDNRTRPTGWMPPSVRHRVDTTFSLANRLCRYAPVTEIHVELVSFDTHSMSAGRPLRGAEFAQGTLAGTTARDYLRARWNNACAYCDATDVPLNIEHLRPRSRGGTNRITNLVLACTPCNSAKGSSPIEVFLAHRPERLARVLRQLKSPLRDAAAMNTTRWLLTEALNDLGIPTHTSTGQATKGIRTAMGLAKTHTLDALSVGQLDHEAGDVIVRYPEKVLVAKATGRGSYARTTPDRSGFPRLRRTRAKQHFGYITGDLVRATVPTGKRAGSWTGRISVRARGQHSLQTPTGRLNVSHRNLALLQRGDGYGYSVRSESAPPTSRKPVDRWPTGS

SEQ ID NO: 7206 - protein, 420 aa, unidentified
MQYVYVLSKHGEPLMPCSPGKARLLLKEKKARVVRRTPFTIKLLYGSAGYKQPITLGVDAGSKHVGLSASTKKRELYREEFTPRNDVVKLLSKRKQYRRSRRNRKTRYRAPRFNNRVHSKHKGWLAPSVEVKIQEHITVIKRICRILPISLVRVETAEFDTQRLKAMLEGKSLPVGTDYQLGEMYDEYNVRQYVLKRDNYTCQCCGAHTTKKKTVKLHVHHLEGRQVGGNAPNNLITLCVDCHKALHAGKVKLDGKKRGKSFKDAAFMGIMRKTLMARLRDELPIPVQGTYGYITKMRREQNDIKKSHVNDARCISKHPLAEPCSVCYRTKAIRHHNRQTHKANFSKGGTRQRSQMPYVVEGYRLWDKVLYKGQECFVSGRRASGSFTLKKLDGTRISKGVTFKKLRLLETATNYLIERM

SEQ ID NO: 7207 - protein, 391 aa, unidentified
MPIMVYVISQDGQPLMPTDRHGKIRRLLKSDKAKVVKHCPFTIQLLYGSTDYTQEISLGIDAGSKYIGISATTQNRVLYESDVELRNDIVSLLSARRQNRRTRRNRKTRYRKPRFNNRISCKKKGWLAPSVRQRVNTHLTVVAKVHQILPVTRIIVETASFDIQKIKNPTISGTDYQQGDQLGFWNVREYVLFRDGHVCQCCKGKSKDKILNVHHIESRKTGGDSPDNLITLCKTCHTGYHRGTIKLPKTIHRGTSFRDASFMGIMRWSFYDELKTLYPDVNLTFGYITKNTRIKNNLPKEHYIDARCISGHPLAVSDETYYYQKKVRCHNRQIHKNTILKGGVRKRNQAPYFVKGFRLFDKVMYQGQECFIFGRRSTGRMDLRLLDRTHI

SEQ ID NO: 7208 - protein, 465 aa, unidentified; identical to SEQ ID NO: 3287

SEQ ID NO: 7209 - protein, 421 aa, unidentified; identical to SEQ ID NO: 2738

SEQ ID NO: 7210 - protein, 408 aa, unidentified; identical to SEQ ID NO: 4142

SEQ ID NO: 7211 - protein, 428 aa, unidentified
MQYVYVLNKHGEPLMPCSPRKARLLLKQKKACVVKRTPFTIKLLYGSTGYKQPITLGVDAGSKHIGISATTEKHELYREEATPRNDVVDLLSARRAFRRSRRNRKTRYRAPRFNNRVHSKHKGWLAPSVEVKIREHITLIKRVCRILPITLIRVETAEFDTQRLKAMLESKPLPVGTDYQLGEMYDEYNVRQYVLKRDNYTCQCCGAHPTKTKAVKLHVHHIETRRTGGNAPNNLITLCTACHKALHAGKVTLDGKKRGKPLKDTAFMGIMRKTLLERLRKELKIPVQGTYGYITKYLREKHGIPKSHTNDARCISKNPLAIPCDTCYYAKAVRHHNRQLHKATILKGGIRKANQAPYIVKGYRLWDKVSYNGTECFITGRRTSGYFALKKLDGTVISNSISYKKLRLLEVATNYITERKRRGNSSHD

SEQ ID NO: 7212 - protein, 443 aa, unidentified; identical to SEQ ID NO: 4257

SEQ ID NO: 7213 - protein, 442 aa, unidentified
MVTVQQSTHHLPFGRVFIRRNLFMVYVISQDGKPLMPCSDPIARLLLKQGKAKVKKREPFTIKLTYETTNYTQGLTLGVDTGSGTIGTAVSKDNGDIVYMSEVVVRNDITDKMTQRAKYRRNRRNRKTRYRKARWLNRASSIKKDRFSPTMQSKLHSHVREIEYIQSILPVTEMVFETGQFDMHLMKNPSLANPKVRPWGYQKGANYGFENTKAMVLNRDNYTCQCCKGKHKDSKLEVHHIVFRSQGGSDEESNLLTLCHTCHKDLHSGKITPKLSGKVKGNLKYATQMNSIRKQLFRFYPNAIETFGYVTKVNRLHLGVAKEHYYDACTIATQGNAFNVKSNLYKKKCVSDGDFQKTKGIRSEQPIVTDKICGFRKFDKVRYFGNDYFIKGRMSTGYAILMDIDGNKIDFSTMPRGYKTPKLSNCKRITARSTVMTQVKVV

SEQ ID NO: 7214 - protein, 420 aa, unidentified
MLAYVLKQNGQPFMPTERFGKVRRLLKEGKAKVVRREPFTIRLLYESKTDVVQECYCGIDTGSKHIGVAVVGNDKVLYQSQTDLRSDIKRKMDARRSFRYNRRSRKTRYRKPRFLNRRNSIREDRLQPSVKHKVQAHIDEIEFCKKILPVSDIILEVSQFDTALMKNPSLINEKVKHWGYQKGFNYGYSSRRSAILHRDNYTCQCCGKKNCRLEVHHIKFRSDGGTDNEENLITLCEDCHRGIHAGTVVLNKKPKKSKGLKHATHMSIIRSRLLKEYPDAIETFGFVTAENRNHLKLEKDHYIDACVIASGGLEFKELDVIYKKRRIAKQDRILTKGIRREQKLPTGKIFGFKKFDKVEYLGETCFIKGRRSSGAFVLMDIDNNSIDFRDRGGKQNPPYRFIKRLNTRKSVLCVKERLER

SEQ ID NO: 7215 - protein, 383 aa, unidentified
VSFVFLVDTKRQPLSPVHPGRARLLLKAGKAAVLKRYPFTLILKAAIEQPQVQPLRLKLDPGSRTTGIAIVNDESGQVLFAAELAHRSQQIKKALDDRRAVRRGRRARHTRYRKPRFQNRSRPPGWLAPSLQSRVCNIETWVKRLRKLCPITAISLELVRFDLQLMQNPEISGIHYQQGTLAGYECREYLLAKWGRACSYCGKQNVPLQIEHIVARANGGTDRISNLCLACEPCNTRKGTQDIAVFLAKKPDLLKQIQAQAKAPLKDATAVNSTRWALFEQLKELGLPLECGSGGMTKYNRELRNLPKTHWVDAACVGKVVPAHLKHPGVHTGRVSVRAKGAFTISTNQGTVTDIGKKYCQVLQKADGYGYIQKGEAAVSPVP

SEQ ID NO: 7216 - protein, 406 aa, unidentified; identical to SEQ ID NO: 6445

SEQ ID NO: 7217 - protein, 419 aa, unidentified
MLIFILNKHGKPLMPCSPRQARLLLKKNLAKVIQRTPFTIKLLHGSSGYKQKIIAGMDTGSKTIGCAAIANNTVLYQSEVAIRQDISKKMQQRSMFRRTRRSRKLRYRQTRFNNRKNSLKLNRLPPSIKSKINSHLREKNFIESILPITKWIIELASFDIHKITNPQVSGSEYQQGKQLGYYNVKQYVLHRDGYKCQSGIKVKHNNKLQVHHIIYQSNGGNDAPDNLITLCKDCHSNLHKGVFSIKSKIAKTQHATQVSIIKSQLAKELTKFEITFGYETKFKREGMGLLKTHANDAIAICCNIDDKIKVDDTIYYKKHIAKGDYQQTCGSHSEKRIPTGKLFGLRKFDLVKTNKGIGFIKGKRSSGYFALMNIDGSKINDVVNVKKDCIRLAARTTTIISRKAAFPPRPEGRGFHAEV

SEQ ID NO: 7218 - protein, 529 aa, unidentified; identical to SEQ ID NO: 3816

SEQ ID NO: 7219 - protein, 396 aa, unidentified
VVRRTPFTIQLTIATGESKQPVSLGVDAGYKHVGLSASTEKAELYASEVELRKDITDLLSARRALRQSRRNRKTRYRAPRFDNRIRTKRKGWLAPSVENRINAHLSRIEAVLRLLPITKITVETASFDMQRLKNPDISGKEYQEGEQLGFWNVREYVLFRDGHVCRHCHGRSKDPVLNVHHLESRRPGSDSPDNLITLCVTCHKALHRGEITLKAKRGQSFRAQAFMGIMRREVLNRLKASYPELKVHETYGYLTKHARIANGIVKSHGADAFCIAGNLGAKRLGEFFFQKQTRRNNRQIHKLSILKGGIRKRNQAPFEAKGFRLFDKVACQGEEGFIFGRRSSGSFDVRKLDGTRISAGISCKKLRLLEKRRTYLTEIRKEEALPPLPEGRGLRA

SEQ ID NO: 7220 - protein, 406 aa, unidentified; identical to SEQ ID NO: 6079

SEQ ID NO: 7221 - protein, 431 aa, unidentified; identical to SEQ ID NO: 3801

SEQ ID NO: 7222 - protein, 432 aa, unidentified
MCYVFVLDRDRTPLDPCHPARARELLRDGRAAVLRRFPFTIILHDRTRAESVVHEHRLKIDPGSKTTGLALVAGARVLWAAELTHRGQRITAALLSRHAIRRGRRQRKTRYRQARFLNRTRPAGWLPPSLQSRVGNIMTWVERLARSCPLSALSQELVRFAMHQMQHAEISGVAYQHGELAGYEVREYLLEKWHRACAYCDAKDVPLEVEHILPKVRGGSNRVSNLTLACVPCNQKKGAQTAAEFGFPQVQAQARMPLKDAAAVNTTRWGLSQALQATGLPVETGTGGRTTYNRSRLGIAKSHWGDASCVGASTPDTLRVTGIQPVGIRAMGHGTRHMCRVGAHGFPQVHRARQKHYGGMQTGDIVKAVVPTGKYAGTWTSRVVVKARGWFALVIHGKKASVHQKHCTRLWAADGYTYTLPAAAGTTVSSPR

SEQ ID NO: 7223 - protein, 470 aa, unidentified
MSVFVVGLNGCRLMPVSERKARLLLKGGKASVYRKVPFTIKLNYKTGSTVQPGYLGIDTGSQHIGVSVVRQDGTVLHKEEIGLRDSMSKRKLLESRASSRRGRRYRKTRYRHPKWKPKTKRIYSEKADRKGRHWKKQKNTFTSKRRAGWLPPSLQSKTDHHIQWIRKLLHLLPEGYWLSIELGRFDPARMKDPGIHGELYQKGPQYDYENVRAYVLARDGYTCRVCKKKGGKLHVHHILYRSRGASDNPKYMAAVCSKCHTTENHLPGGILYQWMQDQKKFTRGLRDATFMNILKKRLRKAFPDAVFTYGNITKADREKLELPKSHGNDATAIALVKTEVKSVKDEEPVIHIQQVRRKKRSLHEETPRKGRKEPNRTASRNDKNTRSVTVSKGSGKKKVSMTACLFDRVELDGKKGWITGFTGTSCYVKDKEDNYICTSPKYKQVSISKLRILHHCGNWVIGAEKPLGKG

SEQ ID NO: 7224 - protein, 455 aa, unidentified
LQPVTIAEDPGRSNIGMAVVSLSGELLSAAVVQTRNKEIVKLMEKRKQHRRASRNGERKARQRLAKKCHTMIKTGFLMRKLPMYGKDKRVRCNVIKNTEAKFCNRKREDGWLTPSAEHLVRTHINLIHKMQKFLPITDVAIEINRFAFLSLEDPSISGVDFQNGPLKGYDDLNVAIEDLQDGHCLMCNSPIEHRHHIVPRSMQGSNTIGNIAGLCCKCHERVHKDARFEDRLKKKEAGLNKRYAAVSVLNQAIPFICKRLEQEFGKEHVHYCSGRDTSMVRRSLGYHKTKEEQLHEVDAWCIAVLALQHVPEKAPEFDHVHEILQFRRQDRSRIKAQTSRAYYHEGKKIAKNRKKAEGQKDDSLQGWRKRQVERYGEEQTRKMISQLKVKKSIRRYNRLDRLMPGAVFYYQGVRYVMRGQHSNGQYLQAVGMRDKDFPAKKCKIVVHNQGLVFVS

SEQ ID NO: 7225 - protein, 351 aa, unidentified
DNRKRGEGWLAPSLKHKKELNVNVVKMYCTVMPITHATVEVGSFDTMLVKAIQEGKVIPEGADYQKGPRYNLATLREAVFYRDNYVCKICGRKATEGAILHMHHMFYWKGRHGNSPDELLTVCEKCHTPANHQKSGKLYGFGGDVKFTDLSGAAFMNTVRWQIVNELYAAFGKPFVTITYGAMTKEKRIALQLEKSHNNDAYAMGEFHPNHRCTFEHYEKVRRNNRILEKFYDSRYIDIRTGEITTGKALFNGRINRNHKKDSENLHKYRGKRTYAGHRALLRKKVNLNPGDFVSLNGETLVVHSTHTKKNGAVNVEFETPAKSGQKSASLKKLKIVKAANSIHPAWKKIS

SEQ ID NO: 7226 - protein, 417 aa, unidentified
MPCSPAKARLLLKEKKAIVKRRTPFTIQFTIATGEARQPVTLGVDSGYKHIGLSATTEKAELYASQVELRQDITDLLSARLALRRSRRSRKTRYRAPRFDNRVASKREGWLAPSVENRIAAHMSRVEAVMRVLPVTAITVETAAFDTQLLKNPNIAGEAYQQGEQLGFWNVREYVLFRDGHVCQHCRGKSKDPILNVHHIESRRTGGDAPNNLITLCETCHKAFHRGENKLKVKRGKSFKAETFMGIMRWTLFERLKKAHPELRVRNTYGYLTKHKRISHGIAKSHCADAYCIADNLGAKRLEGFFFQKQTRKHNRQIHKLSILKGGLRKKNQAPYEVKGFRLFDKVICKGEEAFIFGRRTSGSFDVRRLDGTRISAGISCKKLRLLEPRTTYLTEFRKEAALPPLHECSGSRAEFR

SEQ ID NO: 7227 - protein, 420 aa, unidentified
MQYVYVLNKHGEPLMPCSPGKARLLLKQQKACVVKRTPFTVKLLFGSAGYKQPITLGVDAGSKHVGLSASTEKRELYSEEFTPRSDVVELLSTRRQNRRSRRNRKTRYRVPRFDNRVHNKHKGWLAPSVEVKIQEHITVIKHICKILPISLVRVETAEFDTQRLKAMLAGKPLPVGTDYQLGEMYDEYNVRQYVLKRDHYTCQCCGTHNTAKKVVKLHVHHLESRKTGGNAPSNLVTLCTTCHKNLHKGRVTLDGKERGKPLRDAAFMGIMRKTLMVRLKEELPIPVQGTYGYITKMRREQNNIKKSHTNDARCISKHPLAEPCSVCYRTKAIRHHNRQTHKANFSKKGIRKRSQMPYLVEGFRLWDKVLYKGQECFVSGRRSSGSFALKKLDGTSISKGVTFKKLRLLEPATNYLIERM

SEQ ID NO: 7228 - protein, 448 aa, unidentified
MSTGLRAVQAEPAGIRKGDALKVFVLNMRGRPLMPCSPAKARHLLKAGKAVVRRRTPFTIQLRIATGETKQSVTLGVDAGAKHVGLSAATEKEEVFASEVELRQDITGLLAARLSLRRDRRHRKTRYRAPRFLNRVRSKHKGWLAPSVENRIQAHMSCIDAVCRLLPVTRIVIETASFDVQKIRNLEVEGTGYQQGDQLGFWNVREYVLFRDGHVCQHCHGYSKDKILNVHHLESRQTGGDAPNNLITLCETCHKACHAGKIKLKVKRAQSFRAEAFMGIMRWTLLDRMRKAHSGLPVENTYGYLTKNTRITLGLPKTHCVDAYCIAGNLKAVRRGVCLHQRQVRKHNRQIHKCTVLSKTLKDGTKIGYRKLNQTPHLVKSFRLFDKVRCLGQTGFIFGRRSSGYFDVRRLDGVKLSSGISYRKLTLLEKRSTYLTELRKEDGASSPV

SEQ ID NO: 7229 - protein, 431 aa, unidentified
MPNKVYVINKHGRPLMPCSPAKARHLLDAGKAKVKKRTPFTIQLVYGSSGYTQEVILGVDAGSKTIGMSASTTKEELLSAEVKPRNDVVDLLSTRREFRRARRNRKTRYRKPRFDNRVRSKHKGWLAPSVEVKIQEHITSIKRVCRILPVSKVVIETAEFDLQLLKAIEEGKPVPQGEDYQQGEMYGHYNVRQYVLWRDGYTCQCCGAHATKKKEVRLHVHHLESRKVGGDAPDNQVTLCESCHEKLHKGLIAEKDFKKRKRRSTRDATFMGIMRKTLMQRLCSELPIPVVKTRGYITKATREKLLVLPKSHTNDALAIAQGKQGFNVGYLPGILQIDKIYTIRPVRHHNRQLHKATILKGGIRKSNQTEKYVFGYRLFDKVQFNGQDCFIWGRRTTGIFTIKTINGKMIKDGISFKKLKLVEKSTSYLIA

SEQ ID NO: 7230 - protein, 535 aa, unidentified; identical to SEQ ID NO: 6116

SEQ ID NO: 7231 - protein, 470 aa, Anaerostipes sp.; identical to SEQ ID NO: 2949

SEQ ID NO: 7232 - protein, 379 aa, Arthrospira sp.; identical to SEQ ID NO: 2972

SEQ ID NO: 7233 - protein, 417 aa, unidentified
MVYVLSIDKQPLMPIRRHGKVRRLLKEGKARVVRREPFTIQLLFETDNNVSHLVLKIDTGSKYIGAGVTDDNACVYYASEVEIRNDIHTKMVRRGMYRRARRSRKLRYRKVRFLNRRNSIKKDRFSPTMVSKYDSHQREIEFVKSILPIADLVFETGTFDTNLLNHAGEAFNRHWGYQKGPNYGYKNAQEACFNRDNYTCQCCKTKRGTLNAHHIIYRSKGGADTLDNLITLCVDCHKKLHRGELKEFELTISGKRRGNLKHATQMNSIRVQLLKHYPNAIETFGFVTKANREWLGLEKFHWMDAVSMGLNKKPTFLIDRIYKKKHVSKGQYQLYRGKNSNKKQPRGKVCGFLNRDIVKYRGQLYLIKGLISPCYCVLSDINGVEQKFKKPKTVKLSSIKRVSARSTTRCISQKIIY

SEQ ID NO: 7234 - protein, 460 aa, unidentified
MVITVDKNKKPLGVCTERRARILLSKRRACVYRYYPFTIIVKDADVRSLEKKEEYQIKIDPGAKTTGIAVVRTSDNAAVFFEQIEHRGEKVKSNLDARRMTRRNRRTRETRYRRPKWGSKQLPKGKKPGYDTKRPEGWLPPSVKSVADNIISWVIRLRKLFNITSCSFEAVRFDTQLIDNPDIGGVQYQQGELFGYEVKEYLLDKYGHTCQYCGGASSDPVLEWEHIVPKSKGGSDSVKNATLACRCCNQAKGSMTPQEWLSTIKGHTKLDKARQNGIHRVLSGKASGVGNRYCAWVSASRRYTEAALFAIFGDVECSTGGRTKYNRERLGLPKDHHYDALCVGTVPKGGYTDLTNGYFFYAKAIGRGSRFRGKINACGIITLKLKKGPKRRFGFQNGDIVRADVPKGKYQGQHVGRVITRASGYFDIRKTDGSLVTANSRYCKTSQKDNGFLGSYKRAS

SEQ ID NO: 7235 - protein, 414 aa, unidentified; identical to SEQ ID NO: 2588

SEQ ID NO: 7236 - protein, 417 aa, unidentified
MLTYVLAADGSPLMPTYNISKVRRMLKDGRAVIAGHKPGFTIRLTYALPDQKTPHTQKIELCEDTGYQHIGVSVKSKKHEYVHLQVDTLADEKNHHDAQRRYRRNRRNRLRYRAPRFDNRTHSKKPGWIAPSLQHKADIHVRLVSTFQKVLPICDVYLEVGTFDTQVLEAKEKGLPIPEGSDYQHGTRYGIATLREAVFYRDGYKCQCCGKGIKDGRILRVHHIGYWKTPSDHTDRMGNLITVCTKCHTAANHKKGGKPKMMPLTGAAFMNTVRWKIVQAVKDLDSNLTVHATYGADTKLSRRDHSITKTHANDAYCMGMFQPGHRAPEQLLKKKRRNNRVLSKFYDAKYIDSRDGVKKSGSDLSCGRTNRSEPRNGEQNLRIFHGKKVSKGRISVRRQRYVSVSKLRILHHAGAFV

SEQ ID NO: 7237 - protein, 400 aa, unidentified
LQFYRKEHGIMQYVYVLSKHGEPMMPCSPGKARLLLKQQKACVVRRTPFTIKLLYGSAGYKQPITLGVDAGSKHVGLSASTEKRELYREEFAPRNDVVELLSTRRQNRRSRRNRKTRYRAPRFDNRVHSKHKGWLAPSVEVKIQEHITIIKRICKILPISLVRVETAEFDTQRLKAMLAGKPLPVGTDYQLGEMYDEYNVRQYVLKRDNYTCQCCGAHTTAKKLVKLHVHHLESRKTGGNAPSNLITLCTTCHKNLHKGKVTLDGKERGKPLRDAAFMGIMRKTLMARLKKELPIPVQGTYGYITKMRREQNDIKKSHTNDARCISKHPLAEPCSVCYRTKAIRHHNRQTHKANFSKKGIRKRSQMPYLVEGYRLWDKVLYKEQECFVSGRRSSGSFTLK

SEQ ID NO: 7238 - protein, 413 aa, unidentified; identical to SEQ ID NO: 3587

SEQ ID NO: 7239 - protein, 535 aa, unidentified; identical to SEQ ID NO: 6116

SEQ ID NO: 7240 - protein, 460 aa, unidentified
MVAVVDLFGKPLMPTNEYRARKLLKQKKAKIFGYRPFTIQLTERKSTEIQPIELCMDTGYIHIGISAKSERHEYLGMQIDTLTDEKLKRDDKRQYRRKRRNRKRYRAPRFDNRRRKEGWIAPSLEHKKEIHIDAIQRICKVMPITDITLEIGNFDTHVLKAVEEGKPLPQGSDYQHGERYGIATLREAVFLRDGYKCQCCEKSVKDGAILHVHHIKYRSQGGTNRMSNLITVCDKCHTQKNHKPGGKLWNWKPKLAEFKGASYMTSIRWTLYNEVTALLPNSSVHITYGAKTKESRRKLDIKKSHVNDAYVMGLFCPKHRTKPVYFKKKRRNNRVLEKFYDAKYIDSRDGKKQSGQELFNGRISRNHRKDSENLHLYRKQKVTKGKRSIRNKHYPIQPHDILLYQKKKYENAGCHNNGSRVILLPEKKSVALKQLTIYQYAGGYYRVPYESNKKEERTGS

SEQ ID NO: 7241 - protein, 422 aa, unidentified
LRVFVLNKRGKPLMPCSPAKARLLLKEKKAIVVRRTPFTIQLTIATGESKQPVSLGVDAGYKHVGLSASIEKAELYASEVELRKDITDLLSARRALRQSRRNRKTRYRAPRFDNRIRTKRKGWLAPSVENRINAHLSRIEAVLRLLPITKITVETASFDMQRLKNPDISGKEYQEGEQLGFWNVREYVLFRDGHVCRHCHGRSKDPVLNVHHLESRRTGSDSPDNLITLCETCHKALHRGEITLKAKRGQSFRAQAFMGIMRREVLNRLKASYPELKVHETYGYLTKHARIANGIVKSHGADAFCIAGNLGAERLGEFFFQKQTRRNNRQIHKLSILKGGIRKRNQAPFEAKGFRLFDKVACQGEEGFIFGRRSSGSFDVRKLDGTRISAGISCKKLRLLEKRRTYLTEIRKEEALPPLPEG

SEQ ID NO: 7242 - protein, 456 aa, unidentified; identical to SEQ ID NO: 4174

SEQ ID NO: 7243 - protein, 423 aa, Moorena sp.
MRVFVLNKKGQPLDPCKPARAIILLSTGKAKVYRRYPFTIILTEEIKEPVTHEHQLKIDPGAKTSGLAIVQGQRVIWGAELTHRGFKIREALTSRRQLRSSRRNRKTRYRKPRFLNRTRPKGWLAPSLMSRVKNILTWVKKLIRLCPVIGISQELVRFDTQKLQNPEISGVEYQQGTLYGYELREYLLEKWNRKCAYCGTTGTQLEIEHIKPKSKGGSDRVSNLAIACHPCNQAKSSQDIELFLSKKPSILKRILNQAKRPLADAASVNVTRWKLYHNLKSTGLPVEVSSGGLTKFNRCRQNLPKTHWLDAANVGKVETLIVEVTHPLLIAAKGHGTRQLCRTNKYGFPIRHCSRTKIHRGFQTGDIVRAVVTKGKKVGTYVGRVATRKSGYFNISTKSGLVQGISHKYCKFIHRKDGYAYTN

SEQ ID NO: 7244 - protein, 545 aa, unidentified
LSRTIPLTANTQPRETQPPVSAGETYSKRRVAYMPTVYMLNKDGKPLMPTTRCMHVRHLLKNGKARVVKSKPFTIQLLYETDDVVQPLYLGIDPGRTNIGVAVVKADGAAVFTAHLETRNKEVPKLMKKRKESRCARRTNGRRCRRQRRAKTNGTISKKCVKQTTAQNGSVSKRAKEIGVIKRHLPGCEKDVLCIGIKNKEAKFTNRARPEGWLTPTANQLLQTHINLVKKIQKFLPISDVVLEVNKFAFMQLDNPNIQKWQYQQGPLYQKGSLENAVSEMQEHHCLFCEKPIEHYHHVVPKSENGSNTIANIVGLCTEHHNLVHKDATWQKKLAKEKVGLVKKYSALSVLNQIIPALTKEMNSLFPKHFFVTNGKSTYDYRTAHGVSKDHWLDAYCIACSVLPNDVCDSNINSHVPYELKQFRRHDRRVLHKANMSRVYTLNGKTVATNRHKAIKQTTDSLEEFRQSHPGDVCKLKVKEHHPAYRNLNRNYPGSVFLVDGQVHVMQGVSGSHNGKADGYYNTNGNAYPYYKCKFVVKNEGIVFA

SEQ ID NO: 7245 - protein, 420 aa, unidentified
MQYVYVLSKHGEPMMPCSPGKARLLLKQQKACVVRRTPFTIKLLYGSAGYKQPITLGVDAGSKHVGLSASTEKRELYREEFTPRNDVVELLSTRRQNRRSRRNRKTRYRAPRFDNRVHSKHKGWLAPSVEVKIQEHITVIKHICRILPISLVRVETAEFDTQRLKAMLAGKPLPVGTDYQLGEMYDEYNVRQYVLKRDNYTCQCCGAHTTAKKLVKLHVHHLESRKTGGNAPSNLVTLCTTCHKNLHKGKVTLDGKERGKPLRDAAFMGIMRKTLMARLKEELPIPVQGTYGYITKMRREQNDIKKGHTNDARCISKHPLAEPCSVCYRTKAIRHHNRQTHKANFSKKGIRKRSQMPYLVEGYRLWDKVLYKEQECFVSGRRSSGSFTLKKLDGTSVSKGVTFKKLRLLEPATNYLIERM

SEQ ID NO: 7246 - protein, 406 aa, unidentified
MVYVQDIDGKPLMPTTRHGKVRRLLKSNKAVVVNLCPFTIKLMYVTSDYKQEIVLGVDAGTKHVGLSATTKSKELYSSEVILRNDIVDLLSTRRELRRTRRNRLRYRKPRFDNRIKSRRPGWVAPSVKYKVDAHIRVVENVCSILPISRIVIEVAQFDTQKIKNPNISGKEYQEGDQLGFWNVREYVLARDGHKCQYCKGKSKDHVLNVHHIESRKTGGNSPSNLITLCETCHKEYHKGNIDLKIKRGSSLRDAAVMGIMKWRLYEELRSKYDRVSMTFGYVTKYNRINHDIEKSHVSDAFVISKNFNAIRLGYYYKVRLVRRHNRQIHKQKIPKGGIKRLNQSPFEVFGFRLFDRVMFENNCYFIFARRKTGSFNIRDINGKNKRDITYKKLKLSRCKRFMIEKS

SEQ ID NO: 7247 - protein, 450 aa, unidentified; identical to SEQ ID NO: 2935

SEQ ID NO: 7248 - protein, 415 aa, unidentified
MENRIEYCFVVDKNNRPLTPTKVNKGWYLVRKSRAKLKSKYPMVIQLEKEVKSDEDDESHIVCGIDDGSAHVGLAIVQKCPTKNKVVFKGTIEQRQDVKHLMDVRRGHRRYHRYHKRYRQARFNNRSSSKRTCRLAPSIKQKKDAILRVLYQLNKWVNIQEYHLEDVCIDIRALTDDYKPYRWQYQKSNRLDENLRKATILRDECRCQECGKSNCVLEVHHIRARKYGGADTIGNLITLCSGCHQKTEGRERDFEDRYFNMIKSKPKRFDYAMYVMQGKTYLREKISELGSLYLTNGGETANKRIEWNMEKSHGNDAICVTDCIPDNCDVKEWIIKPMRRKSKAKTNNLLGIRHRDLVSYTYKNGETHTGYVTALYPEQLVLNFQSKTKHCKKVNVRKCRLLWKFNKIYWLEQCV

SEQ ID NO: 7249 - protein, 408 aa, unidentified; identical to SEQ ID NO: 2950

SEQ ID NO: 7250 - protein, 413 aa, unidentified; identical to SEQ ID NO: 2815

SEQ ID NO: 7251 - protein, 456 aa, unidentified
MSTCVCVLSNSGERLMPTIRLGKVRHLLKDGKAKIVKHHPVTIQLLYDSKTNTQPIEICEDVGYNYIGISVKSESHEYVSAQYDTLQDEKEHHDDCRKYRRTRRNRLRYRKPRFDNRKRSEGWLAPSLEHKKQLNIRLIERYVSVIPITRATVEVGSFDTMLLQAIQKGESKPEGVDYQKGPRYNLATLREAVFYRDNYTCQVCGRKIADGAILHMHHMFYWKGRHGYQLDELVTACEKCHTPANHQKGGKLFGFGEDKEFANLSGAAFMNAVRWQIVNALYATYGKEFVTITYGAMTKEKRIILGIEKTHSNDAYAMGDYHPAHRCVFRHYQKRRRNNRVLEKFYDATYIDARTGNKAKGKELFNGRINRNHKKDSENFHKYRSKKVSKGRRSIRRQRYAIQPYDTVRLEGKTYITSGCHNKGTRLLIPVNGKSKSVAISKVQVVCHAGAWIQII

SEQ ID NO: 7252 - protein, 431 aa, unidentified; identical to SEQ ID NO: 4535

SEQ ID NO: 7253 - protein, 456 aa, Halomonas sp.; identical to SEQ ID NO: 2773

SEQ ID NO: 7254 - protein, 421 aa, unidentified
MRGRPLMPCSPAKARHLLKAGKAVVRRRTPFTIQLRIATGETKQSVTLGVDAGAKHVGLSAATEKEEVFASEVELRQDITGLLAARLSLRRERRQRKTRYRAPRFLNRVRSKHKGWLAPSVENRIQAHLSRIDVICGLLPVTKIVIETASFDIQKIKHPDVEGTDYQQGDQLGFWNVREYVLFRDGHVCQHCHGHAKDKILNVHHLESRQTGGDAPNNLITLCETCHKACHAGKIKLKVKRGQSFREEAFIGIMRWTLLDRVRKAHPGLPVENTYGYLTKNTRITLGLPKAHCVDAYCIAGNLKAVRRGVYLHQRQVRKHNRQIHKCTVLSKTLKDGTKIGYRKLNQTPHLVKNFRLFDKVRCLGQTGFIFGRRSSGYFDVRRLDGVKISSCINYRKLTLLEKRGTCLTELRKEDGASSPV

SEQ ID NO: 7255 - protein, 477 aa, Blautia sp.; identical to SEQ ID NO: 2707

SEQ ID NO: 7256 - protein, 413 aa, unidentified
MTSYSFVLDANGKQLAPTKEPKAWFLIRKKRAALVSKYPMVIQLMKEIPENEICQDEIRCGIDDGGLHVGIALVQKCKTKNKVVFKGTMEQRNDVKHLMEVRRGYRRYHRYHKRYRQARFDNRKSSKREGRIAPSILQKRQATIRVIHWLNKWINITNYWLEDVSVDIRALTDGYQSYRWQYQRSNRLDENIRKAAILRDGGKCMECGKSNCRLEVHHIKPRRRNGSNTLDNLITLCESCHQKTEGQEELYMDRYFSLLKSSDNKNLNYAQHVMIGKRWLRKQLSGLGVLYLTSGGDTANKRIDWNIEKSHANDAVCITDLQPDTCDMKEWTMKPMRRQSKAKTDHVLGIHHRDLVEYTFKNGETHRGYVTALYPEQKAINFQSPTKHCKKVNARKCKLLWNYSKIYWFENAS

SEQ ID NO: 7257 - protein, 422 aa, unidentified
MQYVYVVGSNGKPLMPCSPAKARKLLKSKSAAVLQRTPFTIKLLHHAGGYKQPITLGVDAGSKHVGLSACTDTEELYKEELTPRNDVVKLLSARHECRRGRRHRKTRYRAPRFNNRVHSKHKGWLAPSVEVKIQEHITAIHRICRRLPITKIVVETAEFDTQRLKAMLEGKPLPVGIDYKRGEMYDEYNVRQYVLKRDNYTCQHCGARGSAEKGIKLHVHHLETRQTGGNAPNNLITLCKDCHTALHDRKITLKLDKKKRGKPLRDSAFMGIMRKTLLSRIRKEVAIPVVETQGYITKLLREENHIRKSHTNDARCIAGCPKALPCDTTYHAKAIRHHNRKIHKTNILKGGVRKLNQAPYKVFGFRIWDKVKYKGQECFITGRRSSGYFALKKLGGTTISNSANYKKIHFLEPANHYIIERS

SEQ ID NO: 7258 - protein, 406 aa, unidentified
MVYIQDIDGKPMMPTTRHGKVRRLLKDSKAVVVNTCPFTIKLMYKTSDYKQEIVLGVDAGTKHVGLSATTKSKELYSGEVILRNDIVELLSTRRESRRTRRNRLRYRKPRFNNRIKSKRTGWVAPSVRHRIDAHIRVIDNICSILPVSRVIVEVAQFDTQKIKNPDISGDEYQEGDQLGFWNVREYILARDGHKCQHCKGKSKDPILNVHHIESRKTGGDSPSNLITLCETCHKEYHKGNIDLKVRRGRSLRDAAVMGIMKWKLYEELKSRYPNVSMTFGYITKYNRIKYGIEKSHTSDAFVISRNFNAKRIERQYLKRLIRRHNRQIHKMKILKGGKKKNNQAPFEIFRFRLFDKVLYNNEILFVYGRRKSGNFNIRDFNGENPKDVSHKKLKLIRGKRHLIILK

SEQ ID NO: 7259 - protein, 426 aa, unidentified
MVFVLDANKKPLSPCHEAVARKLLKQGKAAIFKKYPFTIILKKSAEDTKNKQEYRLKIDYGSKHTGLAILQNNNVIWLAQIDHRTDIKKKLDDRRMFRRNRRNRRTRYRKPRFLNRKRKEGWIPPSLESRVNNIKTWVNRLQKLIPLTHISYENVKFDTQLMQNPEISGIEYQQGTLQGYEIREYLLEKFGRKCCYCGKENIPLEIEHIIPKSRGGTNRIDNLCLACHECNQKKGNMTAEEFGYLDIQKQVKQTLKDSSVVNSTRWKVYNLLYNSGLEVECGTGALTKMNRIKLGLPKEHYFDACCVSQSTPDKLYFKTKNVLYIKAKGRGSHCRTNLDKYGFPRGYLARQKYFFGFQTGDMVKAEIPKGKYKGIWYGEVACRKSGSFDIKDKEGQRVVQGVNHKYFSVVQHFDGYSYRKEVAILI

SEQ ID NO: 7260 - protein, 413 aa, unidentified; identical to SEQ ID NO: 5965

SEQ ID NO: 7261 - protein, 416 aa, unidentified
MVYVLSKTGQPLMPTENHAKVRVLLKQQKAKVITNCPFTIQLLYNSADYTQPVSLGLDAGSKHIGVSATTETKVLYEADVTLRNDIVDLLSARREARRTRRNRKTRYRKPRFHNRTRKDGWLAPSVQQKVDTHLTVVRKVLKILPISSITVETASFDIQKIKDPGINGTDYQQGEQLGFWNVREYVLFRDGHECQCCHGRSKDPILNVHHIESRKTGGNAPNNLITLCETCHRGYHKGTVTLPKTIHRGMRFKDATFMGIMRWAFYKRLKELYTTNGIQVELTYGYITKNTRIEHGLSKEHFVDARCISGHPDAIPPKEVFYQKKVRCHNRQIHKYKILKSGIRKRNQAAYEVKGFRLYDTVLWKGKKCFIFGRRSTGRMDLRLIDGTHINASAGYKNLKLLRKRSNYLIEQRTSG

SEQ ID NO: 7262 - protein, 433 aa, unidentified; identical to SEQ ID NO: 6520
  source 1..433: note = freshwater bacterium LH6-2

SEQ ID NO: 7263 - protein, 443 aa, Lactobacillus sp.
IYVVDSNGTPLMPTSRLGMVRRWLKTGQAKWFGNSRNTIQFVRPVTTNTQELTLGVEAGFHLGLSVVGNNREYYVSESLRKSEKDRITSRRELRRTRRNRLRYRKARFNNRRRKDGWLAPSIQHRLDFTIKEIKRLYKFLPITNLVVEVTPFDNQKLLNPDIQGWQYQKGKMYGFKTIKDYLLARDNYRDALDGKQYPASQLRVHHLVQRKDGGSNQPDNLVLLSDINHNQANHNNVILAKLRENRQKTLDYRGAYFMSILATRLSNYFEHYTTTQGYLTANLRQKYEIEKSHLNDAFVIAGGTDTTLRTNNVYSRQKLRNNNRVLQKFYDAKYIDSRDGKQKAGKELSSGRTRRSQELNYDNLRQLRKEKVKKGRVSIRRGHYQLRPHDVVLNTRTNRIETVKGVQNSGTVIKFQTGKTCSIKSVVSLYHVNGILEKKMKNI

SEQ ID NO: 7264 - protein, 442 aa, unidentified; identical to SEQ ID NO: 2637

SEQ ID NO: 7265 - protein, 452 aa, unidentified; identical to SEQ ID NO: 4732

SEQ ID NO: 7266 - protein, 512 aa, unidentified; identical to SEQ ID NO: 5174

SEQ ID NO: 7267 - protein, 359 aa, unidentified
MSTVYVLNKDGKPLMPTTRCWHVRRLLKEQKARVVTSKPFTIQLLYETDDVAQPLYLGIDTGRTNIGVAVVRTDGTAVFTAHLETRNKEIPKLMQERKKARRARRTNGRRCRRQRRAKANGTISKKCVKQDTAQNGSVSKRAKKIGVIKRHLPGCEKEVLCIGIKNKEAKFSNRTRPEGWLTPTANQLLQTHINLVKKIQKFLPISDVVLEINKFAFMRLDNPNVQKWQYQQGPLYQNASLEEAVSEMQEHHCLFCKKPIAHYHHVVPQSENGSNTIGNIVGLCTKHHDLVHKIPRGKKACQKENRAQQKIWCFECVEPNHSGADERVEFSFPEAFLCDQWQKYIRLSCSARRKQRPLA

SEQ ID NO: 7268 - protein, 427 aa, unidentified
MRVFVLDKNRKPLDPCHPAKARKLLKSGRAKVLRRYPFTIIIKDLEVENCSTHDHQLKIDPGAKTTGLAIVQGDRVIWGAELTHRGFQIKEALTSRRQLRRSRRNRKTRYRKPRFLNRTRPKGWLPPSLMSRVHNILTWVKKLIKFCPVTGISQELVRFDTQKMLNPEISGIEYQQGTLYGYELREYLLEKWNRTCAYCGANNTRLEIEHIKPKSKGGSDRVSNLAIACHNCNQAKGNLEIEEFLSSKPNILKRILSQAKKPLADAAAVNATRWKLHDELKLIGLPVEVGSGGLTKYNRCRQNLPKTHWLDAANVGKVETLYIEDYQPLLITAKGHGTRQICRTDKFGFPRLHCSPKKIHKGFQTGDIVRAVVTKGKKIGTYMGRIATRKTGSFDITTAKGRVSGISYKYCQAIHRKDGYSYQFYGG

SEQ ID NO: 7269 - protein, 428 aa, unidentified; identical to SEQ ID NO: 4606

SEQ ID NO: 7270 - protein, 431 aa, unidentified
MNRVFVLSKTGKTLMPCHPARARQLLHDKKAVIKRLYPFTIQLTHRSEEYIQPVELKFDPGSKQTGIGIVLHGKNRLSAIYGAVLTHRGNEIKNNLDSRRMIRRSRRNRKTRYRQVRFLNRVRSKHKGWLAPSVQSRVDNIVEWSKRFIRYVTVGFITVESVKFDMQKMENADVDGIEYQRGTLFDYEVKEYLLEKYNYSCVYCGAKNVPFEKEHVVPRSRGGSNRISNLVLSCRSCNEKKDNLPIEEFLKDNPALLKKIKAQLKSSLKDAAAVNITRKQIVKELENLNVPVLTGTGAETKYNRVSQGYKKEHYIDALCAGTTGTKVYIPSTLKPLLIKKERRNNRQMCLVDKYGFPRGKAKGSKIVHGFKTGDIVKAVVLKGKKKGTYKGKVAVRSSGSFNIKVKQGVVEGIGWKNCVMLYRFDGYSYAY

SEQ ID NO: 7271 - protein, 443 aa, Ktedonobacter sp.
MNQVFVLDTTKQPLNPVHPGYARLLLKQGKAAVYRRYPFTIRLSRRVEQPILSPLRIKVDPGSKTSGLALVNDASGDVVWAAELTHRGEQIKRDLDRRRAIRRKRRQRKTRYRKPRFTNRRKRRGTLPPSLESRVCNVLTWVCRLMKVCPVTNISQELVRFDTQALETPDIEGAQYQRGQLSGYEVREYVLLKWKHQCAYCDARDVPLELDHIDPRSRHGSNRVSNLTLACTPCNQRKSNQDVRQFLRDEPERLARILAQMKAPLRDAEAVNATRWMLNARLKTLGLPVECGSGGRTKCNRITRELPKTHWLDAVCVGRSTPESLIIKNIVPLQIRATGHGSRQMCRMDKYGFPRTGSKQHKRVQGFQTGDLVRAVVTSGTKQGTYVGKVAVRSRGTFNISTAHGVVTDIPHRFCVLVARSDGYSYQQGKEAAFPPYLSGSLK

SEQ ID NO: 7272 - protein, 419 aa, unidentified; identical to SEQ ID NO: 5677

SEQ ID NO: 7273 - protein, 342 aa, unidentified
THINLVKKIQKFLPISDVVLEVNKFAFMRLDNPDIQKWQYQQGPLYKKESLESAVSEMQEHHCLFCKKPIDHYHHVVPKSENGSNTIANIVGLCAEHHNLVHKDVAWQEKLAEEKTGLNKKYGALSVLNQIIPALTNKLSVLFPKHFFVTAGKSTHDYRAAHGVSKDHWLDAYCIACSVLPSNVCDSNINNHVPYELKQFRRHDRRVLHKANMSRVYTLNGKAVATNRHKAIKQTTDSLEEFRQNYPDDVYKLKVKEHHPAYRNLNRNYPGSVFLVGKQAHVMQGIASSKDGKTTKYNDTNATTITAGKCKFVAKNSGILFVQCKFRKALSDGTTKKLQYPV

SEQ ID NO: 7274 - protein, 420 aa, unidentified; identical to SEQ ID NO: 5988

SEQ ID NO: 7275 - protein, 429 aa, Parasutterella sp.
LRVLVWNKRGKPLMPCSPAKARLLLKEKKAIVVRRTPFTIQLTIATGESKQPVSLDVDAGYKHVGLSASTEKAELYASEVELRQDITDLLSARRALRESRRNRKTRYRAPRFDNRIRTKRKGWLAPSVENRINAHLSRIESVLRLLPVTKITVETASFDTQLLKNPDISGKEYQEGEQLGFWNIREYVLCRDRHVCQHCYGRSKDPVLNVHHLESRRTGGDSPGNLITLCETCHKALHRGEITLKAKRGQSFRAEAFMGIMRSEVPNRLKASHPELEVNNTYGYRTKHARIANDIAKSHCADAFCIAGNLGAERLCEFFFQKQTRRNNRQIHKLSILKGGIRKRNQAPFEVNGFRLFDKVACQGEEGFIFGRRSSGFFDVRKLDGTRISAGISCKKLHLLEKRRTYLTEIRKEEALPPLPEGRGLRAKM

SEQ ID NO: 7276 - protein, 413 aa, unidentified; identical to SEQ ID NO: 2636

SEQ ID NO: 7277 - protein, 414 aa, unidentified
MPCSPAKARLLLKEKKAIVVRRTPFTIQLTIATGESKQPVSLGVDAGYKHVGLSASTEKAELYASEVELRPDVSDLLSARRTLRQSRRNRKTRYRAPRFDNRIRTKRKGWLAPSVENRINAHLSRIGAILRLLPVTKITVETASFDTQLLKNPDISGKEYQEGEQLGFWNVREYVLFRDGHACQHCHGRSKDPVLNVHHLESRRTGGDSPGNLLTLCETCHKALHRREIKLKTKRGQSFRAEAFMGIMRWEVLNRLKASHPELEVHNTYGYRTKHTRIVNGIDKSHCADAFCIAGNLGAKRLGEFFFQKQTRRNNRQIHKLSILKHGLRKRNQAPFEVKGFRLFDKVVCQGEEGFIFGRRSSGSFDVRKLDGTRISAGISYKKLCLLEKRRTYLKEIRKEEALPPLPEGRSLRA

SEQ ID NO: 7278 - protein, 417 aa, unidentified; identical to SEQ ID NO: 5520

SEQ ID NO: 7279 - protein, 502 aa, unidentified; identical to SEQ ID NO: 2616

SEQ ID NO: 7280 - protein, 416 aa, unidentified
MVYILNKHNEPLMPCSERKARLLLKDGMAIVYRRDIFTIKLINGSYGYKQHITLGVDCGSKHIGVSATTDKQELFSANAELRNDVVKLLSDRRMLRRSRRFRKTRYRKPRFNNRIVKNGWIAPSIKQKIQSHFNLVGFLHKLLPISNIVIETASFDMQKINNPIISGSEYQQGEQLDFFNVREYVLFRDNHICQHCNGKSKDKVLNVHHIESRKTGGDSPNNLITLCETCHKAYHRGELELNVKRGKSFRDAAFMGIMRWKLYDELKLRYDNVSMTFGYITKYKRIKLGLDKEHYNDAYCICGNLAAKMLSTHHFIRFIPRHSRVLHMQKFSKGGVRRSASASYWLNGGKPSKYGIRFTRFDKVNFNGITCFISGSSKGFAVLRDINWNKVNCCKTTVTVNKLALISRVHGCMLFG

SEQ ID NO: 7281 - protein, 406 aa, unidentified
MVYVQDINGKPMMPTTRHGKVRRLLKDKKAVVVNLCPFTIKLMYVTSDYKQEIVLGVDAGTKHVGLSATMKSKELYSSEVILRNDIVDLLSTRRELRRTRRNRLRYRKPRFDNRIKSRRPGWVAPSVKYKVDAHIRVVENVCSILPISRIVIEVAQFDTQKIKNPNISGKEYQEGDQLGFWNVREYVLARDGHKCQYCKGKSKDHVLNVHHIESRKTGGNSPSNLITLCETCHKEYHKGNIDLKIKRGSSLRDAAVMEIMKWRLYEELRSKYDRVSMTFGYVTKYNRINHDIEKSHVSDAFVISKNFNAIRLGYYYKVRLVRRHNRQIHKQKIPKGGIKRLNQSPFEVFGFRLFDRVMFENNCYFIFARRKTGSFNIRDINGKNKRDITYKKLKLSRCKRFMIEKS

SEQ ID NO: 7282 - protein, 518 aa, unidentified
LANLKLIDELLEKTEYIYVLGTDGKPQMPTNRKVRVRSLFKSGLAKIVDTVPFTIRLLYENDAVLQPITIAEDPGRTNIGAAVLTQLGDLVFSAVVETRNKSIKKLMSDRKAYRQASRRGERKARQRLAKRHGSMIKAGMIMRKLPQYAADKFVTCKIIKNTEARFCNRKRMPDWLTPTVNHLVQTHINLIKKVEKYLPITDVAIEVNRFAFMQMENPDASGVDFQNGPLKGFDDVKAAICEQQHGKCLMCKNDIEHFHHIVPRSKGGSDTIQNQAGLCKKCHAKVHTDAEFQAKFKDKKEGLIKKYGALSALNQAIPFICKELLEIYSVEHVHFCTGKDTSLIRSSLGYEKTKDNQMHEVDAYCIGLAAIGADKAKRPDFNNVFKIKQFRRQDRQLVHYQKERTYYLDGKKIATNRNPRFEQKGDALSDWYKEQIKIYGQYEAEKMRSRLTVKKSKRSYNTTKRLMPGCVFYYDGQRHVMAGQSSYGRYLRAYNCGTKDFPASKCQVIQFNAGLVFV

SEQ ID NO: 7283 - protein, 420 aa, unidentified
MQYVYVLNKHGEPLMPCSPGKARLLLKQQKAHVVKRTPFTIKLLYGSTGYKQPITLGVDAGNKHVGLSASTEKREFYCEEFTPRNDVVDLLSTRKQSRHSRRNRKTRYRAPRFDNRVHSKHKGWLAPSVEVKIQEHITVIKRICRILPVALVRVETAEFDTQRLKAMLEGKPLPVGTDYQLGEMYDKYNVRQYVLKRDHYTCQCCGAHTTTKKTVKLHVHHLESRKVGGNAPSNLITLCTTCHDALHKGKVSLDGKERGKPLRDAAFMGIMRKALMARLREELPIPVQGTYGYITKMRREQNDIKKSHVNDARCISKHPLAEPCSVCYRTKAIRHHNRQTHKANFSKGGIRKRSQMPYVVEGYRLWDKVLYKGQACFVSGRRASGSFTLKKLDGTRISKGVTFKKLRLLEPATNYLIERM

SEQ ID NO: 7284 - protein, 470 aa, unidentified
MSVFVVGLNGCRLMPTSERKARLLLKQGKAFVEQKVPFTIRLNYKTGSTTQLGYLGIDTGSQHIGVSVVREDGTVLHKEEIGLRDSMSKRKLLEAKASLRRGRRYRKTRYRHPKWRPKTKRVYCEVPDRKGRHWQKKKITFTSKRPKGWLPPSLQSKTDHHIRWIKKLQDLLPEGYRLSIELGRFDPARMKNPEIHGDLYQKGPQYDYENVRAYVLDRDRYTCQICKKKGGKLHVHHILYRSHGATDDPQYMVTVCSDCHSAQNHLPGGILYQWMQEQKRFSRGLRDATFMNILRKRLIRAFPEAVFTYGNVTKVDREKLKLPKSHGNDATAIALVKTGITAVKDKESVICIQQVRRKKRSLHEETPRKGRKEPNRTAARNNKNTKAVTVTKRQNKKKVSMTGCLFDRVELNGKKGWISGFTGKSCYVKDADDQYLSTSPKYKQVSLSKLRILHHCGNWIIGAKKTLGNG

SEQ ID NO: 7285 - protein, 319 aa, unidentified; identical to SEQ ID NO: 3180

SEQ ID NO: 7286 - protein, 426 aa, unidentified
MVFVLNKSKKPLDMISNAEARILLRKKLAVIHKVYPFTIRLRDNSCVSKDKSYTVKLDPGSKHTGVAITDDKNSVVMLAEIEHRGHLIKKDLDSRRAVRKSRRQRKTRYREARFLNRTKPKGWLAPSVKSRADNVINFIKKYKKLLNIDKVIIENVSFDTAQMTAGTNLVGTTYQQGNLYQQKLRNFIFNRSNNKCVYCGAKATEIDHIVARANGGTNSTYNLAASCRTCNQMKSNLTLKDFGKLVGKDFSHLKPRKLPKNAAIVQSSRSYMVKEITKLVSDTTTYDAWMTKYNRDSLGLPKEHYYDALSVGEVPTKFNFLTDKILQISAKGRGSRQMCLMDKYGFPRTSAKASKMVNGFQTGDIVKAVVTKGSKQGEYLGRVAVRSRGYFNIQTKTQVVQGIGFEYCHIVQRSDGYLYSYKERKF

SEQ ID NO: 7287 - protein, 464 aa, unidentified; identical to SEQ ID NO: 6627

SEQ ID NO: 7288 - protein, 431 aa, unidentified
MPNKVYVINKHGRPLMPCSPAKARHLLDAGKAKVKKRTPFTIQLLFGSTGYTQEVILGVDAGSKTIGLSASAETEELLSAEVKPRNDVVDLLSTRREFRRARRNRKTRYRKPRFDNRVRSKHKGWLAPSVEVKIQEHITSIKRVCRILPVSKVVIETAEFDLQLLKAIADGKPVPQGEDYQKGEMYGHYNVRQYVLWRDDYTCQCCGAHATKKKEVRLHVHHLESRKVGGDAPDNQVTLCESCHEKLHKGLITAKDFKKRKRRSTRDATFMGIMRKTLMQRLCSELPIPVVKTRGYITKATREKLLVLPKSHTNDALAIAQGKRGFNVGYLPEIAQIDKIYTIRPVRHHNRQLHKATILKGGIRKSNQTEKYVFGYRLFDKVQFNGQDCFIWGRRTTGIFTIKTINGKMIKDGISFKKLKPVEKSTSYLIA

SEQ ID NO: 7289 - protein, 465 aa, unidentified; identical to SEQ ID NO: 4016

SEQ ID NO: 7290 - protein, 428 aa, Enterococcus sp.; identical to SEQ ID NO: 4335

SEQ ID NO: 7291 - protein, 458 aa, Lactobacillus sp.; identical to SEQ ID NO: 5912

SEQ ID NO: 7292 - protein, 502 aa, unidentified
MSIIYVQDRHGKPLAPTTRGGHVRRLLDSKQARVVCGNPFTIRLMYGVDPCTQGFILGIDPGRTNIGVTVAAADGTCVFSAKAETNNKDVPKRMKERKAHRQASRQGERKRRQRRARKNGTCFGERKRILPGCKEPITNHYITNTEARFMNRARTKGWLTPTANQLLQSTISLVRKVCKFLPVTDVVLELNEFAFMAMDDPGIQRWEYQKGPLYGYGSVEAAVYTQQDGHCIFCEQAIAHCHHVIPASKGGSDTLENRAGLCGGHHDLVHKEQSWTDKLAELKAGMNKRYAALSVVNQIIPRLADELGKMFPGHAFATNGWSTKQFRDAHGIPKDHNTDADCIACSILENPTIKLPEKVYELRKFRRHDRAQISRMEDLNYYLPGADPKTGKPKKVLAAKNRHKRTEQKTDSLEEFRAAHPNDVGRLMVARGGPKHKDPNRVLPGAIFQVETSSGNVEQLVLQGSHGRDKNGQPLYMEFVGQGNFRPNRCKYVARGRGWQFV

SEQ ID NO: 7293 - protein, 412 aa, unidentified; identical to SEQ ID NO: 3155

SEQ ID NO: 7294 - protein, 430 aa, unidentified; identical to SEQ ID NO: 6024
  source 1..430: note = Spirochaetales bacterium UBA6485

SEQ ID NO: 7295 - protein, 414 aa, unidentified; identical to SEQ ID NO: 4252

SEQ ID NO: 7296 - protein, 429 aa, Parasutterella sp.; identical to SEQ ID NO: 6752

SEQ ID NO: 7297 - protein, 522 aa, unidentified
MEQEFNDPVHQAPGHWRGQITSKDVPDCHVPAERKQMKVYVIGWNGLGLAPTTPRKARLLLSSGRAEVAFRQPFTIRLNYKTGCAHPDEMSLGIDTGSQHIGVSVISLAEESVISKEEYALRSTMEKRSLLETRKALRRGRRFRNIRYRHPKFRPGTKRTYLDVPIKRNGHLTHWKKESNDFDSSRPEGWLPPSMQSKLDHHVRIISRYRNALPPDTTTRIEVGRFDVQHMENPQIRGEMYQHGELYESENLKAYIFSRDHYTCQCCQKKAGTRRDDGTTVRLIVHHIDFRSNGASDNPKRLITVCDKCHTGAAHKPGGVLYDWMLKGKTVARGYRDTTVMNILRRRLWKAFPDAEFTYGNITAADRKTLGLGKAHCNDAAAIAAHGLEKIQDVPDTTYYCQIRKQKRSLHEASPRKGRKEPNCNAKRNAKNTCRAGKLYLNDKIRIAGQNGWICGFSGTSSVYIKNCEGEYIRMPGKTHKLIPAKRLTARTHCNNWAVYNTKTILYEGREEAAETMKVSSQ

SEQ ID NO: 7298 - protein, 424 aa, unidentified
MRIFVMNMRGDPLMPCTQKKARILLKEGKAVIYKYDPFTIQLTYATGETKQDCHIGIDTGSKHIGMAITSENKVLFKGEIELRQDVKSNIDTKHIYRRSRRNRKTRYRQPRFLNRKRSDKWLPPSLQNRVDHTFHWIDTFCSLVSDPILHIEVGKFDTAKMINPEINGVDYQHGQTYGFFEERYFVFARDNYTCQCCGKSKDKILQTHHIIYRSNGGTDRVDNLITVCTDCHTSKNHQKGGILYKWQEQHKKVKQYKEPPFMNAIRKRIFARYPNAHTTYGSETTPKRKAMKLDKTHYNDAIVISGINEIKENPEEWLLIKQFRKKKRSLHEATARKGRKKPNRNQTRNSKNTPYYKGFYLNDKVSVFGKSGYITGFTSNAAYIKDENNDYITLPNKTYKQVSINKMKLECHNNNWQYIIKNAV

SEQ ID NO: 7299 - protein, 396 aa, unidentified
VVRRTPFTIQLTIATGESKQPVSLGVDAGYKHVGLSASTEKAELYASEVELRKNITDLLSARRALRQSRRNRKTRYRAPRFDNRIRTKRKGWLAPSVENRINAHLSRIEAVLRLLPITKITVETASFDMQRLKNPDISGKEYQEGEQLGFWNVREYVLFRDGHVCRHCHGRSKDPVLNVHHLESRRTGSDSPDNLITLCETCHKALHRGEITLKAKRGQSFRAQAFMGIMRREVLNRLKASYPELKVHETYGYLTKHARIANGIVKSHGADAFCIAGNLGAERLGEFFFQKQTRRNNRQIHKLSILKGGIRKRNQAPFEAKGFRLFDKVACQGEEGFIFGRRSSGSFDVRKLDGTRISAGISCKKLRLLEKRRTYLTEIRKEEALPPLPEGRGLRA

SEQ ID NO: 7300 - protein, 442 aa, unidentified
MGEGLQPTERSRRQNLRVFVLNKRGQPLMPCSPAKARLLLKEKKAVVRHRTPFTIQLTQATGETVQPVTLGVDAGSKFIGLSASTEKAEHYASEAELRTEVVDLLSSRREMRRARRNRKTRYRAPRFDNRIHSKNKGWLAPSVENKINTHLSCVDNVRKCLPVTKIVVETAAFDIQKIKNPDIEGTDYQQGDQLGFWNVREYVLCRDGHQCCHCHGKSKDPILNVHHLESRKTGGNAPNNLITLCETCHKAYHDGKITLKQKRGQVFRDAAFMGIMRWTFFNRLKAQCPEIEVRNTYGYLTKNTRIRHGLEKSHHTDAFCIAGNLEAKRLGVYFFQKQTRKHNRQIHKMSILKGGVRKLQQAPYEVKGFRLFDKVRYDGREAFIFGRRSSGYFDIRLLTGEKVSAGVSYKKLVLLEKRKTFLTQLIKENAIPPATEVAGSLA

SEQ ID NO: 7301 - protein, 394 aa, unidentified
MPFTIRLLYGSTKYIQPIILGVDAGSKTIGLSASTAKEEVFAAEVMPRNDVVENLSTRREFRRARRNRTTRYRKPRSDNRVRSNHERWLAPSVKVKIQEHITSIKRVCTILPISKVVIETAEFDLQLLKAIQEGKPIPEGEDYQKGEMYGSYNVCQYVLWRDNYTCICCGVRGTPKNPVRLHVHHFESRKYGGNAPDNHGTLCDDCHKKFHLGIITDVKLKTRRRQSTRDAAFMGIMRKTLMWRLRTELFIPVAETKGYITKATREKLLVLPKSHTRDALAIAQGRRGFGIKEYAYVEPANHIYTVRPVRHHNRQLQKASILKGGIRKRNQASKYVFGFRLYDKVLYQGKACFVWGRRTSGTFLLRTIDGIKVKDGVSYRNLTLLERSSNYLIA

SEQ ID NO: 7302 - protein, 413 aa, unidentified
MTSYSFVLDANGKQLAPTKEPKAWFLIRKKRAALVSKYPMVIQLKKKIQENEICKDEIRCGIDDGGLHVGIALVQKCKSKNKVVFKGTIEQRNDVKHLMEVRRNYRRYHRYHKRYRQARFDNRKSSKREGRIAPSILQKRQATIRVIHWLNKWINITNYWLEDVSIDIRVLTDGYKSYSWQYQKSNRLDENIRKATILRDGGKCMECGKSNCRLEVHHIKPRRRNGSNTLDNLITLCESCHQKTEGQEELYMDRYFSLLKSSDNKNLNYAQHVMIGKMWLRKQLSGLGVLYLTSGGDTANKRIDWNIEKSHANDAVCITDLQPDTCDMKEWTMKPMRRQSKAKTDHVLGIHHRDLVEYTFKNGETHRGYVTALYPEQKAINFQSPTKHCKKVNARKCKLLWNYSKIYWFENAS

SEQ ID NO: 7303 - protein, 475 aa, Blautia sp.; identical to SEQ ID NO: 4128

SEQ ID NO: 7304 - protein, 424 aa, unidentified; identical to SEQ ID NO: 3434

SEQ ID NO: 7305 - protein, 424 aa, Ktedonobacter sp.
MVVMNVVYVLSPDRVPLMPCSCAIARLLLKQGKAKVVRRTPFTIKMYTQPVDTHTQPLTLGIDTGSAVIGSAVSDECGNILYVSEGEVRNDIAQTMKNRATSRRNRRYRKTRYRPARWLNRRNSLKTGRFSPTMTSKTEAHLREIRFVQSLLPIQSIVLETGTFNPHALKHPAVLQNKWMYQKGINYGLANTKAYVLTRDGYVCQRCKGQSKDRRLEVHHIVFRSQQGSDEEANLLTLCKTCHEGLHAGTVTLKQKGKRKGNLLHATQMNSIRIQLLSRVEAIETWGFVTKEHRLLAGLPKEHIFDAAMIATRGNIPVFQTTEVLLKKCISDGDYQQTKGKHSQQRIPTGKIAGFRKFDKVRYLGVEYFIKGRMSTGYAILMDLSGNKLALKPTPKFDNMKRVSARSSWIINQKAMPSFSSSPT

SEQ ID NO: 7306 - protein, 369 aa, unidentified
VDTGSGTIGTAVSNDNSDIVYMSEVIVRNDIMDKMTQRRKYRKNRRGRKTRYRKARWLNRANSTKTDRFSPTMQSKLHSHVKEIEYIKSILPITTMVFETGQFDTHLMKNPNLANPKVKHWGYQKGVNYGFENTKAMVLNRDNYTCQCCKGKHKDSKLEVHHIIFRSQGGSDEESNLITLCHTCHKDLHSGTINFKLKGKLKGNLKYATQMNSIRKQLFRIYPDAIETFGYVTKANRLVLGIDKEHYYDACTIATQGNIFTVKSNLYKKKCVSDGDFQKTKGIRSEQPIVTDKICGFRKFDKVRYFGNDYFIKDRMSTGYAILMDIDGNKADFSAMPKGYKTPKMVKLKRIEARTTWMITTVEVTPNIA

SEQ ID NO: 7307 - protein, 465 aa, unidentified
MSTCVCVLSNSGERLMPTFRLGKVRRLLKDGKAKIVKHHPFTIQLLYDSKTNTQPIEICEDVGYNYIGISVKSQSHEYVSAQYDTLQDEKACHDSCRKLRRTRRNRLRYRKPRFDNRKRGEGWLVPSLRHKKELNVNVVKMYCAVMPITHATVEVGSFDTMLLQAIQKGESKPEGVDYQKGPRYNLATLREAVFYRDNYVCKVCGRKATEGAILHMHHMFYWKGRHGNSLDELLTVCEKCHTPANHQKSGKLYGFGENVKFADLSGAAFMNTVRWQIVNELYAAFGKDFVTVTYGAMTKEKRIALHLEKSHNNDAYAMGEFHPNCRCTFEHYEKVRRNNRILEKFYDSRYIDIRTGEIATGKELFNGRINRNHKKDSENLHKYRGKRLYKGHRALVRKKVNFNPGDLVSLNGEVLVVHGTHTNKKGAVNVKFKTPAKNGRKSANLKKLKIVKAAGSIHPAWEKVS

SEQ ID NO: 7308 - protein, 431 aa, unidentified; identical to SEQ ID NO: 4463

SEQ ID NO: 7309 - protein, 424 aa, Microcoleus sp.
MSNFIFVCDTLMRPLSPCKPGVGRSLLKAGKASVFRRFPFTIILNKEVDATPEPLELKLDPGSKTTGIAIQQGDKIIFGAELQHRGQQIKQALLSRRQLRRGRRNRQTRYRQARFLNRTRPDGWLAPSLQHRVETTLTWVRKLMRFAPITSIIQELVRFDLQLIQNLEISGVLYQQGELQGYEVREYLLTKWNRQCAYCSVENVPFEIEHIQPKSRGGSDRVSNLTLACHGCNQKKGNQDVRAFLATQPDLLNRILKQAKLPLKDATAVNSTRWALFNALKETGLPVTTGTGGQTKFNRNRLGLPKSHWLDAACVGKFEALAVLTSKPLLIAASGHGTRQMCGTNKYGFPNRHKSRVQIHKGFQTGDIVSATVTAGKKVGSYIGRVLCRASGSFDIVTKSGRVAGISHKYCSPIHKKDGYSYAF

SEQ ID NO: 7310 - protein, 487 aa, unidentified
VQDVFAGIDSGRENIGSGASNEDGDCLYLGELKTSNKSIKLKMTERAGFRKERRRHDRQNKQRKARKDHTEIQNGKDDICRATISCKSVQISYPTAEESVTHKIIRGKEGKFANRHRDGDWITPSARQLVQMHMNDLKSICKILPISHVTLERVAFDFQKLENENIKAWEYGKGKLYGYDSPEEYIHDVQDGKCLVCGKPHIDYLHHIIPRSKGGSDKVSNLAGLCYDCHYGPMGVHNCRETQDRLPELKNEANKQYKVNLLNSVMPVLIEEMDKFCKANSIIFSICEGHDTAKVRDMYDLQKDHCLDGFAISLVGRNVKSVDVMPDRIYQKQRYKKKSKNIIQKRNCREYYDGKKLVAVNRHKGTDQKADSLEEYMNTYAETHTTDECKKHFDSLVVKPARRTYTFHKEWRICPFHIGDKVRYEKKNKIKGNTKVDTFICEGIRFVKDENKAEVKHNKTKSKKMKFCRVLESGCTPYVDYRKLALM

SEQ ID NO: 7311 - protein, 423 aa, Moorena sp.
MRVFVLNKNRQPLDPCKPARARILLSTGKAKVYRRYPFTIILTEEIKDPVTHEHQLKIDPVAKTSGLAIVQGTRLIWGAELTHRGFQIRVALNYRRQLRRSRRNRKTRYRKPRFLNRTRPKGWLAPSLISRVQNILTWVKKLIRFCPVTGISQELVRFDTQKLQNPEISGIEYQQGTLYGYELREYLLEKWNRQCVYCGVTGTQLEIEHIKPKSKGGSNRVSNLAIACRPCNQAKSNQDIELFLSKKPSLLKRILCQAKRPLADAASVNTTRWKLYHVLKSIGLPVEVGSGGLTKFNRCRQSLPKTHWLDAANVGKVETLIIEVTLPLLITAKGHGTRQLCRTNKYGFPTRHCSRIKFHKGFQTGDIVRAVVTKGKKIGTYVGRVATRKSGSFNVSTKSGLVQGISHKYCQFIHRKDGYAYTN

SEQ ID NO: 7312 - protein, 427 aa, Anabaena sp.; identical to SEQ ID NO: 2799

SEQ ID NO: 7313 - protein, 421 aa, unidentified
MLVFVKNKHGENLMPCKPSKARKLLKQKKAKIISYKPFTIQLLYGSSGYKQPVTLGVDLGSKHIGIAVTSEDKVLIKGEIELRDDIKENLDIRRQYRRSRRYRKTRYRKPRFNNRKRPEDWLPPSIQSRIDNTFRWIDNFINLLPSPKLCIEVGKFDVQKMMNPDIEGVEYQQGETYGYYDVRYYVFARDNYTCQVCKKKDKILQTHHIVYKSKGGTDRPSNLITVCTDCHTHKNHQEGGIFYKWMMEKKKMPSYKETPLMNIMRRRVFEKYPEANIVYGSYTTIRRKELGLEKTHYNDAIAITGIESIKHNPDNYFKIKQFRKKKRSLHEAIPRKGRKEPNRTQKRNSKNTKYRNGFYLNDKVKVFGKVGFITGFTNGGAYIQDIEGNYITIPNKSYKQVSFKYIEFINHNNNWQFISHL

SEQ ID NO: 7314 - protein, 411 aa, unidentified
MENRIEYCFVVDKNNRPLAPTKVNKGWYLIRKGRAKLKSKYPMVIQLEKEVESDEDGESHMVCGIDDGSVHVGLAIVQKCLTKNKVVFKGTIEQRQDVKHLMDVRRGYRRYHRYHKRYRQAKFNNRSSSKRTGRLAPSIKQKKDAVLRVLYQLNRWIDIQEYYLEDVCIDIRAMTDDYKPYRRQYQKSNRLDENLRKATILRDGCRCQECGKSNCMLEVHHIRARRYGGADTIGNLITLCEKCHDKTKGREKDFEERYFNMIKSKPKRFDYAMHVMQGKAYLREKISGLGILHLTNGGETANKRIEWNIAKTHSNDAICIADGIPDTCDIKEWIIKPMRRKSRAKTDNVLGIKHRDLVSYTYKNGETHTGYVTALYPEQLALNFQSKTKHCKKVNARKCRLLWKFNKIYWL

SEQ ID NO: 7315 - protein, 406 aa, unidentified; identical to SEQ ID NO: 6079

SEQ ID NO: 7316 - protein, 490 aa, unidentified; identical to SEQ ID NO: 6170

SEQ ID NO: 7317 - protein, 516 aa, Desulfotignum sp.
LHRELKTNGGMLPQSRPLEAWVADNLQGCGRNGSGHTAAVQQSRGESSTDARVEPSPAFAVNGVSRVFVLDKKGKPLMPCHPARARKFLAQGRARVHQMFPFTIRLVDRIREDSDVQPVNVKLDPGAKTTGMAVVRQDGGHIQILHLSELTHRGAAIRKKLDQRSNYRRRRRTANLWYRKKRFDNRTQPKGWLPPSLKSRVDNTLSWVKKYQRFCPFTGIVLERVRFDTQKLQNPDISGIEYQQGTLFGYEVKEYLLEKYKRTCAYCNGLSKDPFLEIEHFIPRNPSKGDKGSNRISNLAIACKTCNQESKKNLQPADWISLLSRSRKKIDQVRVKNATRFLEGRRPSLASTAAVNATRNAIFFELRDLGLPVECSTGGRTKYNRSRLDIPKTHCLDAACTGHVESVSGWKQNVFLIKAMGRGSYQRTRVDKYGFPRGTLMAQKTVKGFATGDMVKAIVPTGKKKGTYIGRVAVRKSGSFNIQTNTETVQGISWKYCKIISRQNGYNFASQVSSPT

SEQ ID NO: 7318 - protein, 438 aa, unidentified
MVYVLSKSGSPLMPTKRYGKVRRILKDGKAKVVKAKPFTIQLTYETTQYTQPITLGVDAGYQTIGISSITEDEELISGECQLLQGQVERNKERRMYRRQRRNKLRHRKPRFNNRKKPKGWLAPSIQHKLDSHIRLINQIKTILPITQIIIEVANFDIQAIKNPSISGKDYQQGEQLGYWNLREYILHRDNHQCQYCKSQGILEVHHIGYWKNDRTDRPGNLITLCISCHTPENHKGFLYGWQPKLKPFKAETFMSTVRWKLVNILNCTHTYGYLTKSKRIDLGLEKTHANDAFCIAGGTTQTRSTLFTIQQVRRNNRSLEKFYDAKYIDIRTSKKASGQELNNGRHTRNTNLNTKNLRQYRGKKLSKGRRQIRKSRYPFQPGDVVLCEGRKYTVKGTQNLGAYVKLTDLPKPVRTDRLKHLHFGKGFSWHSSPTYAIA

SEQ ID NO: 7319 - protein, 544 aa, unidentified; identical to SEQ ID NO: 3572

SEQ ID NO: 7320 - protein, 313 aa, unidentified
LRVFVLNKRGKPLMPCSPAKARLLLKEKKAIVVRRTPFTIQLTIATGEAKQPVSLGVDAGYKHVGLSASTEKAELYASEVELRQDITDLLSARRALRQSRRNRKTRYRAPRFDNRIRTKRKGWLAPSVENRIDAHLSRIEAVLRLLPVTKITVETASFDLQLLKNPDISGKEYQEGEQLGFWNIREYVLCRDGHVCQHCYGRSKDPVLNVHHLESRRTGGDSPGNLITLCETCHKALHRGEITLKAKRGQSFRAEAFMGIMRWEVLNRLKASHPELEVNNTYGYRTKHARISNGIAKSHCADAFCIAGNLGAK

SEQ ID NO: 7321 - protein, 393 aa, Exiguobacterium sp.
MFVFVLNHHGEPLMPCKPSKARKLLHNSKAKLVKQTPFTIQLLFGSSGYKQEISLGVDAGTKHIGFSATTSTKVLLEGEVQLRTDIQDLLATRRAMRSARRSRKTRYRQARFLNRKKPKGWLAPSVQHKVDAHLKLIRMIHRLLPIKHLTIEVAQFDIQKIKSPDISGDLYQKGDQLGFWNVREYVFFRDKHICQHCKGKSKDKILNVHHIESRRTGGDAPDNLLTLCETCHKKIHKEKLEHLFQRKSRSFRDASQMTVMRWFIYNAVKETYPYVKLTYGFLTKNIRIQNGLEKRHAVDARCISGNPLPEEPKVSYLFRQVRANNRQLHKMTIGKKGKRKANKAERFVHGYQLFDKVHYEGQTCFVFGRRKTGYFDLRTLQGVRVHKSASIRN

SEQ ID NO: 7322 - protein, 472 aa, unidentified; identical to SEQ ID NO: 4432

SEQ ID NO: 7323 - protein, 557 aa, unidentified; identical to SEQ ID NO: 7161

SEQ ID NO: 7324 - protein, 408 aa, unidentified; identical to SEQ ID NO: 5694

SEQ ID NO: 7325 - protein, 423 aa, unidentified
MQVVYVLNKDGLPLMPMHKLGKVRHFLKDGKAKVVKRSPFTIQLNYDCGNHTQSITLGVDAGSKHIGLSASTKKQELYCSDVELRDDVVELLSTRRENRRTRRNHLRYRQPRFDNRKKEDSWLAPSIRQKIDSHLKVIEEVHKILPITNIIVEVASFDIQKIKNPNINGIEYQQGEQLDFWNIREYVLFRDNHTCQCCKGKSKDKVLNVHHIESRKTGGNAPNNLITLCETCHNGYHKGTIQLPKTIKRGMSFKDATFMGIMRWAFYNKVKEVYEPKGISVSLTFGYITKNNRIKYGLAKEHYNDAYCITQNFKSKPLDTIIYQKKVRCHNRQIHKANFLKSGIKKLNQAPYIVKDFRLFDKVRYHGQDCFVFGRRISGYFDIRLLDGTKIHSSVNYKKLELLNTRKSYLQEERSRQFLPLIN

SEQ ID NO: 7326 - protein, 512 aa, unidentified
MSTVYVLNKDGKPLMPTTRCGHVRRLLKEQKARVVTSKPFTIQLLYETNDVVQPLYLGIDPGRTNIGVAAVKTDGTAVFTAHLETRNKEIPKLMQGRKKARRARRTNGRRCRRQRRAKANGTISKKCVKQTTAQNGSVSKRAKEIGVIKRHLPGCEKELLCIGIKNKEAKFSNRTRPEGWLTPTANQLLQTHINLVKKIQKFLPISDVVLEINKFAFMQLDNPNIQKWQYQQGPLYQKASLEEAVSEMQEHHCLFCKKPIAHYHHVVPQSENGSNTIGNILGLCTKHHDLVHKDATWQKKLAKKKTGLNKKYGALSVLNQIIPALTKELSSLFPKHFFATNGKSTYDYRAAHGVSKDHWLDAYCIACSVLANDVCDSNINSHVPYELKQFRRHDRRALHKENMSRVYTLNGKSVATNRHKAIKQTTDSLEEFRQRQPNDVYKLKVKEHHPEYRNPKRNFPGCVFLVGKHTHVVQGTSGSHNSKADGYYDTNGNSYSSGKCKFVAKNKGIVFA

SEQ ID NO: 7327 - protein, 434 aa, Solobacterium sp.; identical to SEQ ID NO: 6847

SEQ ID NO: 7328 - protein, 420 aa, unidentified
MQYVYVLNKHGEPLMPCSPRKARLLLKQKKACVIKRTPFTIKLLYGSTGYKQPVTLGVDAGSKHIGISATTEKHELYREEATPRNDVVDLLSARRAFRRSRRNRKTRYRAPRFDNRVHSKHKGWLAPSVEVKIQEHITLVEHVCRILPVTLVRVETAEFDTQRLKAMLEGKPLPVGTDYQLGEMYDEYNVRQYVLKRDNYTCQCCGAHSTKTKGVKLHVHHIETRRTGGNAPNNLITLCTACHKALHAGKVTLDGKKRGKPLKDAAFMGIMRKTLMERLRKELKIPVQGTYGYITKCLREKNGIHKSHTNDARCISKNPLAIPCDTCYYTKAVRHHNRQLHKATILKGGIRKANQAPYIVKGYRLWDKVAYNGTECFITGRRTSGYFALKELDGTVVSNSISYKKLRLLEAATNYITERK

SEQ ID NO: 7329 - protein, 424 aa, unidentified
MSNYVFVIDPDKQPCNPVHPAKARLLLNQKKAAVFRRYPFTIILNEKQKDVEANPLTLKIDLGSQTTGIAILNGENVVWGAELAHRGQQIKSDLESRRAIRRNRRNRKTRYRPARFLNRKREKGWLAPSLQHRVDTTLTWIKKLIRYCPVTNIVQELVRFDLQKMENPEISGIEYQQGELQGYEVREYLLEKWNRQCAYCGAKNIPLQIEHIHPKSKGGTNRISNLCITCEPCNLAKGTQDIKDFLSGKPSILKRVLSQAKSPLKDAAAVNSTRWALLNALKSIGLPISTGSGGQTKFNRTRLNLPKTHWIDAACVGTIESLRIITKQPLLIKATGHGCRQMCRTDKFGFPSRYVPRLKFIKGFQTGDIVKAIVTSGKKIGTYVGRVAVRCSGSFNISTPQLIQGIGHKYCRAIHRKDGYSYSF

SEQ ID NO: 7330 - protein, 439 aa, unidentified
MVFVLDKSKKPLNMISHAQARILLKNRLAVVHKIYPFTIRLRDNSCVDRNKTYIVKIDPGSRTTGVAITDNNDAVVMLTEIEHRGHIVKKKLSSRKAVRRNRRNRKTRYRESRFLNRTRPEGWLAPSVKSRADNVINFIKKYKKLLNIDKVMIENVSFDTAQMTSNTKLWGNNYQKGNLYQQKLRSFIFSRSNSKCVYCGAKATEIDHVVPRSKGGTNSVCNLVASCKSCNKKKSNKTLKEFGKIMNKNFSHLEPKKLPKDAAIVQSARNYMVREITKLVSDTTLHDAWLTKYNRDQLGLPKEHYYDALSVGNIQDYKFLTDKVLQISAKGRGSRQMCRMDSHGFPRTSAKASKSVKGFQTGDMVKAIVPKGLKRGEYLGKVAVRSNGYFNIQTKTQVVQGIGYEYCHIIQRSDGYLYDYKECDFLSDIHNRVSIAKLL

SEQ ID NO: 7331 - protein, 442 aa, unidentified; identical to SEQ ID NO: 2903

SEQ ID NO: 7332 - protein, 516 aa, unidentified
MATVYVLNKDSKPLMPTTRCGHVRHLLKEKKARVVRTNPFTIKLLYETNDVVQPLYLGIDPGRTNIGVAVVKWDGAAVFTAHLETRNKEIPKLMAKRKEYRQGRRHYRRCKRQRRAASHGTLSKKCKKQSTAQGCNISKRAQKIGVFERNLPGCEKPVLCIGIKNKEARFNNRARPAGWLTPTANHLLLTHINLVKKIGKFLPINDVVLEINKFAFMALDNPNIQKWQYQQGPLYQKDSLESAVSEQQDHHCLFCKKTIEHYHHVIPRSENGSNTITNIVGLCTKHHDLVHKDDKLKEELAKKKQGLNKKYGALSVLNQIIPALTKELGSLFQGHFYVKTGKSTYDYREAHGVSKDHWLDAYCIVCSVLPGGCFDNTINSRVPYELKQFRRHDRQVCQQQNAKKKYYLDEKLVATNRHKAIKQETDSLEEYRNNGGVTDKLVVKEHKPTNKRLNRILPGALMTANGKLNIMVASRGLHNGIPDYYVFADDSKARPTKCTLINKNNGIVFVSNSVPQ

SEQ ID NO: 7333 - protein, 416 aa, unidentified
MVYVLDKNGQPLMPTDRHRKVRLMLQSGQAKVIKRCPFTIQLNYDSGHQTQEISLGIDAGSKHIGVSATTKIKVLYEVDVELRNDIVDLLSSRRELRRGRRNRKTRYRQAKFNNRRRGNGRLAPSIRQKIGTHLTVVENICKMLPISRIMVETASFDIQKIKNPDIQGAEYQQGDQLEFWNVREYVLFRDGHTCQCCKGKSKDKILNVHHIESRKTGGNAPNNLITLCETCHTGYYKGTVQLPKAIKRGMRFKDAAFMGIMRWAFYEALKQQYEPVGTPVHNTYGYITKHTRIAYNLPKEHYVDARCISGNPEASSNGEYYYQKKVRCHNRQIHKLTILKGGIRKQNQATYLVKGYRLFDKVSYQGKGYFVFGRRQSGFFDIRTLSGEKVNKGSLSCKKLKFIATRTYYLTERRAV

SEQ ID NO: 7334 - protein, 419 aa, unidentified
MVYVISQDGKPLMPCSDPIARLLLKQGKAKVKKRDPFTIKLTYETTNYTQGLTLGVDTGSGTIGTAVSKDNGDIVYMSEVVVRNDITDKMTQRAKYRRNRRNRKTRYRKARWLNRASSIKKDRFSPTMQSKLHSHVREIEYIQSILPVTEMVFETGQFDMHLMKNPSLANPKVRPWGYQKGANYGFENTKAMVLNRDNYTCQCCKGKHKDSKLEVHHIVFRSQGGSDEESNLLTLCHTCHKDLHSGKINPKLSGKVKGNLKYATQMNSIRKQLFRFYPNAIETFGYVTKANRLHLGVDKEHYYDACTIATQGNAFNVKSNLYKKKCVSDGDFQKTKGIRSEQPIVTDKICGFRKFDKVRYFGNDYFIKGRMSTGYAILMDIDGNKIDFSTMPRGYKTPKLSNCKRITARSTVMTQVKVV

SEQ ID NO: 7335 - protein, 462 aa, unidentified
MSVLVIGRNGRALMPTNPRKARLLLKKKTASVVCRHPFTIQLLYKTGCATQEGCIGIDTGSQHIGVGITCGDRVILKDEHALRSSMEKRSLLATRAVMRRGRRYRKVRYRKPKWRHHTKRMYFEKANRRGQHWRKVKTTTQSPRLKGWLPPSLQSKCDHHFRIIDRYLKYLPDPITRNLVIEAGRFDMARMNDPTIHGEMYQRGPMYDAENLRAYIFARDNYQCVCCKAKAGTTRKADGTTVKLVAHHILFRSRGATDNPKYIISVCDHCHTTKAHQPGGILYSWMENNKKVARGLRDATFMNILRKRLFARYPQAAFTYGNITAADRKQLRLPKSHANDAVAISLFGKEASTVKNICQTMHYKQIRKSKRSLHEAIPRKGRKNPNTKAVRNKKNTTQVNGFKLWDSVLADGKKLFICSFTGTSAYLIDKNGCYISQPGKTYKQWPLSKLKRLHPNGNWLMA

SEQ ID NO: 7336 - protein, 340 aa, Anoxybacillus sp.
MVFVLDTNKCPLAPCHEAVARKLLKQGKAAIYKRYPFTIILKEIVDNFRPKTPYRLKIDHGSKHTGLAILRGQEVVWLGQLDHRTDIKERIDKRRAFRRARRNRKTRYRKPRFLNRKRKEGWLPPSLESRVQNIQTWVSRLKKLCPIGHISYENAKFDTQLMRNPEINGVEYQQGTLQGYEVREYLLEKFGRKCCYCGKENVPLEVEHIIPKSRGGTDRVDNLCLACHDCNQRKGSKTAEEFGYPHIQKQVKESLKDASAINSTRWKAYEVLKQTGLDVECGTGARTKMNRIRLDLPKTHYFDACCVGESTTNHLYFKTKEVLFIKAKGRGSRSRTNLDR

SEQ ID NO: 7337 - protein, 465 aa, unidentified
MSTCACVLSKNGERLMPTIRLGKVRHLLKDGKAEIVKHHPFTIQLLYESGTNTQPIEICEDVGYNYIGISVKSESHEYVSAQYDTLQDEKKCHDDCRRMRRTRRNRLRHRQARFDNRKRDKGWLAPSLEHKKELNINVIKMYCEVMPITHATVEVGSFDTMLVKAIQEGKATPEGAGYQKGPRYNLATLREAVFYRDNYTCQVCGRKANEGAILHVHHMFYWKGRHGNSLSELITVCEKCHTPANHQKGGKLYGFGEDIKFANLSGAAFMNTVRWQIVNVLYAAFGKPFVTFTYGAMTKEKRIALHLEKSHNNDAYAMGSFHPVNRCAFEHYEKVKRNNRILEKFYDSQYIDTRTGELTNGKSLFNGRINRSHKKDSENLHKYRGKRIRKGYRALRRKKVALNRGDLVSLNGEFLVVYGTHTRKNGSVNVEFETPSKNGKKSADLKKLKIINASNPMHSAWKKAS

SEQ ID NO: 7338 - protein, 431 aa, unidentified; identical to SEQ ID NO: 6230

SEQ ID NO: 7339 - protein, 506 aa, unidentified
MVCVVSNTGKRLMPTTEYKARKLMEKGRAKIYQYDPFTIIILDREDGYTQSIELKCDTGDKHIGMSICSEKHEYVSVEVNPLKDEKEKHNDQKKYRRTRRNRKRYRAPRFNNRKRKEGWLAPSLEHKVEIHKHWIERYLKVMPIEKVILETGTFDTQRLKAINDDKTLPVGTDYQRGEQYDFYTMRDAVFSRDHYTCQCCKKSMNTNKNMVLKTHHIGYWKGDRSNRVSNLLTVCNKCHTQVNHQPSGKLYGLQPKSKKLPEAAFMNSVRYILVDEIYNLQEKLNVSFEIETTYGSMTKLKRKELGIEKSHVNDAYVMGEFHPKHRCQSEHYQKKRRNNRILSKFYDAKYIDSRDNSIKTGKELSSGRTSRNHKKDSENLHQYRKQKVAKGRTSIRKNHYPFQPKDIVLYDGKKYKVNGTNNKGKSVQLYIEERVSIEEITLYKKKKNLQTAEIECGDKVIYEKKIYTVKNIINTKHVLLSGLISTKPENLRHLKYSNGYDKVEIV

SEQ ID NO: 7340 - protein, 431 aa, unidentified
MPNKVYVINKHGRPLMPCSPAKARHLLDAGKAKVKKRTPFTIQLVYGSSGYTQEVILGVDAGSKTIGMSASTTKEELLSAEVKPRNDVVDLLSTRREFRRARRNRKTRYRKPRFDNRVRSKHKGWLAPSEEVKIQEHITAIKMVCRILPVSKVVIETAEFDLQLLKAIADGKPVPQGEDYQKGEMYGHYNVRQYVLWRDNYTCQCCGAHATKKKEVRLHVHHLESRKVGGDAPDNQVTLCESCHEKLHKGLIAEKDFKKRKRRSTRDATFMGIMRKTLMQRLCSELPIHVVETRGYITKATREKLLVLPKSHTNDALAIAQGKQGFNVGYLPGILQIDKIYTIRPVRHHNRQLHKAAILKGGIRKSNQTGKYVFGYRLFDKVQFNGQDCFIWGRRTTGIFTIKTINGKMIKDGISFKKLKLVEKSTGYLIA

SEQ ID NO: 7341 - protein, 512 aa, unidentified
MPTVYVLNKDGKPLMPTTRGGHVRHLLKEQKARVVRAKPFTIQLLYETDDAVQLLYLGIDPGRTNIGVAVVKANGTAVFTAHLESRNKEILKLMQDRKKARRARRTNGRRHRRQRRAKANGTISKKCVKQTTAQNGSVSKRAKDIGVIKRRLPGCEKDVLCIGIKNKEAKYTNRARPEGWLTPTANQLLQTHINLVKKIQKFLPISDVVLEVNKFAFMRLDNPDIQKWQYQQGPLYQKGSLENAVSEMQEHHCLFCDKPIDHYHHVVPQSENGSNTIANIVGLCSEHHNLVHKDAAWQKKLAEEKVGLNKKYGALSVLNQIIPALTNKLSVLFPKHFFVTTGKSTHDYRESHSVSKDHWLDAYCIACSVLPSNVCDSNINNHVPYELKQFRRHDRRALHKENMSRVYTLNGKAVATNRHKAIKQTTDSLEEFRQSHPGDVCKLKVKEHHPAYRNLNRNHPGSVFFVGEQAHVMQSIVASKDGKATRYKDTNVNKIAAGQCRFVAKNEGIVFT

SEQ ID NO: 7342 - protein, 278 aa, unidentified
CRILPITLVRVETAEFDTQRLKAMLKGKPLPVGTDYQLGEMYDEYNVRQYVLKRDNYTCQCCGAHPTEKKPIRLHVHHIESRHVGGNAPNNLITLCVACHKALHEGKITLDKGKKRGKPLRDAAFMGIMRNTLLARLKDELNIPVKQTYGYITKLLREKNKIPKSHVNDARCIAKAPNAKPCDTMLYTRALRHHNRQIHKAKILKGGIRKKNQAPYLVKGFRLWDKVRYNGEECFITGRRSSGYFALKKYDGTVISNSASYKKLMLLEAATNYITERS

SEQ ID NO: 7343 - protein, 407 aa, unidentified
QPLMPTDRHRKVRLMLQSGQAKVIKRCPFTIQLNYDSGHQTQEISLGIDAGSKHIGVSATTKIKVLYEADVELRNDIVDLLSSRRELRRGRRNRKTRYRQAKFNNRRRGNGWLAPSIRQKIGTHLTVVENICKILPISRIMVETASFDIQKIKNPDIQGAEYQQGDQLEFWNVREYVLFRDGHTCQCCKGKSKDKILNVHHIESRKTGGNAPNNLITLCETCHTGYHKGTVQLPKAIKRGMRFKDAAFMGIMRWAFYEALKQQYEPVGTPVHNTYGYITKHTRIAYNLPKEHYVDARCISGNPEASSNGEYYYQKKVRCHNRQIHKLTVLKGGIRKQNQATYLVKGYRLFDKVSYQGKGYFVFGRRQSGFFDIRTLSGEKVNKGSLSCKKLKFIATRTYYLTERRAV

SEQ ID NO: 7344 - protein, 512 aa, unidentified
MSTVYVLNKDGKPLMPTTRCGHVRRLLKEQKARVVTSKPFTIQLLYETNDVVQPLYLGIDPGRTNIGVAAVKTDGTAVFTAHLETRNKEIPKLMQGRKKARRARRTNGRRCRRQRRAKANGTISKKCVKQTTAQNGSVSKRAKKIGVIKRHLPGCEKKVLCIGIKNKEAKFSNRTRPEGWLTPTANQLLQTHINLVKKIQKFLPISDVVLEINKFAFMQLDNPNIQKWQYQQGPLYQKASLEEAVSEMQEHHCLFCKKSIVHYHHVVPQSENGSDTIGNIVGLCTKHHDLVHKDTAWQKKLAKKKTGLNKKYGALSVLNQIIPALTKELSSLFPKHFFATNGKSTHDYRAAHDVSKDHWLDAYCIACSILPNDTCDKNINGRVPYKLKQFRRHDRRALHKENMSRVYTLNGKSVATNRHKAIKQTTDSLEEFRQRQPNDVYKLKVKEHHPEYRNPKRNFPGCVFLVGKHTHVMQGTSGSHNGKADGYYDTNGNSYPSGKCKFVAKNKGIVFA

SEQ ID NO: 7345 - protein, 475 aa, Blautia sp.; identical to SEQ ID NO: 4128

SEQ ID NO: 7346 - protein, 324 aa, unidentified; identical to SEQ ID NO: 5319

SEQ ID NO: 7347 - protein, 406 aa, unidentified
MPCSPRKAKLLLKNKKAKVKHRMPFTIQLIYGSSGYKQPVSLGVDAGSKVIGLSATTEKKELFASEVVLRDDIVKLLSVRREFRRARRNRKKRYRAPRFNNRVHSKNKGWLAPSVENKIETHLKAVHHVFLILPIAKIIVETAAFDIQMLRAKELGLPLPEGVDYQQGEQLYSYNVREYVLFRDNHTCQHCKGKSKDPVLQVHHIESREVGGDAPNNLITLCKTCHAKYHAGLIKLQIKRGASFRDAAFMGIMRWAFYDRLKQIYPNVSMTFGYITKHTRIKHQLEKKHYIDARCISGHPNALPTENLYLQKAVRKRNRQLHKATINKGGIRKSNQSPKYVYGFQLFDKVFYDNKECFIFGRRATGYFDIRMLDGTKLSAGVSYRKLKLLERRKTILIQRVEDFAV

SEQ ID NO: 7348 - protein, 412 aa, unidentified; identical to SEQ ID NO: 6913

SEQ ID NO: 7349 - protein, 386 aa, Ktedonobacter sp.; identical to SEQ ID NO: 5256

SEQ ID NO: 7350 - protein, 456 aa, unidentified; identical to SEQ ID NO: 5876

SEQ ID NO: 7351 - protein, 418 aa, unidentified
MVYVLNIDGQPLMPTTRHGKVKHLLKDGKAKVVKRCPFTIKLLYETPNCTQDLTLGVDTGSGAIGTAVSTDDGEIVYMSEVVVRNDITDKMTQRAKYRRNRRSRKTRYRKARWLNRKNSIKKDRFSPTMVSKLHSHVKEIEYIKSILPITTIVFETGTFDTYLMKNPSLVDENVRHWGYQKGTNYGFENTKAMVLNRDNYTCQYCKGKHKDSKLEVHHIVFRSKHGSDEESNLITLCHTCHKALHSGKISLKLEGKVKGNLKYATQMNSIRKQLFRIYPEAIETFGYITKANRLKLGVDKEHFYDACVIATHGNKFSVRCNLYKKKCVSDGDFQQTKGVRSEQRIPTCKIQGFRKFDKVRYFGKEYFIKGRLSTGYAILMDIDGNKSDFSYMPKGFKTPKIINLKRLEARSSWIVIFK

SEQ ID NO: 7352 - protein, 512 aa, unidentified
MSTVYVLNKDGKPLMPTTCGGHVRHLLKEQKARVVRAKPFTIQLLYETNDVVQPLYLGIDPGRTNIGVAVVKANGTAVFTAHLETRNKEVPKLMQDRKKARRARRTNGRRCRRQRRAKANGTISKKCVKQDTAQSKNPSKRAKEIGIIKRRLPGYKKDVLCIGIKNKEAKYTNRTRPEGWLTPTANQLLQTHINLVRKIQKFLPISDVVLEVNKFAFMRLDNPDIQKWQYQQGPLYQKGSLENAVSEMQEHHCLFCDKPIDHYHHVVPQSENGSNTIANIVGLCAEHHNLVHKDAAWQKKLAEEKVGLNKKYGALSVLNQIIPALTNKLSVLFPKHFFVTAGKSTHDYRATHGVSKDHWLDAYCIACSVLPSDVCDSNINNHMPYELKQFRRHARRALNNENMNRVYTLNDKAVAINRHKATEQEAASLEEFRKEHPNDVCKLKVKEHHPTYRNMNRNYPGSIFLVGKHVHIMQGIAGSKDGKATTYKDSNANSITASKCKFVAKNSGILFV

SEQ ID NO: 7353 - protein, 279 aa, unidentified
KYKVDAHIRVVENVCSILPISRIVIEVAQFDTQKIKNPEISGKEYQEGDQLEFWNTREYVLARDGHKCQYCKGKSKDSILNVHHIESRKTGGDSPSNLITLCETCHKEYHKGNIDLKIRRGKSLRDAAVMGIMKWRLYEELKSRYDRVFMTFGYITKHNRIKYGIEKSHTSDAFVISKNINAKRIERQYLKRLIRRHNRQIHKMKILKGGKKKNNQAPFEVFGFRLFDKVLYNNKIFFVYGRRKSGSFNIRDFNGENSKDVSRKKFKLIRGKRHPIILK

SEQ ID NO: 7354 - protein, 376 aa, Oscillatoria sp.
MAFRPASYEIKLDPGSKTTGIALLKGENIIFVGELNHRGQAIKASLDSRRAIRRSRRARHTRYRQARFLNRIRPKGWLAPSLKHRVDTTLTWVNKFIKFAPVNSIAMELVRFDLQQLEKPEIYGVGYQQGELLGYEIREYLLNKWERKCTYCKVENIPLQVEHIHPKAKGGSNRISNLCLACEKCNLKKGTQDINDFLLKKPDLLKQIMAQVKQPLKDATAVNSTRWALFNQLKLTGLPVTTGSGGQTKYNRIRLELPKTHYFDAACVGKVDKLIVLTTQPLLIKANGHGTRQMCRTDKFGFPSRYVPRDKFVKGFQTGDIVKAVVTSGKKVGQYIGRVAVRSSGSFNISAKELVQGISHKYCHILQRKDGYSYQF

SEQ ID NO: 7355 - protein, 442 aa, Anaerostipes sp.; identical to SEQ ID NO: 3218

SEQ ID NO: 7356 - protein, 408 aa, unidentified
MVYVQDIDGKPMMPTTRHGKVRRLLKANKATVVNLCPFTIRLTYATSGYKQEIVLGVDAGTKHVGLSATTKSKELYSSEVILRSDIVELLSTRRELRRTRRNRLRYRKPRFGNRVKSKHHGWVAPSVRHKVDAHIRVIDNICSTLPISRIIVEIAQFDTQKIKNPDISGNEYQEGDQLGFWNVREYVLARDGHKCQHCKGKSKDPILNVHHIESRKTGGDSPSNLITLCETCHKEYHKGNIDWKVKRGKSLRDAAVMGIMKWKLYEELKSRYPNVSITFGYITKYNRIKYGIEKYHISDAFVISKNFNALRLEYHYKVRLVRRHNRQIHKQKVLKGGAKKPNQSPFEVFGFRLFDRVMFEGNYYFIFGRRKSGSFNIRDINGGNQRNVTYKKLKLSIGKRFMIQKEMN

SEQ ID NO: 7357 - protein, 415 aa, unidentified
MENRIEYCFVVDKNNRPLTPTKVNKGWYLVRKSRAKLKSKYPMVIQLEKEVKSDEDDESHIVCGIDDGSAHVGLAIVQKCPTKNKVVFKGTIEQRQDVKHLMDVRRGHRRYHRYHKRYRQARFNNRSSSKRTCRLVPSIKQKKDAILRVLYQLNKWVNIQEYHLEDVCIDIRALTDDYKPYRWQYQKSNRLDENLRKATILRDECRCQECGKSNCVLEVHHIRARKYGGADTIGNLITLCSGCHQKTEGRERDFEDRYFNMIKSKPKRFDYAMHVMQGKTYLREKISELGSLHLTNGGETANKRIEWNMEKSHGNDAICVTDCIPDNCDVKEWIIKPMRRKSKAKTNNLLGIRHRDLVSYTYKNGETHTGYVTALYPEQLVLNFQSKTKHCKKVNARKCRLLWKFNKIYWLEQCV

SEQ ID NO: 7358 - protein, 429 aa, unidentified
LKDGKAKIVKHHPFTIQLLYDSKANTQPIEICEDVGYNYIGISVKSESHEYVSAQYDTLQDEKEHHDDCRKYRRTRRNRLRYRKPRFDNRKRSEGWLAPSLEHKKQLNIRLIERYVSVIPITRATVEVGSFDTMLLQAIQKGESKPEGADYQKGPRYNLATLREAVFYRDNYTCQVCGRKIADGAILHMHHMFYWKGRHGYQLDELVTACEKCHTPSNHQKGGKLYGFGKDKKFANLSGAAFMNAVRWRIVDALHATYGKEFVTITYGAMTKEKRIILGIEKTHNNDAYAMGDYHPAHRCVFRHYQKRRRNNRVLEKFYDATYIDARTGNKAKGKELFNGRINRNHKKDSENFHKYRNKKVSKGRRSIRRQRYAIQPYDTVRLEGKTYITSGCHNKGTRLLIPANGKSKSVAISKVQVVCHAGAWIQII

SEQ ID NO: 7359 - protein, 518 aa, unidentified
MTPKKRKEASRMSEYIYVLGIDGNPQMPTKRKRHVEQLLQTGRARIFRQVPFTIQLTYKNEPVLQPVTIAEDPGRSNIGMAVVSLSGELLSAAVVQTRNKEIVKLMEKRKQHRRASRNGERKARQRLAKKCHTMIKTGFLMRKLPMYGKDKRVRCNVIKNTEAKFCNRKREDGWLTPSAEHLVRTHINLIHKMQKFLPITDVAIEINRFAFLSLEDPSISGVDFQNGPLKGYDDLNAAIEDLQDGHCLMCNSPIEHRHHIVPRNMQGSNTIGNIAGLCCKCHERVHKDARFEDRLKKKKAGLNKRYAAVSVLNQAIPFICKRLEQEFGKEHVHYCSGRDTSMVRRSLGYHKTKEKQLHEVDAWCIAVLALQHVPEKAPEFDHVHEILQFRRQDRSRIKAQTSRAYYHEGKKIAKNRKKAEGQREDSLQEWRKRQVERYGKEQTRKMISQLEVKENIRRYNRLDRLMPGAVFYYQGVRYVMRGQHSNGQYLQAVGMGDKDFPAKKCKIVVHNQGLVFVS

SEQ ID NO: 7360 - protein, 420 aa, unidentified
MQYVYVLNKHGKPLMPCSPGKARLLLKQQKAHVVKRTPFTIKLLYGSAGYKQHITLGVDAGSKHVGLSASTEKLELYCEEFTPRNDVVDLLSTRRAFRRSRRNRKTRYREPRFDNRVHSKHKGWLAPSVEVKIQEHITVIKHICKILPITLVRVETAEFDTQRLKTMLEGKPLPVGKDYQLGEMYDEYNVRQYVLKRDNYTCQCCGVHTTAEKMVKLHVHHLESRKTGGNAPSNLITLCTTCHDALHKGKVSLDGKERGKPLRDAAFMGIMRKTLMGRLREELPISVQGTYGYITKMRREQNDIKKSHMNDALCIAKHPKAQHCENSYRSKAVRHHNRQIHKAKMLKGGIRKLNQAPYIVKGFRLWDKVLYNGQECFISGRRSSGYFALRKLDGTAITNSASFKKLQLLEATSSYLIERM

SEQ ID NO: 7361 - protein, 451 aa, unidentified; identical to SEQ ID NO: 6972

SEQ ID NO: 7362 - protein, 426 aa, Lactobacillus sp.
LKGVGMMSEIKKVDYIYVVDSNGTPLMPTSRLGMVRRWLKTGQAKWFGNSRNTIQFVRPVNTNTQELTLGVDAGFHLGLSVVGNNREYYVSESLRKSEKDRITSRRELRRTRRNRLRYRKARFNNRRRKDGWLAPSIQHRLDFTIKEIKRLYKFLPITNLVVEVTPFDNQKLLNPDIQGWQYQKGKMYGFKTIKDYLLARDNYRDALDGKQYPASQLRVHHLVQRKDGGSNQPDNLVLLSDINHNQANHNNGILAKLRENRQKTLDYRGAYFMSILATRLSNYFEHYTTTQGYLTANLRQKLRNNNRVLQKFYDAKYIDSRDGKQKAGKELSSGRTRRSQELNYDNLRQLRKEKVKKGRVSIRRGHYQLRPHDVVLNTRTNRIETVKGVQNSGTVIKFQTGKTCSIKSVVSLYHVNGILEKKMKNI

SEQ ID NO: 7363 - protein, 494 aa, unidentified
MAMVYVQNKDGKPLMPTTRYCYVRLLLKEKKARVVCTTPFTIRLNYDTPNVTQDLILGIDPGRTNIGVAVVKEDGSCVFSAHLETRNKDVPLLMQKRADFRRQHRTLDRRRKRQRRAKAAGTTIAEGSVERLLPGYEKPVVCHYIRNKEARFNNRKRPKGWLTPTANHLLQTHINLIAKVAKFLPITKVVVELNRFAFMAMDNPNIRRWEYQQGPLYGLGSVEDAVYAQQDGHCLFCKKPIDHYHHVVPRHKGGSETLANRCGLCEKHHALVHKDKAWAEKLVTRKGGMNKKYHALSVLNQIIPHLMEYLGSETPYDVYATDGKSTKGFRIAKNVPKEHYTDAYCIACSILDADTKVSAPAEPFKLKQFRRHDRQSCIRQMVDRKYLLDGKVVATNRHKAIEQKSDSLEEFREAYGDAAVSQLTVRPHSPQYKDMARIMPGAVMDFDGIVGVFKGSSGRNNGTPNYYNSTKGARVLTKRCALLAKNVGMVFIPA

SEQ ID NO: 7364 - protein, 458 aa, Halomonas sp.
MAVFVLDKQKQPLMPCSEKRARLLLERGRAVVHKHYPFCIRLKDRVGGETQPLRLGLDPGSKTTGLALMRESDGEQRHVLCLFDLVHRGFQIKKALAQRAAFRRRRRSKNLRYRAPRFDNRKRKADWLPPSLQHRVDTVMAWVERLSRLAPVTGISQELVRFDTQKLENPEISGVEYQQGTLLGYEVREYLLEKWGRECAYCGAADTPLEIEHVVPSSSGGSNRVSNLTMACHDCNQAKDSLPLADFFARDKGLKKRFKANGLLADARLERVQRELKRPLRDASAVNAPRWVLFTALNAPGLPVAVGTGGRTKYNRQRLDIPKTHALDAACVGVFDSLHDWVVPTLAIQCTGRGSYQRTRLTKHGFPRGHLMHQKQVHGFQTGDMVKAIVPAGKKAGTHNGRVAVRKTGSFNIQTDQGAVQGISHRHCTLIQRGDGYGYYVMPTIHQPTKGEARQAVA

SEQ ID NO: 7365 - protein, 426 aa, unidentified
MQYVFVLDKDRKPLDPCHPARARQMLSEGRAAVIRRHPFTIILTDRTQAESVVHEHRVKIDPGSKTTGLAVVREGDGKVVWAGEITHRGQVIRDALLSRRAIRRGRRHRHCRYRPARFNNRRRKEGWQPPSLESRLSNVQTWVKRLLRCAAVTAISLELVKFDTQSMQNPEISGVEYQQGELAGYEVREYLLEKWGRKCAYCGKTDTPLEVEHIIPHTRGGTNRVSNLTLACRECNMRKGRQTAAEYGHPNIQSAARLPLKDAAAVNATRWELWRRLAQIGLPVECGTGGRTKYNRVHQGLPKTHWMDAACVGRTGEKVFVPNNLTALGIKSCGHGRRQMCLVDKYGFPRTSAKKSGRIYGFKTGDIVEARVPKGKYAGVHYGRVVVRASGWFQIGNANVSHRGCRIVQRADHFEYTRKECGSSTR

SEQ ID NO: 7366 - protein, 428 aa, Enterococcus sp.; identical to SEQ ID NO: 4335

SEQ ID NO: 7367 - protein, 292 aa, unidentified
LSRIEAVLRLLPVTKITVETASFDLQLLKNPDISGKEYQEGEQLGFWNIREYVLCRDGHVCQHCYGRSKDPVLNVHHLESRRTGGDSPGNLITLCETCHKALHRGEITLKAKRGQSFRAEAFMGIMRWEVLGRLKASHPELEVNNTYGYRTKHARIANDIAKSHCADAFCIAGNLGAERLGEFFFQKQTRRNNRQIHKLSILKGGIRKRNQAPFEVNGFRLFDKVACKGEEGFIFGRRSSGFFDVRKLDGTRISAGISCKKLHLLEKRRTYLTEIRKEEALPPLPEGRGLRA

SEQ ID NO: 7368 - protein, 423 aa, unidentified
VWNKRRKPLMPCSPAKARHLLKEKKAAVVRRTPFTIQLTIATGESKQPVTLGVDAGYKHVGLSASTEKAELYASEVELRQDVSDLLSARRALRQSRRNRKTRYRAPRFDNRIRTKRKSWLAPSVENRINAHLSRIEAVLRLLPVTKITVETASFDMQLLKNPDISGKEYQEGEQLGFWNVREYVLFRDGHVCQHCHGRSKDPVLNVHHLESRRTGGDSPGNLITLCETCHKALHRSEITLKTKRGQSFRAEAYMGLMRWEVLNRLKTSHPGLEVHNTYGYRTKYTRIVNGIDKSHCADAFCIAGNLGAERLGEFFFQKQTRRNNRQIHKLSILKGDIRKRNQAPFEVNGFRLFDKVACKGEEGFIFGRRSSGFFDVRKLDGTCISAGISYKKLHLLEKRRTYLTEIRKEEALPPLPEGSGLRA

SEQ ID NO: 7369 - protein, 423 aa, Microcoleus sp.
MSNHVFLIDSNKTPLNPVHPAQARKLLDSEKAAVFQCYPFTLILKRVIENPNVYPLTLKIDPGSKFTGIALVTNQGNVVWAMELQHRGQQIKDALLHRRAVRRGRRNRNTRYRQARFLNRKRPDGWLAPSLRHRILTIETWVKRLQKFAPLDSIAQELVKFDTQAIQNPEISGIEYQQGTLKGYECREYLLEKWNRQCAYCGVKDVPLEIEHIQPKSQGGSDRISNLCLACHKCNQRKGNRDIKDFLKGKSDVLKRVLKQAKTTLKDAASVNSTRWALFNTLKSFGLPVSTGTGGQTKFNRIRFSLPKAHWIDAACVGVVNAIKLVTTKILKVKATGFGGRQRCQTDKFGYPQKHRPLRPILGFCTGDIVRANVPKGKYKGTFTARVCPMSHGYGEFVIDKKRRSIKLDYLTSIHRKDGYEYA

SEQ ID NO: 7370 - protein, 456 aa, unidentified; identical to SEQ ID NO: 4017

SEQ ID NO: 7371 - protein, 407 aa, unidentified
MVYVQDINGNPLMPTTRHGKVRRLLKNNKAVVVNLCPFTIRLTYETTNYKQEIVLGVDAGTKHVGLSATTKSKELYSSEVILRNDIVDLLSTRRELRRTRRNRLRYRKPRFNNRIKSRRPGWIAPSVQHRIDAHIRVIDNVCSILPISRIVIEVAQFGTQKINNPEMSGKEYQEGDQLGFWNVREYVLARDGHKCQYCKGKSKSKILNVHHIESRKTGGDSPSNLITLCETCHKEYHKGNIDLKIKRGKSLRDAAVMGIMKWRLYEELKYKYDRVSMTFGYVTKYNRINHGIEKSHVSDAFVISKNFNAKRLNFSYKIKLVRRHNRQIHKMKIQKGGTKRPNQSPFEIFGFRLFDRVRFDSKFYFIYGRRKTGSFNIRDINGENKKDVIYKKLKLSRCKRFMIQIEM

SEQ ID NO: 7372 - protein, 413 aa, unidentified
LKVFVLNMRGKPLMPCSPAKARHMLKAGKAVVVRRTPFTIKLTIATGETKQDVTLGVDAGARHVGISATTEKEEVFASEVALRQDITGLLADRLAFRRARRNRKTRYRAPRFNNRVRSKHKGWLAPSVENRIQAHISRIEAVCRLLPVTKIVIETASFDIQKIRNPEVEGTGYQQGDQLGFWNVREYVLFRDGHVCQHCHGRSRDKILNVHHLESRKTGGDAPNNLITLCETCHKAYHAGKIKLKVKRGQSFRAEAFMGIMRWTLLDRVRKTHPKLPVENTYGYLTKHKRIALGLPKTHCADAFCIAGNLKALRRGDFLFQQQTRKHNRQIHKCSILKGGVRKLNQAPFLVKGFRLFDKVRIGGQIGFVFGRRVRGTFNIRRLDKTVIGTDINCKKLSLLETRKTFLTELRKE

SEQ ID NO: 7373 - protein, 502 aa, unidentified; identical to SEQ ID NO: 6341

SEQ ID NO: 7374 - protein, 356 aa, unidentified
RKPRFDNRKRGEGWLAPSLKHKKELNVNVVKMYCTVMPITHATVEVGSFDTMLVKAIQEGKAIPEGADYQKGPRYNLATLREAVFYRDNYVCKICGRKATEGAILHMHHMFYWKGRHGNSLNELLTVCEKCHTPANHQKSGKLYGFGEKIKFADLSGAAFMNTVRWQIVNELYVAFGKPFVTITYGAMTKEKRIALQLEKSHNNDAYAMGEFHPNLRCMFEHYEKARRNNRILEKFYDSRYIDIRTGEIATGKELFNGRINRNHKKDSENLHKYRGKRTYAGHRALLRKKVNLNPGDLVSLNGEVLVVHSTHTNKKGAVNVEFKTPGKSGQKSASLKKLKIVKAADSMHSAWEKIS

SEQ ID NO: 7375 - protein, 440 aa, unidentified
  source 1..440: note = uncultured proteobacterium
MAVFVLDKHQQPLMPASEKRARLLLSCGRAVVVKRYPFTIRLKDRVGGEVQPIRLKLDTGSKFTGIALARVSEAIEASTGEIKTTLSILNLFQLNHRGHAISEKLSARAAMRGRRRGNLRYRPARFDNRTRAKGWLAPSLQHRVDTTMSWVNKLCRLAPVTALSQELVRFDMQKLENPEISGVEYQQGELLGYEVKQYLLAKWGHQCVYCGKGDRPLEVEHILAKANGGSNRVSNLTIACRPCNQDKDTKLIASFLAKKPELLKRLLSQAKRPLKDAAAVNSTRWALAEQLKLTKLPVELASGGKTKFNRIQHDIPKSHALDAACVGDFSAIKRWTIPVIVIKCMGRGSYQRTRLDKYGFPRGYLMRQKSVKGFQTGDMAKASITKGKKVGDYTGRIAVRASGSFNITTLDSVIQGLSYKNFTLIARNDGYGYSHQAKIA

SEQ ID NO: 7376 - protein, 338 aa, unidentified
VLHVYKLRNDIVKLLATRRTSRRSRRNRKTRYRKPRFNNRKRDKDWLAPSIREKIGTHLKVVDDTCKLLPVSKIIVETASFDIQKIKNPDVKGIDYQQGEQLGFWNVREYVLFRDGHKCQCCKGKTKDKILNVHHIESRQTGGNAPNNLITLCETCHTGYHKGTVELPAKIKRGMKFKDATFMGIMRWAFYGELKKRYPDVSLTYGYITKNTRIKNGLPKEHYVDARCISGHPLARPLGTVFYIKKVRCHNRQIHKFNILKKGVRKRNQAEYEVYGFRLYDKVSWKGQTCFVFSRKSTGYIILRLLDGTRVKESASYKKIKLLRMRSGYLIESRSVAF

SEQ ID NO: 7377 - protein, 428 aa, unidentified
LKVFVLNMRGRPLMPCSPAKARHLLKAGKAVVRRRTPFTIQLRIATGETKQNVTLGVDAGAKHVGLSAATEKEEVFASEVELRQDITGLLAARLSLRRERRQRKTRYRAPRFLNRVRSKHNGWLPPSVENRIQAHLSRIDAICGLLPVTKIVIETASFDIQKIKHPDVEGTDYQQGDQLGFWNVREYVLFRDGHVCQHCHGHAKDKILNVHHLESRQTGGDAPNNLITLCERCHKACHAGKIKLKVKRGQSFREEAFMGIMRWTLLDRVRKAHPGLPVENTYGYLTKNTRITQGLPKAHCVDAYCIAGNLKAVRRGVHLYQRQVRKHNRQIHKCTVLSKTLKDGTKIGYRKLNQTPHLVKNFRLFDKVRCLGQTGFIFGRRSSGYFDVRRLDGVKISSCINYRKLTLLEKRGTCLTELRKEDGASSPV

SEQ ID NO: 7378 - protein, 478 aa, unidentified
LLRQGRLIVKEVAYMSTVYVLNKDGKPLMPTTRGGHVRHLLKEQKARVVRTKPFTIQLLYETDDVVQLLYLGIDPGRTNIGVAVVKTDGTAVFTAHLETRNKEIPKLMKKRKNSRRARRTNGRRCRRQRRAKANGTISKKCVKQDTAQNGSVSKRAKKIGVIKRHLPGCEKEVLCIGIKNKEAKFSNRVRPEGWLTPTANQLLQTHINLVKKIQKFLPISDVVLEVNKFAFMQLDNPNIQKWQYQQGPLYQKANLEEAVSEMQEHHCLFCKKPIDHYHHVVPQHKNGSNTIGNIVGLCTKHHDLVHKEAAWQEKLAKKKTGLNKKYGALSVLNQIIPALTKELSSLFPKHFFATNGKSTYDYRAAHGVSKDHWLDAYCIACSVLADDVCDNNINSHVPYELKQFRRHDRRALHKENMSRVFTLNGKSVATNRHKATEQTTDSLEEFRQCQPDDVCKLKVKEHYPEYRNPKRNFPGCVF

SEQ ID NO: 7379 - protein, 420 aa, unidentified; identical to SEQ ID NO: 3884

SEQ ID NO: 7380 - protein, 417 aa, Ktedonobacter sp.
MNAVYVLTPERRPLMPCSPAIARLLLKQHKARVVRRTPFTILLLSPPATTYTQPMTLGVDTGSCVVGSAAADEQGHIFYLSHVELRNDIATTMKERAVKRRNRRNRKTRYRPARWLNRKKSIQHGRFSPTMRSKIDAHLREIRFVQSLLPITSIVLETGTFDPHALKHPEVLRHKWLYQKGINYGYANTKAYVLTRDEYTCQHCRGKSKDRRLEVHHIIFRSQWGSDEEANLLTLCKTCHDGLHAGALTLKKSGKKKGVLAHATLMNSIRTQLLKRIEGAEETWGFVTKEHRLLAGLPKEHCFDATMIATRGTTPTFCTARVLTKRCVPDGDYQQTKGVRSEQRIPTGKLGGFRKFDKVRYQGREYFIKGRMSTGYAILMDGAFSKIDLKPIPKFEKLKRVSARSSWMISQRTMPSF

SEQ ID NO: 7381 - protein, 452 aa, unidentified; identical to SEQ ID NO: 3042
  source 1..452: note = uncultured beta proteobacterium

SEQ ID NO: 7382 - protein, 435 aa, unidentified
MVFVLDKHKKPLMPCSEKRARQMLERKRAVIHRMEPFTIRLKDRTAEESKIQPLRLKLDPGSRVTGMAALDESIPEHGKVIFLGEIHHKKGIKQRLDSRRALRSGRRGRKTRYRKPRFLNRVKPKGWLPPSLEARVNQTMNAVAKLRKLLPITAISTEHVKFDTQLMQNPNMSGIEYQQGELMGYEVREYLLEKWKRKCAYCGKENVPLEVEHIIPRARGGSDRISNLAIACTKCNQKKGTKTAEEFGYPEVQKQAKKPLRDAAMMNATRWKLFERLKETGLPVECGTGARTKKQRIEHGLPKTHYYDACCVGASTPDKLTIEPRYVSIWMAMGRGLRQMCRTDKYGFPRAHRSNKKLRFGFQTGDIVVANVPKGKYKGKWRGRVTCRASGSFDIRNGERKMICNTNHKNFRVIQRGDGWDYAKAIAQRCCQDLS

SEQ ID NO: 7383 - protein, 428 aa, unidentified
  source 1..428: note = Candidatus Margulisbacteria bacterium
MRTQYQKPKGVEPKGSHELAVGDDMLVKPTLGGVAKDALQGNAPALNPATVEEEYSSHESEKGKHSVTNANVSTEMAPLNIGKGLYIYGIDEGAKEAGIAIVEAITGEVVFKGVIHLRDDVKRLMRYRREHRRERRRHLRYRANRFNNRRRKEGWIPPSIKVKKDNILRVIRELAKRYPPSKFVYEEASFNIRKLVEPNVNGKEYQKNLWNALIYRAGNKCEVCGKVDRKLQMHHIVPLSKGGSNSVTNILIVCEQCHKGIHEGRIKIEKKDLQVRYPAVAQAGKTYLKNELSKLAPVEVVYGYQTKEWREKMGLEKTHWDDAIAIIAKGKKVIDKTQPSFCFAKRHRPYREAQRRPDIKEIGGLRRGDVVNYYRRDGTVLNGYIYGFNANGTVRINNWNGKRIIKFSKISPKRCERVLRDPVVVVVS

SEQ ID NO: 7384 - protein, 434 aa, unidentified
MPCHPARARELLRKGRAAVYRRFPFTIIIKDREGGATQPTVLKFDPGSKKTGIAVVADFQRGKRCIFAAELEHRGEQIKKALEKRRNIRRSRRSRKTRYRKARFENRRKPKGWLAPSLQSRVDNIESWTRKFRALIPVSSLSVENVRFDTHKLVNPEVQGVEYQQGTLFGYQVREYLLEKWGRKCAYCGKQNVPLQVEHMTPKSRGGSNRVDNLTLACEMCNQKKGSKTAGGFGFPGLCKKADRPLRAVAVVNSTRPAILEVLKSTGLSVETGSGGQTKFNRSQQGYAKEHWIDAMCVGDSGRHVFVEKCHEVLEIKAMGRGTRQMCRVDRFGFPRTGAKKKEKRVDGFQTGDIVKAIVTKGKKKGTYVGRVAVRSSGNFNIKEGKKTTQGIAAKYCKMVQKIDGYNYNNRMGVSSPLLRRGSPRLGKMEAFDR

SEQ ID NO: 7385 - protein, 420 aa, unidentified
LRVFVLNKRGQPLMPCSPVKARLLLKEKKAIVKRRTPFTIQLTIATGEAKQPITLGVDSGYKHIGLSATTEKAELYASQVELRQDITDLLSARLALRRSRRSRKTRYRAPRFNNRVASKRKGWLAPSVENRIAAHMSRVEAVMRVLPVTAITVETAAFDTQLLKNPNIAGAAYQQGEQLGFWNVREYVLFRDGHVCQHCRGKSKDPILNVHHIESRRTGGDAPNNLITLCETCHKAFHRGEIELKVRRGKSFKAETFMGIMRWTLFERLKKAHPELRVRNTYGYLTKHKRISYGIAKSHCADAYCIADNLGAKRLEGFFFQKQTRKHNRQIHKLSILKGGLRKKNQAPYEVKGFRLFDKVICKGEEAFIFGRRTSGSFDVRRLDGTRISAGINYKKLRLLEPRTTYLTEFRKEAALPPLH

SEQ ID NO: 7386 - protein, 493 aa, unidentified
MAVVYVISASGKPLMPTTRCGHVRGLLNEGKARVVEREPFTIQLKYETPDVTQPLYLDIDPGRTNVGAAVVCEDGECVFTAQLTTRNKDVPKLMKARKQFRMAHRRLKRRCKRQRRAKAAGTLSQKGEFQRLLPGYEKPILCKGIRNKEARFNNRQRPVGWLTPTANHLLLTHLNMVKKLQKLLPITDVVLEVNRFAFMAMENPSIRRWQYQRGPLYGKDCVEDAVYAQQDGHCLFCGRPIAHYHHVVPQHKNGSDTLENRVGLCNEHHDLVHKDRAWEAKMKETKAGLNKKYHALSVLNQIIPALTEQLTELFPQHAFVTTGKDTADFREDHGIAKEHYLDAYCIACSVLTEPDRVSAPTAKPYRLMQFRRHDRQVCHKENIKRVYLLDGKAVATNRHKAIEQKDDSLEEFRRTHTQQEVSSLTVKDHQPIYKDMQRFMPGGVFLCNGKVHTLLGSQGRYKGMPYYYIGTDGSRNNATRCIFLQQNCGLRWV

SEQ ID NO: 7387 - protein, 416 aa, unidentified
MVYVISKSGKPLMPTKRHGKVRRMLKSGMAKVVRRTPFTIQLLYDSEEYTQDVTVGMDIGSRHAGASAISGNKELFAGQFDMRTDIHDLMTERRMYRRDRRSYKTRYREARFLNRKKDKWLAPSVRWKVEAHIRIIHFLSKILPIARVVVEIAPFDTQKIMNPEISGVEYQNGVQKGFSDVREYCLWRAGYKSEYSGKKGILEVHHIIPKSMGGTDTPENLIVLTADEHKQIHEGKIKITKRVNQKIKGLKDASHVSTIGQFIVSGLRIRYLTEVTFGNITKGKRMASNLSKTHDTDALIIAGGDATTTRTESSFFAKFVRRQNRSLHKANMLNGGRKKVNTIKSAKGYKRFDKVLYNDEECFIYGLRTSGYFDLRKLDGSKIHVSANWKQLKKLESAKTLLIERQVNVAIPLQLT

SEQ ID NO: 7388 - protein, 442 aa, Deinococcus sp.; identical to SEQ ID NO: 5259

SEQ ID NO: 7389 - protein, 442 aa, unidentified; identical to SEQ ID NO: 2903

SEQ ID NO: 7390 - protein, 424 aa, Enterococcus sp.; identical to SEQ ID NO: 4034

SEQ ID NO: 7391 - protein, 442 aa, unidentified
MSTSVFVLDKKHRPLMPCRPARARRLLRAGRARVVKRFPFVIRLVDRTVEQSEVQPVLIKLDPGSRETGAAVVRDDGKKRHHALAFFVIKHRGGAIRDALKARSAFRRRRRSQNFRCRSPRFLNRVKPKGWLPPSLRHRVETTLSFVRRMCRYLPVSGIAAELVKFDSQKLQTPEVSGIEYQQGTLFEYEVREYLLEKFGRKCVYCGAEGVPLNIDHVVPRAKGGSNRVSNLVLACVSCNQKKGARSLEDFLKGKPEVLARVRRELKTPLRDAAAVNATRWVLFNELKATGLPVETGSGALTKFNRHAFGVEKEHWLDALCVGRLNGVVTRKGLNVLEIRCMGRGSRQRTRLTKYGFPRGYLMRQKCVHGFATGDMVEANVPKGKKAGLWRGRVAVRVSGSFNIQTPKGVIQGVGWKHCRLISHNDGYGYAWLGHAPHSSPA

SEQ ID NO: 7392 - protein, 430 aa, unidentified
MLVYVLKQNGQPFMPTARFGKIRRLLKAKKAKVVRREPFTIKLLYEPETDVVQECYCGVDTGSRHIGVAVVSNDKVLYQSQTELRSDIKRKMDARRAYRRNRRQRKTRYRKPRFLNRSNSIKNDRLPPSVNHKVQAHIGEIEFCKKILPISDSNLIIEVSQFDTALMKDPSLISEKIKHWGYQQGFNYGYSSRREAILHRDNYTCQCCGKKNCRLEVHHVKFKSDGGTDDEENLITLCEDCHKGVHAGTVVLNKKPKKSKNLKYATHMSIIRSYLLKKYPNAIETFGFVTSENRNHLNLEKDHYIDACVVASGGLEFKELDVIYYKHRVSKGNYQLTKGFRGEQKIPKGKICGFKKFDKVEYLGREYFIKSRMSSGFATLMDIFGNKIDFSYMPKGMKTPKLSNCRRISTRKSCLCIGQTRKERAIYMLS

SEQ ID NO: 7393 - protein, 464 aa, unidentified; identical to SEQ ID NO: 6330

SEQ ID NO: 7394 - protein, 515 aa, unidentified
MTALEEKLSKTEYIYVLGFDGKPQMPTRRKRHVLKLLKTGRARIAEDIPFTIRLTYRHAPVLQPVTLAEDPGRTNIGAAVLSPLGDLLFAAVIETRNKEIKKLMADRQKSRQASRRGERKARQRLAKRYGSMVKSGMVMRKLPMYAADKFVICKFIRNTQARFCNRKRCPDWITPTVQHLVQTHLNIIRKISRYLPVTDIAFEVNRFAFMHMENPEAMGVDFQNGPLKGYGDVKEAIRTQQHGKCLMCKKPITHFHHIVPRSRGGSDTIQNLAGLCTECHTKVHTDTAFRKDFDEKKSGQLKKYGALSALNQAVPFICKKLLEEYGEEHVHFCRGLDTSLIRTAFGFEKTKKNQMHEVDAYCIGLAALEVNEVETPAFDHTFQIRQFRRQDRSIIHHQTGRSYYQGKEKVAQNRKPGFEQKTTALSQWYKEQIRIHGEKEAEKLRSQLRVEKSCRHYNDMDRFLPGAVFLYEGKRYVLSGRITNGKYLRACGQGMKNFPAAECTFIRHNAGLVFI

SEQ ID NO: 7395 - protein, 557 aa, Blautia sp.
MIYNLVSIRERSFMKQKKQKVMVYILNKKGKPLMPTTRCGHVRKLLDSKKAVVVSSNPFTIRLKYDTPNGVQDVFAGIDSGRENIGSGASNEDGDCLYLGELKTSNKSIKMKITERAGFRKERRRHDRQNKQRKARKDHTEIQNGNADICRTTISCKSVQISYPAAEKSVTHKIIRGKEGKFANRHRDEGWITPSARQLVQMHMNDLKSMCKILPISHVTLERVAFDFQKLENENIKAWEYGKGKLYGYDSPEEYIHDVQGGKCLICGKPHIDYLHHIIPRSKGGSNKVSNLAGLCYDCHYGPMGVHNCQNTQDRLPELKNEANKQYKVSLLNSVMPVLIEEMDKFCKANSIIFSICEGHDTAKVRDIYDLQKDHCVDGFAISLVGRNVKSVDVMPDRIHQKQRYKKKSKNIIKKRNCREYYDGKKLVAVNRHKGTDQKADSLEEYMNTYAETHTADECKKHFESLTVKPARRTYTFHKEGRICPFHIGDKVRYEKKNKIKGNTKVETFICEGIRFPKDENKAKVEHNKTKSKKMKFCRVLEPGCTPYIDYRKLVLI

SEQ ID NO: 7396 - protein, 442 aa, unidentified
MSTSVFVLDKKHRPLMPCRPARARRLLRAGRARVVKRFPFVIRLVDRTVEQSEVQPVLIKLDPGSRETGAAVVRDDGKKRHHALAFFVIEHRGGAIRDALKARSAFRRRRRSQNLRCRSPRFLNRVKPKGWLPPSLRHRVETTLSFVRRMCRYLPVSGIATELVKFDSQKLQNPEVSGVKYQQGTLFEYEVREYLLEKFGRKCVYCGAEGVPLNIDHVVPRAKGGSNRVSNLVLACVSCNQKKGARSLEDFLKGKPEVLARVRRELKTPLRDAAAVNATRWVLFNELKATGLPVETGSGALTKFNRHAFGVEKEHWLDALCVGRLNGAVTRKGLNVLEIRCMGRGSRQRTRLTKYGFPRGYLMRQKCVHGFATGDMVEANVPKGKKAGLWRGRVAVRVSGSFNIQTPKGVIQGVGWKHCRLISHNDGYGYAWLGHAPHSSPA

SEQ ID NO: 7397 - protein, 557 aa, Streptomyces sp.
MRKFSALAENSPLPAPAITEKEVTSMATFHAGQQTDRAVLPQQLALEFASADTPGNRNETGRERRTMQHRAASGVEHVRGETSCSAPAAGRVTPDRPVREQGRKAHPAVFVLDRHGKPLQPTTPARARRLLGEGRAVVHRHTPFVIRVKDRHVDLSTVEGVQLGVDPGSRQTGISVFSTVHTKEGDVRRGLYAIELTHRGGQIRDKLAQRAACRRSRRSRNTRYRAPRFLNRSRPKGWLAPSLRHRVDTVVSWGSRLARWAPVTVVYMEKVAFDTHVLSAEGPVDHQRGMLQSLEIREYLRVKWDRACAYCGTRAVPLNIEHLHPRSRGGSDRVANLVLACIPCNQAKGKRPVEEFLAARPEALAKVLVQAEASLRDTAAANTTNWALWRSFTARFPAVCSASGVRTKWNRTHAGLPKTHTLDALCVGALDGVVQYSAAVLAVTATGRGTYARTRSDKHGFPRLRLPRNKRVHGYATGDLARAVVPRGKKAGTHTGRVAVRSSGNFNVRTRHGLVQGIRHTHFRLLQRADGYGYTTRLEAAIPPPSEAEGSYARRFR

SEQ ID NO: 7398 - protein, 333 aa, unidentified
LRVFVLNKRGKPLMPCSPAKARLLLKEKKAIVKRRTPFTIQLTIATGETKQPGSLGVDAGYEHVGLSASTEKAELYASEVELRQDVSDLLSARRALRQCRRNRKTRYRTPRFGNRIRTKRKGWLAPSVENRINAHLSRIESVLRLLPVTKITVETASFDTQLLKNPDISGKEYQEGEQLGFWNIREYVLCRDGHVCQHCYGRSKDPVLNVHHLESRRTGGDSPGNLITLCETCHKALHRGEIKLKAKRGRSFRAETFMGIMRWGVLNRLKASHPKLEVHNTYGYRTKHARIANGIAKSHCADAFCIAGNFGAKRLGEFFFQKQTRRNNRQIHK

SEQ ID NO: 7399 - protein, 475 aa, unidentified
MVAVVTSTGKPLMPTSAYRARKLLKKRRAVIFKYRPYFTIQLVDRADGEVQEVEYKSDTGSVHVGISVCTEKKELLSEQRDLLENEPEHHNDRKKNRRTRRNRKRYRKPRFDNRKKKPQESHEKWLPPTLLHKMEVQVRLFREFCRVVPVTSACFEMGKFDTQALKAVSKGEPVPEGEGYQKGERYGTDTLRAAVFLRDGHTCRFCGRSVKDGAILHVHHVGYWKGDRTDRLANLASACEQCHTPANHGKNGILYGKEPEFKTLKDASYMTSVRWIMLDEIKKVAPGVQVSVTYGVTTKRKRQELHLPKSHVNDAFSMASFHPKKRSDTEYWKKIPRHDRVLQRFYDAVYLDTRDGSEKKGSELSNGRISRNHKKDSENLHRYRGYKVSKGHNSIRRGASSLKPGSIVMYKGEKMTVHGTHTRYVTDKDGKTVKKVNVQFTRPASDGKKSASLKKCTPVSRVYNTGWKRYWPDKK

SEQ ID NO: 7400 - protein, 422 aa, unidentified; identical to SEQ ID NO: 5333

SEQ ID NO: 7401 - protein, 461 aa, Parasutterella sp.; identical to SEQ ID NO: 3646

SEQ ID NO: 7402 - protein, 289 aa, Parasutterella sp.
IEAVLRLLPVTKITVETASFDLQLLKNPDISGKEYQEGEQLGFWNIREYVLCRDGHVCQHCYGRSKDPVLNVHHLESRRTGGDSPGNLITLCETCHKALHRGEITLKVKRGQSFRAEAFMRIMRWEVLNRLKASHPELEVNNTYGYRTKHARIANDIANSHCADAFCIAGNLGAERLSEFFFQKQTRRNNRPIHKLSILKGGLRKRNQAPYEIKGFRLFDKVACQGEEGFIFGRRSSGYFDVRKLNGTHISAGISYKKLRLLEKRQTYLIEIRKEEALPPLPEGRGLRA

SEQ ID NO: 7403 - protein, 485 aa, unidentified
LYIKMTSCTCTVFPACNHAKASSSQGKHNLLLRQERLIVKEVAYMSTIYVLNKDGKPLMPTTRGGHVRHLLKEQKARVVQSNPFTIQLLYETNDVVQPLYLGIDPGRTNIGVAVVKADGTAVFAAHLETRNKKIPKLMQDRKKARRARRTNGRRCRRQRRAKANGTISKKCVKQDTAQSKNPSKRAKEIGVIKRHLPGCKKDVLCVGIKNKEAKYTNRARLEGWLTPTANQLLQTHINLVKKIQKFLPISDAVLEVNKFAFMRLDNPNIQKWQYQQGPLYQKGSLENAVSEMQEHHCLFCEKPIEHYHHVVPKSENGSNTIANIVGLCAEHHNLVHKDVAWQEKLVEEKTGLNKKYGALSVLNQIIPALTKELSFLFPKHSFMTNGKSTHDYRAAHGISKDHWLDAYCIACSVLPIDVCDSTINNCVPYELKQFRRHDRRALNNENMNRVYTLNDKVVATNRHKATEQEAASLEEFRKEHPNDVC

SEQ ID NO: 7404 - protein, 414 aa, unidentified
MPCSPAKARLLLKEKKAIVKRRTPFTIQLTIATGEAKQPVSLGIDAGYKHVGLSASTEKAELYASEVELRQDITDLLSARRALRQSRRNRKTRYRAPRFDNRISTKRKGWLAPSVENRINAHLSRIEAVLRLLPVTKITVETASFDLQLLKNPDISGKEYQEGEQLGFWNIREYVLCRDGHVCQHCYGRSKDPVLNVHHLESRRTGGDSPGNLITLCETCHKALHRGEITLKPKRGQSFRAEAFMGIMRWEVLGRLKASHPELEVNNTYGYRTKHARIANDIAKSHCADAFCIAGNLGAERLGEFFFQKQTRRNNRQIHKLSILKGGIRKRNQAPYEIKGFRLFDKVACQGEEGFIFGRRSSGFFDVRKVDGTRISAGISYKKLHLLEKRRTYLTEIRKEEALPPLPEGRGLRA

SEQ ID NO: 7405 - protein, 420 aa, unidentified
MRYVYVLNKHGEPLMPCSPRKARLLLKQKKACVIKRTPFTVKLLYGSAGYKQPVTLGVDAGSKHIGISATTEKHELCREEATPRNDVVDLLSARRAFRRSRRNRKTRYRAPRFNNRVHSKHKGWLAPSVEVKIQEHITLIKHACRILPVTLVRVETAEFDTQRLKAMLEGKPLPVGTDYQLGEIYDEYNVRQYVLKRDNYTCQCCGAHSTKTKGVKLHVHHIETRRTGGNAPNNLITLCKACHKALHAEKVTLDGKKRGKPLKDAAFMGIMRKTLIERLRKELKIPVQGTYGYITKYLREKNCIPKSHTNDALCISKNPLAIPCDTCYYTKAVRHHNRQLHKATILKGGIRKANQAPYIVKGYRLWDKVAYNGTECFITGRRTSGYFALKKLDGTVVSNSISYKKLRLLEAATNYIIERK

SEQ ID NO: 7406 - protein, 406 aa, unidentified
MVYIKDIDGRPLMPTKRHGKVRWLLKENKAVVINLCPFTIQLTYKSTDHKQPVTLGIDAGAKHIGFSATAEKEELFACETTLRTDIVDLLSTRLQNRRTRRSRLRYRKPRFNNRGSSKKKGWVAPSVKQRIDSHLNEVNEIHKILPITKIVIEVAQFDTQKMKNHDISGSDYQNGEQLGFWNVREYVLFRDGHKCSHCKGKSKDPVLNVHHLESRKTGGDSPSNLVTLCESCHKAFHKGEIELKKKRGKSLRDAAVMGIMKWKLYEELKSRYDNVSMTFGYITKYNRIKYGIEKSHTSDAFVISRNFNAKRIERQYLKRLVRRHNRQIHKMKILKGGKKKNNQAPFGVFRFRLFDKVLYNNEICFIYGRRKSGNFNIRDFNGENPKDVSYKKLKLIRGKMHPIILK

SEQ ID NO: 7407 - protein, 434 aa, unidentified; identical to SEQ ID NO: 5659

SEQ ID NO: 7408 - protein, 413 aa, Beggiatoa sp.
MMMKVYVINKNGNPLMPCKPAKARKLLRDGKAKPVKQVPFTIQLMWDCEENIQPITIGIDKGSKITGYSAIANGEILISGYINHRTDVTKKMEARAANRRQRRSRLWHRPPRFNNRTSSKRSGRLPPSIKANADEVIRVINKLPLPITSVIIEDVLIDIAMLNDLKLKGKEYQKSNRLHENLRLATLLRDDFRCQQCHIKNTRLEAHHIKLTSEGGKNTINNLITLCSECHNKVHSGKIRLKTKGVSGFKDKIAQRTMQGKHYIETNVRQKYGFERVYGYQTAEFRKKIGLPKNHDSDALAIATLGTGEIIRFHRDNFYNINFRPVQTRRRYLDLPKKGRGRVKYQINENSSGFRKGDIVLVKDKYVKQVNSIYSAGTLAFKRIKGEPNNSMPKNCRLLERQSSIVFSNGIWK

SEQ ID NO: 7409 - protein, 448 aa, Deinococcus sp.
MQSDKPEHAPLGELYMALMRNKETMSNRVFVLNPDKTPLMPCTAKRARKMLEAGKAAIWRRYPFTIILKSEAAKQSQPLALKLDPGSKTTGMALVMEGKTGRQVVWGAELQHRGRAIRDALTSRRQLRSSRRSRKLRHRPARFLNRTKPTGWLPPSLMHRVLTVISWAKRLDRFTMLNSFSMELVSFDTQKMMNPDIQRQDYQRGTLFGTEVRAYLMHKWEGKCAYCQKEGSLEVEHLVPRSRGGSNRISNLIMSCRKCNEAKGAQHLEAFLKRKPAQLRRIQAQQQASLADTAAVNATKYRLLDELKSFGYPVETGSGAQTSFNRQQQGYDKAHWIDAACVGASGEKVQVKPLEPLNITCMGRGSRQMCGTNKYGFPIRHRTRQKVFFGFQTGDIVRGVVTTGKKAGVYTGRVSVRATGSFKLPQVDGVHHRFFSILHKADGYGYNF

SEQ ID NO: 7410 - protein, 518 aa, Kandleria sp.
  source 1..518: note = isolate UBA4329
METLLPDVSALQATAPESYERRHHDMPKTKLEQELSEADYIYVLSAYGDPLMPTRRRGHVKRLLNKGKARIVSHVPFVIQLKYDGSKNTQPLFGGIDPGRTNIGAAVVTPEGKCVYRSHTASRNRDVPKKMEARKSHRQASRRGERLRRKRRARANGTTTEFPDGRMLPGYKKPVMVKDIINTTAKFNYRKRPEKWLTPTANQLVQTHENLICRISAILPVTDWTIEANKFAFMQMDNGKCYGTDFQNGRMKGYKNSHEYVYIRQNGVCPMCGAPIEHYHHIIPRSRGGSDLPENILGVCMKCHAQIHKGELRSDMKGVMKKYGSLSVLNQAIPYIWQWMTETYGEDHAHFCTGVETQTVRDDSGLPKDHDIDALCIACIGSGITPVRRLPRTFEIVQFCRHSRANINNQRERTYRLDGRIVCRNRHKRFEQKGDSIEEFRQKYPDQVSRLTVTKSTRYYNDADRLMPGAVFLFDGERYVLQSQLTGGRYYRAVGCEKRNFPAAKCTIIRENAGLVYV

SEQ ID NO: 7411 - protein, 458 aa, Halomonas sp.
MAVFVLDKQKQPLMPCSEKRARLLLERGRAVVHKRYPFCIRLKDRVGGETQPLRLGLDPGSKTTGLALMRESDGEQRHVLCLFDLVHRGFQIKKALAQRAAFRRRRRSKNLRYRAPRFDNRKRKAGWLPPSLQHRVDTVMAWVERLSRLAPITGISQELVRFDTQKLENPEISGVEYQQGTLLGYEVREYLLEKWGRECAYCGTAETALEIEHVVPRSRGGSNRVSNLTLSCHACNQAKDSLPLADFFARDKGLKKRFKANGLLADARLERVQRELKRPLRDASAVNATRWALFTALNATGLPVAVGTGGRTKYNRQRLDIPKTHALDAACVGVFETLHDWAVPTLAIQCTGRGSYQRTRLTKHGFPRGHLMHQKQVHGFQTGDMVRAVVPTGKKAGTHTGRVAVRKTGSFNIQTDQGAVQGISHRHCTLIQRGDGYGYYVTPTIHQPTKGEAGQAVA

SEQ ID NO: 7412 - protein, 413 aa, unidentified; identical to SEQ ID NO: 2636

SEQ ID NO: 7413 - protein, 456 aa, unidentified; identical to SEQ ID NO: 4017

SEQ ID NO: 7414 - protein, 414 aa, unidentified
MPCSPAKARLLLKEKKAIVKRRTPFTIQLTIATGETKQPVSLGVDAGYKHVGLSASTEKAELYASEVELRQDITDLLSARRALRQSRRNRKTRYRAPRFDNRIRTKRKGWLAPSVENRINAHLSRIEAVLRLLPVTKITVETASFDLQLLKNPDISGKEYQEGEQLGFWNIREYVLFRDGHVCQHCHGRSKDPVLNVHHLESRRTGGDSPGNLITLCETCHKALHRGEITLKAKRGQSFRAEAFMGIMRWEVLNRLKASHPELEVNNTYGYRTKHARIANDIAKSHCADAFCIAGNLGAERLGEFFFQKQTRRNNRQIHKLSILKGGIRKRNQAPFEVKGFRLFDKVACKGEEGFIFGRRSSGFFDVRKLDGTRISAGISCKKLHLLEKRRTYLTEIRKEEALPPLPEGRGLRA

SEQ ID NO: 7415 - protein, 507 aa, unidentified; identical to SEQ ID NO: 6546

SEQ ID NO: 7416 - protein, 559 aa, Streptomyces sp.
MTTLPVGEQTHQAVLPQQPALESVGADTPGSRDETAHGHPADARGTGGRHGRGETGGHGTRARRRHAETAAPAAREAEKGDGDVPTDTDAYAGGIGAGRVFVLSKDGKPLMPCHPARARELLGKGRAAVARQVPFTIRLRDRTLTESEVDGVQLRIDPGSRGTGLVLTDEKKETKGEGRTVTVRRGLISVELRHRGSQIHLCMLQRAGYRHRRRSTNCRYRARRSQNRVAALGRLPRSLRHRVDTTVSIATRMCRYAPITEIHVESVAFDTHSMSADSTPRGVEYRHGPLAGTDARAYLRTRWGSACAYCGATGVPLNIDHLQPRSRGGSDRVSNLVLACAPCNQAKGSQPVRIFLAHRPELLAEILRQARAPLHDAAAMNSTRLRLLESLARLGRPVHGWPGVLTQRMRITAGLRKTHTLDALCVGAPDHEGGSTVVRVPRHVLVVKATGRGSYARTTPDRFGFPRLRRARGKQHFGYATGDLVRASVPSGKWAGTWTGRISVRARGQHSLATPRGRINVNHRNLRLLQRGDGYGYGRRDDIADDSLGKSLERLPVAS

SEQ ID NO: 7417 - protein, 512 aa, unidentified; identical to SEQ ID NO: 4031

SEQ ID NO: 7418 - protein, 442 aa, unidentified; identical to SEQ ID NO: 2903

SEQ ID NO: 7419 - protein, 452 aa, Lactobacillus sp.; identical to SEQ ID NO: 3322

SEQ ID NO: 7420 - protein, 453 aa, Lactobacillus sp.
MMSEIKKVDYIYVVDSNGTPLMPTSRLGMVRRWLKTGQAKWFGNSRNTIQFVRPVTTNTQELTLGVDAGFHLGLSVVGNNREYYVSESLRKSEKDRITSRRELRRTRRNRLRYRKARFNNRRRKDGWLAPSIQHRLDFTIKEIKRLYKFLPITNLVVEVTPFDNQKLLNPDIQGWQYQKGKMYGFKTIKDYLLARDNYRDALDGKQYPASQLRVHHLVQRKDGGSNQPDNLVLLSDINHNQANHNNGILAKLRENRQKTLDYRGAYFMSILATRLSNYFEHYTTTQGYLTANLRQKYEIEKSHLNDAFVIAGGTDTTLRTNNVYSRQKLRNNNRVLQKFYDAKYIDSRDGKQKAGKELSSGRTRRSQELNYDNLRQLRKEKVKKGRVSIRRGHYQLRPHDVVLNTRTNRIETVKGVQNSGTVIKFQTGKTCSIKSVVSLYHVNGILEKKMKNI

SEQ ID NO: 7421 - protein, 512 aa, unidentified
MSTVYVLNKDGKPLMPTTRCWHVRRLLKEQKARVVTSKPFTIQLLYETDDVAQPLYLGIDTGRTNIGVAVVRTDGTAVFTAHLETRNKEIPKLMQERKKARRARRTNGRRCRRQRRAKANGTISKKCVKQDTAQNGSVSKRAKKIGVIKRHLPGCEKEVLCIGIKNKEAKFSNRTRPEGWLTPTANQLLQTHINLVKKIQKFLPISDVVLEINKFAFMRLDNPNVQKWQYQQGPLYQNASLEEAVSEMQEHHCLFCKKPIAHYHHVVPQSENGSNTIGNIVGLCTKHHDLVHKDTAWQKKLAKKKTGLNKKYGALSVLNQIIPALTKELSSLFPKHFFATNGKSTYDYRAAHGVSKDHWLDAYCIACSVLPNDVCDSNINSRVPYELKQFRRHDKRALHKANMNRVYTLDGKKVATNRHKAIKQTTDSLEEFRQRQPDDVCKLKVKEHHPEYRNPERNFPGCVFLVGKHTHVMQGTSGSHNGQADGYYDTNGNSYSSGKCKFVAKNKGIVFA

SEQ ID NO: 7422 - protein, 419 aa, Anoxybacillus sp.; identical to SEQ ID NO: 5328

SEQ ID NO: 7423 - protein, 456 aa, unidentified
MSTCVCVLTNNGERLMPTFRLGKVRHLLKDGKAKIVKHHPFTIQLLYDSKTNTQPIETCEDVGYNYIGISVKSESHEYVSAQYDTLQDEKEHHDDCRKYRRTRRNRLRYRKSRFDNRKRDKGWLAPSLEHKKHLNISLIERYVSVIPITHVTVEVGSFDTMLLQSIQKGEAKPEGADYQKGPRYNLATLREAVFYRDNYTCQVCKRKIADGAILHMHHMFYWKGRHGYQLDELVTVCEKCHTPANHQKGGKLYGFGKDKKFANLSGAAFMNAVRWQIVNALYATYGKEFVTITYGAMTKEKRIALQLEKTHNNDAYAMGDYHPARRCKFRHYQKRRRNNRVLEKFYDATYVDTRTGNKAKGKELFNGRISRNHKKDCKNLHKYRSKKVSKGRRSIRRQHYAIQPYDTVRLEGKTYITSGCHNKGTRLLIPVNGKSKSVAISKVQVVCHAGAWIQII

SEQ ID NO: 7424 - protein, 413 aa, unidentified; identical to SEQ ID NO: 2636

SEQ ID NO: 7425 - protein, 494 aa, unidentified
MDMVYVLNKDGKPLMATTRGGRVRYLLKEKKARVVSSTPFTIQLNYDTPDATQDLILGIDPGRTNIGVAVVKEDGQCVFSAHLETRNKEVPLLMKKRAAFRRQHRTQDRRRKRQRRAIAAGTTVESNTIERLLPGYEKPIVCHHIRNKEARFNNRSRPAGWLTPTANHLLQAHINLIAKAAKFLPITKVVVELNRFAFMAMDNPNIRRWEYQQGPLYGLGSVKDAVYAQQDGHCLFCKKPIDHYHHVVPRHKGGSETLANRCGLCEKHHALVHKDKAWAEKLVTRKGGMNKKYHALSVLNQIIPHLMEYIGSETLYDAYATDGRSTKGFRIAKNVPKEHYTDAYCIACSILDADTKVSTPVEPFELKQFRRHDRQACIRQMVDRKYLLHGKVVAANRHKAIEQKSDSLEEFREAHGNAAVSQLTVKPHHSQCKDMARIMPGAMMDFDGIVGVFKGSSGRNNGTPNYYNSTKGERFLTRSCVLLAQNAGMVFIPA

SEQ ID NO: 7426 - protein, 346 aa, Arthrospira sp.; identical to SEQ ID NO: 2872

SEQ ID NO: 7427 - protein, 418 aa, unidentified; identical to SEQ ID NO: 6419

SEQ ID NO: 7428 - protein, 397 aa, unidentified
EDVGYNYIGISVKSESHEYVSAQYDTLQDEKEHHDDCRKYRRTRRNRLRYRKPRFDNRKRSEGWLAPSLEHKKQLNIRLIERYVSVIPITRATVEVGSFDTMLLQAIQKGESKPEGVDYQKGPRYNLATLREAVFYRDNYTCQVCGRKIADGAILHMHHMFYWKGRHGYQLDELVTACEKCHTPANHQKGGKLYGFGKDKKFANLSGAAFMNAVRWQIVDALHATYGKEFVTITYGAMTKEKRIALQLEKTHNNDAYAMGDYHPACRCKFRHYQKRRRNNRVLEKFYDATYIDARTGNKAKGKELFNGRISRNHKKDSENLHKYRSKKVSKGRRSIRRQRYAIQPYDTVRLENKTYITSGCHNKGTRLLIPANGKSKSVAISKVQVVCHAGAWIQII

SEQ ID NO: 7429 - protein, 456 aa, unidentified
MNTCVCVLSNNGERLMPTFRLSKVRRLLKDGKAKIVKHHPFTIQLLYDSKTNTQPIEICEDVGYNYIGISAKSKSREYVSTQYDTLQDEKEHHDDCRKMRRSRRNRLRYRKPRFDNRKRDEGWLAPSLEHKKQLNISLIERYVSVIPITHATVEVGSFDTMLLQSIQKGEAKPEGADYQKGPRYNLATLREAVFYRDNYTCQVCKRKITDGAILHMHHMFYWKGRHGYQLDELVTACEKCHTPANHQKGGKLFGFGKDKKFANLTGAAFMNAIRWQIVNALYATYGKEFVTITYGAMTKEKRIALQLEKSHNNDAYAMGKLHPSRRCTFVHYEKIKRNNRVLEKFYDATYIDARTGNKAKGKELFNGRISRDHKKDSENLHKYRNKKVSRGRRSIRRQRYAIQPYDTVRLEGKTYITSGCHNKGTRLLIPVNGKSKSVAISKVQVVCHAGAWIQII

SEQ ID NO: 7430 - protein, 368 aa, unidentified; identical to SEQ ID NO: 2621

SEQ ID NO: 7431 - protein, 323 aa, unidentified
  source 1..323: note = Cyanobacteria bacterium UBA11371
VPEALANITCKKDAAMQNYVFVLDTNFQPLNPVSPKRARELLTKQKAAVFRMYPFTIILKHALPNPLPKSLTIKLDPGSRFSGIAVLDGKNVIWVAELEHRSWQIKDSLLTRRSLRRSRRNRKTRYRQARFNNRKRKQGWLAPSLMHRVLTIETWVKRLCRYAPIASIAMELVKFDAQKLQNPEIDGVEYQQGELAGYEVRQYLLEKWGRKCAYCDKERVPLQIEHIHPRAKGGSNRVSNLTLSCERCNTKKGTKSIDEFLKKDGSRLEKIKQQAKQPLKDAAAVNTTRWELFRTLKNILPTTTGTGGQTKYNRTKLELPKQH

SEQ ID NO: 7432 - protein, 414 aa, unidentified
MPCSPAKARLLLKEKKAIVKRRTPFTIQLTIATGETKQPVSLGVDAGYEHVGLSASTEKAELYASEVELRQDVSDLLSARRALRQSRRNRKTRYRAPRFDNRIRTKRKGWLAPSVENRINAHLSRIEAVLRLLPVTKITVETASFDLQLLKNPDISGKEYQEGEQLGFWNIREYVLCRDGHVCQHCYGRSKDPVLNVHHLESRRTGGDSPGNLITLCETCHKALHRGEITLKAKRGQSFRAEAFMGIMRWEVLNRLKASHPELEVNNTYGYRTKHARISNGIAKSHCADAFCIAGNLGAERLGEFFFQKQTRRNNRQIHKLSILKGGIRKRNQAPFEIKGFRLFDKVACKGEEGFIFGRRSSGFFDVRKLDGTRISAGISYKKLHLLEKRQTYLTEIRKEEALPPLPEGRGLRA

SEQ ID NO: 7433 - protein, 430 aa, unidentified
MYRLTTEAGIPLIPERLHDTKKKKGTSRMSEYIYVLGMDGNPQMPTKRKRHVEQLLQTGRAHVFRQVPFTIQLTYKNQPVLQPVTIAEDPGRSNIGMAVVSLSGELLSAAVVQTRNKEIVKLMEKRKQYRRASRNGERKARQRLAKKCHTMIKAGFLMRKLPMYGKDKRVKCLVIKNTEARFCNRKREDGWLTPSAEHLARTHINLIHKMQKFLPITDVAIEINRFAFLSLEDPSISGVDFQNGPLKGYDDLNAAIEDLQDGHCLMCNSPIEHRHHIVPRSMQGSNTIGNIAGLCCKCHEKVHKSTAFEDSLKKKKAGLNKRYGAISTLNQAIPIICKRLEQEFGKEHVHYCSGRDTSMVRRSFGYHKTKEEQLHEVDAWCIAVLSLQQIPEKAPEFDHMHEILQFRRQDRSRIKAQTSRAYYHEGKKIA

SEQ ID NO: 7434 - protein, 423 aa, unidentified
  source 1..423: note = Cyanobacteria bacterium UBA12227
MSNYVFLIDQNKTPLNPVHPSHARKLLLSGKAAVFRRYPFTLILKRVVLEPKVYPLTLKIDPGSKFTGIALVTNQDNVIWAMELQHRGQQIKDALEHRSSVRRGRRNRNTRYRQARFLNRKRPHDWLAPSLRHRVLTTETWVKRLQKFVPIGSLVQELVKFDTQAIQNPEISGTQYQQGTLHGYECREYLLEKWNRQCTYCGVKDVPLEIEHIQPKSQGGSDRISNLCLACHKCNQRKGNKDIKDFLKGKPDVLSRILKGAKAPLKDAASVNSTRWTLFNTLKSLGIPISTGTGGQTKFNRIRFKLPLSHWIDAACVGVVETIKLVTTKILKVKATGFGGRQRCQTDKFGYPQKHRPLRPIRGFCTGDIVRADVPKGKYAGTFTARVCPMSHGYGEFVIDKKRRSIKLEYLTPVHRKDGYDYA

SEQ ID NO: 7435 - protein, 452 aa, unidentified; identical to SEQ ID NO: 3322

SEQ ID NO: 7436 - protein, 430 aa, unidentified
MPKVYVLNRHGRPLMPCTPAKARHLLDAGKAKVRQRTPFTIQLLYGSTGYTQEVILGVDAGSKTIGLSASTETEELFSTEVKPRSDVVELMSARRQFRRARRSRKTRHRKPRFNNRVRSKHKGWLAPSVEVKIQEHMTAIRRVCVILPISRVVVETAEFDLQLLKAVAEGKPVPQGEDYQKGEMYGHYNVRQYVLWRDGYTCRVCGAHGSVKKGVPLHVHHLESRKVGGDAPDNLVTLCTACHDKLHKGIITAADLKKRKRRSTRDATFMGIMRMTLLRRLREQLPVPVVETRGYITKATREKLLVLPKSHTNDALAIAHGPQGFRAGYLPNIRQADRLYTIRPVRHHNRQLHKATILKSGVRKANQAETYICGFRLYDKVLYNGIECFVWGRRTSGSFLLRQLNGEKVKDGVSHKHLKLLERSQSYLVA

SEQ ID NO: 7437 - protein, 386 aa, unidentified
VKSESHEYVSAQYDTLQDEKEHHDDCRKYRRTRRNRLRYRKSRFDNRKRDKGWLAPSLEHKKHLNISLIERYVSVIPITHVTVEVGSFDTMLLQSIQKGEAKPEGADYQKGPRYNLATLREAVFYRDNYTCQVCKRKIADGAILHMHHMFYWKGRHGYQLDELVTVCEKCHTPANHQKGGKLYGFGKDKKFANLSGAAFMNAVRWQIVNALYATYGKEFVTITYGAMTKEKRIALQLEKTHNNDAYAMGDYHPARRCKFRHYQKRRRNNRVLEKFYDATYVDTRTGNKAKGKELFNGRISRNHKKDCKNLHKYRSKKVSKGRRSIRRQHYAIQPYDTVRLEGKTYITSGCHNKGTRLLIPVNGKSKSVAISKVQVVCHAGAWIQII

SEQ ID NO: 7438 - protein, 460 aa, unidentified
MVAVVDLFGKPLMPTNEYRARKLLKQKKAKIFGYRPFTIQLTERKSAEIQPIELCMDTGYIHIGISAKSERHEYLGMQIDTLTDEKLKRDDKRQYRRQRRNRKRYRAPRFDNRRRKEGWIAPSLEHKKEIHIDAIQRICKVMPITDITLEIGNFDTHVLKAVEEGKPLPQGSDYQHGERYGIATLREAVFFRDGYKCQCCEKSVKDGAILHVHHIKYRSQGGTNRMSNLITVCDKCHTPKNHKPGGKLWNWKPKLAEFKGASYMTSIRWTLYNEVTALLPNSSVHITYGAKTKESRRKLDIKKSHVNDAYVMGLFCPKHRTKPVYFKKKRRNNRVLEKFYDAKYIDSRDGKKRSGQELFNGRINRNHRKDSENLHLYRKQKVTKGKRSIRNKHYPIQPHDILLYQKKKYENAGCHNNGSRVILLPEKKSVALKQLTIYQYAGGYYRVPYESNKKEERTGS

SEQ ID NO: 7439 - protein, 270 aa, unidentified
LQLLKAIADGKPVPQGEDYQKGEMYGHYNVRQYVLWRDDYTCQCCGAHATKKKEVRLHVHHLESRKVGGDAPDNQVTLCESCHEKLHKGLITEKDFKKRKRRSTRDATFMGIMRKTLMQRLCSELPIPVVETRGYITKATREKLLVLPKSHTNDALAIAQGKRGFNVGYLPGIIQTDKIYTIRPVRHHNRQLHKAAILKGGIRKSNQAGKYVFGYRLFDKVQFNGQDCFIWGRRTSGYFVVKTIDGKVIHNSASFKKLRLVERASNYLIA

SEQ ID NO: 7440 - protein, 401 aa, unidentified
VARKLLNTEKAAVFRRYPFTIILKEVKTEIVTQPIELKLDPGSKTTGIALVTNNKVIWGAQLQHRGQQIKDSLETRKAVRRSRRNRHTRYRKPRFLNRKRPNGWLAPSLLHRVLTTLTWLKRLCKYTPITNIAQELVKFDLQKLQNPEISGLEYQQGELQGYEIREYLLEKWGRNCVYCGKKDIPLEIEHIKPKSLGGTNRISNLTLACRNCNEKKGSRQIEDFLSGKFDLLNKIKKQAKQPLKDATAVNSTRWKLFNSLKELGLPVTTSSGGKTKFNRIKFGLPKTHWLEAACVGNINDLKILTNKPLIITAKGRSTRRLCRINKYGFPISKPRQKYQHGWQTGDIAKVVKNGVSYTGKIVVQSATRLEVRTQGKRIGGQLSLFQRIHLLDGYIYGFESN

SEQ ID NO: 7441 - protein, 424 aa, unidentified
MSNYALVLDTNKQPLSPCHPSVARKLLDSGKAALFRMYPFTIILNKSCSDIVNQAIELKIDPGSKTTGIALVQGEKIIFGAELSHRGSAIKASLESRRSLRRGRRNRHTRYRQARFLNRTRTKNWLAPSLQHRVETTLTWVNKLIKFIPITRISQELVRFDLQQIDNPEISGIEYQQGTLSGYEVREYLLEKWQRKCAYCGIENVPLQVEHIHPQARGGTNRISNLCLACEKCNIKKGTQDIKDFLAKKPDLLKCILAQAKRPLKDAAAVNSTRWALFSRLQETGLPVFTGSGGQTKFNRTRLNFPKTHWLDAACVGQIGELEILTNKPLLIKATGHGTRQMCRTDKFGFPSRYVPRIKFVKGFQTGDIVKAIVTTGKKIGKYIGRVAVRATGSFNISASKLVQGISYKYCKIIHRKDGYDYAF

SEQ ID NO: 7442 - protein, 430 aa, Desulfobacter sp.
LSVFVLDTNKKPQNPVHPAKARLLLTEGKAAVFRQFPFTIILKEKVLDVASNPLRIKIDPGSRETGIAVINDDSGEIVFAMELRHRGQQIKNNLESRRAIRRSRRNRKTRYRKPRFDNRTRAEGWLPPSLKSRVHNIETWVKRLCRFCNIQAISMELVRFDMQKIQNPEISGVEYQQGELMGYEVREYLLEKWDRTCAYCGKTDIPLEIEHIVPKSKGGSNRISNLTLACTACNRKKGNKPLELFLSRKPGLLKRIQKQSRVPLKDAGAVNATRWDLFRTLKKTGLPVETGSGGLTKFNRTTRGLHKTHWLDAACVGESTPEKMFQVDKTVLIVKADGHGSRQMCRVNKFGFPRTTAKSTEKKVKGFQTGDIVKAVVTSGKKVGTYTGRVAVRKSGSFNIKTVDKTVQGISWKYCRLLHASDGYSYNTTC

SEQ ID NO: 7443 - protein, 419 aa, unidentified
MVYVISQDGKPLMPCSDPIARLLLKQGKAKVKKREPFTIKLTYETTNHTQGLTLGVDTGSGTIGTAVSKDNGDIVYMSEVVVRNDITDKMTQRAKYRRNRRNRKTRYRKARWLNRASSIKKDRFSPTMQSKLHSHVREIEYIQSILPITEMVFETGQFDMQLMKNPSLANPKVRPWGYQKGANYGFENTKAMVLNRDNYTCQCCKGKHKDSKLEVHHIVFRSQGGSDEESNLLTLCHTCHKDLHSGKINPKLSGKVKGNLKYATQMNSIRKQLFRFYPNAIETFGYVTKANRLHLGVDKEHYYDACTIATQGNAFNVKSNLYKKKCVSDGDFQKTKGIRSEQPIVTDKICGFRKFDKVRYFGNDYFIKGRMSTGYAILMDIDGNKIDFSTMPRGYKTPKLSNCKRITARSTVMTQVKVV

SEQ ID NO: 7444 - protein, 465 aa, unidentified
MSTCVCVLSNSGERLMPTFRLGKVRRLLKDGKAKIVKHHPFTIQLLYNSKTNTQPIEICEDVGYNYIGISVKSKSCEYVSAQYDTLQDEKEHHDDCRKYRRTRRNRLRYRKPRFDNRKRSEGWLAPSLKHKKELNVNVVKMYCAVMPITHATVEVGSFDTMLVKAIQEGKAIPEGADYQKGPRYNLATLREAVFYRDNYVCKVCGRKATEGAILHMHHMFYWKGRHGNSLDELLTVCEKCHTPANHQKSGKLYGFGEKIKFADLSGAAFMNTVRWQIVNELYTAFGKPFVTITYGAMTKEKRIALRLEKTHNNDAYAMGEFHPNFRCTFEHYEKVRRNNRILEKFYDSQYIDIRTGEIATGKELFNGRINRNLKKNSESLHKYRGKRTYAGHRALLRKKVNLNPGDLVSFNGEVLIVHGTHTDKKGAINVEFKTPAKNGRKSASLKKLKIVKAAGSIHPAWEKVS

SEQ ID NO: 7445 - protein, 451 aa, unidentified
MSVAVISKTGERLMPTSEYRARKLLKSGKAIKYSYHPFTIQLTERKTGNIQPIELCMDTGYIHIGISVKSEKHEYLTEQIDTLTDERSRHNARRMYRSQRRNRKRYRQPRFNNRKKDKGRIAPSLEHKKNIHVQTISRINNVMPLTDITMEMGNFDTQVLKAKEEGRPLPQGVDYQHGERYSIATLREAVFARDGYKCQCCGRTIKDGAILHVHHIKYRSQGGTNSISNLATVCDKCHTPKNHKPGGKLYGWKPTLPSFKGATFMTTIRWQLYNEAKALFPDIDIHITYGAATKERRRELNIDKSHINDAFVMGQFHPRHRIKAVLYKKKRRNNRCLEKFYDAKYIDSRDGKKRSGQELFNGRINRNHKKDSENLHQYRLQKVTAGKRTVRKQHYSVQPHDIIIYESRKRETTGCHCNGARVMLLPDKKSVSIKKIKIYRYAGGYFKSTFN

SEQ ID NO: 7446 - protein, 423 aa, unidentified
MSNHVFVLDTNRKPLTPCKPGVARSLLKAGKASVFRRYPFTIILNKEVDANPEPLELKLDPGSKVTGIALKQGNHIIFAAELQHRGQQIKEALLSRRQLRRSRRNRKTRYRPARFLNRTRSKGWLAPSLQHRVDTLMTWVHRFRRLAPVGRITQELVRFDLQLMENPEISGVEYQQGELQGYEVREYLLEKWGRTCAYCGAQNVLLEVEHIQPRSKGGSDRVSNLTMACHSCNQAKGNGDIRDFLSGQPDVLSRLLRQAKSPLKDAAAVNSTRWALFKALKATGLPVTTGTGGQTKFNRLRLNLPKAHWLDAACVGPVESLEVLTSKPLLILAKGHGTRQMCGTNKYGFPNRHRSRRQIHKGFQTGDMVTALVTAGKKIGSYLGRVLCRASGSFDITTASVRVAGISHKYCQPIHSTDGYAYA

SEQ ID NO: 7447 - protein, 429 aa, unidentified
LKDGKAKIVKHHPFTIQLLYDSKTNTQPIEICEDVGYNYIGISVKSQSHEYVSAQYDTLQDEKACHDSCRKLRRSRRNRLRYRQKRFNNRKHDKGWLAPSLEHKKELNVNVIKMYCEVMPITHATVEVGSFDTMLLQAIQKGKSKPEGVDYQKGPRYNLATLREAVFYRDNYTCQVCGRKIADGAILHMHHMFYWKGRHGYQLDELVTACEKCHTPANHQKGGKLFGFGEDKEFANLSGAAFMNAVRWQIVDALHATYGKEFVTITYGAMTKEKRIILGIEKTHNNDAYAMGDYHPVHRCVFRHYQKRCRNNRMLEKFYDATYIDTRTGNKAKGKELFNGRISRNHKKDSEDLHKYRSKKVSKGRRSIRRQRYAIQPYDTVRLESKTYITSGCHNKGTRLLIPANGKSKSVAVSKVQVVCHAGAWIQII

SEQ ID NO: 7448 - protein, 570 aa, Streptomyces sp.; identical to SEQ ID NO: 3191

SEQ ID NO: 7449 - protein, 425 aa, Planktothrix sp.; identical to SEQ ID NO: 3728

SEQ ID NO: 7450 - protein, 414 aa, Parasutterella sp.; identical to SEQ ID NO: 3876

SEQ ID NO: 7451 - protein, 409 aa, unidentified
MVYVQDINGKPMMPTTRHGKVRRLLKENKAVVVNLCPFTIKLTYVTSDYKQEIVLGVDAGTKHVGLSATTKSKELYSSEVILRNDIVDLLSTRRELRRTRRNRLRYRKPRFDNRIKSRRPGWIAPSVRYKIDAHIRVIDNVCSILPIFRIVIEVAQFDTQKIKNPNISGKEYQEGNQLGFWNVREYVLARDGHKCQYCKGKSKDSILNVHHIESRKTGGDSPSNLITLCETCHKEYHKGNIDLKIRRGKSLRDAAVMGIMKWRLYEELRSKYNRVSMTFGYVTKYNRIKHGIEKSHVSDAFVISKNFNAIRLGYYYKVRLVRRHNRQIHKQKIQKGGIKRLNQSPFEVFGFRLFDRVMFENNCYFIFARRKTGSFNIRDINGKNKRDITYKKLKLSRCKRFMIEKKLIY

SEQ ID NO: 7452 - protein, 413 aa, unidentified; identical to SEQ ID NO: 5215

SEQ ID NO: 7453 - protein, 492 aa, unidentified; identical to SEQ ID NO: 4486

SEQ ID NO: 7454 - protein, 433 aa, unidentified
MFVYVLDKNGQPLMPTSRFGKVRRMLRDKKAKVVQSCPFTIRLLYEPKTKIVQDVVLGVDTGSKYVGVACVGNDKVLYQSQVELRDDIKKKMDSRRMYRRNRRFRKTRYRKVRFLNRGNSIKKDRYCPTLVSKYFGHEREIEFCKKILPIKDTVLEVGKFDTQLMEKPWIQEYKWAYQKGVNYGYVNAREHALVRDNYTCQCCGKKNCRLEVHHIVFQSNDGSDDLENLVTLCKDCHDTIHHDGKELKLRGKRRSTLRYATQMSIIRSMLLKKYPDAIETHGFVTKANREHLGLPKYHYIDACVIASGGLVFEQSDVLYRKRCVSKQDRQLCKGIRGERKIPTGKIFGFKKFDKVEYLGKVCFIKGRRSRGYFILMDINNNALDFREKGGKREPTYQHLKRISVRRSNLCISSRLWRNSTDGCIQADIEYLCS

SEQ ID NO: 7455 - protein, 451 aa, Microcoleus sp.
MDTTSPQNIGEETITPTGRTFMSNFVFVVDTNLQPLNPIPSGQARRLLAQQKAAIYRRYPFTLVLKRAVRVPQTQPHQLKIDPGSKVSGLAIVRDRKVIWGAELTHRGQQIKNDLESRSNLRRNRRNRKTRYRKPRFLNRNRKPGWLPPSLESRVKNIVTWVSRIRRYVPITGISQELVKFDTQAIQNPEISGVEYQQGELAGYEVREYLLAKWGRKCAYCGVENVPFEVEHIYPKSKGGSDRVSNLTLACRQCNQAKGDRYLREFLSGKPDILSRILQQAKQPLKDAAAVNSTRPSLFQQLKQTGLPIEVSTGGRTKYNRTRLGLPKTHWLDAACVGNQEVLQVVTKQPLLIAAKGWGSRQMCTTNKYGFPVKHKTRCKTFFGFGTGDMVSAILPSGKFAGTHAGRLTVRQSGVFSMTTPLGKISPVRHKYCKLIHRNDGYMYALSAVVH

SEQ ID NO: 7456 - protein, 441 aa, unidentified
MELRITYCKVEYFQGVDTLVYVISIDGKPLMPCKPVIARLLLKQHKAKVIKKYPFTIKLLYKTKTEYTQPLTLGIDTGSSKIGSAVVDENNNVLYLSQVEVRNDITDKMKQRAKYRRNRRNRKTRYRKARWLNRKNSIKEDRFSPTIVSKINSHLKEINFVKSILPIQNVILETATFDPYALKNPAVLHNKWLYQKGVNYGFANTRAYVLGRDNYTCQYCNGKSKDSKLEVHHIIFRSQGGSDESKNLITLCKTCHGKLHNGKINLKKNGKVKGQLKHATQMNSIRQQLLRLLPEATETFGFITKEHRQLMKLPKEHYYDAIAIACLNNIENTGLIGVNFKTKNILFKRCIADGDFQQTKGVRSEQRIITGKIQGFRKLDKVEYQGKEYFIKGRMSTGYAILMDIEGNKINLKPIPKFEKMKRMQARKSWIISQETIRNIC

SEQ ID NO: 7457 - protein, 415 aa, unidentified
MVYVLDKNGQPLMPTDRHRKVRLMLQSGQAKVIKRCPFTIQLNYDSGHQTQEISLGIDAGSKHIGVSTTTKIKVLYEVDVELRNDIVDLLSSRRELRRGRRNRKTRYRQAKFNNRRRGNGWLAPSIRQKIGTHLTVVENICKMLPISRIMVETASFDIQKIKNPDIQGAEYQQGDQLGFWNVREYVLFRDGHTCQCCKGKSKDKILNVHHIGSRKTGGNAPNNLITLCETCHTGYHKGTVQLPKAIKRGMRFKDAAFMGIMRWAFYEALKQQYEPVALVHNTYGYITKHTRIAYNLPKEHYVDARCISGNPEASSNGEYYYQKKVRCHNRQIHKLTVLKGGIRKQNQATYLVKGYRLFDKVSYQGKGYFVFGRRQSGFFDIRTLSGEKVNKGSLSCKKLKFIATRTYYLTERRAV

SEQ ID NO: 7458 - protein, 419 aa, unidentified; identical to SEQ ID NO: 3670

SEQ ID NO: 7459 - protein, 465 aa, unidentified
MSTCVCVLSNSGERLMPTFRLGKVRRLLKDGKAKIVKHHPFTIQLLYDSKTNTQPIEICEDVGYNYIGISVKSESHEYVSAQYDTLQDDKEHHDDCRKYRRTRRNRLCYRKPRFDNRKRSEGWLAPSLRHKKELNVNVVKMYCAVMPITHATVEVGSFDTMLVKAIQEGKAIPEGADYQKGPRYNLATLREAVFYRDNYVCKVCGRKATEGAILHMHHMFYWKGRHGNSLSELITVCEKCHTPANHQKGGKLYGFGENVKFADLSGVAFMNTVRWQIVNEFYAAFGKPFVTITYGAMTKEKRIALRLEKSHNNDAYAMGEFHPNHRCTFEYYEKVRRNNRILEKFYDSRYIDIRTGEKASGKALFNGRINRNHKKDSENLHKYRGKRLYKGHRALVRKKVNLNPGDLVSLNGEVLVVHGTHTNKKGAINVEFKVPSKSGKKSASLKKLEIIKTSNSMRSVWKKVS

SEQ ID NO: 7460 - protein, 427 aa, unidentified
MRVFVLDKNRKPLDPCHPARARKLLKSGRAKVLRRYPFTIIIKDLEEENCSTHDHQLKIDPGAKTTGLAIIQGNRVIWGAELTHRGFQIRDALTSRRQLRRSRRNRKTRYRQPRFLNRKKPKSWLAPSLMSRVHNILTWVNKLIKFCLVTGISQELVRFDTQKMLNPEISGIEYQQGTLYGYELREYLMEKWNRTCAYCGAKNTRLEIEHIKPKSKGGDHRVSNLAIACHNCNQAKGNLEIEEFLSSKPNILKRILSQAKKPLADAAAVNATRWKLHNELKLIGLPVEVGSGGLTKYNRCRQNLPKTHWLDAANVGKVSTLYIEDYQPLLIAAKGHGKRQICGTNKYGFPIRHNSKKKIHKGFQTGDIVKAVVTKGKKIGTYIGRVATRKTGSFDITTAKGRVSGISYKYCQAIHRKDGYSYQFHGG

SEQ ID NO: 7461 - protein, 431 aa, unidentified
MPNKVYIINKHGRPLMPCSPAKARHLLDEGKAKVKKRTPFTIQLVYGSSGYTQEVILGVDAGSKTIGMSASTTKEELLSAEVKPRNDVVDLLSTRREFRRAQRNRKTRYRKPRFDNRVRSKHKGWLAPSVEVKIQEHITAIRRVCGILPVSKVVVETAEFDLQLLKAIADGKPVPQGEDYQQGEMYGHYNVRQYVLWRDGYTCQCCGAHATKKKEVRLHVHHLESRKVGGDAPDNQVTLCESCHEKLHKGLIAEKDFKKRKRKSTRDATFMGIMRKTLMQRLCSELPIPVIETRGYITKATREKLLVLPKSHTNDALAIAQGKQGFNVGYLPGIVQINKIYTIRPVRHHNRQLHKATILKGGIRKSNQTEKYVFGYRLFDKVQFNGQDCFIWGRRTTGIFTIKTINGKMIKDGISFKKLKLVEKSTSYLIA

SEQ ID NO: 7462 - protein, 453 aa, unidentified
MQRVFVVDANKQPLMPCLPTRARQLLKKGKAAVLKLHPFTIVLKEKEKGDLQEIELKIDPGSKVSGIALTCSFLREKVVLWAANLEHKGMAIRSALESRRSLRRGRRYRKTRYRKVRFDNRRRKEGWIPPSLESRVHNILTFVQRLQRIAPISSISLESVRFDMQKIQDPEITGSEYQQGALFGYEVREYLLEKWERCCAYCGAKQVRLEIDHILPKSKGGSDRVSNLTIACRDCNCKKSNYSLQEFLKGKSGLQSQILEKAKKPLADASAVNSSRKEIVNRLSILNLPLSCSTGGRTKFNRTLQGYPKDHWIDAACVGESGEDVYIPSSLIPLTIKAIGRGSRQFCRMDKYGFPRTSPKDQKRIHGFATGDFVKAIVPKGKRIGTYSGRVAVRSSGNFCIDTSFGKVDGISFRFCKNLQHADGYQYSQQSQQQEERHFLPRLKSRVSMSSVL

SEQ ID NO: 7463 - protein, 465 aa, unidentified
MSTCVCVLSNSGERLMPTIRLGKVRHLLKDGKAKIVKHHPFTIQLLYDSKTNTQPIEICEDVGYNYIGISVKSESHEYVSAQYDTLQDEKEHHDDCRKMRRARRNRLRYRKPRFGNRKCDKGWLAPSLEHKKQLNIRLIERYVSVIPITRATVEVGSFDTMLLQAIQKGESKLEGADYQKGPRYNLATLREAVFYRDNYTCQVCGRKATEGAILHVHHMFYWKGRHGNSLDELLTVCEKCHTPANHQKGGKLYGFGENVKFADLSGAAFMNAVRWQIVNELYAAFGKPFVTITYGAMTKEKRIALRLEKSHNNDAYAMGELHPNCRCTFEHYEKVRRNNRTLEKFYDSRYIDIRTGEIATGKELFNGRINRNHKKDSENLHKCRGKRTYAGHRALLRKKVNLNPGDLVSLNGEVLIVHGTHTNKKGAVNVEFKVPAKNGQKSANLKKLKIVKAAGSIHPAWEKVS

SEQ ID NO: 7464 - protein, 485 aa, unidentified
MPDGRRKPERKLMVAVVGNTGKPMMPTSEYRARKLLKKGRAIIYRYRPYFTIQLLDREDGEVQEVEYKSDTGSQHVGISVCTEKKELLSEQRDLPQMEPEAHNDRKKNRRTRRNRKRYRAPRFDNRKKRVQEGHTKWFAPTNLHKLEVQVSLFRELVKVIPVTKAVFEMGKFDTQVLKAVLEGKPLPHGKDYQRGEQYGTDTLRAAVFLRDGHTCQFCGRSIKDGAFLHVHHVGYWKGDRTNRPANLATACEQCHTPANHGKNGILYGRQPKYGSLKDASYMTMVRWAMLEELKAAAPGVEIHVTYGVATKRKRQGLHLSKSHVNDAYSMEMFHPKKRADTVYWKKVRRHDRILQKFYDATYVDTRDGKTKKGKELFNGRISRNHKKDSENLHKYRGHKASKGRVSIRRDGDKLKPGSMVLYNGERLTVHATHTTYRKNEKGETMKNVNIQFTHPASNGRKSASSKKCRVLTRNYNTGWKRYRPA

SEQ ID NO: 7465 - protein, 430 aa, unidentified
MVYVLSKNGAPLMPCSPRKARLLLAGNKAKVVRKTPFIIKLVYGSTEYRQTVVAGLDTGSTVVGCAAVANGCVVYQSETILRNDITGKLKSRSSYRRTRRGRKTRYRAARFDNRSASCRKDRLPPSLNSKITSHQREVAAVNSILPVSEWIFELAAFDIHKITNPEVTGVGYQQGALMQFYNVKQFVYARDSYRCQSGQKIKHSTRLHAHHKLFKSQGGADTQDNLITLCETCHADLHKGLFSLKAKTSRSKTKHATEMGVIKSRLAKDAIAHTVTYGYETKFKREQHLKLDKTHANDAIAICVKEGASVLPMANILIKRHLSKGDYQQTSGKRSQLTIPTGKLFGFRKGDKVATSRGMGFVKGKRSSGYFSISDIDGGIIHASEKVTNCVRLAARSTTQVEEIKLTKLIERRKEASLNKQLKKPTKAQA

SEQ ID NO: 7466 - protein, 427 aa, Enterococcus sp.; identical to SEQ ID NO: 5630

SEQ ID NO: 7467 - protein, 442 aa, unidentified; identical to SEQ ID NO: 2903

SEQ ID NO: 7468 - protein, 518 aa, unidentified
LANLKLIDELLEKTEYIYVLGTDGKPQMPTNRKVRVRSLFKSGLAKIVDTVPFTIRLLYENDAVLQPITIAEDPGRTNIGAAVLTQLGDLVFSAVVETRNKSIKKLMSDRKAYRQASRRGERKARQRLAKRHGSMIKAGMIMRKLPQYAADKFVTCKIIKNTEARFCNRKRMPDWLTPTVNHLVQTHINLIKKVEKYLPITDIAIEVNRFAFMQMENPDASGVDFQNGPLKGFDDVKAAICEQQHGKCLMCKNDIEHFHHIVPRSKGGSDTIQNQAGLCKKCHAKVHTDAEFQAKFKDKKEGLIKKYGALSALNQAIPFICKELLEIYSVEHVHFCTGKDTSLIRSSLGYEKTKDNQMHEVDAYCIGLAAIGADKAKRPDFNNVFKIKQFRRQDRQLVHYQKERTYYLDGKKIATNRNPRFEQKGDALSDWYKEQIKIYGQYEAEKMRSRLTVKKSKRSYNTTKRLMPGCVFYYDGQRHVMTGQSSYGRYLRAYNCGTKDFPASKCQVIQFNAGLVFV

SEQ ID NO: 7469 - protein, 415 aa, unidentified
MVYIVSIDNKPLMPTSRHGKVRRLLRENKAEIIKRVPFTIKLLYRTETEITQNITLGVDAGSKVIGLSATTENQEVFKAEYELRNDISKKLTSKREIRQTRRNRLRYRKPRFNNRVSTKKKGWLAPSIEHKINSHLKIVEDLNKIMPINKIIVEVASFDVQKIKNPNIQGKEYQEGEQLGFWNVREYVLFRDDHVCQHCKGKSKDPILNVHHIVQRKDGGSNAPSNLITLCETCHNDYHKGKIDLKIKKAKSFKDSAFMGIMRWAFYNKLKEKYPDVSLTYGYKTKNKRIELGLDKTHYNDAYCIANNLKAKKLDVYYYYKKVRCHNRHIHKANYLKGGIKKNNQAPYQVKGFRLFDKVRYQDKEYFIFGRRSSGQFDIRDLSGNKVNKGSISCKKLEFIEPRKTVLVERRIAGS

SEQ ID NO: 7470 - protein, 456 aa, unidentified
MSTCVCVLSNSGERLMPTFRLGKVRRLLKDGKAKIVKHHPFTIQLLYDSKTNTQPIEICEDVGYNYIGISVKSESHEYVSAQYDTLQDEKEHHDDCRKYRRTRRNRLRYRKPRFDNRKRSEGWLAPSLEHKKQLNIRLIERYVSVIPITRATVEVGSFDTMLLQAIQKGESKPEGVDYQKGPRYNLATMREAVFYRDNYTCQVCGRKIADGAILHMHHMFYWKGRHGYQLDELVTACEKCHTPANHQKGGKLFGFGENKEFANLSGAAFMNAVRWQIVNALYATYGKEFVTITYGAMTKEKRIILGIEKTHNNDAYAMGDYHPAHRCVFRHYQKRRRNNRVLEKFYDATYIDARTGNKAKGKELFNGRINRNHKKDSENFHKYRSKKVSKGRRSIRRQRYAIQPYDTVRLEGKTYITSGCHNKGTRLLIPANGKSKSVAISKVQVVCHAGAWIQII

SEQ ID NO: 7471 - protein, 470 aa, unidentified; identical to SEQ ID NO: 2949

SEQ ID NO: 7472 - protein, 442 aa, unidentified
MSTSVFVLDKKHRPLMPCRPARARRLLRAGRARGVKRFPFVIRLVDRTVEQSEVQPVLIKLDPGSRETGAAVVRDDEKKRHHALAFFVIKHRGGAIRDALKARSAFRRRRRSQNFRCRSPRFLNRVKPKGWLPPSLRHRVETTLSFVRRMCRSLPVSGIATELVKFDSQKLQNPEVSGVKYQQGTLFEYEVREYLLEKFGRKCVYCGAEGVPLNIDHVVPRAKGGSNRVSNLVLACVSCNQKKGARSLEDFLKGKPEVLARVRRELKTPLRDAAAVNATRWVLFNELKATGLPVETGSGALTKLNRHAFGVEKEHWLDALCVGRLNGVVTRKGLNVLEIRCMGRGSRQRTRLTKYGFPRGYLMRQKCVHGFATGDMVEANVPKGKKAGLWRGRVAVRVSGSFNIQTPKGVIQGVGWKHCRLISHNDGYGYAWLGHAPHSSPA

SEQ ID NO: 7473 - protein, 402 aa, unidentified
VLTLKGSSAVKACVVKRTPFTIKLLYGSAGYKQPITLGVDAGSKHVGLSASTEKRELYREEFTPRNDVVDLLSTRRQNRRSRRNRKTRYRAPRFDNRVHSKHKGWLAPSVEVKIQEHITVIKRICRILPITLVRVETAEFDTQRLKAMLKGKPLPVGTDYQLGEMYDEYNVRQYVLKRDNYTCQCCGAHPTEKKPVRLHVHHLESRHVGGNAPNNLITLCVACHKALHEGKITLDKGKKRGKPLRDAAFMGIMRNTLLARLKDELNIPVKQTYGYITKLLREKNKIPKSHVNDARCIAKAPNAKPCDTMLYTRALRHHNRQIHKAKILNGGIRKKNQAPYLVKGFRLWDKVRYNGEECFITGRRSSGYFALKKYDGTVISNSASYKKLMLLEAATNYITERS

SEQ ID NO: 7474 - protein, 451 aa, Ruminococcus sp.; identical to SEQ ID NO: 2436

SEQ ID NO: 7475 - protein, 406 aa, unidentified
MPCSPRKAKLLLKNKKAKVKHRMPFTIQLIYGSSGYKQPVSLGVDAGSKVIGLSATTEKKELFASEVVLRDDIVKLLSVRREFRRARRNRKKRYRAPRFNNRVHSKNKGWLAPSVENKIETHLKAVRHVFLILPIAKIIVETATFDLQMLRAKELGLPLPEGVDYQQGEQLYSYNVREYVLFRDNHTCQHCKGKSKDLVLQVHHIESRVVGGDAPNNLITLCKTCHAKYHAGLIKLQIKRGASFRDAAFMGIMRWAFYDRLKQIYPNVSMTFGYITKHARIEHQLEKKHHIDARCISGHPNALPTENLYLQKAVRKRNRQLHKATINKGGIRKSNQSPKYVYGFQLFDKVFYDNKECFIFGRRATGYFDIRMLDGTKLSAGVSYKKLKLLERRKTILMQRVEDFAV

SEQ ID NO: 7476 - protein, 418 aa, unidentified; identical to SEQ ID NO: 4424

SEQ ID NO: 7477 - protein, 430 aa, unidentified
MSNFVFVLDTNKQPLEPVTPGLARRMLNQGKAAVYKRYPFTIILNYSCDKPLTKSHEIKIDPGSKTTGLAVLQGDKIIWAAELVHRGNHITCDLASRSAIRRNRRNRKTRYRQPRFLNRTRTPGWLPPSLASRVSNIVTWVNRLRRYVPVTAISQELVKFDTQAMQFPEISGIEYTQGELAGYEIRQYLLEKWGRKCAYCGIKNTPLEVEHIHPKSKGGSSRVSNLTLACRNCNLAKGNRDITDFLSGKPDILSRVLKFACLPLKDAAAVNSTRRALFEKLQQTGLPVTTGTGGQTQYNRTRMGLPKTHWLDAACVGKVEQLAVLSRQPLLITAKGWGNRQMCTPNKYGFPSKHRTRCKTFFGFQTGDMVKAILPIGKFAGTHVGRLAVRESGVFDLRTAWGKISPVRHKYCTIVHRNDGYMYGFSTLVR

SEQ ID NO: 7478 - protein, 420 aa, unidentified; identical to SEQ ID NO: 5662

SEQ ID NO: 7479 - protein, 427 aa, unidentified; identical to SEQ ID NO: 5764

SEQ ID NO: 7480 - protein, 420 aa, unidentified
MQYVYVLSKHGKPMMPCSPGKARLLLKQQKACVVRRTPFTIKLLYGSAGYKQPITLGVDAGSKHVGLSASTEKRELYREEFAPRNDVVELLSTRRQNRRSRRNRKTRYRAPRFNNRVHSKHKGWLAPSVEVKIQEHITVIKRICRILPVTLVRVETAEFDTQRLKAMLAGKPLPVGTDYQLGEMYDEYNVRQYVLKRDNYTCQCCGAHTTAKKAVKLHVHHLESRKVGGNAPSNLITLCTTCHNNLHKGKITLDGKERGKPLRDAAFMGIMRKTLMARLKKELPIPVQGTYGYITKMRREQNDIKKSHTNDARCISKHPLAEPCSVCYRTKAIRHHNRQTHKANFSKKGIRKRSQMPYLVEGYRLWDKVLYKEQECFVSGRRSSGSFTLKKLDGTSVSKGVTFKKLRLLEPATNYLIERM

SEQ ID NO: 7481 - protein, 416 aa, unidentified
MVYVLSQHGQPLMPTGNHAKVRVLLNQRKAKVIKRCPFTIQLQYESTTHTQKINLGIDAGSKTIGVSATTDSKVLYESEVVLRNDIVELLSGRRALRNSRRSRKTRYRKPRFDNRKKPDGWLAPSIRQKIETHVTVVGNVMKILPVTKIIVETASFDIQKIKNPEIEGEGYQHGEQLDFWNVREYVLFRDGHTCQCCKGKSKDNILNVHHIESRKTGGNAPNNLITLCETCHKAYHKGIITLPKEIHRGMRFRDAAFMGIMRWAFYDRLKELYNPLGAEVINTYGYITKNTRIEHGLPKEHYVDARCISDNPAAKPLDHYYFQKKVRCHNRQIHKNTILKGGIRKRNQASYEVKGFRLYDQVLWKGQKCFIFGRRSTGRMDLRLLDGTHINASVGHKNLKLLSMRKNYLIEQRKAG

SEQ ID NO: 7482 - protein, 442 aa, unidentified
MVTVQQSTHHLPFGRVFIRRNLFMVYVISQDGKPLMPCSDPIARLLLKQGKAKVKKREPFTIKLTYETTNYTQSLTLGVDTGSGTIGTAVSKDNGDIVYMSEVVVRNDITDKMTQRAKYRRNRRNRKTRYRKARWLNRASSIKKDRFSPTMQSKLHSHVREIEYIQSILPVTEMVFETGQFDMHLMKNPSLANPKVRPWGYQKGANYGFENTKAMVLNRDNYTCQCCKGKHKDSKLEVHHIVFRSQGGSDEESNLLTLCHTCHKDLHSGKINPKLSGKVKGNLKYATQMNSIRKQLFRFYPNAIETFGYVTKVNRLHLGVAKEHYYDACTIATQGNAFNVKSNLYKKKCVSDGDFQKTKGIRSEQPIVTDKICGFRKFDKVRYFGNDYFIKGRMSTGYAILMDIDGNKIDFSTMPRGYKTPKLSNCKRITARSTVMTQVKVV

SEQ ID NO: 7483 - protein, 300 aa, unidentified
TVSETSSDNRVRSNHERWLAPSVKVKIQEHITSIKRVCTILPISKVVIETAEFDLQLLKAIQEGKPIPEGEDYQKGEMYGSYNVCQYVLWRDNYTCICCGVRGTPKNPVRLHVHHFESRKYGGNAPDNHGTLCDDCHKKFHLGIIADVKLKTRRRQSTRDAAFMGIMRKTLMWRLRTELFIPVAETKGYITKATREKLLVLPKSHTRDALAIAQGRHGFSIKEYAYVEPANHIYTVRPVRHHNRQLHKASILKGGIRKRNQASKYVFGFRLYDKVLYQGKACFVWGAENKRTFFFEQLTV

SEQ ID NO: 7484 - protein, 512 aa, unidentified
MSTVYVLNKDGKPLMPTTRGGHVRHLLKEQKARVVRAKPFTIQLLYETNDVVQPLYLGIDPGRTNIGVAVVKANGTAVFTAHLEARNKEVPKLMQDRKKARRARRTNGRRCRRQRRAKANGTISKKCVKQDTAQSKNPSKRAKEIGIIKRRLPGYKKDVLCIGIKNKEAKYTNRTRPEGWLTPTANQLLQTHINLVRKIQKFLPISDVVLEVNKFAFMRLDNPDIQKWQYQQGPLYQKGSLENAVSEMQEHHCLFCDKPIDHYHHVVPQSENGSNTIANIVGLCAEHHNLVHKDAAWQKKLAEEKVGLNKKYGALSVLNQIIPALTNKLSVLFPKHFFVTAGKSTHDYRATHGVSKDHWLDAYCIACSVLPSDVCDSNINNHMPYELKQFRRHARRALNNENMNRVYTLNDKAVAINRHKATEQEAASLEEFRKEHPNDVCKLKVKEHHPTYRNMNRNYPGSIFLVGKHVHIMQGIAGSKDGKATTYKDSNANSITASKCKFVAKNSGILFV

SEQ ID NO: 7485 - protein, 454 aa, unidentified; identical to SEQ ID NO: 5869

SEQ ID NO: 7486 - protein, 507 aa, unidentified
MSEYIYVIGMDGDPQMPTKRKRHVEQLLQTGRARVFRQVPFTIQLTYKNEPVLQPVTIAEDPGRSNIGMAVVSLSGELLSAAVVQTRNKEIVKLMDKRKQHRRASRNGERKARQRLAKKCHTMVKAGSLMRKLPMYGKDKRVRCNVIKNTEARFCNRKREDGWLTPSAEHLVRTQINLIHKMQKFLPITDVAIEINRFAFLSLEDPSISGVDFQNGPLKGYDDLNAAVEDLQDGHCLMCNSPIEHRHHIVPRSMQGSNSIGNIAGLCCKCHERVHKDSAFEDSLKKKKAGLNKRYAAVSVLNQAIPFICKRLEQEFRKEHVHYCSGRDTSMVRRSLGYHKTKEEQLHEVDAWCIAVLSLQQIPEKAPSFDHVHEILQFRRQDRSRIKAQTSRAYYHERKKIAKNRKKAEGQREDSLQEWRKRQVERYGKEQTRKMISQLEVKESIRRYNRLDRLMPGAVFYYQGVRYVMRGQHSNGQYLQAVGMGDKDFPAKKCKIVVHNQGLVFVS

SEQ ID NO: 7487 - protein, 430 aa, unidentified
MPKVYVLNRHGRPLMPCTPAKARHLLDAGKAKVRHRTPFTIQQLYGSTGYTQEVILGVDAGSKTIGLSAATETEELFSAEVKPRNDVVELMSARRQFRRARRNRTTRYRKPRFDNRVRSKHKGWLAPSVEVKIQEHMTAIRRACAILPVSKVVVETAEFDLQLLKAVAEGKPVPQGEDYQKGEMYGHYNVRQYVLWRDSYTCRICGVHGSVRKGVPLHVHHLESRRVGGDAPDNLVTLCTACHDKLHKGIIMAADIKKRKRRSTRDATFMGIMRMTLLRRLREQLPVPVVETRGYITKATREKLLVLPKSHTNDALAIAHGPQGFRAEYLPNIRQADRLYTIRPVRHHNRQLHKATILKGGVRKANQAEKYICGFRLYDKVLYNGIECFVWGRRTSGSFLLRQLNGEKVKDGVSYKHLKLLERSQSYLVA

SEQ ID NO: 7488 - protein, 464 aa, Ktedonobacter sp.; identical to SEQ ID NO: 6151

SEQ ID NO: 7489 - protein, 516 aa, Eubacterium sp.
MKYLDYTFVVDNNNVPCMPVTNNEAGYLIRCGLAKVINHDPFVIQRLDDYISESEIRDEITMKMDMGYMNVGFSVGTKDHEYLSGQVKLLNGISERLEQRASYRRTRRGRIRYRKNKNVDYKTIHNPTYKNGNEDNWIAPSVQHKIDSHVRLYRKIASWIPIDKVIIEIANFDIQAIKALKDGKEISGVDYQRGEMYGFENVKQYVRERDNYTCQICEIDTIKKGTGLEVHHIIPRSQGGSNKPSNLISLCKKCHNKVHSNNNNNKYFRELQTRKINDTYKDATFMNTSRWRIYESIGSKCPTYISYGYITSLNRKTNNLPKFHYVDAACIQKFTYKTLTKNIYLVEQKRCNDRCMSAFWDAKYIDNRDGKEKKGSELSYKRLPSATSKRTTRKEDVENDRVYRQRKTKKGEFRFVCNSRCLKAGDLIRINIGKRKGIIGEVTNSQIERNKYKVRFTYNGQDVKYPSISISKDEYNILKETGKCDSISIVRTRRGMIWRKYDRAKYESENVDQYSS

SEQ ID NO: 7490 - protein, 420 aa, unidentified
MQYVYVLNKHGEPLMPCSPGKARILLKQQKACVVKRTPFTIKLLYGSAGYKQPITVGVDAGSKHVGLSASTEKRELYSEEFTPRNDVVELLSTRRQNRRSRRNRKTRYRAPRFNNRIHSKHKGWLAPSVEVKIQEHITVIKRICRILPITLVRVETAEFDTQRLKAMLSGKPLPVGTDYQLGEMYDEYNARQYVLRRDNYTCQRCGAHTTKKKTVKLHVHHLESRKTGGNAPSNLITLCVDCHKAFHAGKVKLDGKKRGKSLKDAAFMGAMRNTLLTRLRNELNIPVQNTYGYITKLLREQNDIKKSHVNDARCISKHPLAEPCSVCYRTKAIRHHNRQTHKANFSKGGIRKRSQMPYVVEGYRLWDKVLYKGQECFVSGRRASGSFTLKKLDGTRISKGVTFKKLRLLEPATNYLIERM

SEQ ID NO: 7491 - protein, 406 aa, unidentified
LQKVHIMRVFVFNMRGEPLMPCTQRKARLLLKAGKAKIYKYNPFTIQLKYATGENKQECHVGIDTGSKHIGLAVTSENKVLFKGEVELRQDVKSKIDTKRIYRRSRRNRKTRYRRCRFLNRKRFGKWLPPSLQNRINHTFKWIDKLCSFIPESILHIEVGKFDIAKMINPEVHSMDYSQGQTYGYQGERYFIFARDNYTCQVCGERNKPLQTHHIIYVSNGGTNRVDNQITVCKNCHNSTNHKNGGIFYKWQKEHKKVKQYKEPPFMNVLRQQILNQYPQALITYGFETTIKRKNIGLEKTHYNDAIVISGISTISENLDEWLLIKQFRKKKRSLHEGVPRKGRKEPNRIQKRNSKNTPYYRGFYLNDKVSVFGKSGYITGFTNSGAYVKGVDGEYIVLPNKSYKR

SEQ ID NO: 7492 - protein, 411 aa, Orenia sp.
MTKNYAFVIDKNGKSLAPTNINKAWILIRKKKATLANKYPMLIQLNYEVEEDKQECQFICGIDDGSNHVGIAIVQKCKTRNKAVFKGTIEQRKDVKGLIDTRRGYRRYKRSHKRYRQPRFDNRSSSTRKGRVAPSILQKKEAIIRVINKLKKWINITEFHLEDVAIDIRALTEGKKLYKWQYQKSNRLDENIRKAVILRDKCKCMECAKSNCMLEVHHIVPKRLQGANSLSNLITLCSKCHDKTKGIEEKYIEHYQKMIDGNNVRFDYAQHVMQGKTWLRKELSKLGKLILSTGGDTANKRIDWNIEKSHSNDAIVVADLKVNNDECDIKDWIIKPMRRKSKTKVEELKGFRHRDLVKYTKRNGESYIAYITALYPNKKQCNMTTIEGKVLKRYGVKPLKLLWRFNKIYWF

SEQ ID NO: 7493 - protein, 453 aa, Lactobacillus sp.; identical to SEQ ID NO: 2687

SEQ ID NO: 7494 - protein, 414 aa, unidentified
MPCSPAKARHLLKEKKAIVVRRTPFTIQLTIATGETKQPVSLGVDAGYKHVGLSASTEKAELYASEVELRQDITDLLSARRALRQSRRNRKTRYRAPRFDNRIRTKRKGWLAPSVENRINAHLSRIEAVLRLLPVTKITVETASFDMQLLKNPDIAGKEYQEGEQLGFWNVREYVLFRDGHVCQHCHGRSKDPVLNVHHLESRRTGGDSPGNLITLCETCHKALHHGEITLKTKRGQSFRAEAFMGIMRWEVLNRLKVSHPELEVNNTYGYRTKHVRIANGIAKSHCADAFCIAGNLGAKRLGEFFFQKQTRRNNRQIHKLSILKGGIRKRNQAPFEVKGFRLFDKVACKGEEGFIFGRRSSGFFDVRKLDGTRISAGISCKTLHLLEKRQTYLTEIRKEEALPPLPEGRGLRA

SEQ ID NO: 7495 - protein, 420 aa, unidentified; identical to SEQ ID NO: 5136

SEQ ID NO: 7496 - protein, 442 aa, unidentified
MSTSVFVLDKKHRPLMPCRPARARRLLRAGRARVVKRFPFVIRLVDRTVEQSEVQPVLIKLDPGSRETGAAVVRDDEKKRHHALAFFVIEHRGGAIRDALKARSAFRRRRRSQNLRCRSPRFLNRVKPKGWLPPSLRHRVETTLSFVRRMCRYLPVSGIAAELVKFDSQKLQTPEVSGIEYQQGTLFEYEVREYLLEKFGRKCVYCGAEGVPLNIDHVVPRAKGGSNRVSNLVLACVSCNQKKGARSLEDFLKGKPEVLARVRRELKTPLRDAAAVNATRWVLFNELKATGLPVETGSGALTKLNRHAFGVEKEHWLDALCVGRLNGAVTRKGLNVLEIRCMGRGSRQRTRLTKYGFPRGYLMRQKCVHGFATGDMVEANVPKGKKAGLWRGRVAVRVSGSFNIQTPKGVIQGVGWKHCRLISHNDGYGYAWLGHAPHSSPA

SEQ ID NO: 7497 - protein, 425 aa, unidentified
MVYVLNKNGQSLMPTNRHGKVKHLLKDGKAKVVKRCPFTIKLTYETTNYTQDLTLGVDTGSGTIGTAVSKDSGDIIYMSEIVVRNDITDKMSQRAKYRRNRRNRKTRYRQARWLNRRNSIRKDRFSPTMQSKLHSHVKEIEYIKSILPITTMVFETGQFDMHLMKNPMLANPKVKHWGYQKGTNYGFENTKAMVLNRDNYTCQYCKGKHKDSKLEVHHIIFRSQGGSDEDSNLITLCHTCHKNLHDGKIAPNFKGKAKGTLKYATQMNSIRKQLFRLYPEVIETFGYVTKANRLAIGIEKEHYYDACTIATQGKPFIVKTNLYKKKCVSDGDFQKTKGIRSEQPIVTDKIYGFRKFDKVKYFGKEYFIKGRMSTGYAILMDIEGNKVDFLTMPKGFKTPKMINLKRLEARSSWMVTTVEVTPNIV

SEQ ID NO: 7498 - protein, 470 aa, unidentified; identical to SEQ ID NO: 2825

SEQ ID NO: 7499 - protein, 430 aa, unidentified
MPKVYVLNWHGRPLMPCTPAKARHLLDAGKAKVRRRTPFTIQLLYGSTGYTQEVILGVDAGSKTIGLSAATETEELFSAEVKPRNDVVELMSARRQFRRARRNRATRYRKPRFDNRVRSKHKGWLAPSVEVKIQEHMTAIRRACAILPVSKVVVETAEFDLQLLKAVAEGKPVPQGEDYQKGEMYGHYNVRQYVLWRDSYTCRICGAHGSVRKGVPLHVHHLESRKVGGDAPDNLVTLCTACHDKLHKGIIMAADIKKRKRRSTRDATFMGIMRMTLLRRLREQLPVPVVETRGYITKATRENLLVLPKSHTNDALAIAHGPQGFRAEYLPNIRQADRLYTIRPVRHHNRQLHKATILKGGVRKANQAEKYICGFRLYDKVLYNGIECFVWGRRTSGSFLLRQLNGEKVKDGVSYKHLKLLERSQSYLVA

SEQ ID NO: 7500 - protein, 421 aa, Moorena sp.
MQNRVFVIDVNKQPLNPIHPGRARKLLKQGKAAVFRTYPFTIILKKTVRDPVNEPHRIKLDPGAKVTGMALVNQRTDAVVWAAELTHRGDMIRQKLADRRRVRRNRRHRKTRYRPARFDHRKRPDGWLAPSLQHRVETTMTWVERLGKCCSITDLSMELVRFDTQKLQNPEISGVQYQQGVLFGYELREYLLTKWRHECAYCGAQKVPLEIEHIHPKSKGGSDRVSNLAIACHQCNQKKGNKPVEQFLKKKPEVLKRLLAQANAPLKDAAAVNSTRWALFNRLQETGLAIEIGTGGLTKYNRTLQGLPKTHWLDAACVGKSTPMLNIATSQPLLITCTGRGGRQKAAINKYGYPIRHNPLKPIKGWQTGDIAKHRVHGIGRITPRSRGSFVLSKPDKTKKSVKPIDLKPVFRRDGYSYKWA

SEQ ID NO: 7501 - protein, 414 aa, unidentified; identical to SEQ ID NO: 2588

SEQ ID NO: 7502 - protein, 512 aa, unidentified
MPTVYVLNKDGKPLMPTTRCMHVRHLLKNGKARVVKSKPFTIQLLYETDDVVQPLYLGIDPGRTNIGIAVVKADGAAVFTAHLETRNKEVPKLMKKRKESRCARRTNGRRCRRQRRAKTNGTISKKCVKQTTAQNGSVSKRAKEIGVIKRHLPGCEKDVLCIGIKNKEAKFTNRARPEGWLTPTANQLLQTHINLVKKIQKFLPISDVVLEVNKFAFMQLDNPNIQKWQYQQGPLYQKGSLENAVSEMQEHHCLFCEKPIEHYHHVVPKSENGSNTIANIVGLCTEHHNLVHKDATWQKKLAKEKVGLVKKYSALSVLNQIIPALTKEMNSLFPKHFFVTNGKSTYDYRTAHGVSKDHWLDAYCIACSVLPNDVCDSNINSHVPYELKQFRRHDRRVLHKANMSRVYTLNGKTVATNRHKAIKQTTDSLEEFRQSHPGDVCKLKVKEHHPAYRNLNRNYPGSVFLVDGQVHVMQGVSGSHNGKADGYYNTNGNAYPYYKCKFVVKNEGIVFA

SEQ ID NO: 7503 - protein, 431 aa, unidentified
MPNKVYVINKHGRPLMPCSPAKARHLLDEGKAKIKKRTPFTIQLVYGSSGYTQEVILGVDAGSKTIGLSASAETEELLSAEVKPRNDVVDLLSTRREFRRARRNRKTRYRKPRFDNRVRSKHKGWLAPSVEVKIQEHITSIRRVCRILPVSKVVVETAEFDLQLLKAIADGKPVPQGEDYQKGEMYGHYNVRQYVLWRDNYTCQCCGTHPSKKKEVRLHVHHLESRKVGGDAPDNQVTLCESCHEKLHKGLIAEKDFKKRKRRSTRDATFMGIMRKTLMQRLCSELPIPVVKTRGYITKATREKLLVLPKSHTNDALAIAQGKRGFNVGYLPGIAQIDKIYTIRPVRHHNRQLHKATILKGGIRKSNQTEKYVFGYRLFDKVQFNGQDCFIWGRRTTGIFTIKTINGKMIKDGISFKKLKLVEKSTSYLIA

SEQ ID NO: 7504 - protein, 529 aa, unidentified; identical to SEQ ID NO: 6786

SEQ ID NO: 7505 - protein, 465 aa, unidentified; identical to SEQ ID NO: 3070

SEQ ID NO: 7506 - protein, 427 aa, unidentified; identical to SEQ ID NO: 2799

SEQ ID NO: 7507 - protein, 444 aa, unidentified
MQKVFVVDANKQALDMCHAGQARRMLKAGKAAVYKLYPFTIILKGEVTDPEPQPYQIKLDPGSKTTGVAIVNQATGEVVFAAEIEHRGEIIKGSLDSRRGVRRSRRARNTRYRKPRFNNRTRSSGWLVPSLLSRVANVETWVRRLIKLCPISGISLELVKFDTQLMQNAEINGVLYQQGTLAGYETRQYLLEKFQRKCAYCSKKDIALQIEHIVPRSRGGSNSVTNLTLACEKCNQKKGTKTASEFGYPQAQAQARLPLKDAAAVNTTRWALYNRLKSFGLPLEIGSGGLTKFNRSSQALPKAHWIDAACVGSSTPSKLDVSKVNPLQIKATGHGCRQMCLMDKFGFPRTKAKAGKKFFGFTTGDMVKALVTSGKKIGIYRGKVAVRASGSFNITCGKTTIQGINHKYCKLLHSCDGYSYSYLAQSKTAIPPTPKVVGFLAGDL

SEQ ID NO: 7508 - protein, 364 aa, unidentified
MAVFVLDRKKKPLMPCSEKRARLLLERKKAVVHRMAPFTIRLKDRIGGETQPIRIKLDPGSKTTGIALVREEEILSPEIGEAETAAHVLFLGEIGHRGGRIRDRLSARRAFRRRRRSKLRHRKPRFDNRTKPEGWLPPSLQHRVDTTASWVERLRRLVPVSSISMELVRFDMQKIENPETSGVEYQQGALAGYEVREYLLEKWDRTCAYCGKKDVPLEIDHIHPRSKGGSDRISNLTLACRPCNEKKGNRPVEAFLVGKPELLKKILSRAKAPLRDAAAVNATRWALFERLNQTGLPVETGSGGRTKWNRTRLGIPKTHALDAACVGKVDRVEGGTRPVLEIKTMGRGSYQRPASTPSGSRGGS

SEQ ID NO: 7509 - protein, 466 aa, unidentified
MSTCACVFSKSGKRLMPTIRLGKVRHLLKDGKAKIIKHHPFTIQLLYDSETNIQPIEICEDVGYNYIGISVKSQSHEYVSVQYDTLQDEKDCHDSCRKMRRIRRNRLRYRKPRFDNRKRDKGWLAPSLEHKKELNVNVIKMYCKVVPITHVTVEVGSFDTMLVKAIEEGKAAPEGVDYQKGPRYNLATLREAVFYRDNYTCQVCGREAQKDSAILHVHHMFYWKGRHGNSLSELLTVCEKCHTPANHQKGGKLYGFGENIKFANLSGAAFMNTVRWQIVNELCAAFGKPFVTFTYGAMTKEKRIALHLEKSHNNDAYAMGSFHPVGRCAFEHYEKVKRNNRILERFYDSQYIDIRTGKVTNGKSLFNGRINRNHKKDSENLHKYRGKRIRKGYRALRRKKVALNPGDLVFLNGEILVVHGTHTDKKGAVRVEFKVAAKNGKKSANLKKLKIIKTSNLTYSAWKKVF

SEQ ID NO: 7510 - protein, 421 aa, unidentified
MFVYVISKTGQPLMPTRRFGNVRRLLKNKQAKVIRRCPFTIRLLYEPETEIVQEVVLGQDTGSKHVGTACVANNKVLYQSQVQLRTDIKSKMDSRRSSRRSRRNRKTRYRKPRFLNRANLTKKDRLSPSVRHKVQAHIDEIEFCKKILPVSKIILEVSQFDTTLMKNPELIDEKIKHWGYQKGFNYGYASRREAVLHRDNYTCQCCGKKHARLEVHHITYRSKGGTDDEKNLITLCEKCHKAIHDGLIILTVKLKKLNLKYATHMSIIRSQLLKVYPHAIETFGFVTKENRNHLNLSKEHFIDACVIASGGVKFEPSDVLYQKRRVARQDRQLCKGIRGEKKIPTGKIFGFKKFDLVEYLKELCFIKGRRSRGSFVLMDIDNNIIDLRDKGGKKEPSYKYLKRVNTRRSILCIRKEVVYGF

SEQ ID NO: 7511 - protein, 442 aa, unidentified; identical to SEQ ID NO: 2903

SEQ ID NO: 7512 - protein, 512 aa, unidentified
MSTVYVLNKDGKPLMPTTRGGHVRHLLKEQKARVVRTNPFTIQLLYETDNLVQPLYLGIDPGRTNIGVAVVKTDGTAVFTAHLETRNKEIPKLMQGRKKARRARRTNGRRCRRQRRAKANGTISKKCVKQATAQNGSVSKRANEIGVIKRHLPGCEKEVLCIGIKNKEAKFSNRTRPEGWLTPTANQLLQTHINLVKKIQKFLPISDVVLEINKFAFMRLDNPNVQKWQYQQGPLYQKASLEEAVSEMQERHCLFCKNTIDHYHHVVPQHKNGSNTIGNIVGLCAKHHDLVHKDTSWQEKLAKKKTGLNKRYGALSVLNQIIPALTKELSSLFPKHFFATNGKSTYDYRAAHGVSKDHWLDAYCIAGSVLPNEACDNNINNRVPYELKQFRRHDRRALHKENMSRVYTLNGKKVATNRHKAVEQATDSLEEFCQNHPDDVCKLKVKEHHPEYRNPKRNFPGCVFLVGKHTHVMQGTSGSHNGKADGYYDTNGNSYSSGKCKFVVKNEGIVFT

SEQ ID NO: 7513 - protein, 428 aa, unidentified
LKVFVLNMRGQPLMPCSPAKARHLLKAGKAVVKRRTPFTIQLRIATGETKQNVTLGVDAGAKHVGLSATTEKEEVFASEVELRQDITGLLAARLSLRRDRRHRKTRYRAPRFLNRVRSKHKGWLAPSVENRIQAHMSRIDAVCRLLPVTKIVIETASFDIQKIKDPSVEGTDYQQGDQLGFWNVREYVLFRDGHVCQHCHGHAKDKILNVHHLESRQTGGDAPNNLITLCETCHKACHAGKIKLKVKRGQSFRAEAFMGIMRWTLLDRVRKAHPGLPVENTYGYLTKNTRITLGLPKAHCVDAYCIAGNLKAVRRGVYLHQRQVRKHNRQIHKCTVLSKTLKDGTKIGYRKLNQTPHLVKNFRLFDKVRCLGQTGFIFGRRSSGYFDVRRLDGVKISSCISYRKLTLLEKRSTCLTELRKEDGASSTV

SEQ ID NO: 7514 - protein, 406 aa, unidentified; identical to SEQ ID NO: 2752

SEQ ID NO: 7515 - protein, 419 aa, Moorena sp.; identical to SEQ ID NO: 3991

SEQ ID NO: 7516 - protein, 346 aa, unidentified
LRQDITDLLSARRALRQSRRNRKTRYRAPRFDNRIRTKRKGWLAPSVENRINAHLSRIEAVLRLLPVTKITVETASFDLQLLKNPDISGKEYQEGEQLGFWNIREYVLCRDGHVCQHCYGRSKDPVLNVHHLESRRTGGDSPGNLITLCETCHKALHRGEITLKAKRGQSFRAEAFMGIMRWEVHSRLRALHPGIEVSNTYGYRTKHARIANGIAKSHCADAFCIAGNLGAERLCEFFFQKQTRRNNRQIHKLSILKGGIRKRNQAPFEVKGFRLFDKVACQGEEGFIFGRRSSGFFDVRKLDGTRISAGISCKKLHLLEKRRTYLTEIRKEEALPPLREGRGLRA

SEQ ID NO: 7517 - protein, 406 aa, unidentified
QPLMPTDRHRKVRLMLQSGQAKVIKRCPFTIQLTYNTGHQAQEISLGIDAGSKHIGVSATTKTRVLYEADVELRNDIVDLLSSRRELRRGRRNRKTRYRPARFDNRRREDGWLAPSIRQKIGTHLTVVENICKILPISRITVETASFDIQKIKNPDIQGAEYQQGDQLGFWNIREYVLFRDNHTCQCCKGKSKDKILNVHHIESRKTGGNAPNNLITLCEICHTGYHKGAIQLPKTVKRGMRFKDAAFMGIMRWAFYEALKQQYEPVALVHNTYGYITKHTRIEHNLPKEHYVDARCISGNPDAFPNGEYYYQKKVCCHNRQMHKLTILKGGIRKQNQATYLVKGYRLFDKVSYQRKEYFVFGRRKSGFFDIRTLSGKQVNKGSLSCKKLKFIATRMYYLIERRAV

SEQ ID NO: 7518 - protein, 411 aa, unidentified
MVYVQDIDGKPLMPTTRHGKVRRLLKDNKAVVVNTCPFTIKLTYKTSDYKQEIVLGVDAGTKHVGLSATTKSKELYSGEVILRNDIVELLSTRRESRRTRRNRLRYRKPRFENRVKSKRLGWVAPSVRHRIDAHIRVIDNVCSILPVSRVIIEVAQFDTQKIKNPEISGKEYQEGDQLGFWNVREYVLARDGHKCQHCKGKSKDPILNIHHIESRKTGGDSPSNLITLCETCHKEFHKGNIKLKVKRGKSLRDAAVMGIMKWRLYDKLKSLYPNVRMTFGYITKHDRINHGIEKSHVSDAFVISRNFDSERLGYYYKLKLVRRHNRQIHKMKIPKGGKKRMNQSPFKVFGFKLFDKVMFQGEERFIYARRLSGQFKIKDIDGNNERNISYKKLRYVSHGLISIKTNLFLSQ

SEQ ID NO: 7519 - protein, 456 aa, unidentified; identical to SEQ ID NO: 7423

SEQ ID NO: 7520 - protein, 442 aa, unidentified; identical to SEQ ID NO: 3234

SEQ ID NO: 7521 - protein, 424 aa, Caldicoprobacter sp.
MVYVISKTGKPLMPTERYGKVRRLLKHRLAKVVKREPFTIQLLYDTTTYTQPVTVGLDIGSKIAGVSAVTEKKEIFSAEIELRDDIKGLLLERRQYRRMRRYRKVRYRKPRFLNRARDDGWLAPSLQWKVDAHIRIVEMLSMIMPIGKVVIEVAPFDTQKILNPGIEGEDYQNGVQKGFWDVREYCLWRSGYKSELSGKRGTLEVHHIVPRSEGGTDTPSNLIVLTAEEHKAVHEGRIKIPKSKIERIKLLKDAAHVATIGWYIVNRLRERYSVEVTYGSITKAKRLGCGMTKLHRNDAFVIADGTLQERVKEWYLGKFLRRQNRSLHRANFIKGGVRPVNTIKEAYGFRRYDRVEYEGIIGIIAGLRSSGYFAVRNLSGEKIHDSAKHSRLRLVERAKTLMLERMEERIPLHLEEDGVSCVRL

SEQ ID NO: 7522 - protein, 471 aa, Acidiferrobacter sp.; identical to SEQ ID NO: 6601

SEQ ID NO: 7523 - protein, 462 aa, Burkholderia sp.
MSAFVLDRSGRPLMPCSEKRARLLLARGRARVHRVMPFVIRLVDRMADSCALQPLRIKLDPGSKVTGVALVREADRGIAVINLFELIPRGRQISEALIARRNFRRRRRCANLRYRAPRFLNREKPEGWLPPSLQHRVDTTMAWVQRIRRWAPVTALSSELVRFDLQQLENPEISGLEYQQGTLAGYEVREYLLEKWKRTCIYCDAKGRPLQIEHLTSRARCGSNRVGNLGLACSDCNQEKGALDVRAYVKDPKRLARILATASQPLRDAAAVNATRWALIDALRATGLPLELASGGRTKFNRISHGLPKTHALDAVCVGQVEAIAGWERPSLSVEASGRGSYQRTRLTRHGFPRGYLMRHKRVQGFQTGDRVRADVPNGKKAGIHVGRVAVRATGSFNIQTASAVVQGISHRHCRLIQRGDGYAYSLQSVDSYRQGDAGVWRAAHAALSLPGLEPGVSRAFG

SEQ ID NO: 7524 - protein, 442 aa, unidentified; identical to SEQ ID NO: 2939

SEQ ID NO: 7525 - protein, 465 aa, unidentified
MSTYACVLSKNGERLMPTIRLGKVRHLLKDGKAKIIKHHPFTIQLLYDSKTNIQPIEICEDVGYNYIGISVKSESHEYVSAQYDTLQDEKDCRDDCRRMRRSRRNRLRHRQVRFNNRKRDKNWLAPSLKHKKELNVNVIKMYCEVMPITHATVEVGSFDTMLVKAIEEGKVRPESTDYQKGPRYNLATLREAVFYRDNYTCQVCGRKANEGAILHVHHMFYWKGRHGNSLSELLTVCEKCHTPANHQKGGKLYRFGEDKKFANLSGAAFMNTVRWQIVNELYAAFGKPFVTFTYGAMTKEKRIALHLDKSHSNDAYAMGNFHPVDRCAFEHYEKVKRNNRILEKFHDSRYIDIRTGKEAKGKELFNGRISRSHKKDSENLHKYRGKRIRKGYRALRRKKVTLNSGDLVSLNGETLIVHGTHTNKKGNVRVEFKVAALNGKKSASLKKIKIVKTSIPMHSAWAKVS

SEQ ID NO: 7526 - protein, 451 aa, unidentified
MSVAVISKTGERLMPTSEYRARKLLKSGKAIKYSYHPFTIQLTERKTGNIQPIELCMDTGYIHIGISVKSEKHEYLTEQIDTLTDERSRHNARRMYRSQRRNRKRYRQPRFNNRKKDKGWIAPSLEHKKNIHVQAISRINNVMPLTDITMEMGNFDTQVLKAKEEGRPLPQGVDYQHGERYSIATLREAVFARDGYKCQCCGRTIKDGAILHVHHIKYRSQGGTNSISNLATVCDKCHTPKNHKPGGKLYGWKPKLPSFKGATFMTTIRWQLYNEAKALFPDIDIHITYGAATKERRRELNIDKSHINDAFVMGQFHPRHRIKAVLYKKKRRNNRCLEKFYDAKYIDSRDGKKRSGQELFNGRINRNHKKDSENLHQYRLQKVTAGKRTVRKQHYSVQPHDIIIYESRKRETTGCHCNGARVMLLPDKKSVSIKKIKIYRYAGGYFKSTFN

SEQ ID NO: 7527 - protein, 424 aa, unidentified
MRVFVFNMRGRPLMPCSQRKARLLLRENKAMIYKYHPFTIQLTYTTGETKQDCHIGIDTGSKYIGAAVRSEDKVFWKGEIELRQDIRSNLDTKRIYRRSRRNRKTRYRKPRFLNRKRRDEWLPLSLQSRINHTFHWIDTLSSLVPNPILHIEVGKFDVAKMINPEIHGVDYQHGQTYGFFDERYFVFARDNYTCQCCGKSKNKILNTHHIIYRSNGGTNRVDNLITVCTDCHTSQNHRKGGIFYQWQEQHKKVKQYKEPPFMNTLRKRIFVAYPDAEITYGSETTPKRKAMKLDKTHYNDAIVISGINEIKENPEEWLLIKQFRKKKRSLHEATARKGRKKPNRNQTRNSKNTPYYKGFYLNDKVSVFGKSGYITGFTSNAAYIKDENNDYITLPNKTYKQVSINKMKLECHNNNWQYIIKNAV

SEQ ID NO: 7528 - protein, 428 aa, unidentified
LKVFVLNMRGQPLMPCSPAKARHLLKAGKAVVKRRTPFTIQLRIATGETKQNVTLGVDAGAKHVGLSAATEKEEVFASEVELRQDITGLLAARLSLRRDRRHRKTRYRAPRFLNRVRSKHKGWLAPSVENRIQAHMSRIDAVCRLLPVTKIVIETASFDIQKIKDPSVEGTDYQQGDQLGFWNVREYVLFRDGHVCQHCHGRSKDKILNVHHLESRQTGGDAPNNLITLCETCHKAYHAGKIKLKVKRRQSFRAEAFMGIMRWTLLDRVRKAHPGLPVENTYGYLTKHTRITHGLPKTHCVDAYCIAGNLKAVRRGVYLHQRQMRKHNRQIHKFTVLSKRLEDGTKIGYRKLNQSPYLVHGFRLFDKVRCLGQIGFIFGRRSSGYFDVRRLDGVKLSPSISWRKLTLLEKRSTYLTELRKQDGASSPV

SEQ ID NO: 7529 - protein, 442 aa, unidentified
MSTTVFVLDKKHRPLMPCRPARARRLLRAGRARVVKRFPFVIRLVDRTVEQSEVQPVLIKLDPGSRETGAAVVRDDGKKRHHALAFFVIEHRGGAIRDALKARSAFRRRRRSQNLRCRSPRFLNRVKPKGWLPPSLRHRVETTLSFVRRMCRYLPVSGIATELVKFDSQKLQNPEVSGVEYQQGTLFKYEVREYLLEKFGRKCVYCGAEGVLLNIDHVVPRAKGGSNRVSNLVLACMSCNQKKGARSLEDFLKGKPKVLARVRRELKTLLRDAAAVNATRWVLFNELKATGLPVETGSGALTKLNRHAFGVEKEHWLDALCVGRLNGVVTRKGLNVLEIRCMGRGSRQRTRLTKYGFPRGYLMRQKCVHGFATGDMVEANVPKGKKAGLWRGRVAVRVSGSFNIQTPKGVIQGVGWKHCRLISHNDGYGYAWLGHAPHSSPA

SEQ ID NO: 7530 - protein, 423 aa, unidentified
  source 1..423: note = Cyanobacteria bacterium UBA11166
VFRLYPFAIILNKEVVEIPEPLTLKIDPGSKTTGLAILSGCNLLWVAELTHRGQTIKASLESRHSLRRGRRNRHTRYRQARFLNRTRFNGWLAPSLQHRVETTLTWVKKLTRSGPINVVAQELVRFDLQQMDNPEISGIEYQQGGLAGYEVREYLLNKWERKCAYCGIENIPLQIEHIHPKAKGGTNRVSNLCLACEPCNIKKGTKNIEEFLKKKPDVLKKVLAQAKQPLKDAAAVNSTRWSLFNRLKKTGLEVATGSGGLTKFNRTRLQLSKTHFFDAACVGDTPELLVLANQPLLIKATGHGSRQMCRTDKFGFPSRYVTQFKFVKGFQTGDIVKAIVTSGKKIGTYTGRVAVRSTGSFNISTTNGLVQGISYKHCQQIHQKDGYGYGFSRLEANKFAAALSSPVSHTRSFQRRRYSDEST

SEQ ID NO: 7531 - protein, 456 aa, unidentified
MSTCVCVLSNNGERLMPTFRLGKVRHLLKDGKAKIVKHHPFTIQLLYDGKTNTQPIEICEDVGYNYIGISVKSESHEYVSAQYDTLQDEKEHHDSCRKYRRARRNRLRYRKPRFDNRRRGEGWLAPSLKHKKQLNISLIERYVFVIPITHATVEVGSFDTMLLQAIQKGEAKPEGADYQKGPRYNLAMLREAVFYRDNYTCQVCGRKITDGAILQMHHMFYWKGRHGYQLDELATVCEKCHTPANHQEGGKLFGFGKEKKFAYLSGAAFMNAVRWQIVNELYAAFGKPFVTITYGAMTKEKRIALQLEKSHNNDAYAMGDYHPAHRCKFRHYQKRRRNNRVLEKFYDATYIDVRTGNKAKGKELFNGRISRNHKKDSENLHKYRSKKVSKGRRSIRRQRYAIQPYDTVRFKGKTYFTSGCHNKGTRLLIPVNGKSKSVAISKVQVVRHAEAWIQII

SEQ ID NO: 7532 - protein, 460 aa, unidentified
  source 1..460: note = uncultured archaeon
MKMQTLEKRNTCTPPNASQVRCNCDPALNREETLSVPGLKTSSNNSEVNQLPIHKEKERQNPRVSVYVCVLNMRGQPLMPTTPRKARILLKQGKAKVVQRKPFTIQLKYANGETKQPIRLGIDPNYTKIGYSAVTDNKELISGEVSLRDDIPDKLIERKQYRRGRRNKLRYRQPRFDNRKRTETLSPSIKQKLQTFVNFVTKIKRILPITSTWVEVSSFDTQKLVNSEISGVEYQQGELQGYEVREYLLEKYARTCVYCGKTNIPLEVEHIVPRSKGGSDKVSNLTISCHKCNQKKGNKTAKEFGHPEVQKQAKESLKATAFMNTVRWKFVNLLNCEYTYGYITKCKRIKLNIEKSHANDAFVIAGGTDQERTRQYQGKQTRRNNRALQTNRNGFKPSIRRKKYGLGPSDIVYFRSLICTVKGVFSYGKRIRVVDSIGTIINTNIKNVELIKYGKGLQFE

SEQ ID NO: 7533 - protein, 361 aa, unidentified
MDRRKARFCNRKHPKDWVTPTVEQLIRTHINLMHKMQKFLPITDVAIEVNRFAFMLLENPTIAGVDFQQGLLKGYHGIQDAVFDQQDGECLLCGKPIEQYHHIVPKSKNGSNTLGNIVGLCRNCHDAVHKDEDVQKALKDKKSGLMKKYTALSALNQAIPFIYKRLVEEFGEEHIFTCTGRETAMVRKSLGYTKTKTDQLHEVDAYCIALLAHGDIDAENPTFEHVYQMKQFRRQNRANINNQRERSYYYKGKLVAKNRKDRIEQKDDSLEVWYQKMVKQYGEKEAERRRSVLQVKKSTRHYNTPGRVMPGTVFYYNGARHVLNGQITNGQYFKATGDARSNYPAKKCRIVKQNEGLVFLG

SEQ ID NO: 7534 - protein, 434 aa, Mitsuokella sp.
MGFLTTWARRKILPKGKVAEMPKIKKYAFVLDAKRKQLDPTIEQNAWRLVRQYKARLVSKFPMIIQLNKVMDNPNNDEIRCGIDDGANHVGMALVQKCQTRNKVLFKGTIEQRKDVKHLLTVRRGYRRYHRYHKQYRPARFLNRASSRRSGRLMPSIIQRKQAILRVIDRLRQWVRIDGYWLEDVKIDIRALTDGYKPYRWQYQKSNRLDNNLRLAAIHRDGCKCVECGKTKTRFEVHHITPRKTGGADTISNLITLCPKCHAKTFGRESQFADRYYALIGSTGHVEGIDDAQRVMQGKHWFREQLQQRGSLVLTTGGNTANKREDWDIAKTHSNDAVCITDLKPENIDIEEWTIKPMRRKNKAGVDEVCGFHHRDYVTYTYRNGETHTGYVTAMYPDKNQLNFQSPTKHCKRVNALKARLLWRYDKIYWFKCA

SEQ ID NO: 7535 - protein, 414 aa, unidentified
MPCSPAKARLLLKEKKAIVKRRTPFTIQLTIATGEAKQPVSLGIDAGYKHVGLSASTEKAELYASEVELRQDITDLLSARRALRQSRRNRKTRYRAPRFDNCISTKRKGWLAPSVENRINAHLSRIEAVLRLLPVTKITVETASFDLQLLKNPDISGKEYQEGEQLGFWNIREYVLCRDGHVCQHCYGRSKDPVLNVHHLESRRTGGDSPGNLITLCETCHKALHRGEITLKARRGQSFRAEAFVGIMRWEVHNRLRALHPGIEVSNTYGYRTKHARIANGIAKSHCADAFCIAGNLGAERLCEFFFQKQTRRNNRQIHKLSILKGALRKRNQAPFEVKGFRLFDKVACQGEEGFIFGRRSSGFFDVRKLDGTRISAGISYKKLHLLEKRQTYLIEIRKEEAFPPLPEGRGLRA

SEQ ID NO: 7536 - protein, 472 aa, unidentified
VVDNRLLSIKPLINIGEGVIYSSICTGLSLQTYQKRKEVPCMVYVLDINGQPLMPTTRHGKVRRLLNSHLAKVVKRCPFTIQLLYQSTKEIQPVSLGVDAGSKHIGMAATTEKKVVYQEELSPRNDVVKLLSARRTLRRTRRNRKTRYRKPRFNNRVHSKHKGWLAPSVEVKIQEHITAIKRICQILPISEIHVEISEFDLQRLKAMEEGRTLPVGTDYQLGEQYDFYNTRQYVLHRDGYTFQCCGTHDNNIKLHVHHIESRQTGGDAPSNLITLCEHCHKALHKGKFELPKGKKRGKTYRDATFMGIMRKTLLERLKKEIDVPVAGTYGYITKYWRERAGLEKSHINDAICISKYPYAKPLDTYYLTKAVRNHNRQIHKSNFSKGGIRKRNQAPYLVKGFRLFDKVLYQGKEYFIFGRRATGYFDIRTLDGTKVNKGSISYKKLRIQDTAKAYLKEARAIPHMNKFTCVLA

SEQ ID NO: 7537 - protein, 439 aa, unidentified
MVFVLNRSKKPLDMISHAKARILLKNRLAVVHKIYPFTIRLKDNSCVSKDKPYTVKIDPGSRTTGVAIVDDKDSVVMLAEIEHRGHIVKKKLSSRKAVRRNRRNRKTRYRESRFLNRTRPEGWLAPSVKSRADNVINFIKKYKKLINIDKVMIENVSFDTAQMTSNTKLWGSNYQKGNLYQQKLRSFIFSRSDGKCVYCGAKATEIDHVVPRSSGGTNSVCNLVASCKSCNKKKSNKTLKEFGKIMNKDFSHLEPKKLPKDAAIVQSARNYMVREITKLVSDTTLYDSWLTKYNRDQLGLPKEHYYDALSVGNIQDYKFLTDKVLQISAKGRGSRQMCRMDSHGFPRTSAKASKSVKGFQTGDMVKAIVPKGLKRGEYLGKVAVRSNGYFNIQTKTQVVQGIGYEYCHIIQRSDGYLYDYKECDFLSDIHNRVSIAKFL

SEQ ID NO: 7538 - protein, 427 aa, Nostoc sp.
MCKVFVLDTERRPLNPIHPAQARQLLSNGKAAIFRRFPFTIILKEARADLPVTALRLKLDPGAKTTGIALVNDSTGEVVFAAELKHRGFAIRDALISRRQLRSSRRNRKTRYRKPRFLNRTRPEGWLAPSLMSRVHNVETWVNRLRKFAPITAISTELVKFDMQLMRNPEIEGKEYQQGTLAGYEAREYLLEKWNRQCAYCGIKDIPLQIEHIHPRSKGGSNSITNLTLSCEKCNVKKGTKDIKDFLKKDPTKLQKILAQAKKPLADAAAVNATRYKLLEVLKSTGLPVECGSGGLTKFNRTRQQLIKTHWLDAACVGQSTPILIIKGIKPLLITANGHGTRQMCRTDKFGFPNRYVPKLKFIKGFQTGDIVKAVVTNGKKIGEYIGRVAVRSTGSFNISAQKGLIQGINYKFCKSIHKKDGYSYSS

SEQ ID NO: 7539 - protein, 431 aa, unidentified
MPNKVYVINKHGRPLMPCSPAKARHLLDDGKAKVKKRTPFTIQLVYGSSGYTQEVILGVDAGSKTIGMSVSTTKEELLSAEVKPRNDVVDLLSARREFRRARRNRKTRYRKPRFDNRVRSKHKGWLAPSVEVKIQEHITSIKRVCRILPVSKVVVETAEFDLQLLKAIADGKPVPQGEDYQKGEMYGHYNVRQYVLWRDNYTCQCCGTHPSKKKEVRLHVHHLESRKVGGDAPDNQVTLCESCHEKLHKGLIAEKDFKKRKRRSTRDATFMGIMRKTLMQRLCSELPIPVVKTRGYITKATREKLLVLPKSHINDALAIAQGKHGFNVGYLPGILQIDKIYTIRPVRHHNRQLHKATILKGGIRKSNQTEKYVFGYRLFDKVQFNGQDCFIWGRRTSGYFVVKTIDGKVIHNSASFKKLNLVERASNYLIA

SEQ ID NO: 7540 - protein, 413 aa, unidentified
MTSYAFVLDANGKQLAPTKEQKAWFLIRKKRAALVSKYPMVIQLKKEIQENEICKDEIRCGIDDGGLHVGIALVQKCKTKNKVVFKGTIEQRNDVKHLMEVRRGYRRYHRYHKRYRQARFNNRKSSKREGRIAPSILQKRQATIRVINQLNKWINITNYWLEDVSIDIRVLTDGYKSYRWQYQKSNRLDENIRKATILRDGGKCMECGKSNCRLEVHHIKPKRQNGSNTLDNLITLCESCHQKTEGQEELYMDRYFSLLKSSDNKNLNYAQHVMIGKMWLRKQLSGLGVLYLTSGGDTANKRIDWNIEKSHANDAVCITDLQPDTYDMKEWTMKPMRRQSKAKTDHVLGIKHRDLVEYTFKNGETHRGYVTALYPEQKAINFQSPTKHCKKVNARKCKLLWKYSKIYWFENAS

SEQ ID NO: 7541 - protein, 413 aa, unidentified
MTNYVFVLDANGKHLSPTKEQKAWFFIRKKRATLVSKYPMVIQLNKEIPDDKICKDEIRCGIDDGGLHTGIALVQKCQTKNKVLFKGVIEQRNDVKHLMDVRRGYRRYHRYHKRYRPARFNNRSSSKKEGKIAPSILQKRQATIRAVAQLNKWINITDYWLEDVAIDIRALTDGFKPYKWQYQKSNRLDENIRKAVILRDGCQCVECGRTNCKLEVHHIKPRRLNGSNALSNLITLCERCHQNTEGREELFMDKYFALLNSSDNKYLNYAQHVMIGKKWLREQLSSLGILHLTNGGDTANKRIDWNIEKFHSNDAICITNLQPDTCDVKEWTIKPMRRQSKAKADNVLGIKHRDLVEYTFKSGETHRGYVTALYPKQNAINFQSPTKHCKKVSAKKCRLLWKFNKIYWLDDVS

SEQ ID NO: 7542 - protein, 547 aa, Streptomyces sp.
MTTFFTGEQTHQAVLPQQPALEFVGADTPGGRDETAHGSPGKDRDTGREHGRGETGERSTVTRRRHAKSAATAAKAAENGSGDAPTPDRDYAAGAGAARVFVLSSDGKPLMPCHPARARELLARGRAVVARRVPFVIRMKDRTRAESGVHGLQLRIDPGSEGTGLVLTDEKTEVGERGAVVTVRRGLFAIELRHRGDQIRTCMQQRAGYRRRRRSANNRYRAPRSRNRTHPAGWLSPSVRHRVDTTFSLAARLSRYAPVTEIHVERVAFSMRQEEHQTRGTVRTRLRAKWNSTCAYCGATGVRLNVEHVRPLSRGGSSRISNLVLACVPCNRAKGSESVEDFLAHRPEQLATVLGQIESPLDDAAAMNALSPRLSEALNALGKPVHCWSGRLTKTNRDFCGMRKTHTLDALSVGRLDRESGDRIVRFAGRVLVAKATGRGSYARTTPDRYGFPRLRRSRTKQHFGFVTGDLVRATLPTGTWAGTWTGRVSVRARGQHSVTVPVGRINVSHKHLSLLQRGDGYQYSACAESGALPLSKKEVDRSPVRS

SEQ ID NO: 7543 - protein, 431 aa, unidentified
MDAWDIIVILNKRGKPLMPCSPAKARLLLKEKKAIVVRRTPFTIQLTIATGEAKQPVSLGVDAGYKHVGLSASTEKAELYASEVELRQDVSDLLSARRALRQSRRSRNTRYRAPRFDNRIRTKRKGWLAPTVENRINVHLSRIETVLRLLPVTKITVETASFDTQLLKNPDIAGKEYQEGEQLGFWNVREYVLFRDGHVCQHCHGRSKDPVLNVHHLESRRTGGDSPGNLITLCETCHKALHRGEIKLKAKRGRSFRAETFMGIMRWGVLNRLKASHPKLEVHNTYGYRTKHARIANGIAKSHCADAFCIAGNFGAKRLGEFFFQKQTRRNNRQIHKLSILKGGIRKRNQAPFEVKGFRLFDKVAYQGEEGFIFGRRSTGYFDVRKLDGTCISAGISYKKLHLLEKRRTYLTEIRKEEALPPPPEGRGLRA

SEQ ID NO: 7544 - protein, 464 aa, unidentified; identical to SEQ ID NO: 6330

SEQ ID NO: 7545 - protein, 498 aa, unidentified
MPTTRCGHVRYLLKEKVARVAASKPFTIQLLYETNDVVQPLYLCIDPGRTNIGVAVVKTDGTAVFTAHLETRNKEIPKLMQGRKKARRARRTNGRRCRRQRRAKANGTISKKCVKQTTAQNGSVSKRAKEIGVIKRHLPGCEKDVLCIGIKNKEAKFNNRTRPTGWLTPTANQLLQTHINLVKKIQKFLPISDVVLEVNKFAFMQLDNPNIQKWQYQKGPLYQKESLKSAVSEMQEHHCLFCKKKIDHYHHVVPQHKNGSNTIDNIVGLCTQHHDLVHKDATWQKRLAKKKTGLNKKYGALSVLNQIVPVLTKELGSLFLKHFYVTTGKSTYDYRAAHGVSKDHWLDAYCIACSVLPNDVCDSNINSHVPYELKQFRRHDRRALHKENINRVYTLNGKKVATNRHKAIEQTTDSLEEFRQNHPNDVCKLKVKEHHPEYRNPKRNFPGCVFLVGKHTHVMQGTSGSHNGKADGYYDTNGNSYPFGKCKFVAKNEGIVFA

SEQ ID NO: 7546 - protein, 470 aa, unidentified
MSVFVVGLNGCRLMPVSERKARLLLKGGKASVYRKVPFTIKLNYKTGSTVQPGYLGIDTGSQHIGVSVVRKDGTVLHKEEIGLRDSMSKRKLLESRASSRRGRRYRKTRYRHPKWKPKTKRIYNEKADRKGRHWKKQKNTFTSKRQAGWLPPSLQSKTGHHIQWIRKLLDLLPEGYRLSIELGRFDPARMKDPEIHGELYQKGPQYDYENVRAYVLARDGYTCRVCKKKGGKLHVHHILYRSRGASDNPKYMAAVCSKCHTTENHLPGGILYQWMQDQKKFTRGLRDATFMNILKKRLRKAFPDAVFTYGNITKADREKLELPKSHGNDATAIALVKTEVKSVKDEEPVIHIQQVRRKKRSLHEETPRKGRKEPNRTASRSDKNTKSVTVTKGSGEKKASMTACLFDRVELDGKKGWITGFTGTSCYVKDKEDNYICTSPKYKQVSISRLRILHHCGNWAIGAEKPLGKG

SEQ ID NO: 7547 - protein, 407 aa, unidentified
TNGRRCRRQRRAKANGTISKKCVKQDTAQSKNPSKRAKKIGVIKRHLPGCKKDVLCVGIKNKEAKYTNRARLEGWLTPTANQLLQTHINLVKKIQKFLPISDVVLEVNKFAFMRLDNPNIQKWQYQRGPLYQKGSLENAVSEMQEHHCLFCEKPIEHYHHVVPKSENGSNTIANIVGLCAEHHNLVHKDVAWQEKLVEEKTGLNKKYGALSVLNQIIPALTKELSFLFPKHSFMTNGKSTHDYRAAHGISKDHWLDAYCIACSVLPIDVCDSTINNCVPYELKQFRRHDRRALNNENMNRVYTLNDKVVATNRHKATEQEAASLEEFRKEHPNDVCKLKVKEHHPTYRNMNRNYPGSVFLVGKQIHVMQGIASSKDGKATKYNDTRATTIAAGKCKFVAKNSGILFV

SEQ ID NO: 7548 - protein, 458 aa, unidentified
LTKDENRPSGRTTGLRAEQAEPAGIRKGDTLKVFVLNMRGQPLMPCSPAKARHLLKAGKAVVKRRTPFTIQLRIATGETKQNVTLGVDAGAKHVGLSATTEKEEVFASEVELRQDITGLLAARLSLRRDRRHRKTRYRAPRFLNRVRSKHKGWLAPSVENRIQAHMSRIDAVCRLLPVTKIVIETASFDVQKIKNPTIEGTDYQQGDQLGFWNVREYVLFRDGHICQHCRGRSKDPILNVHHLESRKTGGDAPNNLITLCETCHKAYHAGKIKLKVKRGQSFRAEAFMGIMRWTLLDRVRKAHPGLPVENTYGYLTKHTRITHGLPKTHCVDAYCIAGNLKAVRRGVYLHQRQMRKHNRQIHKFTVLSKRLEDGTKIGYRKLNQSPYLVHDFRLFDKVRCLGQTGFIFGRRSSGYFDVRRLDGVKLSSGISYRKLTLLEKRSTYLTELRKEDGASSPV

SEQ ID NO: 7549 - protein, 425 aa, unidentified
MVYVLNKNGQSLMPTNRHGKVKHLLKDGKAKVVKRCPFTIKLTYETTNYTQDLTLGVDTGSGTIGTAVSKDSGNIIYMSEIVVRNDITNKMSQRAKYRRNRRNRKTRYRQARWLNRRNSIRKDRFSPTMQSKLHSHVKEIEYIKSILPITTMVFETGQFDMHLMKNPMLANPKVKHWGYQKGTNYGFENTKAMVLNRDNYTCQYCKGKHKDSKLEVHHIIFRSQGGSDEDSNLITLCHTCHKNLHDGKIAPNFKGKAKGTLKYATQMNSIRKQLFRLYPEVIETFGYVTKANRLAIGIEKEHYYDACTIATQGKPFIVKTNLYKKKCISDGDFQKTKGIRSEQPIVTDKIYGFRKFDKVKYFGKEYFIKGRMSTGYAILMDIEGNKADFSTMPKGFKTPKMINLKRLEARSSWMVTIVEVTPNIA

SEQ ID NO: 7550 - protein, 420 aa, unidentified
MQYVYVLNKHGEPLMPCSPRKARLLLKQKKACVIKRTPFTVKLLYGSAGYKQPVTLGVDAGSKHIGISATTEKHELYREEATPRNDVVDLLSARRAFRRSRRNRKTRYRAPRFNNRVHSKHKGWLAPSVEVKIQEHITLIKHVFRILPVTLVRVETAEFDTQRLKAMLEGKPLPVGTDYQLGEMYDEYNVRQYVLKRDNYTCQCCGAHSTKTKGVKLHVHHIETRRTGGNAPNNLITLCKACHKALHAEKVTLDGKKRGKPLKDAAFMGIMRKTLMERLRKKLKIPVQGTYGYITKYLREKNGIPKSHTNDARCISKNPLAIPCDTCYYTKAVRHHNRQLHKATILKGGIRKANQAPYIVKGYRLWDKVAYNGTECFITGRRTSGYFALKELDGTAVSNSISYKKLRLLEAATNYIIERK

SEQ ID NO: 7551 - protein, 442 aa, unidentified
MVTVQQSTHHLPFGRVFIRRNLFMVYVISQDGKPLMPCSDPIARLLLKQGKAKVKKREPFTIKLTYETTNYTQGLTLGVDTGSGTIGTAVSKDNGDIVYMSEVVVRNDITDKMTQRAKYRRNRRNRKTRYRKARWLNRASSIKKDRFSPTMQSKLHSHVREIEYIQSILPVTEMVFETGQFDMHLMKNPSLANPKVRPWGYQKGANYGFENTKAMVLNRDNYTCQCCKGKHKDSKLEVHHIVFRSQGGSDEESNLLTLCHTCHKDLHSGKINPKLSGKVKGNLKYATQMNSIRKQLFRFYPNAIETFGYVTKVNRLHLGVAKEHYYDACTIATQGNAFNVKSNLYKKKCVSDGDFQKTKGIHSEQPIVTDKICGFRKFDKVRYFGNDYFIKGRMSTGYAILMDIDGNKIDFSTMPRGYKTPKLSNCKRITARSTIMTQVKVV

SEQ ID NO: 7552 - protein, 439 aa, Tolypothrix sp.; identical to SEQ ID NO: 2044

SEQ ID NO: 7553 - protein, 425 aa, unidentified
MVYVLNKNGQSLMPTNRHGKVKHLLKDGKAKVVKRCPFTIKLTYETTNYTQDLTLGVDTGSGTIGTAVSKDSGDIIYMSEIVVRNDITDKMSQRAKYRRNRRNRKTRYRQARWLNRRNSIRKDRFSPTMQSKLHSHVKEIEYIKSILPITTMVFETGQFDMHLMKNPMLANPKVKHWGYQKGTNYGFENTKAMVLNRDNYTCQYCKGKHKDSKLEVHHIIFRSQGGSDEDSNLITLCHTCHKNLHDGKIAPNFKGKAKGTLKYATQMNSIRKQLFRLYPEVIETFGYVTKANRLTIGIEKEHYYDACTIATQGKPFIVKTNLYKKKCISDGDFQKTKGIRSEQPIVTDKIYGFRKFDKVKYFGKEYFIKGRMSTGYAILMDIEGNKVDFLTMPKGFKTPKMINLKRLEARSSWMVTTVEVTPNIV

SEQ ID NO: 7554 - protein, 427 aa, Scytonema sp.
MSKVFVLDTDKRPLNPIHSAQARQLLRNKKAAIYRRFPFTILLKESRPDSPVSPLRLKLDPGAKTTGIALVNDTTREVVFAAELKHRGFAIRDALTSRRQLRRGRRARKTRYRQPRFLNRTRPKGWLAPSLQSRVENIKTWVERLRKLAPIATISQELVRFDMQLMRNPEIQGKEYQQGTLAGYETREYLLEKWGRQCAYCGAGDVPLQIEHIHPRAKGGSNSIRNLTLSCEKCNTKKGTKDIKEFLKKDPSKLQKILAQAKRPLADAAAVNTTRWTLFRTLKETGLPIETGSGGLTKFNRNQQALPKTHWLDAACVGKSTPFLKIKGIKPLLITANGHGTRQMAGTDKFGFPTRHRSNKQIHYGFSTGDIVKAMVINGKKVGEYLGRVLCRATGSFDIATNAGRISGISHKYCSAIHKKDGYSYAF

SEQ ID NO: 7555 - protein, 421 aa, unidentified; identical to SEQ ID NO: 2610

SEQ ID NO: 7556 - protein, 451 aa, unidentified
MSVAVISKTGERLMPTSEYRARKLLKLGKAVKYSYHPFTIQLTEREDGDVQPIELCMDTGYIHIGISVKSEKHEYLAEQIDTLTDERARHDACRMYRRQRRGRKRYRQPRFNNRKRDKGWIAPSLEHKKDIHVQAISRINKVMPLTNITMEMGNFDTQVLKAKEEGKPLPHGADYQHGERYGIATLREAVFSRDGYKCQCCGKTISDGAILHVHHIKYRSRGGTNSMTNLATVCDKCHTPKNHKPGGKLYNWKPKLPNFKGATFMTTIRWQLYNEVKSLFLDINIHVTYGAATKEQRRKLNIGKSHVNDAFVMGKFYPKHRANAVLYKKKRRNNRCLEKFYDAKYIDSRDGSKKTGQELFNGRINRNHKKDSENLHQYRLQKTTAGKRTVRKKHYSIQPHDIVIYENRKRETSGCHCNGTRVILLPDKKTATIKKVKIYKYAGGYFKSAFN

SEQ ID NO: 7557 - protein, 451 aa, unidentified; identical to SEQ ID NO: 3199

SEQ ID NO: 7558 - protein, 470 aa, Thermoanaerobacterium sp.; identical to SEQ ID NO: 6736

SEQ ID NO: 7559 - protein, 292 aa, Moorena sp.
RLLDKGKAAVFRMYPFTIILKTAIRQSRRCANNNPTISPCQIKIDPGSKITGFALVQDGQVIWGMELYHRGGLIKKRLESRRAVRRGRRNRHTRYRKPRFLYRKRPEGWLPPSLEHRILTTQTWVKRLIKFCPVNEVWIERVKFDTQKMRNPEISGVEYQQGELAGYEVREYLLEKWGRECTYCGKQNAPLQIEHIHPKSKGGSNRVSNLCLACEKCNQRKGDKPVEDFLKKKPNLLQKIKTKAKQPLKDAAAVNATRNKLVKVLRSVKPLVTGTGAQTKYNRTKLGLPKQH

SEQ ID NO: 7560 - protein, 514 aa, unidentified
MSTVYVLNKNGKPLMPTTRCGRVRHLLKEQKARVVTSNPFTIQLLYETDDVVQPLYLGIDPGRTNIGVAVVKTEGTAVFTAHLETRNKEIPKLMQGRKKARRARRTNGRRCRRQRRAKANDTISKKCVKQDTAQSGSASKRAKKIGVIKRHLPGCEKGVLCIGIKNKEAKFSNRTRPEGWLTPTANQLLQTHINLVKKIRKFLPISDVVLEINKFAFMQLDNPNIQKWQYQQGPLYQKASLEEAVSEMQEHHCLFCKKPIAHYHHVVPQSENGSDTIGNIIGLCTKHHDLVHKDTAWQKKLAKKKTGLNKKYGALSVLNQIIPALTKGLGSRFQGYFYVTTGKSTYDYREVHGVSKDHWLDAYCIACSVLPNDVCDSDINNRVPYELKQFRRHDRRALHKANINRVYTLNGKSVATNRHKAIKQTTDSLEEFRQCQPDDVCKLKVKEHHPEYRNPERNFPGCVFLVGKHTHVMQGTRGSHNGQADGYYDTNGNSYSSGKCKFVAKNEGIVFTLN

SEQ ID NO: 7561 - protein, 431 aa, Klebsiella sp.; identical to SEQ ID NO: 2435

SEQ ID NO: 7562 - protein, 415 aa, unidentified; identical to SEQ ID NO: 3370

SEQ ID NO: 7563 - protein, 413 aa, unidentified; identical to SEQ ID NO: 2636

SEQ ID NO: 7564 - protein, 456 aa, unidentified
MNTCVCVLSNNGERLMPTFRLGKVRRLLKDGKAKIVKHHPFTIQLLYDSKTNKQPIEICEDVGYNYIGISVKSESHEYVSAQYDTLQDEKEHHDDCRKMRRARRNRLRYRKPRFDNRKRSEGWLAPSLEHKKQLNISLVERYVSVIPITHATVEVGSFDTMLLQAIQKGETKPEGADYQEGPRYNLATLREAVFYRDNYTCQICGRKITDGAILHMHHMFYWKGRHGYKLDELVTACEKCHTPANHQKGGKLFGFGEDKEFADLSGAAFMNAVRWQIVNALHTTYSKEFVTITYGAMTKEKRIALQLEKSHNNDAYAMGDFHPVHRCGFRHYQKRRRNNRVLEKFYDATYIDARTGNKAKGKELFNGRISRNHKKDSENLHKYRSEKVSKGRRSIRKRRYAIQPYDTVRLKGKTYITSGCHNKGTRLLIPVNGKSKSVTISKVQVVCHAGPWIQII

SEQ ID NO: 7565 - protein, 413 aa, unidentified; identical to SEQ ID NO: 3220

SEQ ID NO: 7566 - protein, 418 aa, unidentified
MFVYVLDKNGQPLMPTQRFGKVRRLLRDKRAKVVKRCPFTIRLLYEPETKIVQDIVLGVDTGSKYVGVACVGNDKVLYQAQVELRDDIKKKMDSRRMCRRNRRFRKTRYRKCRFLNRRNSIRKDRYCPTLVSKFYGHVREIEFCKKILPIKDTVLETGKFDTQLMEKPWLQEHKWAYQKGVNYGYANAREHALVRDKYTCQCCGKKNCRVEAHHIVFRSKCGSNDLENYVTLCEDCHKAVHSGEIDLKLKGKRRGTLRYATQMSIIRNMLLKKYSDAIETFGFVTKENRENLGLKKDHYLDACVIASGGVKFEQSDVLYRKRCVSRQDRQLCKGIRGEKRMPTGKVFGFKKFDKVKYLGKECFIKGRRRNGAFVLMTIDGNPIDFRNMGGKQNPYYKSIDRLNTRKSVLCVSRSVEWR

SEQ ID NO: 7567 - protein, 457 aa, unidentified; identical to SEQ ID NO: 5177

SEQ ID NO: 7568 - protein, 512 aa, unidentified
MSTVYVLNKDGKPLMPTTRCGHVRHLLKEQKARVVASKPFTIQLLYETDDVVQPLYLGIDPGRTNIGVAVVKTDGTAVFTAHLETRNKEIPKLMKKRKESRRARRTNGRRCRRQRRAKANGTISKKCVKHDTAQNGSVSKHAKEIGVIKRHLPGCEKDVLCIGIKNKEAKFSNRTRPEGWLTPTANQLLQTHINLVKKIQKFLPISDVVLEINKFAFMRLDNPNVQKWQYQQGPLYQKANLEETVSEMQEHHCLFCKKKIDHYHHVVPQHKNGSNTIDNIIGLCTQHHDLVHKDATWQKRLAKKKTGLNKKYGALSVLNQIIPALTKELSSLFPKHFFVTNGKSTYDYRAAHGVSKDHWLDAYCIACSVLPNDTCDKTINSRVPYELKQFRRHDRRALNNENMSRVYMFNGKMVATNRHKATEQTTDSLEEFRQRQPNDVCNLKVKEHHPTYRNMNRNYPGSVFLVGNQVHVMQGIAGSKDGEATTYKDTNANSIAAGKCKFVAKNSGILFV

SEQ ID NO: 7569 - protein, 431 aa, Klebsiella sp.; identical to SEQ ID NO: 4152

SEQ ID NO: 7570 - protein, 408 aa, unidentified
LKVFVLNMRGKPLMPCSPAKARHMLKAGKAFVVRRTPFTIKLTIATGETKQDVTLGVDAGARHVGISATTEKEEVFASEVALRQDITGLLADRLAFRRARRNRKTRYRAPRFNNRVRSKHKGWLASSVENRIQAHMSRIEAVCRLLPVTKIVIETASFDIQKIRNPEVEGTGYQQGDQLGFWNVREYVLFRDGHICQHCRGRSKDPILNVHHLESRKTGGDAPNNLITLCETCHKAYHAGKIKLKVKRGQSFRAEAFMGIMRWTLLNRMRKAHPSLPVENTYGYLTKHKRIALGLPKTHCADAFCIAGNLKALRRGDFLFLQQTRKHNRQIHKCSILKGGVRKLNQAPFLVKGFRLFDKVRIGGQIGFVFGRRVRGTFNIRRLDKTVIGTDINCKKTESSRNTQNFFD

SEQ ID NO: 7571 - protein, 428 aa, Enterococcus sp.; identical to SEQ ID NO: 4335

SEQ ID NO: 7572 - protein, 479 aa, unidentified
MPTTRCGHVRGLLNERKARVVEQNPFTIQLNYETKEMTQPLSLGIDPGRTNVGAAVVREDGECVFTAQLTTRNKDVSKLMKARKQFRMAHRRLKRRCKRQRRAKAAGTISQKRELQRLLPGCEEPILCKGIRNKEARFNNRQRPAGWLTPTANHLLLTHLNMVKKLQKFLPITDVVLEVNRFAFMAMENPNIRRWQYQRGPLYGKGSVEDAVYAQQDGHCLFCGKPITHYHHVVPQHKNGSDTLENRVGLCIEHHDLVHKDRAWEAKMKEVKAGMNKKYHALSVLNQIIPALAEQLAELFPQHAFATTGKDTADFREDHGVTKEHHLDAYCIACSVLTEPGRVSAPTAKPHRLMQFRRHDRQVCHKENIKRVYLLDGKAVATNRHKAIEQKDNSLEEFRKTHTQQEVSSLTVKDHKPIYKDMRRSMPGGVFLCNGKVHTLLGSQGRYKGMPQYYHGTDRSRNNATRCIFLQLNCGLRWV

SEQ ID NO: 7573 - protein, 512 aa, unidentified; identical to SEQ ID NO: 4350

SEQ ID NO: 7574 - protein, 279 aa, unidentified
VVVETAEFDLQLLKAIADGKPVPQGEDYQKGEMYGHYNVRQYVLWRDDYTCQCCGAHATKKKEVRLHVHHLESRKVGGDAPDNQVTLCESCHEKLHKGLIAEKDFKKRKRRSTRDATFMGIMRKTLMQRLCSELPIPVIETRGYITKATREKLLVLPKSHTNDALAIAQGKQGFNVGYLPGIVQINKIYTIRPVRHHNRQLHKATILKGGIRKSNQVGKYVFGYRLFDKVQFNEQDCFIWGRRTTGIFTIKTINGKMIKDGISFKKLKPVEKSTSYLIA

SEQ ID NO: 7575 - protein, 427 aa, Moorena sp.
MQNYVFVIDTNKQPLNPISPKKARRLLDKGKAAVFRMYPFTIILKTAISAPTISPSQIKIDPGSKTTGFALVQNGQVIWAMELEHRGSLIKKKLESRSAVRRGRRNRNTRYRKPRFLNHKPSLGWIAPSLEHRVLTTETWVKRLIKFCPVDEIWIERVKFDTQKMQNPEVSGVEYQQGNLAGYEVREYLLEKWGRECAYCGKQNTPLQIEHIHPKSKGGSDRVSNLCLACEKCNQKKGNKPIEEFLTLKPDLLRKILAIAKQPLTDAAAMNTTRNKILKALKAIKPVATGTGAQTKYNRTRLRLPKQHWIDAACVGNLKTLTLRTSQPLLVTCKGHGGRQKAALNKYGYPIRHNPLRPIKGWITGDIAKHQKLGIGKVTPRSRGSFGFTPLGEKGYKSCKPQDISAVHRKDGYTYRFCKNLPGFAWK

SEQ ID NO: 7576 - protein, 420 aa, unidentified; identical to SEQ ID NO: 3504

SEQ ID NO: 7577 - protein, 438 aa, Calothrix sp.
MTTNFVFVLDSDKKPLTMCTAGLARKLLDSQKAAMFKWYPATIILKKSVVELPLAYLELRIDPGSRYTGFALVEIATETVIWAMELEHRGLLISESLIKRNSIRRARRSRKTRYRKYRQNRKKPSGWLPPSLQHRVLTTVTWVKRILKLAPIKSIAVERVKFDMQQLENPDIQGVEYQQGTLHGYTLREALLEHWGRKCAYCDTSNTPLEIEHIHPKSKGGSDRFSNLTLSCHKCNQEKSNMLIDEFLKHDPARLDNIKKHKKQSLRDAAAVNSTRNKLFNTVLNLNLPVSSGNGAATKMMRIKSNLPKAHFIDAGCVNASKQVTLKTFQPLQVKSNGHGNRRFVTVDKHGFPRKNYAPKQVRKDWKAGDIIKVRKKDGTSVLGRVLKAAKTLAFIPKGGKETTFHPKKTKPIHRSDGYRYSFTTIDSVNVNVNEVFP

SEQ ID NO: 7578 - protein, 482 aa, unidentified
HYYFTKGVSCMSTCVCVLSNNGERLMPTFRLGKVRRLLKDGKAKIVKHHPFTIQLLYDSKTNKQPIEICEDVGYNYIGISVKSESHEYVSAQYDTLQDEKEHHDDCRKMRRARRNRLRYRKPRFDNRKRSEGWLAPSLKHKKELNVNVVKMYCAVMPITHATVEVGSFDTMLVKAIQEGKAIPEGADYQKGPRYNLATLREAVFYRDNYVCKVCGRKATEGAILHMHHMFYWKGRHGNSLNELLTVCEKCHTPANHQKSGKLYGFGEDVKFADLSGAAFMNTVRWQIVNELYAAFGKPFVTITYGAMTKEKRIALQLEKSHNNDAYAMGEFHPNHRCAFEHYEKVRRNNRILEKFYDSQYIDIRTGEIATGKELFNGRINRNHKKDSENLHKYRGKRTYAGHRALLRKKVNLNPGDLVSLNGEPLVVLGTHTRKNGAVNVEFETPSKSGRKSASLKKLKIVKAADSIHPAWEKVSQIIQRKE

SEQ ID NO: 7579 - protein, 477 aa, Acidithiobacillus sp.; identical to SEQ ID NO: 4655

SEQ ID NO: 7580 - protein, 419 aa, unidentified; identical to SEQ ID NO: 3628

SEQ ID NO: 7581 - protein, 442 aa, unidentified; identical to SEQ ID NO: 2903

SEQ ID NO: 7582 - protein, 465 aa, unidentified
MSTCVCVLSNSGERLMPTFRLGKVRRLLKDGKAKIVKHHPFTIQLLYDSKTNTQPIEICEDVGYNYIGISVKSEFHEYVSVQYDTLQDEKEHHDDCRKYRRTRRNRLRYRQARFDNRKRDDGWLAPSLEHKKELNVNVIKMYCEVMPITHAIVEVGSFDTMLVKAIEEGKATPESADYQKGPRYKLATLREAVFYRDNYTCQVCGCKANEGAILHVHHMFYWKGRHGNSLSELITVCEKCHTPANHQKGGKLFGFGEDKEFANLSGAAFMNAVRWQIVNALYATYGKEFVTITYGAMTKEKRIALHLEKSHNNDAYAMGSFHPVNRCAFEHYEKVKRNNRILEKFYDSQYIDIRTGEIATGKELFNGRISRSHKKDSENLHKYRGKRICKGHRALRRKKVALNPGDLVSLNGEILVVHGTHTKKNGSVNVEFKTPSRGGKKSASLKKLKIVKTTDSMHSAWEKVS

SEQ ID NO: 7583 - protein, 426 aa, unidentified; identical to SEQ ID NO: 6904

SEQ ID NO: 7584 - protein, 450 aa, unidentified
MPTIRLGKVCHLLKDGKAKIIKHHPFTIQLLYDSKTNTQPIEICEDVGYNYIGISVKSQSHEYVSAQYDTLQDEKACHDSCRKLRRTRRNRLRYRKPRFDNRKRGEGWLAPSLRHKKELNVNVVKMYCAVMPITHATVEVGSFDTMLLQAIQKGESKPEGVDYQKGPRYNLATLREAVFYRDNYVCKVCGRKATEGAILHMHHMFYWKGRHGNSLDELLTVCEKCHTPANHQKSGKLYGFGENVKFADLSGAAFMNTVRWQIVNELYAAFGKDFVTVTYGAMTKEKRIALHLEKSHNNDAYAMGEFHPNCRCTFEHYEKVRRNNRILEKFYDSRYIDIRTGEIATGKELFNGRINRNHKKDSKNLHKYRGKRLYKGHRALVRKKVNFNPGDLVSLNGEVLVVHGTHTNKKGAVNVEFKTPAKNGRKSANLKKLKIVKAAGSIHPAWEKVS

SEQ ID NO: 7585 - protein, 512 aa, unidentified
MSTVYVLNKDGKPLMPTTRGGHVRYLLKEKKARVVTSKPFTIQLLYETDDVVQPLYLGIDPGRTNIGVAVVKTDGTAVFTAHLETRNKEIPKLMQGRKKARRARRTNGRRCRRQRRAKANGTISKKCVKQTTAQNGSVSKRAKKIGVIKRHLPGCEKKVLCIGIKNKEAKFSNRTRPEGWLTPTANQLLQTHINLIKKIRKFLPVNDVVLEINKFAFMQLDNPNIQKWQYQQGPLYQKASLEEAVSEMQEHHCLFCKQSIVHYHHVVPQSENGSDTIGNIVGLCTKHHDLVHKDTAWQKKLAKKKTGLNKKYGALSVLNQIIPALTKELSSLFPKHFFATNGKSTNDYRIAHGVSKDHWLDAYCIACSVLPNDTCDRTINSRVPYELKQFRRHDRRALHKENMSRVYTLNGKSVATNRHKAAEQTTDSLEEFRQRQPNDVCKLKVKEHHPTYRNMNRNYPGSIFLIGKQVHVMQGIAGSKDGEATTYKDTNANSIAAGKCKFVAKNSGILFV

SEQ ID NO: 7586 - protein, 420 aa, unidentified; identical to SEQ ID NO: 4538

SEQ ID NO: 7587 - protein, 429 aa, Salipiger sp.
MSNYVFVLDDARRPLSPTSPARARQLLRNGKAAVFRRYPFTIILKRKVPDAEPAPVEVKIDPGSKVTGLALVQGDKVLWGGELTHRGHQIRERLQMRRERRRGRRNKLRYRKPRYRTKAQINNAGRKRQKGWLAPSLMHRVETIMTWMDRFRRYAPASSIAMELVRFDLQQMQNPEISGVEYQQGELAGFEVKEYLLAKWGRKCAYCGAEGRPLEVEHIQPRSRGGSNRVSNLTLACTKCNQAKGNKPVEAFLSSKPDLLARIMKQAKQPLRDAASVNSTRWALFTALKMTGLPVTTGTGGRTKYNRKRMGWAKAHWLDAAAVGNVDALTLRTDKPLVIYAKGQGGRQKGVFDKHGQPRRNKAGAAQIRPLKPIHGWRSGDIAKARGLEGRISPRTRGNFELRAAGQKPRSFPPRDFKAIHRNDGYAYQ

SEQ ID NO: 7588 - protein, 437 aa, unidentified
MPCSEKRARLLLARGRACVHRLVPFVIRLTDRQLDTCTLQPLRIKLDPGSKTTGLALVRDTEHLNTDTGEIQRGVAVLSLIELVHRGRQISEALTARRQMRRRRRGCLRYRAPRFLNRGNKARGWLAPSLQHRINTTMAWVARIRRWSPITAISSELVRFDMQRLQNPEISGVEYQQGTLAGYEVREYLLAKWSRKCAYCGVENVPLQIDHVHPKAKGGTNRVSNLTLACGPCNARKSAQSVDAFLAKDPKRLTALLAQAKRPLKDAAAVNATRWALVGALKATGLPVETASGGCTKFNRSRLAIPKTHALDAVCVGAVSVVTNWQKPSLTIKCTGRGSYQRTRLDKYGFPRGYLMREKSVKGFKTGDLVRAIVPTGKKAGRHTGRVAIRKSGSFNIQTLAGVVQGIGYRHCRLLQRADGYGYFFNKAACDTAQKRE

SEQ ID NO: 7589 - protein, 406 aa, unidentified
MVYVQDIDGKPMMPTTRHGKVRRLIKANKATVVNLCPFTIQLTYKSTDHKQPVTLGIDAGAKHIGFSATTEKEELFACETTLRTDIVDLLSMRLQNRRTRRSRLRYRKSRFNNRGSSKKKGWVAPSVKQRIDSHLNEVNEIHKILPITKIVIEVAQFDTQKMKNHDISGADYQNGEQLGFWNVREYVLFRDGHKCSHCKGKSKDPVLNVHHLESRKTGGDSPSNLITLCESCHKAFHKGEIELKKKRGKSLRDAAVMGIMKWKLYEELKSRYDNVSMTFGYITKHNRIKYGIEKNHTSDAFVISKNFNAKRIERQYLKRLIRRHNRQIHKMKILKGGKKKNNQAPFEVFGFRLFDKVLYNNEINFIYGRRKSGNFNIRDFNGENPKDVSHKKFKLIRGKRHPIILK

SEQ ID NO: 7590 - protein, 465 aa, unidentified; identical to SEQ ID NO: 6446

SEQ ID NO: 7591 - protein, 413 aa, unidentified; identical to SEQ ID NO: 3295

SEQ ID NO: 7592 - protein, 456 aa, Clostridium sp.
MAYTYVLDMNKNPLMPCHNGGFIRTLLKKKKAKVVRNKPFTVQLLFEVRNKYKQDMTLGVDAGYKHIGFSVSTSKAEVFSAELEQECGMVERNKERRMYRRQRRSRLRYRKPRFNNRIASKQKGWIAPSLKRKRDTHLRFIMMLKSIIPITKITVEIGLFDPALMKAIAEGRTLEGEDYQHGEAEGFENTKSYIRYRDGYTCQNPDCKCHRMPASDREKLKLAVHHIGYYRNDRSNRPGNLITLCELSHNPENHQPGHLLYGWKPKIKSLKETAFMNIIRKEIVDTLKVIYPTTEIRYTYGYRTNMTRNEWHIKKSHHDDAFCIAGNYSKNRCNTLYFHQKRRNNRSLEIFYDAKYIDRRDRKKKSGKELFCGRTTRNKNYAGENLHKYRIKKISKGKRSIRRQHYFYQPKDIILFKGIKHVIKGSHCNGSRLILDTGKSVSVKKVRIHKFSGGIY

SEQ ID NO: 7593 - protein, 465 aa, unidentified; identical to SEQ ID NO: 3603

SEQ ID NO: 7594 - protein, 460 aa, unidentified
MVVYVLNKNNKPLMPCKPQRARKLIKEKKAKIVNYKPFTIKLIYGSYGYTQNTNLGVDLGSKNIGIAVTTQNKVLAKGEIELRQDVSSLIETKKILRRGRRSRKTRYRRCKFNFRNKRVFNAPKGAKLKTLKKGSDSKKNWRTLSTNIDSNRPVGWLPPSIQSKIDNTFFWIDKYYNLLPKCNLSIEVGKFDMAKMINPEIEGADYQQGEAFGFYNTRYFVFARDNYTCQVCKKNKDKVLHTHHVIYKSKGGSDRADNLATICTDCHTSENHKPGGILYEWMIKKKKMKTYKEPPFMNSMRVKVFKKYPQANITYGSITTPRRKELGLEKTHYNDAIAISKVECINQNCDEVFKIKQFRKKKRSLHEATARKGRKTKNTESKRNEKNTSFANGFYLNDKVEIFGQIGYITGFSGKSSAYVKNINDEYITIPGKKYKQVSISALKFINHNNNWQYESNFAI

SEQ ID NO: 7595 - protein, 415 aa, unidentified; identical to SEQ ID NO: 5047

SEQ ID NO: 7596 - protein, 451 aa, unidentified; identical to SEQ ID NO: 2424

SEQ ID NO: 7597 - protein, 416 aa, unidentified; identical to SEQ ID NO: 3087

SEQ ID NO: 7598 - protein, 415 aa, Bacillus sp.; identical to SEQ ID NO: 2431

SEQ ID NO: 7599 - protein, 451 aa, unidentified
VTTILKTCFAASNLAKIVVLMDAWDIIVVLNKRGKPLMPCSPAKARLLLKEKKAIVKRRTPFTIQLTIATGESKQPVTLGVDAGYKHVGLSASTEKAELYASEVELRQDVSDLLSARRALRQSRRNRKTRYRAPRFNNRLRTKRKGWLAPSVENRINAHLSRIEAVLRLLPVTKITVETASFDMQLLKNPDIAGKEYQEGEQLGFWNVREYVLFRDRHVCQHCYGRSKDPVLNVHHLESRRTGGDSPGNLITLCETCHKALHRGDITLKAKRGKSFRAEAFMGIMRWEVHNRLRALHPGIEVSNTYGYRTKHARIANGIAKSHCADAFCIAGNLGAERLCEFFFQKQTRRNNRQIHKLSILKGGIRKRNQAPFEVKGFRLFDKVACQGEEGFIFGRRSSGFFDVRKLDGTRISAGISCKKLHLLEKRRTYLTEIRKEEALPPLPEGRGLRA

SEQ ID NO: 7600 - protein, 464 aa, unidentified
MVIALDKNKRPAGFLTEKRCRKLFEQKRAVRYRMFPMVVILKDIDVRTFTQTLPEYRLKIDPGAKYDGFAIIDPVRDAVVFTLQVEHRAGQVKQNLDARRQARRNRRSRETVYRKNKFAQGGTFTQTGNEGKLPPSIQSILANTETWVKRLSRWVNLTSVSLEAVRFDTQLLDDPVIEGKEYQQGTLQGTEIREYLLDRYQHTCQYCGGVSGDPVLEWEHIRPRSRGGSDSIKNATLACHRCNQDKGSMTPEEWAGQLKTQKTKLSRARLQGIEKVLAGKRNGGSSRYCAWVNITRKELERFLFACFGKVECASGGRTKYNRTRLGFPKDHQYDAACVGKVPEQGYTDLTHGYYTLAKAVGHGSHFRGKINSCGIIIQKLPPREKNVFGFMNGDIVAADIPKREKRPYKYEGHHVGRVMTRARGEFDIRTTDGRLIGANHRYVTKIQNADGYQYAQYRTPGVSG

SEQ ID NO: 7601 - protein, 494 aa, unidentified
MTMVYVQNKDGKPLMPTTRYCYVRLLLKEKKARVVCTTPFTIQLNYDTPDITQDLILGIDPGRTNIGVAVVKEDGQCVFSAHLETRNKDVPLLMKKRAGFRKQHRTLDRRRKRQRRAKATGNTVKNETIERLLPCYQRPIVCHYIRNKEARFNNRSRPAGWLTPTANHLLQTHINLIAKVAKFLPITKVVVELNRFAFMAMDNPNIRRWEYQQGPLYGLGSVEDAVYAQQDGHCLFCDKPIDHYHHVVPRHKGGSETLANRCGLCAKHHDLVHKDKAWAEKLVTRKGGMNKKYHALSVLNQIISFLMEYLGRETPYDVYATDGKSTKGFRIAKNVPKEHYTDAYYIACSILDTAIEVSAPTSPFKLKQFRRHDRQSCIRQMVDRKYILDSKVVATNRHKAIEQKSDSLQEFREVYGDAAVSQLTVRPHSPQYKDMTRIMPGAVMDFNGTIGVMQCSGGRNNGKVEFFKSTKGNKTPPKKCVLLAQNAGMVFIPA

SEQ ID NO: 7602 - protein, 420 aa, unidentified; identical to SEQ ID NO: 3195

SEQ ID NO: 7603 - protein, 417 aa, unidentified
MPCSPAKARLLLKERKAIVKRRTPFTIQLTIATGEAKQPVALGVDSGYKHIGLSATTEKAELYASEVELRQDITDLLSARLALRRSRRSRKTRYRAPRFDNRVASKREGWLAPSVENRIVAHMSRVEAVMRVLPVTAITVETAAFDTQLLKNPDITGAAYQQGEQLGFWNVREYVLFRDGHVCQHCSGKSKDPILNVHHIESRRTGGDAPNNLITLCETCHKAFHRGEIKLKVKRWKSFKAETFMGIMRWTLFERLKKAHPELSVRHTHGYLTKHKRISHGIAKSHCADAYCIAGNLGAMRLNSYLFQKQTRKHNRQIHKLSILKGGLRKKNQAPYEVKGFRLFDKVICKDEEAFIFGRRSSGSFDVRRLDGTRISAGISYKKLRLLEPRTTYLTEFRKEAALPPLHKCRGFRAEFL

SEQ ID NO: 7604 - protein, 442 aa, unidentified; identical to SEQ ID NO: 3037

SEQ ID NO: 7605 - protein, 418 aa, unidentified
MVYVLSQNGQPLMPTVNHAKVRVLLNQRKAKVIKRCPFTIQLQYESTTHTQKINLGIDAGSKTIGVSATTETKVLYESEVALRNDIVELISGRRALRSSRRNRKTRYRKPRFDNRKRPDGWLAPSVRQKIETHITVVENVMKILPVTKIIVETASFDIQKIKNPEIEGVGYQHGEQLDFWNVREYVLFRDGHTCQCCKGKSKDNILNVHHIESRKTGGNAPNNLITLCETCHQAYHKGIITLPKEIHRGMRFRDASFMGIMRWAFYDRLKELYTPLDVEVVNTYGYITKNTRIEHGLPKVHYVDARCISDNPASKPMDHYYFQKKVRCHNRQIHKNTILKGGIRKRNQAAYLVNGFRLFDKVKYQNQEYFIFGRRSSGFFDIRTLDGTKVNKGSISCKKFQLVEKSKHYLTEQRKVTA

SEQ ID NO: 7606 - protein, 423 aa, unidentified; identical to SEQ ID NO: 3951

SEQ ID NO: 7607 - protein, 431 aa, Moorena sp.; identical to SEQ ID NO: 2831

SEQ ID NO: 7608 - protein, 470 aa, unidentified; identical to SEQ ID NO: 2925

SEQ ID NO: 7609 - protein, 472 aa, unidentified
VVDNRLLSIKPLINIGEGVIYSSICTGLSLQTYQKRKEVPCMVYVLDINGQPLMPTTRHGKVRRLLNSHLAKVVKRCPFTIQLLYQSTKEIQPVSLGVDAGSKHIGMAATTEKKVVYQEELSPRNDVVKLLSLRRASRSSRRSRKTRYRKPKFNNRVHSKHKGWLAPSVEVKIQEHITAIKRICQILPISEIQVETAEFDFQRLKAMKEWKPLPVGTDYQLGEQYDLYNTRQYVLHRDGYTCQCCGTHDNNIKLHVHHIESRQTGGDAPSNLITLCEHCHKALHKGKLELPKGKKRGKTYRDATFMGIMRKTLLERLRKEVDVPVSGTYGYITKYLREKTDLEKSHINDAICISKYPYAKPLDTYYLTKVVRNHNRQIHKSNFSKGGIRKRNQAPYLIKGFRLFDKVLYQGKEYFIFGRRATGYFDIRTLDGTKVNKGSISYKKLRIQDTAKAYLKEARAIPHMNKFTCVLA

SEQ ID NO: 7610 - protein, 512 aa, unidentified
MSTVYVLNKDGKPLMPTTRGGHVRHLLKEQKARVVRTNPFTIQLLYETDNLVQPLYLGIDPGRTNIGVAVIKTDGTAVFTAHLETRNKEIPKLMQGRKKARRARRTNGRRCRRQRRAKANGTISKKCVKQATAQNGSVSKRANEIGVIKRHLPGCEKEVLCIGIKNKEAKFSNRTRPEGWLTPTANQLLQTHINLVKKIQKFLPISDVVLEINKFAFMRLDNPNVQKWQYQQGPLYQKASLEEAVSEMQEHHCLFCKNTIDHYHHVVPQHKNGSNTIGNIVGLCVKHHDLVHKDTSWQEKLAKKKTGLNKRYGALSVLNQIIPALTKELSSLFPKHFFATNGKSTYDYRAAHGVSKDHWLDAYCIAGSVLPNDACDNNINNRVPYELKQFRRHNRRALHKENMSRVYTLNGKKVATNRHKAVEQATDSLEEFCQNHPDDVCKLKVKEHHPEYRNPKRNFPGCVFLVGKHTHVMQGTSGSHNGKADGYYDTNGNSYSSGKCKFVVKNEGIVFS

SEQ ID NO: 7611 - protein, 431 aa, Escherichia sp.; identical to SEQ ID NO: 3801

SEQ ID NO: 7612 - protein, 420 aa, unidentified
LMQDRKKARRARRTNGRRCRRQRRAKANGTISKKCVKQTTAQNGSVSKRAKDIGVIKRRLPGCEKDVLCIGIKNKETKFTNRTRPEGWLTPTANQLLQTHINLVKKIQKFLPISDVVLEVNKFAFMRLDNPNIQKWQYQQGPLYKKESLESAVSEIQEHHCLFCKKPIDHYHHVVPQHKNGSNTIGNIVGLCAKHHDLVHKDSAWEKKLAKKSTGLYKKYGALGVLNQIIPTLTNELSSLFPKHSFVTNGKSTYDYRAAHGVSKDHWLDAYCIACSVLPSNVCDSNINNHMPYELKQFRRHDRRVLNNENMNRVYTLNNKAVAINRHKAKDQKTVSLEEFRKEHPDDVCKLKVKEHHPTYRNMNRNFPGSVFLVGKQIHVMQGIASSKDGKATKYNDTSATAIAAGKCKFVAKNTGILFV

SEQ ID NO: 7613 - protein, 441 aa, unidentified
MSTTVFVLDKKHRPLMPCRPARARRLLRAGRARVVKRFPFVIRLVDRTVEQSEVQPVLIKLDPGSRETGAAVVRDDEKKRHHALAFFVIKHRGGAIRDALKARSAFRRRRRSQNFRCRSPRFLNRVKPKGWLPPSLRHRVETTLSFVRRMCRYLPVSGIATELVKFDSQKLQNPEVSGVKYQQGTLFEYEVREYLLEKFGRKCVYCGAEGVPLNIDHVVPRAKGGSNRVSNLVLACVSCNQKKGARSLEDFLKGKPEVLARVRRELKTPLRDAAAVNATRWVLFNELKATGLPVETGSGALTKLNRHAFGVEKEHWLDALCVGRLNGVVTRKGLNVLEIRCMGRGSRQRTRLTKYGFPRGYLMRQKCVHGFATGDMVEANVPKGKKAGLWRGRVAVRVSGSFNIQTPKGVIQGVGWKHCRLISHNDGYGYAWLGHAPHSSP

SEQ ID NO: 7614 - protein, 422 aa, unidentified; identical to SEQ ID NO: 5333

SEQ ID NO: 7615 - protein, 419 aa, Geobacillus sp.; identical to SEQ ID NO: 2839

SEQ ID NO: 7616 - protein, 468 aa, unidentified
  REGION 1..468: note = Ga0373625_0009821
MHSPVPGSVVQGNEVLKGRNQCSEHDKLHSHRRGEPYPQWETGGVCPTNQEERLNKVFVVDQNKKPQDPIRPADARGLLDRKEAAVWRMRPFTIILKVAVEEEPKPLRVKIDPGSRKTGIVLVDEESKKVVWAAEIEHRGVAIKKRMDARRALRHSRRNRKTRHREPRFLNRRRPDGWLPPSLLSRVQNIETWVCRLSRLSPVRFISMELVKFDTQMMENPEISGVEYQQGELRGYEVREYLLEKWGRNCVYCGVMGVPLQVEHINPKSRGGTNRVSNLTISCHGCNTEKGTMTAEEFGHPKIQEQARRPLRDVAAVNITRKEIGERLRDTGLPVEEGTGGRTKFNRIGRGFPKAHWIDAACVGESGENVHLDPDQSVLKIKAMGRGSRQSCRMDRFGFPRTGPKGKRVVHGFRTGDLVRAVVLKGKFIGTHLGRVAIRATGSFTIDGVTTTSWKNCQIAQRADGYSY

SEQ ID NO: 7617 - protein, 419 aa, Aneurinibacillus sp.; identical to SEQ ID NO: 4563

SEQ ID NO: 7618 - protein, 512 aa, unidentified
MSTVYVLNKDGKPLMPTTRGGHVRYLLKEKKARVVTSKPFTIQLLYETDDVVQPLYLGIDPGRTNIGVAVVKTDGTAVFTAHLETRNKEIPKLMQGRKKARRARRTNGRRCRRQRRAKANGTISKKCVKQTTAQNGSVSKRAKKIGVIKRHLPGCEKKVLCIGIKNKEAKFSNRTRPAGWLTPTANQLLQTHINLIKKIRKFLPVNDVVLEINKFAFMQLDNPNIQKWQYQQGPLYQKASLEEAVSEMQEHHCLFCKKSIVHYHHVVPQSENGSDTIGNIVGLCTKHHDLVHKDTAWQKKLAKKKTGLNKKYGALSILNQIIPALTKELSSLFPKHFFATNGKSTHDYRAAHDVSKDHWLDAYCIACSILPNDTCDKNINGRVPYKLKQFRRHDRRALHKENMSRVYTLDGKKVATNRHKAIKQTTDSLEEFRQRQPNDVCKLKVKEHHPEYRNPERNFPGCVFLVGKHTHVVQGTSGSHNSKADGYYDTNGNSYSSGKCKFVAKNKGIVFA

SEQ ID NO: 7619 - protein, 512 aa, unidentified
MSTIYVLNKDGKPLMPTTRGGHVRHLLKEQKARVVMTKPFTIQLLYETDDVVQPLYLGIDPGRTNIGVAVVKADGTAVFTAHLETRNKEIPKLMKKRKDSRRARRTNGRRCRRQRRAKENDTLSTKRVKQTTAQNGSASKRAKEIGVIRRRLPGCEKDVLCIGIKNKEAKFNNRTRPEGWLTPTANQLLQTHINLVKKIQKFLPISDVVLETNKFAFMQLDNPNIQKWQYQQGPLYKKESLESAVSEMQEHHCLFCKKQIDHFHHVVPQHKNGSNTIGNIVGLCAKHHDLVHKETAWQEKLAKKKTGLNKKYGALGVLNQIIPALTKELGVLFPKHFFVTTGKSTYDYRAAHGVCKDHWLDACCIACSVLPNDVCDSSINNRVPYELKQFRRHDRRVLHKENMNRVYTLNSKKAATNRHKATEQESASLEEFRKEHPDDVCKLKVKEHHPTYRNMNRNYPGSVFFVDKQVHVMQGIARSKDGKATTYKDTNANLITAEGCKFVAKNSGILFV

SEQ ID NO: 7620 - protein, 462 aa, unidentified
MSVLVIGSNGRALMPTNPRKACLLLKKKTASVVCRHPFTIQLLYKTGCATQEGSIGIDTGSQHIGVGVTCGDRVILKEEHELRSSMEKRSLLVARAAMRRGRRYRKVRYRKPKWRHHTKRMYFEKPNRRGQHWRKVKTTTQSPRPKGWLPPSLQSKCDHHFRIIDRYLKYLPDSITRNLVIEVGRFDMARMNDPMIHGEMYQRGPMYDAENLKAYIFARDGYQCACCKAKAGTTRKTDGTTVKLVAHHILFRSRGATDNPRYIISVCDHCHTTKAHQPGGVLYSWMENNKKVTRGLRDAAFMNILRQRLFARYPQAAFTYGNITAADRKQLRLPKSHANDAVAISLLGKEASTVKNICQTMHYKQIRKSKRSLHEAIPRKGRKNPNTKAVRNKKNTTQVNGFKLWDSVLANGKKLFICSFTGTSAYLIDKNGCYISQPGKTYKQWPLSKLKRLHPNGNWLMA

SEQ ID NO: 7621 - protein, 426 aa, unidentified
LAKDHYRSIDREETNLRVYVLNKRGEPLMPCSAAKARILLKEKKAVVKRRTPFTIQLTIATGETTQPVTLGVDAGYKHIGLSASTEKAELYASEIELRQDVSELLAARRALRGARRSRKTRHRAPQFDNRKREKGWLAPSVENRIGAHVSRVEAVLRILPVTKIVVETASFDVQRLKNPDVQGVEYQQGEQLGFWNVREYVLFRDGHECQHCHGKSKDKVLNVHHIESRRTGGDAPNNLITLCETCHKAFHRGEIELKVKRGRSFQAETFMGVMRWTFFERLQASHPEIEVRNTYGYLTKDTRIANKIEKSHCADAFCIAGNLKAKRLGYYFFQKQTRRHNRQIHKLTILKGGVRKRHQTPYEIKGFRLYDKVLYRGKVAFIFGRRSSGYFDIRTLDGERISASVSYKKLRLLEKRRTFLIELRRN

SEQ ID NO: 7622 - protein, 512 aa, unidentified
MPTVYVLNKDGKPLMPTTRGGHVRHLLKEQKARVVRTNPFTIQLLYETDNLVQPLYLGIDPGRTNIGVAVVKTDGTAVFTAHLETRNKEIPKLMQGRKKARRARRTNGRRCRRQRRAKANGTISKKCVKQATAQNGSVSKRANEIGVIKRHLPGCEKEVLCIGIKNKEAKFSNRTRPEGWLTPTANQLLQTHINLVKKIQKFLPISDVVLEINKFAFMRLDNPNVQKWQYQQGPLYQKASLEEAVSEMQEHHCLFCKNTIDHYHHVVPQHKNGSNTIGNIVGLCAKHHDLVHKDTSWQEKLAKKKTGLNKRYGALSVLNQIIPALTKELSSLFPKHFFATNGKSTYDYRAAHGVSKDHWLDAYCIAGSVLPNDACDNNINNRVPYELKQFRRHDRRALHKENMSRVYTLNGKKVATNRHKAVEQATDSLEEFCQNHPDDVCKLKVKEHHPEYRNPKRNFPGCVFLVGKHTHVMQGTSGSHNGKADGYYDTNGNSYSSGKCKFVVKNEGIVFT

SEQ ID NO: 7623 - protein, 460 aa, unidentified
  source 1..460: note = Methanosarcinaceae archaeon
VAKWTNSIQEDKTLKVFVINNNGNPLMPTTPRKARILLKSGKAEVVQRIPFSIRLLYPTGNATQPITLGMDTGYSNVGFSAVTEKEELIAGEVQLLTGMVERNQERTMYRRTRRNRLRHRKPGFDQNTNKEGWFAPSIRHKLDSHVRFVAKLYELLPITKIVVEIGKFDIQKIKNPDIKGKQYQEGEKKGYENLRAYILHRDGYKCQNPDCPVTTGKYRRLDIHHIVYRSNGGSDRPNNLITLCSRCHTPKNHKGFLLAWRPKTRGFKDATFMNTVKLKVFDILKQTYENVEATYGYLTKMRRLELGLEKSHANDAFCTVNGDKQIRHQPFIIRQVRRNNRSLSKFYDAKYIDSRDGSTKSGQDMNSGRTCRNKNLNTENLRQYRQQRIKKGRYSIRKKRYPLQPMDLVEVEGKLYYSAGMHNKGKSVTFKGLKKSLTPKKVKLIKYGKGFCWLDPKVVC

SEQ ID NO: 7624 - protein, 405 aa, unidentified
MSTCACVFSKSGKRLMPTIRLGKVRHLLKDGKAKIIKHHPFTIQLLYDSETNIQPIEICEDVGYNYIGISVKSQSHEYVSVQYDTLQDEKDCHDSCRKMRRIRRNRLRYRKPRFDNRKRDKGWLAPSLEHKKELNVNVIKMYCKVVPITHVTVEVGSFDTMLVKAIQEGKAIPEGADYQKGPRYNLATLREAVFYRDKYTCQVCGRKANEGAILHVHHMFYWKGRHGNSLSELLTVCEKCHTPANHQQGGKLYRFGENIKFANLSGAAFMNTVRWQIVNELYTAFGKLFVTFTYGAMTKEKRIAFHLEKCHNNDAYAMGNFHPVDRCAFEHYKKVKRNNRILEKFHDSQYIDIRTGKVANGRSLFNGRINRSHKKNSENLHKYRGKRTRKGYRALRRKKVAPQSR

SEQ ID NO: 7625 - protein, 445 aa, Petrotoga sp.
VLVFVFNKHGEPLMPCKPSKARKLLKGKKAKIISYEPFTIQLLYGSSGYKQGVSIGIDIGSKHIGVAITSENKVLVKGEIELRQDVSSLLTTRKTYRRSRRFRKTRYRKSKFLNRKRKEGWLPPSIESRISNTFKWIDKFASLVPNPKLNIEVGKFDSHKFVNPEVSGKDYQKGQMHGYDDIRYFVFERDNYTCEVCKKKGVILQTHHIKYKSKGGTDNPNNLITVCADCHTPENHKPGGIFWEWMTKSKKPKAYKEHPFMNIIRKRIYQRYPSANIVYGFWTTPRRKELGLSKTHYNDAIAISGIDFIKKNVDSVFEIRQVRKKKRSLHEATARKGRKEPNRDQIRNSKNTKFYKSFYLNDLVKVFSRKGWITGFTNGGAYIKDIFDNYITMPNKSYKQVSLKNIQFISHNNNWQFVPHMKEGDLLLNGKENQLSSLIKQPHGR

SEQ ID NO: 7626 - protein, 446 aa, unidentified
MSVFVVGLNGCRLMPTSERKARLLLKQGKAFVEQKVPFTIRLNYKTGSTTQLGYLGIDTGSQHIGVSVVREDGTVLHKEEIGLRDSMSKRKLLEAKASLRRGRRYRKTRYRHPKWRPKTKRVYCEVPDRKGRHWQKKKITFTSKRPKGWLPPSLQSKTDHHIRWIKKLQDLLPEGYRLSIELGRFDPARMKNPEIHGDLYQKGPQYDYENVRAYVLDRDRYTCQICKKKGGKLHVHHILYRSHGATDDPQYMVTVCSDCHSAQNHLPGGILYQWMQEQKRFSRGLRDATFMNILRKRLIRAFPEAVFTYGNVTKVDREKLKLPKSHGNDATAIALVKTGITAVKDKESVICIQQVRRKKRSLHEETPRKGRKEPNRTAARNNKNTKAVTVTKRQNKKKVSMTGCLFDRVELNGKKGWISGFTGKSCYVKDADDQYLSTSPKYKRGH

SEQ ID NO: 7627 - protein, 404 aa, unidentified
LLKEKKAIVVRRTPFTIQLTIATGETKQPVSLGVDAGYKHVGLSASTENAELYASEVELRQDVSDLLSARRTLRQSRRNRNTRYRAPRFDNRIRTKRKGWLAPSVENRINAHLSRVETVIRLLPVTKITVETTSFDMQLLKNSDIAGKEYQEGEQLGFWNVREYVLFRDGHVCQHCHGRSKDPVLNVHHLESRRTGGDSPGNLITLCETCHKALHRGEITLKAKRGQSFRAETFMGIMRWEVLDRLKASHSKLEVQNTYGYRTKHARISNGIAKSHCADAFCIAGNLGAERLGEFFFQKQTRRNNRQIHKLSILKGGIRKRNQAPYEIKGFRLFDKVACQGEEGFIFGRRSSGYFDVRKLNGTHISAGISCKKLRLLEKRQTYLTEIRKEKALPPLPEGRGLRA

SEQ ID NO: 7628 - protein, 437 aa, unidentified
MSFSKVKNERIYMVFVLNKSKKPLDMISHAKARILLKNRLAVVHKIYPFTIRLKDNSCVGKDKAYTVKIDPGSRTTGVAVVDDKDSVVMLAEIEHRGHIIKKDLDKRRSLRQVRRQRKTRYRPARFLNRTKPKGWLTPSVKSRADNVINFIKKYKKLINIDKVMIESVSFDTAQMTSDDCLIGTGYQQGPLYNTNLRKFIFSKTNGRCSYCGAKATEIDHIVPRAKGGSNSTYNLTPACSSCNKKKSNLSLKEFGKSVGKDFSYLEPKKLPKDAAIVQSARNYTVKEITKLVSDTTTHPSWLTKYNRDELGLPKEHYYDALSVGEIPNNFNFLTDKILIISAKGRGSRQMCRMDSYGFPQTSAKASKTVKGFQSGDMVKAIVPKGSKQGIYLGRVAIRHKGSFNIRTKSGLVKDISYKYCHIIQRGDGYLYSYKERN

SEQ ID NO: 7629 - protein, 418 aa, unidentified
MPCSPAKARLLLKEKKAIVKRRTPFTIQLTIATGETKQPVSLGVDAGYKHVGLSASTEKAELYASEVELRQDITDLLSARRALRQSRRNRKTRYRAPRFDNRIRTKRKGWLAPSVENRINAHLSRIEAVLRLLPVTKITVETASFDLQLLKNPDISGKEYQEGEQLGFWNIREYVLCRDGHVCQHCYGRSKDPVLNVHHLESRRTGGDSPGNLITLCETCHKALHRGEITLKAKRGQSFRAEAFMGIMRWEVHSRLRALHPGIEVSNTYGYRTKHARIANGIAKSHCADAFCIAGNLGAERLCEFFFQKQTRRNNRQIHKLSILKGGIRKRNQAPFEVKGFRLFDKVACQGEEGFIFGRRSSGFFDVRKLDGTRISAGISCKKLHLLEKRRTYLTEIRKEEALPPLPEGRGSAPKCDE

SEQ ID NO: 7630 - protein, 252 aa, unidentified
MVYVQDINGKPLMPTTRHGKVRRLLKDKKAVVVNLCPFTIKLMYVTSDYKQEIVLGVDAGTKHVGLSATTKSKELYSSEVILRNDIVDLLSTRRELRRARRNRLRYRKPRFNNRIKSKRPGWIAPSVKYKIDAHIRVVENVCSILPISRIVIEVAQFDTQKIKNPNISGKEYQEGDQLGFWNTREYVLARDGHKCQYCKGKSKDKILNVHHIESRKTGGDSPSNLITLCETCHKEYHKGNIDLKIRRGKSLP

SEQ ID NO: 7631 - protein, 442 aa, unidentified; identical to SEQ ID NO: 2903

SEQ ID NO: 7632 - protein, 518 aa, unidentified
LANLKLIDELLEKTEYIYVLGIDGKPQMPTNRKVRVRSLFKSGLAKIVDTVPFTIRLLYENDAVLQPITIAEDPGRTNIGAAVLTQLGNLVFSAVVETRNKSIKKLMSDRKAYRQASRRGERKARQRLAKRHGSMIKAGMIMRKLPQYAADKFVTCKIIKNTEARFCNRKRMPDWLTPTVNHLVQTHINLIKKVEKYLPITDVAIEVNRFAFMQMENPDASGVDFQNGPLKGFDDVKAAICEQQHGKCLMCKNDIEHFHHIVPRSKGGSDTIQNQAGLCKKCHTKVHTDAEFQAKFKDKKEGLIKKYGALSALNQSIPFICKELLEIYSVEHVHFCTGKDTSLIRSSLGYEKTKDNQMHEVDAYCIGLAAIGADKAKRPDFNNVFKIKQFRRQDRQLVHYQKERTYYLDGKKIATNRNPRFEQKGDALSDWYKEQIKIYGQYEAEKMRSRLTVKKSKRSYNTTKRLMPGCVFYYDGQRHVMTGQSSYGRYLRAYNCRTKDFPASKCQVIQFNAGLVFV

SEQ ID NO: 7633 - protein, 426 aa, unidentified; identical to SEQ ID NO: 3604
  source 1..426: note = Cyanobacteria bacterium UBA1136

SEQ ID NO: 7634 - protein, 411 aa, unidentified
  REGION 1..411: note = Ga0307928_10050093
MQRVYTQNKDGEPLMPCKPAKARHLLRDGKAVVVKLTPFTIRLKWDCETNTQKVIVGVDTGAVNVGCSAVSGNKVLYASETKLRTDIHKKMQRRAMYRRTRRTKLRYRQPRFNNRTRPKGWLPPTLKSKAESTIKIVKQLSKILPITKVRVEIAKFDTQKLQNPNIKGKEYQKGVTEGYDNLRAYVFERDNYTCQICKKKLGILQTHHIIERKDGGSDRPDNMVTVHKKCHENFHKGLIQHKFRKPKEYKIETQVTILKDYIIKGLKKDFEVETTFGHITKRIRLGLNLPKTHCFDAVAICNPKKVERTENIFKRICIPRGRYQLTKGKRSEKRLPSGKVFGFNQWDKVLFNNQTGFVKGRRTSGFFDVCDIDGKSISHSVKYAKLQKLYSKNIMEVKAVPPTTKVMGIPA

SEQ ID NO: 7635 - protein, 424 aa, unidentified
MRVFVLNMRGEPLMPCTQRKARLLLKEGKAIIYKHNPFTIQLTYATGETKQDCHIGVDTGSKHIGLAVTSKDKVLFKGEVELRQDVKSNLDTRRRYRRNRRNRKTRYRKCRFLNRRRSDKWLPPSLQNRIEHTFRWINELTQIVPNPVLHIEVGKFDTAKMINPQLNGVDYQHGQTYGFFDERYFVFARDEYTCQCCGKSKDKILQTHHIIYRSNGGTNRVDNLITVCTDCHTSVNHKKGGILYKWQEEHKKVKQYKEPPFMNTLRKRIFSSYPDAVITYGSETTPKRKNAGLDKTHYNDAIIISGVTDVIDNSSEWLLIRQFRKKKRSLHEGVARKGRKEPNRLQKRNSKNTPESGGFYLNDKVDVFGQTGYITGFTSGGAYIKDSKGTYITLLNKTYKQVGISNLKLKYHNNNWQYLVKYAV

SEQ ID NO: 7636 - protein, 512 aa, unidentified
MSTVYVLNKNGKPLMPTTRCGHVRRLLKEQKARAVASKPFTIQLLYETDDVVQPLYLGIDPGRTNIGVAVVKTDGTAVFTAHLETRNKEIPKLMKKRKDSRRARRTNGRRCRRQRRAKANGTLSKKCVKQTTAQNGSVSKRAKKIGVIKRHLPGCEKEALCIGIKNKEAKFNNRTRPEGWLTPTANQLLQTHINLVKKIQKFLPISDVVLEVNKFAFMRLDNPNIQKWQYQQGPLYQKASLEEAVSEMQEHHCLFCKNTIDHYHHVVPQHKNGSNTIDNIVGLCTKHHDLVHKETAWQEKLAKKKTGLNKKYGALSVLNQIILALTKGLSFLFPKHFFVTTGKNTYDYRTAHSVSKDHWLDAYCIACSVLPNDVCDSSINSHVPYELKQFRRHDRRALHKENMSRVYTLNGKKVATNRHKAIEQTTDSLEEFRQRQPNDVYKLKVKEHHPEYRNPKRNFPGCVFLVGKHTHVMQGTSGSHNGKADGYYDTNGNSYSSGKCKFVVKNKGIVFA

SEQ ID NO: 7637 - protein, 421 aa, unidentified
MRGQPLMPCSPAKARHLLKAGKAVVRRRTPFTIQLRIATGETKQSVTLGVDAGAKHVGLSATMEKEEVFASEVELRQDITGLLAARLSLRRERRHRKTRYRAPRFLNRVRSKHKGWLAPSVENRIQAHMSRIDAVCKLLPVTKIVIETASFDIQKIRNPTVEGTDYQQGDLLGFWNVREYVLFRDGHVCQHCHGHSRDKILNVHHLESRQTGGDAPNNLITLCETCHKAYHAGKIKLKVKRAQSFRAEAFMGIMRWTLLDRVRKAHPGLPVENTYGYLTKNTRITLGLPKTHCVDAYCIAGNLKAVRRGVYLYQRQVRKHNRQIHKCTVLSKTLKDGTKIGYRKLNQTPHLVKNFRLFDKVRCLGQTGFIFGRRSSGYFDVRRLDGVKLSSGISYRKLTLLEKRSTYLTELRNEDGASFPV

SEQ ID NO: 7638 - protein, 532 aa, unidentified
MSTVYVLNKDGKPLMPTTRGGHVRHLLKEQKARVVQSNPFTIQLLYKTNDAVQPLYLGIDPGRTNIGVAVVKADGTAVFTAHLKSRNKEIPKLMQDRKRARRARRTNGRRHRRQRRAKANGTISKKCVKQTTTQNGSVSKRAKEIGIIKRHLPGCEKDVLCVGIKNKEAKYTNRARLEGWLTPTANQLLQTHINLVKKIQKFLPISDAVLEVNKFAFMRLDNPDIQKWQYQQGPLYKKESLESAVSEMQEHHCLFCKKPIDHYHHVVPKSENGSNTIANIVGLCAEHHNLVHKDVAWQEKLAEEKTGLNKKYGALSVLNQIIPALTNKLSVLFPKHFFVTAGKSTHDYRAAHGVSKDHWLDAYCIACSVLPSNVCDSNINNHVPYELKQFRRHDRRVLHKANMSRVYTLNGKAVATNRHKAIKQTTDSLEEFRQNYPDDVYKLKVKEHHPAYRNLNRNYPGSVFLVGKQAHVMQGIASSKDGKTTKYNDTNATTITAGKCKFVAKNSGILFVQCKFRKALSDGTTKKLQYPV

SEQ ID NO: 7639 - protein, 414 aa, unidentified
MPCSPAKARLLLKEKKAIVKRRTPFTIQLTIATGETKQPVSLGVDAGYKHVGLSASTEKAELYASEVELRQDITDLLSARRALRQSRRNRKTRYRAPRFDNRISTKRKGWLAPSVENRINAHLSRIEAVLRLLPVTKITVETASFDMQLLKDPDISGKEYQEGEQLGFWNVREYVLFRDGHVCQHCHGRSKDPVLNVHHLESRRTGGDSPGNLITLCETCHKALHRGEITLKAKRGQSFRAETFMGIMRREVLDRLKASHPKLEVQNTYGYRTKHARISNGIAKSHCADAFCIAGNLGAERLCEFFFQKQTRRNNRQIHKLSILKGGIRKRNQAPFEIKGFRLFDKVACKGEEGFIFGRRSSGSFDVRKLDGTRISAGISCKKLHLLEKRRTYLTEIRKEEALPPLPEGRDLRA

SEQ ID NO: 7640 - protein, 470 aa, unidentified
MSVFVVGLNGCRLMPTSERKARLLLKQGKAFVEQKVPFTIRLNYKTGSTTQLGYLGIDTGSQHIGVSVVREDGTVLHKEEIGLRDSMSKRKLLEAKASLRRGRRYRKTRYRHPKWRPKTKRVYCEVPDRKGRHWQKKKITFTSKRPKGWLPPSLQSKTDHHIRWIKKLQDLLPEGYRLSIELGRFDPARMKNPEIHGDLYQKGPQYDYENVRAYVLDRDRYTCQICKKKGGKLHVHHILYRSHGATDDPQYMVTVCSDCHSAQNHLPGGILYQWMQEQKRFSRGLRDATFMNILRKCLIRAFPEAVFTYGNVTKVDREKLKLPKSHGNDATAIALVKTGITAVKDKESVICIQQVRRKKRSLHEETPRKGRKEPNRTAARNNKNTKAVTVTKRQNKKKVSMTGCLFDRVELNGKKGWISGFTGKSCYVKDADDQYLSTSPKYKQVSLSKLRILHHCGNWIIGAKKTLGKG

SEQ ID NO: 7641 - protein, 420 aa, unidentified; identical to SEQ ID NO: 6806

SEQ ID NO: 7642 - protein, 512 aa, unidentified
MSTVYVLNKDGKPLMPTTRGGHVRHLLKEQKARVVRTNPFTIQLLYETDNLVQPLYLGIDPGRTNIGVAVVKTDGTAVFTAHLETRNKEIPKLMQGRKKARRARRTNGRRCRRQRRAKANGTISKKCVKQATAQNGSVSKRANEIGVIKRHLPGCEKEVLCIGIKNKEAKFSNRTRPEGWLTPTANQLLQTHINLVKKIQKFLPISDVVLEINKFAFMRLDNPNVQKWQYQQGPLYQKASLEEAVSEMQEHHCLFCKKPIDHYHHVVPQHKNGSNTIGNIVGLCAKHHDLVHKDTTWQKKLAKKKTGLNKRYGALSVLNQIIPALTKELSSLFSKHFFATNGKSTYDYRAAHGVSKDHWLDAYCIASSVLPNDACDNNINNHVPYELKQFRRHDRRALHKENMGRVYTLNGKSVATNRHKAIKQTTDSLEEFRQRQPNDVCKLKVKEHHPEYRNPKRNFPGCVFLVGKHTHVIQGTSGSHNGKADGYYDTNGNSYSSGKCKFVAKNEGIVFT

SEQ ID NO: 7643 - protein, 456 aa, unidentified
MSTCVCVLSNSGERLMPTIRLGKVRRLLKDGKAKIVKHHPFTIQLLYDSKTNTQPIEICEDVGYNYIGISVKSESHEYVSAQYDTLQDEKKHHDDCRKYRRTRRNRLRYRKPRFDNRKRSEGWLAPSLEHKKQLNIRLIERYVSVIPITHATVEVGSFDTMLLQAIQKGKSKPEGVDYQKGPRYNLATLREAVFYRDNYVCKVCGRKATEGAILHVHHMFYWKGRHGNSLSELITVCEKCHTPANHQKGGKLFGFGEDKEFANLSGAAFMNAVRWQIVNALYATYGKEFVTITYGAMTKEKRIILGIEKTHNNDAYAMGDYHPAHRCVFRHYQKRRRNNRVLEKFYDATYIDARTGNKAKGKELFNGRINRNHKKDSENFHKYRSKKVSKGRRSIRRQRYAIQPYDTVHLEGKTYITSGCHNKGTRLLIPVNGKSKSVAISKVQVVCHAGAWIQII

SEQ ID NO: 7644 - protein, 414 aa, unidentified
MPCSPAKARLLLKEKKAIVKRRTPFTIQLTIATGETKQPVSLGVDTGYKHVGLSASTEKAELYASEVELRQDITDLLSARRALRQSRRNCKTRYRAPRFDNRIRTKRKGWLAPSVENRINAHLSRIEAVLRLLPVTKITVETASFDLQLLKNPDISGKEYQEGEQLGFWNIREYVLCRDGHVCQHCYGRSKDPVLNVHHLESRGTGGDSPGNLITLCETCHKALHRGEITLKAKRGQSFRAEAFMGIMRSEVLNRLKASHPELEVNNTYGYRTKHARIANDIAKSHCADAFCIAGNLGAERLGEFFFQKQTRRNNRQIHKLSILKGGIRKRNQAPFEVNGFRLFDKVACKGEEGFIFGRRSSGFFDVRKLDGTRISAGISYKKLHLLEKRRTYLTEIRKEEVLPPLPEGRGLRA

SEQ ID NO: 7645 - protein, 560 aa, Streptomyces sp.
MTTFPAGEQTHQAVLPQQPALESVGADTPGSRDETAHGHPAPARGTVREHGRGETGGQSTRTRRRHARSATPVARAAENGSGDAPPDHGPAYRGGVGVSRVFVLSKEGRPLMPCHPARARELLGRRRAVVARHVPFTIRLRDRMLPESEVDGVQLRIDPGSRGTGLVLTDEKPQTGERSTVTVRRGLVAVELRHRAGRIRHRMRQRAGYRRRRRSANRRYRAPRPDNRTHPARWLPPSLRHRVDTTFSQANRLCRWAPVAEIHVEVTAFDVRALSAGRPLSGVEYAQGPLAGTTGRAYLRAKWGNACAYCEATGVPLNIDHLHPRSRGGSHRVSNLVLACVPCNQAKGNASAETFLAHRPDRLATILRQVSPSLQDAASMNTILRQLVDALGGLGRPVHSWPGAMTKENRSTAGLAKTHTLDALCVGRLDHEAGDAIVRYPGQVLVAQAAGRGSYARTTPDRHGFPRLPRARAKRHFGYATGDLVRAVIPSGKWAGTWTGHVSVRARGQHSLTTPEGRINVSHRNLQLRQRGDGYDYTTRPEPLPSNCSEKPLERWPTRS

SEQ ID NO: 7646 - protein, 423 aa, Arthrospira sp.
MSNHIFVLDTNRKPLTPCKPGVARSLLKAGKASVFRRYPFTIILNKEVDANPEPLELKLDPGSKVTGIALKQGNHIIFAAELQHRGQQIKEALLSRRQLRRSRRNRKTRYRPARFLNRTRSKGWLAPSLQHRVDTLMTWVHRFRRLAPVGRITQELVRFDLQLMENPEISGVEYQQGELQGYEIREYLLEKWGRTCAYCGAQNVLLEVEHIQPRSKGGSDRVSNLTMACHSCNQAKGNGDIRDFFSGQPDVLSRLLRQAKSPLKDAAAVNSTRWALFKALKATGLPVTTGTGGQTKFNRLRLNLPKAHWLDAACVGPVESLEVLTSKPLLILAKGHGTRQMCGTNKYGFPNRHRSRRQIHKGFQTGDMVTATVTAGKKIGSYLGRVLCRASGSFDITTASVRVAGISHKYCQPIHRKDGYAYA

SEQ ID NO: 7647 - protein, 458 aa, Lactobacillus sp.
LKGAGMMSEKKKVDYIYVVDSNDTPLMPTSRLGMVRRWLKTGQARWYGNSRKTIQFVRPVTTNTQKLTLGVDAGFHLGLSVVGNQREYYAAESLRKSEKDRITSRRELRRTRRGRLRHRKARFNNRRRKDGWLVPSIQHRLDFTIKEIKRLYTFLPITNLVVEVTPFDNQKLLNPDIKPWQYTQGKMHGFKTIKDYLLARDNYRDALDGKQYPASQLRVHHLVQRKDGGSNKPDNLVLLSDVNHNQANHNNGILAKLKENRQKTIDYRGAYFMSVLATRLSDYFEHYTTTQGYLTANLRQKYKIEKSHLNDAFVIAGGTDVTLRMNNVYSRQKLRNNNRSLQKFYDAKYVDSRDGKKKTGKELSSGRIKRSKELNYDNLRQFRKEKVKKGRVSIRRNHYQLRPHDVVLNTKTNKIERVASVQNNGKVVRFQTGKTCSIKSVVSLYHVNGILEKKMENI

SEQ ID NO: 7648 - protein, 431 aa, unidentified; identical to SEQ ID NO: 3340

SEQ ID NO: 7649 - protein, 516 aa, unidentified; identical to SEQ ID NO: 5652

SEQ ID NO: 7650 - protein, 464 aa, unidentified
MYVFVIGLDGTRLMPCKPRKARKLIEAHKAEIYKKQPFTIRLLYKTGCASQPITLGIDTGSQHIGIAVTSENKVLYQAEIELRSTMDKRSLMETRYSYRRSRRYRKTRYRSPKFRFHTKRTYSETLVKRKTTGIMTHWVKHTNSISTNRPDGWLAPSMQSKVDHHIRWINRFLDVLPPDTKLRLEIARFDMARMKNPEVHNELYQYGPQYDYENLKAYVFDRDHYKCVVCKRKLGSKQPDGHSLKGMMHHITFRSKGATDNPDQLVTVCEYCHIPQAHKEGGVLWNLKEKHKPVQRGLRDATQMNIIRTRLVKAFPDAELTYGNITAVDRKKMHLPKSHTGDAVAIAMKGKDVNICESTVYIKQIRKKKRSLHEATPRKGRKRPNTQAVRNSKNTKSIGIYHIYDTVRFQNETGFISGFTGKSAYVQDFDGNYITMPGKSYKQINLSSLELVRHNNNWIQKTGN

SEQ ID NO: 7651 - protein, 512 aa, unidentified
MSTVYVLNKDGKPLMPTTRGGHVRHLLKEQKARVVRAKPFTIQLLYETNDVVQPLYLGIDPGRTNIGVAVVKANGTAVFTAHLETRNKGVPKLMQDRKKARRARRTNGRRCRRQRRAKANGTISKKCVKQDTAQSKNPSKRAKEIGIIKRRLPGYKKDVLCIGIKNKEAKYTNRTRPEGWLTPTANQLLQTHINLVRKMQKFLPISDVVLEVNKFAFMRLDNPDIQKWQYQQGPLYQKGSLENAVSEMQEHHCLFCDKPIDHYHHVVPQSENGSNTIANIVGLCAEHHNLVHKDAAWQKKLAEEKVGLNKKYGALSVLNQIIPALTNKLSVLFPKHFFVTAGKSTHDYRAAHGVSKDHWLDAYCIACSVLPSNVCDSNINNHMPYELKQFRRHDRRVLNNENMNRVYTLDNKAVAINRHKATEQEAASLEEFRKEHPNDVCKLKVKEHHPTYRNMNRNYPGSIFLVGKHVHIMQGIAGSKDGKATTYKDSNANSITASKCKFVAKNSGILFV

SEQ ID NO: 7652 - protein, 413 aa, unidentified; identical to SEQ ID NO: 2636

SEQ ID NO: 7653 - protein, 423 aa, unidentified; identical to SEQ ID NO: 3951

SEQ ID NO: 7654 - protein, 480 aa, unidentified
MKGKNMVITLDKNKRPLGFMSERRCRILLEKKRAVLYRYFPTIVILKDVDARKLSGLSSYRIKIDPGAKYTGIAIVMDDTNEFMYAMQIEHRGEQIKKNLDTRRSARRNRRSRETGYRRPKWGNRCTAKEQLQSYDSRRDENWLPPSVKSTADNIISWIRRLCRWINITNCSIESVRFDTQLMENPEIEGVEYQQGTLYGYEVKEYLLEKYGHTCQYCGGKSNDPILEWEHMLPRSRGGSDRLKNASLACQNCNQDKDNHTLEEWQTILQDRIPKERGKQKELDQIRQKFVQQVMEGKAPVKGLRYAAWVNSSRRYSQRHLYLRFPELECSSGGRTKYNRNVLKYPKEHHYDALCVGEIPEDGFVDRTHGYYLYAKATGRGTRLRGQINQCGVIIRKWMDRSKTAFGFQTGDLVVADVPKDTKYKYKGHFSGRVMIRKSGSFDIRTLSGELVTVNAKFCRLLQNNSGYQMMIKRAIPLGN

SEQ ID NO: 7655 - protein, 442 aa, unidentified
MGEGLQPTERSRRQNLRVFVLNKRGQPLMPCSPAKARLLLKEKKAVVRHRTPFTIQLTQATGETVQPVTLGVDAGSKFIGLSASTEKAEHYASEAELRTEVVDLLSSRREMRRARRNRKTRYRAPRFDNRIHSKNKGWLTPSVENKINTHLSCVDNVRKCLPVTKIVVETAAFDIQKIKNPDIEGTDYQQGDQLGFWNVREYVLCRDGHQCCHCHGKSKDPILNVHHLESRKTGGNAPNNLITLCETCHKAYHDGKITLKQKRGQVFRDAAFMGIMRWTFFNRLKAQCPEIEVRNTYGYLTKNTRIRHGLEKSHHTDAFCIAGNLEAKRLGVYFFQKQTRKHNRQIHKMSILKGGVRKLQQAPYEVKGFRLFDKVRYDGREAFIFGRRSSGYFDIRLLTGEKVSAGVSYKKLVLLEKRKTFLTQLIKENAIPPATEVAGFLA

SEQ ID NO: 7656 - protein, 469 aa, unidentified; identical to SEQ ID NO: 6998

SEQ ID NO: 7657 - protein, 442 aa, unidentified; identical to SEQ ID NO: 3161

SEQ ID NO: 7658 - protein, 419 aa, unidentified; identical to SEQ ID NO: 4877

SEQ ID NO: 7659 - protein, 431 aa, Moorena sp.
MRVFVLDKNLKPLDPCRPARARLLLKQGRAKVFRRYPFTIILSDLEAENCTTHNHQIKIDPGSKTTGLAILQGNTVIWGAEITHRGFQIRDALTSRRQSRRSRRNRKTRYRKPRFLNRKRPSGWLAPSLMSRVYNILTWVKKMIRFCPIAGVSQELVRFDTQKMENPEISGTEYQQGTLYGYEIREYLLEKWNRKCAYCGATDAQLEIEHIKPKSNGGSDRVSNLAIACHDCNQAKGNQEIEQFLSGKPEVLKRVMSQAKRTLADAAAVNATRWKLYNELKFTGLPVETGSGGQTKYNRRRFNLVKTHWLDAACVGNVKSIYVENYQFLLIVAKGHGTRQICRTDKFGFPKRYCSRTKIHKGFQTGDIVKAVVTKGKKIGTYVGRVTTRKTGSFNISTANGLIQGINHKYCTPIHKKDGYAYQINALSSLS

SEQ ID NO: 7660 - protein, 465 aa, unidentified; identical to SEQ ID NO: 4016

SEQ ID NO: 7661 - protein, 420 aa, unidentified; identical to SEQ ID NO: 2951

SEQ ID NO: 7662 - protein, 423 aa, Arthrospira sp.; identical to SEQ ID NO: 3278

SEQ ID NO: 7663 - protein, 423 aa, unidentified; identical to SEQ ID NO: 4062

SEQ ID NO: 7664 - protein, 406 aa, unidentified
MVYVQDINGKPLMPTTRHGKVRRLLKDKKAVVVNLCPFTIKLTYVTSDYKQEIVLGVDAGTKHVGLSATTKSKELYSSEVILRNDIVDLLSTRRELRRARRNRLRYRKPRFNNRIKSKRPGWTAPSVKYKIDAHIRVIDNVCSILPIFRIVIEVAQFDTQKIKNPNISGKEYQEGDQLEFWNTREYVLARDGHKCQYCKGKSKDSILNVHHIESRKTGGDSPSNLITLCEACHKEYHKGNIDLRIRRGKSLRDAAVMGIMKWRLYEELKSRYDRVFMTFGYITKHNRIKYGIEKSHTSDAFVISKNINAKRIERQYLKRLIRRHNRQIHKMKILKGGKKKNNQAPFEVFGFRLFDKVLYNNKICFVYGRRKSGSFNIRDFNGENSKDVSRKKFKLIRGKRHPIILK

SEQ ID NO: 7665 - protein, 396 aa, unidentified
MVTVQQSTHHLPFGRVFIRRNLFMVYVISQDGKPLMPCSDPIARLLLKQGKAKVKKREPFTIKLTYETTNYTQGLTLGVDTGSGTIGTAVSKDNGDIVYMSEVVVRNDITDKMTQRAKYRRNRRNRKTRYRKARWLNRASSIKKDRFSPTMQSKLHSHVREIEYIQSILPVTEMVFETGQFDMHLMKNPSLANPKVRPWGYQKGANYGFENTKAMVLNRDNYTCQCCKGKHKDSKLEVHHIVFRSQGGSDEESNLLTLCHTCHKDLHSGKINPKLSGKVKGNLKYATQMNSIRKQLFRFYPNAIETFGYVTKVNRLHLGVAKEHYYDACTIATQGNAFNVKSNLYKKKCVSDGDFQKTKGIRSEQPIVTDKICGFRKFDKVRYFGNDYFIKGRMST

SEQ ID NO: 7666 - protein, 573 aa, Streptosporangium sp.
LRYAFPRTSDSSSGYFCQKPLTGFIVTCSDGRVPNMSVQHRISRLQSVVERVRLVFNGSGETVEQTHRRVLPQPAALESVGADTPEGGHETAHGHRRQAVPGVQPGRGEIERVGTRPARRHPEGASAPEGANREVHPAVFVLDARGHPLDPCHPARARRLLAAGRAVVQRHTPFVIRLKDRSVTDSVVAGVQVGIDPGSKHTGLAVFTDRGGSRTGRYAIQLDHRGALIRDRLASRAALRRGRRGRNLRYRAPRFLNRTKPKGWLAPSLRHRVETTMSQVARLTRWAPVTAVHMEKVSFDTHALSAGKPLEGVEYQQGTLAGYEVREYLLAKWGRACAYCSASGVPLNLDHIHPRSRGGSDRISNLTLACVQCNQTKNATPVQEFLKTSPALLAKILKQAKAPLRDAAAVNATRWALWRALEATGLSVHTASGGRTKWNRSRTGAPKSHTLDALHVGELETVTTWPSTVLVAKATGRGTYARTVPDRYGFLRLVRPRTKLHHGFQTGDLVRGHVPAGKKAGVHLGRVLVRSSGSFDITTRHGRVTGINHRHVRHLQRADGYGYTTQKEADRND

SEQ ID NO: 7667 - protein, 465 aa, unidentified
MSTCACVFSKSGKRLMPTIRLGKVRHLLKDGKAKIIKHHPFTIQLLYDSETNIQPIEICEDVGYNYIGISVKSQSHEYVSVQYDTLQDEKDCHDSCRKMRRIRRNRLRYRKPRFDNRKRNKGWLAPSLEHKKELNVNVIKMYCKVVPITHVTVEVGSFDTMLVKAIQEGKAIPEGADYQKGPRYNLATLREAVFYRDKYTCQVCGRKANEGAILHVHHMFYWKGRHGNSLSELLTVCEKCHTPANHQQGGKLYRFGENIKFANLSGAAFMNTVRWQIVNELYTAFGKLFVTFTYGAMTKEKRIAFHLEKCHNNDAYAMGNFHPVDRCAFEHYKKVKRNNRILEKFHDSQYIDIRTGKVANGRSLFNGRINRSHKKNSENLHKYRGKRTRKGYRALRRKKVALNPGDLVSLNGEILVVHSTHAGKNGYVGVEFKAPSKSGKKSASLKKLKIVKTSNSMRSAWTKVS

SEQ ID NO: 7668 - protein, 414 aa, unidentified; identical to SEQ ID NO: 2588

SEQ ID NO: 7669 - protein, 419 aa, Anoxybacillus sp.
LFVYVINKHGNPLMPCSPRKARILLKNKKAKVVKRTPFTIQLLYGSSGYKQPISLGVDTGTKHVGLSATTKIQVLLEAEVQLRTDIQELLATRRQFRRSRRNRNTRYRKARFLNRKKPNGWLAPSIQHKVDSHIKLVKWVHSLLPITHITVEVAQFDTQKIKNPDIQGAAYQQGEQLGFWNVREYVLYRDGHTCQWCKGKSKDPVLNVHHIESRKTGGDSPSNLMTLCKTCHDMIHREGLEHEIQRRFSSLKDASHMTVMRWFIWNGLKKVYPHANITYGYITKCIRIANGLPKSHMVDARCISGNPLAKPSGTVYFLKFVRKNNRQLHKATILKGGKRKSNKAPRFVKGFQLFDKVVYEGKECFIFGRRSSGYFDLRLLDGTKVHASASWKKLKRVEYASTLLIERRKGDSSPTFALA

SEQ ID NO: 7670 - protein, 449 aa, unidentified
MPTTTRKARILLKENKASVVCRHPFTIHLWYKTGCATQEGSIGIDTGSQHIGVGVTCRNKVILKDEHELRSSMEKRSLMETRATMRRGRRYRKVRYRKPKWRHHTKRMYFEKANRKGQHWRKVKTTTQSPRPERWLPPSLQSKCDHHFRIIDRYLKYLPDSITKNLVIEVGRFDMAHMNDPTIHGEMYQRGPMYDTENLRAYIFARDGYKCACCKAKAGSIRKKDGTSVKLVAHHIQFRSRGATDNPKYMISVCDHCHTTKAHQLGGILYSWMETNKKVTRGLRDATFMNILRRRLFDGYPQAAFTYGNITAVDRKRLLLPKSHANDAVAISLFGKDVSVINATCQTLRYKQVRKSKRSLHEATPRKGRKEPNTKAIRNKKNTTHVNGFKLWDSVLVNGQKLFICGFTGSSAYLVDQDGHYVSPPGKTYKQWTLSKLSRLHPNGNWLMA

SEQ ID NO: 7671 - protein, 425 aa, unidentified; identical to SEQ ID NO: 6387

SEQ ID NO: 7672 - protein, 456 aa, unidentified
MSTCVCVLSNSGERLMPTFRLGKVRRLLKDGKAKIVKHHPFTIQLLYDSKTNTQPIEICEDVGYNYIGISVKSESHEYVSAQYDTLQDEKEHHDDCRKYRRTRRNRLRYRKPRFDNRKRSEGWLAPSLEHKKQLNIRLIERYVSVIPITRATVEVGSFDTMLLQAIQKGESKPEGVDYQKGPRYNLATLREAVFYRDNYTCQVCGRKIADGAILHMHHMFYWKGRHGYQLDELVTACEKCHTPANHQKGGKLFGFGENKEFANLSGAAFMNAVRWQIVNALYATYGKEFVTITYGAMTKEKRIALQLEKTHNNDAYAMGDYHPACRCKFRHYQKRRRNNRVLEKFYDATYIDARTGNKAKGKELFNGRISRNHKKDSENLHKYRSKKVSKGRRSIRRQRYAIQPYDTVRLEGKTYITSGCHNKGTRLLIPANGKSKSVAISKVQVVCHAGAWIQII

SEQ ID NO: 7673 - protein, 442 aa, unidentified; identical to SEQ ID NO: 3234

SEQ ID NO: 7674 - protein, 408 aa, unidentified
MVYVQDIDGKPMMPTTRHGKVRRLLKANKATVVNLCPFTIRLTYATSGYKQEIVLGVDAGTKHVGLSATTKSKELYSSEVILRSDIVELLSTRRELRRTRRNRLRYRKPRFGNRVKSKHHGWVTPSVRHKVDAHIRVIDNICSTLPISRIIVEIAQFDTQKIKNPDISGNEYQEGDQLGFWNVREYVLARDGHKCQHCKGKSKDPILNVHHIESRKTGGDSPSNLITLCETCHKEYHKGNIDLKVKRGKSLRDAAVMGIMKWKLYEELKSRYPNVSMTFGYITKYNRIKYGIEKYHISDAFVISKNFNALRLEYHYKVRLVRRHNRQIHKQKVLKGGAKKPNQSPFEVFGFRLFDRVMFEGNYYFIFGRRKSGSFNIRDINGGNQRNVTYKKLKLSIGKRFMIQKEMN

SEQ ID NO: 7675 - protein, 427 aa, unidentified
MRVFVLDKNRKPLDPCHPAKARKLLKSGRAKVVRRYPFTIIIKDLEVENCSTHDHQLKIDPGAKTTGLAITQGNRVVWGAELTHRGFQIREALTSRRQLRRSRRNRKTRYRKPRFLNRTRPKGWLPPSLMSRVHNVLTWVNKLIKFCPVAGISQELVRFDTQKMLNPEISGIEYQQGTLYGYELREYLLEKWDRTCAYCGAKNTRLEIEHIKPRSKGGANRVSNLAIACHDCNQAKGNLEIEEFLSSKPSILKRILSQAKKPLADAAAVNATRWRLHDELKLIGLPVEAGSGGLTKYNRCRQNLPKTHWLDAANVGKVETLYISDYQPLLIAAKGHGSRQICRTDKFGFPRLHCSVQKIHKGFQTGDIVKAVVTKGKKLGTYVGRMAARKTGSFDITTTKGKVSGISHKYCQAIHRKDGYSYQFHGG

SEQ ID NO: 7676 - protein, 415 aa, Bacillus sp.
MCVFVKNLRGKPLMPCSHRKARLLLKRGKAKIIEYTPFTIQLQYATGEAVQPVTIGVDSGAKHIGIAITTGDKVLTKGTIELRQDVKENLTLRATLRRGRRQRKTRYRKARFLNRKKKEGWLPPSIQSRVDNQIHWIETFKSLLPSPKVIVEVGKFDAQKLKNPDIQRIEYQQGAALGFWNTRYYVFARDNYTCQICKKKGGILHTHHIIERRKGGSDMADNLVTVHDECHQKFHQGTLKHTFKKPKQYKETAFMNILRLQIIRRLDCEITYGSYTTIKRKELDLSKTHANDAIAITNPKRLQGYDQSGEFCIKQFRKKKRSLHEATARKGRKTKNTNAKRNNKNTPHVNGIYLGDKVKVFGQVGFVTGFTGKMVYVQDIYGQYIQNPAKSYKQVKRSEIERIHHTNNWQFLQIS

SEQ ID NO: 7677 - protein, 451 aa, unidentified
MTTFVFVLDRKGRSLMPCHPARARKLLKKGRARVHKVFPFTIRLTDRELENSSVQPMLIKIDPGSKETGIALVREEKNKEHHALYFINLQHRGQQIRNALYKRRCLRRSRRSRNLRYRSPRFLNRRRAEGWLAPSLQHRADSILSWVSRLRKITPVERISQELVKFDTQLTQNSKIEGIEYQQGELAGYELREYLLEKFGRKCIYCGADNVPLNIDHVIPKSKGGSNRVSNLVLACVQCNQKKGSRSIEEFLKDKPEVLRQIKNQLKQPLKDAASVNATRWKLFNKLKSTGFPFEVGSGALTKFNRKKFGIPKAHWLDALCVGNVPSVTNWRNLNVLNIKCCGRGAYQRTRTDKYGFPRGICMRQKKVYGFSTGDMVKAIIPKGKKKGVYVGKVAVRKTGSFNLQTSGQTIQGISYRYCRLITHSDGYSYSWKSCPIPPRVETRGIPGEVR

SEQ ID NO: 7678 - protein, 424 aa, unidentified
MRVFVFNMRGRPLMPCSQRKARLLLRENKAMIYKYHPFTIQLTYTTGETKQDCHIGIDTGSKYIGAAVRSEDKVFWKGEIELRQDIRSNLDTKRIYRRSRRNRKTRYRKPRFLNRKRRDEWLPPSLQSRINHTFHWIDTLSSLVPNPILHIEVGKFDVAKMINPEIHGVDYQHGQTYGFFDERYFVFARDNYTCQCCGKSKNKILNTHHIIYRSNGGTNRVDNLITVCTDCHTSQNHRKGGIFYQWQEQHKKVKQYKEPQFMNTLRKRIFVAYPDAEITYGSETTPKRKAMKLDKTHYNDAIVISGINEIKENPEEWLLIKQFRKKKRSLHEATARKGRKKPNRNQTRNSKNTPYYKGFYLNDKVSVFGKSGYITGFTSNAAYIKDENNDYITLPNKTYKQVSINKMKLECHNNNWQYIIKNAV

SEQ ID NO: 7679 - protein, 451 aa, unidentified; identical to SEQ ID NO: 3199

SEQ ID NO: 7680 - protein, 524 aa, unidentified
VRLRYGKFNREPFFGSLAYSKKEKIMRYVYVLDVDGNPLMPTRRYGWVRRMLKSGKADAVDSLPFTIRLKEKTGTRILQPVIVGQDPGRSNIGMAAVRNDGTALYRVHCETRNKEIVGLMDNRRAFRRASRRGERLARKRLAKKLGTTAKNLNGRLLPGYEKPLAVKDIINTEARFNNRIRPEGWLTPTAVQLLRTHLNLFKKVSGILPATEAVIEINQFAFMQLDDPDAKKREIDFCHGPLYGTGGIKAAVQIQQKDVCLLCGKHGIEHFHHIVPRSKRGSNTVNNIAGLCMECHKKVHMSQEAAEKLEKRKAGLVKRYGGASVLNQIIPSLVEGLAGQYPGHTHVTNGWNTKEFREKYGLEKEHDIDAYCIAASILGNIQPKLEAETYEIKQFRKHNRALIHHQTERTYKYEGKTVAKNRKKRMEQKTDSLEDWFISMTEKYGKEEAEWMRSRLTVQKSKRYYNTPGRMMPGTVFEYAGKRYVLTGQRTRGQYYLAYGQEKKNIQAKKVRVLKPNAGLVYVA

SEQ ID NO: 7681 - protein, 420 aa, unidentified
MQYVYVLNKHGEPLIPCSPGKARLLLKQQKACVVKRTPFTIKLLYGSTGYKQPITLGVDAGSKHIGISAATEKYELYCEEATPRNDVVDLLSARRAFRRSRRNRKTRYRAPRFNNRVHSKHKGWLAPSVEVKIQEHITLIKRVCRILPVTFVRVETAEFDTQRLKAMLEGKPLPVGTDYQLGEMYDEYNIRQYVLKRDNYTCQCCGAHPTKTKAVKLHVHHIETRRTGGNAPNNLITLCTDCHKALHAGKVTLDGKKRGKPLKDAAFMGVMRKTLMERLHKKLKIPVQGTYGYITKYLREKNGIPKSHTNDARCISKNPLAIPCDTCYYTKAVRHHNRQLHKATILKGGIRKANQAPYIVKGYRLWDKVSCNGTECFITGRRTSGYFALKKLDGTVISNSISYKKLRLLEVATNYITERR

SEQ ID NO: 7682 - protein, 414 aa, unidentified
MVYVINKQGQALMPTERFGKVRRLLKNSLAHVVCRIPFTIQLDYDTTDYTQPVSLGVDAGSKHIGISATTSEKELYAADVELRNDIVDKLSTRRELRRTRRSRLRYRKARFNNRVSSKRKGWLAPSVENKIQTHLTVVEKIHKFLPITNIVVEIASFDIQKINNPIISGSEYQQGEQLDFFNVREYVLFRDNHICQHCKGKSKDKVLNVHHIESRKTGGDSPNNLITLCETCHKAYHRGEFELNVKRGKSFRNAAFMGIMRWSFYDRLKNIYPNVSMTFGYITKNTRITNNLPKEHYVDARCISDNPVAKPLGYYFYQKKVRCQNRQIHKANFLKGGRKKLNQAPFLVKGFRLFDLVEYQKELYYIFSRRNSGYFDIRKLDGTKVNKGSINCKHLRLIATRKSILIEKRTKVNL

SEQ ID NO: 7683 - protein, 414 aa, unidentified
MPCSPAKARLLLKEKKAIVVRRTPFTIQLTIATGETKQPVSLGVDAGYKHVGLSASTEKAELYASEIELRQDITDLLSARRELRRARRNRKTRYRAPRFDNRIRTKRKGWLAPSVENRINAHLSRIEAVLRLLPVTKITVETASFDMQLLKNPEISGKEYQEGEQLGFWNVREYVLFRDGHVCQHCHGRSKDPVLNVHHLESRRTGGDSPGNLITLCETCHKALHRGEITLKAKRGQSFRAEAFMGIMRWEVLNRLKASHPELEVNNTYGYRTKHARISNGIAKSHCADAFCIAGNLGAKRLGEFFFQKQTRRNNRQIHKLSILKHGLRKRNQTPFEIKGFRLFDKVACKGEEGFIFGRRSSGYFDVRKLDGTRISAGISCKKLHLLEKRQTYITEIRKEKALPPLPEGRGLRA

SEQ ID NO: 7684 - protein, 435 aa, unidentified
VIVGFDPGRTNIGISAVREDGTCLNLTHCETRNREIPKLMQKRKEHRQTSRRGERLVRKRLAKRHGTVSSKPLERILPGCEKPLKVKDIINTESRFNNRLRSEGWLTPTATQLLRTHVNLLKRMCQILPATDVVMEVNRFAFMQLDQSNVKKCGIDFQHGPLFGTDGIKEAVSIQQDGRCLLCEKRTIEHYHHIVPRAYRGSDTAENIAGLCAGCHKLVHTSREASNKLKHKKDGINKKYGGISVLNQVIPFLFMEFEQMFPGHTYATNGWNTKQFREKYRLAKDHSVDAYCIAASILPEPKVELPEDTHEIVQYRRHDRARIKRQTERTYCLGKKGVCKNRHKRFEQKTDSLEEYVEKYPNFLSNLTVKKSQRSYNDLKRVLPGAVILYQGKRYILSGRSSGGKQYRMLGYGNQNFTASKCTIVQQNTGLVYVS

SEQ ID NO: 7685 - protein, 458 aa, unidentified; identical to SEQ ID NO: 4474

SEQ ID NO: 7686 - protein, 423 aa, Oscillatoria sp.; identical to SEQ ID NO: 5719

SEQ ID NO: 7687 - protein, 419 aa, unidentified; identical to SEQ ID NO: 5677

SEQ ID NO: 7688 - protein, 553 aa, Streptomyces sp.; identical to SEQ ID NO: 5972

SEQ ID NO: 7689 - protein, 627 aa, unidentified
  source 1..627: note = Lachnospiraceae bacterium UBA7292
MQELEACICAVGDTMNAPTALVQVVALLQFMVKFRVHGIRNTVTLLPQKVPHWMHSNAVYDSELSFQKDVTVYMYVRVIAKDGTPLMPTRRCGNVRHLLETGMAVAIRTKPFTIRLKYETSKYVQALYAGIDTGRENIGSAVSKENGENVYLADSRSNNGTVHSKMYDRAGFRRKRCRHDRQNKQRKAKFDGTEMKKGDADKVRTTHDCISRKVSYPVAEKSVTHKVIQGKEGKFNNRKHPDGWITPSAKQLVQITMNEVKFMCDTMPIRQLSVERVSFDFQKLANVNIRAWEYGKGPLYGYRSYKDYFCDEQKGKCPFCGEDIAHYHHIMPRHRRGTDTVRNIIGVCESCHEKIHSGQITDEMLHEVKDGVAESFEVGLLNSVMPALIDAMKQFCDARNIRLVVMDGRTTSETRNRYHIRKDHCTDAYCISLAGRNIDPADVKLDDFIFMKRRFKKKSKNIINTLNQRVYYDGKKPVAYNRHRAMDQKTDSLEEYMTKYRRTHTGAETDKHFRSLTVRPAKRTYTFHKNGTIAAVHAGDVVRYVKYNKTYGNTKIDTFVALSCEMFGEGHVKYGNGTQGRKLKFCKTIASGALQCVGIEKTDTYLREVALEEAKRRAARVRRKRTG

SEQ ID NO: 7690 - protein, 339 aa, unidentified; identical to SEQ ID NO: 5852

SEQ ID NO: 7691 - protein, 442 aa, unidentified; identical to SEQ ID NO: 3218

SEQ ID NO: 7692 - protein, 424 aa, Moorena sp.
MRVFVLDKNKKPLDPCQPARARILLKQGRAKVFRRYPFTIIMGDLEELECVTHNHQIKLDPGSQTTGLAIVQEKVVVWGAELTHRGLQIRDGLTSRRQLRRSRRNRKTRYRQPRFLNRKRPDGWLAPSLMSRVYNIITWVKKLTRFCPITGISQELVRFDTQKMENPEISGTEYQQGTLYGYEVREYLLSKWNRKCAYCGVTDTPLEVEHIKPKSKGGSDRVSNLAIACRKCNQTKGNQEIEQFLSGKPDVIKRILSQAKRPLVDAAAVNSTRWKLYNELKALGLPIETGSGGLTKYNRCRQNLPKTHWLDAANVGKVDTLYIEVYQPLLISAKGHGTRKMCRTNKFGFPTRYVPRWKFVKGFQTGDIAKAVVTKGKKVGTYTGRIATRKTGSFNISTKHGLVQGISHKYCSIVHRKDGYAYSF

SEQ ID NO: 7693 - protein, 502 aa, unidentified; identical to SEQ ID NO: 6049

SEQ ID NO: 7694 - protein, 443 aa, Halomonas sp.
MPCSEKRARLLLERGRAVVVNLTPFVIRLRDRCLSDCTLQPTLLAADPGSKETGLALMRLENNATEEKAPATRHVLYLFQLVHRGFQIRQALEQRAGFRRRRRSKNLRHRKPRFDNRTRKKGWLPPSLQHRVDTTMARVDKLCRWAPVTHLSMELVRFDMQKMENPEISGVEYQQGTLLGYEVREYLLEKWGRVCAYCGTGDTPLEIEHVVAKSRDGSSRVSNLTVACHDCNIAKDNQSLADFFATDKGLKRRLKANGLSAEMRLARVQRQLKLPLRDATAVNATRWALFGAMKSTGLPVAVGSGGRTKYNRQRLGIPKTHALDAACVGKFDTLKGWRVPTQVIKAMGRGSYQRTRLDKYGFPRGYLMRQKQVQGFQTGDRVRAIVPTGKKAGTHTGRVAIRKTGSFNIQTEQGAVQGISWPYCTLLQRGDGYGYHQIPTPQH

SEQ ID NO: 7695 - protein, 353 aa, Arthrospira sp.; identical to SEQ ID NO: 3451

SEQ ID NO: 7696 - protein, 461 aa, Parasutterella sp.; identical to SEQ ID NO: 3646

SEQ ID NO: 7697 - protein, 465 aa, unidentified; identical to SEQ ID NO: 3070

SEQ ID NO: 7698 - protein, 431 aa, unidentified
MPNKVYVINKHGRPLMPCSPAKARHLLDAGKAKVKKRTPFTIQLVYGSSGYTQEVILGVDAGSKTIGMSASTTKEELLSAEVKPRNDVVDLLSTRREFRRARRNRKTRYRKPRFDNRVRSKHKGWLAPSVEVKIQEHITAIRRVCGILPVSKVVVETAEFDLQLLKAIEEGKPVPQGEDYQKGEMYGHYNVRQYVLWRDGYTCQCCGAHTTKKKEVRLHVHHLESRKVGGDAPDNQVTLCESCHEKLHKGLIAEKDFKKRKRRSTRDATFMGIMRKTLMQRLCSELPIPVVKTRGYITKATREKLLVLPKSHTNDALAIAQGKRGFNVGYLPEIAQIDKIYTIRPVRHHNRQLHKATILKGGIRKSNQTEKYVFGYRLFDKVQFNGQDCFIWGRRTTGIFTIKTINGKMIKDGISFKKLKLLEKSTSYLIA

SEQ ID NO: 7699 - protein, 512 aa, unidentified
MTALEEKLSKTEYIYVLGFDGKPQMPTRRKRHVLKLLKTGRARIAEDIPFTIRLTYRNAPVLQPVTLAEDPGRTNIGAAVLSPLGDLLFAAVIETRNKEIKKLMADRQKSRQASRRGERKARQRLAKRYGSMVKSGMVMRKLPMYAADKFVICKFIRNTQARFCNRKRCPDWITPTVQHLVQTHLNIIRKISRYLPVTDIAFEVNRFAFMHMENPEAMGVDFQNGPLKGYGDVKEAIRTQQHGKCLMCKKPITHFHHIVPRSRGGSDTIQNLAGLCTECHTKVHTDTAFRKDFDEKKSGQLKKYGALSALNQAVPFICKKLLEEYGEEHVHFCRGLDTSLIRTAFGFEKTKKNQMHEVDAYCIGLAALEVNEVETPAFDHTFQIRQFRRQDRSIIHHQTGRSYYQGKEKVAQNRKPGFEQKTTALSQWYKEQIRIHGEKEAEKLRSQLRVEKSCRHYNDMDRFLPGAVFLYEGKRYVLSGRITNGKYLRACGQGMKNFPAAECTFIRHNAGL

SEQ ID NO: 7700 - protein, 507 aa, unidentified
MQTKGKGSKVLVAICKDRSRLLTFPRGDWSQGQRNKSRKGERFEMAVFVLDRSGRPLMPCTEKRARLLLERGRACVHLVMPFTIRIVDLKAENCAFQALRVKLDPGSKATGIALVRETEGKGVAVVNLFELVHRGRQISEALTARRGHRRLRRSKLRYRPPRFDNRGNKQRGWLAPSLQHRVDTSMAWVSRIQRLAPVSAISTELVRFDAQALENPEIEGAQYQQGTLAGYEVREYLLEKWDRTCAYCGAKDVPLQIEHIHPKSKNGSDRINNLTLACQCCNQKKAALPVEMFLAKKPELLKRILAQAKRPLKDAAAVNSTRWALVNTLKTTGLVVETGTGGQTKFNRSQFDIPKTHALDAACVGEVGSITDWQKPTLSIKAMGRGSYQRTRLDKFGCVRGYLTRSKSIKGFQTGDMVKAEVTTGKKIGSYTGRVAVRATGSFNIQTSTGLVQGVSHRYCTVVQRGNGYGYSLVAKTDVRGTPPQHRDASHPALYLPGLKAEVSRAN

SEQ ID NO: 7701 - protein, 396 aa, Moorena sp.
YPFTIILSDLEVENCTTHNHQLKIDPGAKTTGLAILQNDTVIWSAEITHRGFQIRDALTSRRQLRRSRRNRKTRYRKPRFLNRKRPSGWLAPSLMSRVHNILTWVKKLIRLCPIAGIFQELVRFDTQKMENPEISGTEYQQGTLCGYEIREYLLEKWNRKCAYCGATDVRLEIEHIKPKSLGGSDRVNNLAIACHDCNQTKGNQEIEQFLSGKPDILKRILSQAKRSLADAAAVNSTRWKLYNELKLTGLPVKTGSGGQTKYNRRQFSLPKTHWLDAACVGDVQSIFVEDYQILSIVAKGHGTRQICRTDKFGFPKRYCSRTKIHKGFQTGDIVKAVVTKGKKIGTYVGRVATRKTGSFNISTANGLIQGISYKYCTPIHKKDGYAYQINTLPSLS

SEQ ID NO: 7702 - protein, 431 aa, unidentified
MDAWDIIVVLNKRGKPLMPCSPAKARLLLKEKKAIVKRRTPFTIQLTIATGETKQPVSLGVDAGYKHVGLSASTEKAELYASEVELRQDITDLLSARRALRQSRRNRKTRYRAPRFDNRIRTKRKGWLAPSVENRINAHLSRIEAVLRLLPVTKISVETTSFDMQLLKNPDISGKEYQEGEQLGFWNVREYVLFRDGHVCQHCHGRSKDPVLNVHHLESRRTGGDSPGNLITLCETCHKALHRSEITLKTKRGQSFRAEAFMGIMRWEVHNRLRALHPGIEVSNTYGYRTKHARIANGIAKSHCADAFCIAGNLGAERLCEFFFQKQTRRNNRQIHKLSILKGGIRKRNQAPFEVNGFRLFDKVACKGEEGFIFGRRSSGFFDVRKLDGTCISAGISYKKLHLLEKRRTYLTEIRKEEALPPLPEGRGLRA

SEQ ID NO: 7703 - protein, 473 aa, unidentified; identical to SEQ ID NO: 3562
  source 1..473: note = uncultured beta proteobacterium

SEQ ID NO: 7704 - protein, 414 aa, unidentified
MPCSPAKARLLLKEKKAIVVRRTPFTIQLTIATGESKQPVSLGVDAGYKHVGLSASTEKAELYASEVELRQDITDLLSARRALRQSRRNRKTRYRAPRFDNRIRTKRKGWLALSLENRINAHLSRIEAVLRLLPVTKITVETASFDMQLLKNPDIAGKEYQEGEQLGFWNVREYVLFRDGHVCQHCHGRSKDPVLNVHHLESRRTGGDSPGNLITLCETCHKALHRGEIKLKAKRGRSFRAETFMGIMRWGVLNRLKASHPKLEVHNTYGYRTKHARISNGIAKSHCADAFCIAGNLGAERLGEFFFQKQTRRNNRQIHKLSILKGGIRKRNQAPFEVKGFRLFDKVACQGEEGFIFGRRSSGFFDVRKLDGTRISAGISCKKLHLLEKRRTYLTEIRKEEALPPLPEGRGLRA

SEQ ID NO: 7705 - protein, 279 aa, unidentified
VVVETAEFDLQLLKAIADGKPVPQGEDYQKGEMYGHYNVRQYVLWRDNYTCQCCGTHPSKKKEVRLHVHHLESRKVGGDAPDNQVTLCESCHEKLHKGLIAEKDFKKRKRRSTRDATFMGIMRKTLMQRLCSELPIPVVKTRGYITKATREKLLVLPKSHTNDALAIAQGKRGFNVGYLPEIAQIDKIYTIRPVRHHNRQLHKAAILTGGIRKSNQTEKYVFGYRLFDKVQFNGQDCFIWGRRTTGIFTIKTINGKMIKDGISFKKLKLVEKSTSYLIA

SEQ ID NO: 7706 - protein, 512 aa, unidentified; identical to SEQ ID NO: 7484

SEQ ID NO: 7707 - protein, 400 aa, unidentified
KKAIVVRRTPFTIQLTIATGETKQPVSLGVDAGYKHVGLSASTEKAELYASEIELRQDITDLLSARRELRRARRNRKTRYRAPRFDNRIRTKRKGWLAPSVENRINAHLSRIEAVLRLLPVTKITVETASFDMQLLKNPDISGKEYQEGEQLGFWNVREYVLFRDGHVCQHCHGRSKDPVLNVHHLESRRTGGDSPGNLITLCETCHKALHRGEITLKAKRGQSFRAEAFMGIMRWEVLNRLKASHPELEVNNTYGYRTKHARISNGIAKSHCADAFCIAGNLGAKRLGEFFFQKQTRRNNRQIHKLSILKHGLRKRNQAPFEIKGFRLFDKVACKGEEGFIFGRRSSGYFDVRKLDGTRISASISCKKLRLLEKRRTYLTEIRKEEALPSLSEGRGLRA

SEQ ID NO: 7708 - protein, 478 aa, Acidiferrobacter sp.; identical to SEQ ID NO: 4550

SEQ ID NO: 7709 - protein, 411 aa, unidentified; identical to SEQ ID NO: 3277

SEQ ID NO: 7710 - protein, 458 aa, Lactobacillus sp.; identical to SEQ ID NO: 7062

SEQ ID NO: 7711 - protein, 434 aa, unidentified; identical to SEQ ID NO: 6197

SEQ ID NO: 7712 - protein, 428 aa, Enterococcus sp.
MVYVLSINNEPLMPCSNVIARLLLKQGKAKVKYREPFTIKLTYETTTYTQPLTLGVDTGSQTFATAVTNGKGNILYTSEVVLREDKNHSIKKKMDQRRMYRRNRRNRKTRYRKARFNNRKNSKRKNRFSPTMTSKLHSHQKEIEFIKSILPIAKLILETGTFDPHLMKNPSLANLKVKPWGYQQGPNYGFENKKARILARDNHTCQICKKKPKNERLEVHHIIFRSQGGSDEENNLVTVCHSCHVELHKGLIHPNFEGSLKNALKYATQMNSIRVQLLKLYPDAIETFGYVTKANRLNLGLPKEHYVDAAVIATAGNQVNFACNLMIKRCIPKGDFQRTKGIRSEKIIPKGKIDGFKKYDKVRYFGNEYFVKGRMTTGYIQLMNIYGEKISFNHMPKGFKTPKTKNCQRISARKTWITTTEPLIKNIA

SEQ ID NO: 7713 - protein, 512 aa, unidentified; identical to SEQ ID NO: 4038

SEQ ID NO: 7714 - protein, 413 aa, unidentified
LKVFVLNMRGKPLMPCSPAKARHMLKAGKAFVVRRTPFTIKLTIATGETKQDVTLGVDAGARHVGISATTEKEEVFASEVALRQDITGLLADRLAFRRARRNRKTRYRAPHFNNRVRSKHKGWLAPSVENRIQAHISRIEAVCRLLPVTKIVIETASFDIQKIRNPEVEGTGYQQGDQLGFWNVREYVLFRDGHICQHCRGRSKDPILNVHHLESRKTGGDAPNNLITLCETCHKAYHAGKIKLKVKRGQSFRAEAFMGIMRWTLLDRVRKTHPKLPVENTYGYLTKHKRIALGLPKTHCADAFCIAGNLKALRRGDFLFQQQTRKHNRQIHKCSILKGGVRTLNQAPFLVKGFRLFDKVRIGGQIGFVFGRRVRGTFNIRRLDKTVIGTDINCKKLSLLETRKTFLTELRKE

SEQ ID NO: 7715 - protein, 427 aa, Moorena sp.
MQNYVFVIDAKKQPINPIYPKKARRLLDKGKAAVFRMYPFTIILKTAIENPTISPCQIKIDPGSKVTGFALVQDGQVIWGMELEHRGGLIKKKLESRRAVRRGRRNRNTRYRKPRFLNRKRPEGWIPPSLEHRILTTQTWVKRLIKFCPVNEIWVERVKFDTQKMQNPEINGIQYQQGELAGYEVREYLLEKWGRKCTYCGKQNVPLQIEHIHPKSKGGSERVSNLCLACEKCNQRKGNKPIEDFLKKKPSLLQKIKTKAKQPLQDAAAVNTTRNKLVKVLQNVLPLITGTGAQTKFNRTKLGFPKQHWIDAACVGNIEALVLRTSQPLLVTCKGQGGRQKAALNKYGYPIRHNPLKPIGCRPRCANKGWTTGDIAKHQKLGIGKVTPRTKGSFGFTPLGTKGYKSCKPQDISAIHRKDGYTYGFCQ

SEQ ID NO: 7716 - protein, 451 aa, unidentified
MSVAVISKTGERLMPTSEYRARKLLKSGKAIKYSYRPFTIQLTERETGDIQPIELCMDTGYIHIGISVKSEKHEYLAEQIDTLTDERSRHDACRMYRRQRRNRKRYRQPRFNNRKKDKGWIAPSLEHKKNIHIQAISRINNVMPLTDITMEMGNFGTQVLKAKEEGNPLPQGADYQHGERYGIATLREAVFTRDDYKCQCCGRTIKDGAILHVHHIKYRSQGGTNSMSNLATVCDKCHTPKNHKPEGKLYNWKPKLPSFKCATFMTTIRWQLYNEVKTLFPDIDIHITYGAATKERRRELDIDKSHVNDAFVMGQFHPKHRIKAVLYKKKRRNNRCLEKFYDAKYIDSRDGKKRSGQELFNGRINRNHKKDSENLHQYRLQKVTAGKRTVRKQHYGIQPHDIIVYENRKRETTGCHCSGTRVMLLPDKKSVSIKKIKIYKYAGGYFKSAFN

SEQ ID NO: 7717 - protein, 189 aa, unidentified
MVYVLANDGQPLMPTERHGKVCRMLKSGIAKVVKKCPFTIQLQYESERNVQPVALGIDAGSKHVGVSATTKAKVLYESDVELRDDIVKLLATRRQLRRRRRSRKTRYRPARFDNRRRKEGWLTPSIRQKIESHLTVVANVCKILPVSQIIVETASFDIQKIKNPDIQGIEYQQGEQMDFWNIREYVLFR

SEQ ID NO: 7718 - protein, 443 aa, Anoxybacillus sp.
MVEENMTCFMQRKGENPMVFVLDTNKRPLAPCHEAVARKLLKQGKAAIYRRFPFTIILKKSVDESEIKATYRLKIDYGSRHTGLAILRGQEVVWLGQLDHRTDIKERIDKRRAFRRARRNRKTRYRKPRFLNRKRKEGWLPPSLESRMQNIKTWVERLRKICPIEHISYENAKFDTQLMRNPEINGVEYQQGTLQGYEVREYLLEKFGRKCCYCGKEGVPLEVEHIIPKSRGGTDRMDNLCLACRDCNQRKGSQTAEEFGYPHIQEMVKKTLKDASVVNATRWKVYEVLKQSGCEVECGTGARTKMNRIRLGLPKIHYFDACCVGKSTPLQLHFKTKEVLFIKAKGRGSRSRTNLDRYGFPRGYLARQKYFFGFQTGDMVKANVPKGKYQGVWFGEVACRKTGSFDIKGKDGKRIAQGINYRYVQVIQRFDGYAYGKGVAELA

SEQ ID NO: 7719 - protein, 553 aa, Streptomyces sp.; identical to SEQ ID NO: 4116

SEQ ID NO: 7720 - protein, 518 aa, Anaerostipes sp.; identical to SEQ ID NO: 2751

SEQ ID NO: 7721 - protein, 493 aa, unidentified; identical to SEQ ID NO: 3781

SEQ ID NO: 7722 - protein, 425 aa, Aphanothece sp.; identical to SEQ ID NO: 6227

SEQ ID NO: 7723 - protein, 430 aa, Microvirga sp.
MTVFVLDKHGKPLMPCSEKRARQLLDQKRARIHRMRPFTIRLVDRKVEDSILQPIKLKIDPGSKGTGIALVRVSQVRQTVLMLMELKHRGADIRDALTQRRAFRRRRRGKLRFREQRFDNRTRHEGWLAPSLRHRVDTTMAWVDRLSRLASVTAIDMELVRFDTQLLANPEICGVEYQQGTLAGYEVREYCLEKWGRTCMYCGKDGIPLQVEHIVPRARGGSDRPSNLGIACEPCNQAKGSTPVEEFVQDPKRLGRIHAIMRSPLRDAAAVNSTRWGLFNALKAPGLPVSTATGGRTKWNRSRFGIPKTHALDAACVGHVEELAGWSQPTLQAACTGRGRYKRTLLDKHGFPRGRLMVRKRVHGFATGDLVAAAVAKGKKIGSYVGRVAVRESGKFNITTASGVVQGIGHRNFRLLQRADGYCYSQRNTN

SEQ ID NO: 7724 - protein, 421 aa, unidentified
MTPMVYVLSKTGQPLMPTENHAKVRVLLKQQKAKVVHRCPFTIQLLYDSTDYTQPVSLGIDAGSRHIGVSATTETKVLYEADVTLRNDIVDLLSTRREARRTRRSRKTRYRKPRFNNRIRKDGWLAPSIQQKVDTHLTVVHKATGILPVNSITVETASFDIQKIKNPDIAGTGYQQGEQLDFWNVREYVLFRDGHKCQCCKGKSKDPVLNVHHIESRKTGGNAPNNLITLCETCHKGYHNGTVSLPKNIRRGMKFNDAAFMGIMRWTFFNRVKETYEPLGIMVNMTYGYITKNTRIEHKLPKDHFIDARCISGHPDAVSDGTVFYQKKVRCHNRQIHKQKILKGGIRKRNQAPYLVKGFRLFEKVKYHGKQYFIFGRRSSGFFDIRTLDGTKVNKGSVSCKKIRSLDMPRSYLTEERKAIV

SEQ ID NO: 7725 - protein, 430 aa, unidentified
MDAWDIIVILNKRGKPLMPCSPAKARLLLKEKKAIVARRTPFTIQLTIATGEAKQPVSLGVDAGYKHVGLSASTEKAELYASEVELRQDVSDLLSARRALRQSRRSRNTRYRAPRFDNRIRTKRKGWLAPTVENRINVHLSRIETVLRLLPVTKITVETASFDTQLLKNPDIAGKEYQEGEQLGFWNVREYVLFRDGHVCQHCHGRSKDPVLNVHHLESRRTGGDSPGNLITLCETCHKALHRGGITLKAKRGQSFRAEAFMGIMRWEVLNRLKASHPELEVNNTYGYWTKHARIANGIAKSHCADAFCIAGNLGAERLGEFLFQKQTRRNNRQIHKLSILKGGRRKRNQASFEVKGFRLFDKVACKGEEIFIFSRRSSGYFDVRKLDGTRISAGISYKKLRLLEKRRTYLTEIRKEAFSPLPEGRSLRA

SEQ ID NO: 7726 - protein, 279 aa, unidentified
VVVETAEFDLHLLKAIADGKPVPQGEDYQKGEMYGHYNVRQYVLWRDNYTCQCCGTHPSKKKEVRLHVHHLESRKVDGDAPDNQVTLCESCHEKLHKGLIAEKDFKKRKRKSTRDATFMGIMRKTLMQRLCSELPIPVIETRGYITKATREKLLVLPKSHTNDALAIAQGKQGFNVGYLPGIVQINKIYTIRPVRHHNRQLHKATILKGGIRKSNQTEKYVFGYCLFDKVQFNGQDCFIWGRRTTGIFTIKTINGKMIKDGISFKKLKPVEKSTGYLIA

SEQ ID NO: 7727 - protein, 489 aa, unidentified
  source 1..489: note = uncultured beta proteobacterium
VCGSRSSGSRQAIGDVRNGSDSNAGLQHGRGEMFSKHVTAARRVERSNPMSRVFVIAKHGDPLMPCEPARARQLLRKGMAVVHRTFPFVIRLKQRETGDVQPIKLKLDPGSKTTGIALTREAPGKSVALKLIELEHRGRQISDALTSRSSLRRRRRGQLRYRAPRFLNRGNKKNGWLAPSLMHRVHSTMSWVERLRRWVPVSDIASELVRFDMQALENPEVTGVEYQQGTLAGYEVREYLLEKWARKCAYCDATGVPLQIEHIVARARGGTDRISNLTLACGCCNQRKGASSIQEYLAKDQSRLKKILASAKAPLKDAAAVNATRWRLANELKTTGLRIELASGGRTKFNRTQFGVPKSHALDAMCVGNVVGVERWNQPTLLARSTGRGGYQRAITDAYGFPKAHKTRTKMQFGFQTGDMVRALIPRGKYTGVHTGRVSVRATGKFDLKSDSRPRFGVGHKHCTIVQRADGYSYSWKPTPTADQKGTTA

SEQ ID NO: 7728 - protein, 493 aa, unidentified
MAAVYVISASGKPLMPTTRCGHIRGLLNAGKARVVEREPFTIQLKYETPDVTQPLYLGIDPGRTNVGSAVVREDGECVFTAQLTTRNKDVPKLMKARKQFRMAHRRLKRRCKRQRRAKAAETLSQKGEFQRLLPGYEEPILCKGIRNKEARFNNRQRPAGWLTPTANHLLLTHLNMVKKLQKLLPITDVVLEVNRFAFMAMENPSIRRWQYQQGPLYGKGSVEDAVYAQQDGHCLFCGKPIAHYHHVVPQHKNGSETLENRVGLCNEHHDLVHKDRAWDAKMKETKAGLNKKYHALSVLNQIIPALTEQLTAMFPQHAFVTTGKDTADFREDYGIAKEHHLDAYCIACSVLAEPTKVAAPTGRPHRLMQFRRHDRQVCHKENIKRVYLSEGKAVATNRHKAIEQKDDSLEEFRKTHTQQEVSALTVKDHQPVYKDMRRFMPGGVFLFNGKVHTLQRSHGRYKGMPFYYIDTDGSKNHAKGCIFLQQNCGLRWV

SEQ ID NO: 7729 - protein, 431 aa, unidentified
MPDKVYVISRLGHPLMPCSPAKARHLLDDKKAKVVKRMPFTIRLLYGSTKYIQPIILGVDAGSKTIGLSASTAKEEVFAAEVMPRNDVVENLSTRREFRRARRNRTSRYRKPRSDNRVRSNHERWLAPSVKVKIQEHITSIKRVCTILPISKVVIETAEFDLQLLKAIQEGKPIPEGEDYQKGEMYGSYNVCQYVLWRDNYTCICCGVRGTPKNPVRLHVHHFESRKYGGNAPDNHGTLCDDCHKKFHLGIITDVKLKTRRRQSTRDAAFMGIMRKTLMWRLRTELFIPVAETKGYITKATREKLLVLPKSHTRDALAIAQGRHGFGIKEYAYVEPANHIYTVRPVRHHNRQLHKASILKGGIRKRNQASKYVFGFRLYDKVLYQGKACFVWGRRTSGTFLLRTIDGIKVKDGVSYRNLTLLERSSNYLIA

SEQ ID NO: 7730 - protein, 351 aa, unidentified
VFAAELTHRGQEIKKRLAHRRASRRSRRQRHTRYRKPRFDNRRNKKKGWIAPSLESRVCNVITWVKRFLRICPLAALSQELVTFDMQQLENPDIAGAEYQQGTLQGYEVREYLLEKWNRMCAYCGQRDVPLQVEHICPRAKHGSNRISNLTLACELCNTKKGTQEIQVFLARQPEVLKRIMAQAKAPLRDAAAVNVTRWALSERLSVLGVPLERGTGGRTKYNRVTRGLEKAHWLDAACVGASTPDHLSIRGIVPLLITANGHGCRQMCLMDKHGFPRTGPKQAKVVKGFQTGDMVKAVVTKGVNIGTYVGRVAVRATGSFNITIKQGKTVQGINHRSCAALHKCDGYSYR

SEQ ID NO: 7731 - protein, 442 aa, unidentified; identical to SEQ ID NO: 2903

SEQ ID NO: 7732 - protein, 512 aa, unidentified; identical to SEQ ID NO: 4031

SEQ ID NO: 7733 - protein, 415 aa, Bacillus sp.; identical to SEQ ID NO: 2431

SEQ ID NO: 7734 - protein, 460 aa, unidentified
MSYIAFVIANDNSRLMPTRNPKKVRRLLKEKKAIIYSYEPFTIKLLYKSEKCTQDIELCVDIGYNHQGMSIKSRKQEFVSEERTFLLDEKDKHQEQLKIRRARRNRLRYRKPRFDNRAIPKGWIAPSLRHKKEAGINVILKYCEVLPITSITLEVGNFDTHAIKKYLENGEILEGIDYQHGDTYGYDSLREAIFSRDNYTCAICKKGIKDNVILRMHHINYYNKDRSNRPGNLLTVCTNCHNSKNHGIDGALWGLKPKTDSLRDAAYMNIVKYSFKEDLEKSLKKLNLETPINITYGAVTKRQRLKLNIPKTHANDAYCMGSFRPKYKIKTRYFKKIRRNNRKLEKFYDSKVLDTRTNEYMKGNELSCNRTNRSVPRNNPLNERIYRGPKKSKGKRVIRKTHYKYKSGDIVNIKGMKGHYLCKGINNLGKTAKILVDNKYIYPSTSKLSIHKYSNGWIET

SEQ ID NO: 7735 - protein, 411 aa, Clostridium sp.
MEYSFVIDKNNKPLAPTKVNKAWYLIRKGRATLKSKYPMVIQLKKEIEAGEDNDETHIMCGIDDGSVHVGIAIVQKCSTKNKVIFKGTIEQRQDVKHLLDVRRGYRKYHRQHKRYRKPRFNNRSASKRKGRIAPSIKQKKDAIIRTIVWLNRWINISAYCLEDVAIDIRAMTDGYKPYKWQYQKSNRLDENLRKATILRDKCKCQECGKSNCLLEVHHIRAKRYGGANTIGNLITLCGSCHQKTEGKEQSYEEIYFKKINSSPVRLDYAMHVMQGKTYLREQILQLGFLHLTTGGDTANKRILWDIEKSHSNDAICITGCKPDNCNIKEWTIKPMRRKSKAKTDNVLGIKHRDLVSYTYKNGETHTGYVTALYPELNALNFQSDTKHCKKVNARKCKLLWKYNKIYWLECA

SEQ ID NO: 7736 - protein, 416 aa, unidentified
MVYVLDKNGQPLMPTDRHRKVRLMLQSGQAKVIKRCPFTIQLNYDSGHQTQEISLGIDAGSKHIGVSATTKIKVLYEADVELRNDIVDLLSSRRELRRGRRNRKNRYRQAKFNNRRRGNGWLAPSIRQKIGTHLTVVENICKILPISRIMVETASFDIQKIKNPDIQGAEYQQGDQLGFWNVREYVLFRDGHTCQCCKGKSKDKILNVHHIESRKTGGNAPNNLITLCETCHTGYHKDTVQLPKAIKRGMRFKDAAFMGIMRWAFYEALKQQYEPVGTPVHNTYGYITKHTRIEHNLPKEHYVDARCISGNPDAFPNGEYYYQKKVRCHNRQIHKLTILKGGIRKQNQATYLVKGYRLFDKVSYQGKGYFVFGRRQSGFFDIRTLSGEKVNKGSLSCKKLKFIATRTYYLTERRAV

SEQ ID NO: 7737 - protein, 430 aa, unidentified
  source 1..430: note = uncultured bacterium
MQVVYVLNKDGLPLMPTHKLGKVRHLLKDGKAKIVKRNPFTIQLNYECGNYIQPITLGVDAGSKHIGLSASTEKEELYSSDVELRKDIVDLLSTRRQNRRTRRNHLRYRPARFDNRKKEDSWLAPSIRQKIDSHLKVIEDVHKILPITNIIVEVASFDTQLLKAEAEGKTISGTDYQKGEMLGYNTREYVLFRDNHTCQHCHGKSKDKVLEVHHLESRKTGSNAPNNLITLCKTCHEAYHKGKIELKQKRGAKYNDAAFIGIMRWAFYNKLKEIYPNVSLTYGYITKYNRINLGLEKEHYNDAYCIAGNFNAKPLNTFIYQKKVRCHNRQIHKSNLLKGGVKKRNQAPYLVKGFRLFDKVKYQNTECFIFGRRSSGYFDIRKLDGTKIHSFINYKKLELLNARENFIKEERSRQFLSRPLKEGEVSLPTC

SEQ ID NO: 7738 - protein, 434 aa, unidentified
MTYFRVEILSERMFCVVYVLTIDGKPLMPCSSVIARLLLKQGKAKVRRRTPFTIQLLYKTKTEYTQPLTHGLDSGSAKVGSAVSDEKGNVLYMSQMEIRNDITEKMKQRSKYRRNRRNRKTCYRKARWLNRKNSTKKDRFSPTMTSKINSHLKEMKFVESILPITRQIVETATFDPHALKNPAVLTNKWLYQKGMNYGYANTKAYMLTRDGYRCQHCKGKSKDKRLEVHHIIFRSMGGSDEESNLITLCKTCHDALHRGEIELKKRGKKKGQLNHATQMNSIRMQLLKRTHAEETFGFVTKEHRQFMELPKEHYFDAVTIATEGKGARFQTNQVLFKRCVSDGDYQQTKGVRSEQVIPTGKLFGFRKFDKVQYKGKEYFIKGRMSSGYAILMDTEGNKVDLKPIPKFSKMERVSARKSWMAIQKNIPIYYSCAT

SEQ ID NO: 7739 - protein, 430 aa, Anabaena sp.
MSNFVFTVDTNKQPLNPVHPGQARRLLNLQQAAVYRRYPFTIILKYAVPNPEIQTHQLKIDPGSKTTGLAILQSNKVLWGAELTHRGQQIKNNLESRRAIRRNRRNRKTRYRKPRFLNRTRKPGWLPPSLESRVKNILTWVKRITRYVPITGISQELVKFNLQSMQNPEISGKEYQQGELTGYEIKEYLLEKWDRKCAYCGVENVPLEVDHIHPKSKGGSDRISNLTIACHRCNQAKSNKHVKDFLAKKPDVLFRILRQAKQPLKDAAAVNSTRWVLFNTLKQTGLPVEIASSSRTKYNRIHLNLPKTHWLDAACVGLVEKLQVLTSQPLLIAAKGWGSRQMCTPNKYGFPIKHKTRCKTFFGFQTGDMVRAILPSGKFAGIHVGRLTVRESGVFEMRTAKGKVSPVRYKYCKSIQRNDGYMYAFSINVR

SEQ ID NO: 7740 - protein, 458 aa, Tolypothrix sp.; identical to SEQ ID NO: 2937

SEQ ID NO: 7741 - protein, 427 aa, unidentified
FAAVIETRNKEIKKLMADRKKSRQASRRGERKARQRLAKRYGSMVKSGMIIRKLPMYAADKFVTCKFIRNTQARFCNRKRCPDWITPTVQHLVQTHLNIIRKISRYLPVTDIAFEVNRFAFMHMENPEAMGVDFQNGPLKGYGDVKEAIRTQQHGKCLMCKKPIAHFHHIVPRSRGGSDTIQNLAGLCPECHTKVHTDTAFRKDFDEKKSGQLKKYGALSALNQAVPFICKKLLEEYGEEHVHFCRGLDTSLIRTALGFEKTKKNQMHEVDAYCIGLAALEVNEVETPAFDHTFQIRQFRRQDRSIIHHQTGRSYYQGKEKVAQNRKPGFEQKTTALSQWYEEQVRIHGEKEAEKLRSQLWVEKSCRHYNDMDRFLPGAVFLYEGKRYVLSGRITNGKYLRACGQGMKNFPAAECTFIRHNAGLVFI

SEQ ID NO: 7742 - protein, 532 aa, unidentified
VTTTAVAPADGFPVRGTAEPAGSWGRHYPGASAPGVYIPCKGDIRMVYVLDKDGRPLMPTGKHAYVRILLKTGRAKVACVHPFTIKLNYDTTYNVRPVVLGIDPGRTNIGLCAVTEAGKPLFTAEVRTRNKDIPGLMAARKAFRQAHRKHRRREKRQRRALANGTALKDGRIERRLPSYGKDKTVTCNVIRNKQARFSNRRRPEGWLTPTASQLLRTHLNLVRKVSGFLPVSKVVLELNRFAFMRLDDPSVSGSMFQHGLLYGYDGSVESAVYALQDGKCLLCGAPIGQYHHVRERRRDGSETVRNRVGLCTACHGLVHTDVTARDRLAVLASGMRKKYGALGVLNQIIPHLMEGLSALYDVSATAGWETEEFRELHGIPKDHYLDAYAIACSALENLEVCVPNECYHICQFRRHDRKACEREMYNRNYVLDGKTAARNRHKSMGQKADSLAEYVRKGGRTDCLRVKHIRRAMKDMARHYPGCQIIRNGRAATLMKRAEGSYWFDDGTKSTVRRTDITLNNSGLVFVSNTLA

SEQ ID NO: 7743 - protein, 487 aa, Lactobacillus sp.
MGPSTREKTAARQRLSLDNLVEGYPHELKSDELDAVVRSLYLTNNTHQKEGIMQNRVFVINRQGEPLMPCKQQKCRKLLQAGRAKVVKKEPFTIQLLFGSTGYRQPVSIGVDSGQHHIGLAVTSQDKVLFQGEVSLRQDVHKLLNTRRDYRHGRRARNTRYRPARFLNRAKPTGWLPPSVASKAQHNIHWIQRLQAVLPKAELHIEVGKFDMAKMKQPGITGLGYQQGDLYGYETAKQYVLDRDNYTCQICHGKTKDPKLKIHHIIYRSTGGTNQVSNLLTVCATCHTQANHQPGGKLYALLAKKFQSYRSLKGATFMNILRRRLFKAFPEASFQYGAQTTLDRAKLELPKAHYNDAVTISGIQNIAQQPTAVVIFHQFRKKKRSLHEATARKGRKTPNITSKRNDKNTKFSKGFYLNDYVQLPGGQKGNISGFSGKTTCYVKDGGNHYLTIDPKYKQVNLSKLKVIRHQNNWNVAEIRTAVYTMAG

SEQ ID NO: 7744 - protein, 296 aa, unidentified
INAHLSRIEAVLRLLPVTKITVETASFDLQLLKNPDISGKEYQEGEQLGFWNIREYVLCRDGHVCQHCYGRSKDPVLNVHHLESRRTGGDSPGNLITLCETCHKALHRGEITLKAKRGQSFRAEAFMGIMRWEVLNRLKASHPELEVNNTYGYRTKHARIANDIAKSHCADAFCIAGNLGAERLGEFFFQKQTRRNNRQIHKLSILKGGIRKRNQAPFEVNGFRLFDKVACQGEEGFIFGRRSSGYFDVRKLDGTCISAGISYKKLHLLEKRRTYLTEIRKEEALPPLPEGRGLRA

SEQ ID NO: 7745 - protein, 442 aa, unidentified; identical to SEQ ID NO: 2939

SEQ ID NO: 7746 - protein, 413 aa, unidentified; identical to SEQ ID NO: 3476

SEQ ID NO: 7747 - protein, 413 aa, unidentified; identical to SEQ ID NO: 2636

SEQ ID NO: 7748 - protein, 442 aa, unidentified; identical to SEQ ID NO: 2903

SEQ ID NO: 7749 - protein, 388 aa, unidentified
MSNTNYVFVIDTSKKPLQPCKPSVARRLLNSGKASVWRRFPFTLILKKAVEPVEKSLILKIDPGSKFTGIALLDGFQVIWMLEIQHRGSLISEKLQKRSQRRRARRTKNLRYRKPGNPNKKKPKDWLAPSLMHRVETIMTWVKRLIKFCPVESISMELVRFDTQLIQNPEITGYQYQQGELAGYELREYLLEKWGRQCAYCGQTNTPLEIEHIHPRSKGGSDRVSNLTVACTKCNQLKSNRDVKEFLSGKPELLRRILTQARSPLKDAAAVNSSRWKLFNTLKTTGLRVITSSGGQTKFNRRKHKLPKAHCIDAACVGEVNQLNFHTTQALVAICKGQGGRQKAAVNKYGYPIRYNPLKPIKGWNSGDLALNIETGEVGRVNPRSFIK

SEQ ID NO: 7750 - protein, 428 aa, unidentified; identical to SEQ ID NO: 4440

SEQ ID NO: 7751 - protein, 262 aa, unidentified
LNKEKEKVFIETAEFDLQLLKAIQEGKPIPEGEDYQKGEMYGSYNVRQYVLWRDNYTCICCGVRGTPKNPVRLHVHHFESRKHGGNAPDNHGTLCDDCHKKFHLGIITDVKLKTRRRQSTRDAAFMGIMRKTLMWRLRTELFIPVAETKGYITKATREKLLVLPKSHTRDALAIAQGRHGFGIKEYAYVEPANHIYTVRPVRHHNRQLHKASILKGGIRKRNQASKYVSGFRLYDKVLYQGKECFMWGGEQAEAFFFEQLTV

SEQ ID NO: 7752 - protein, 398 aa, unidentified
  VARIANT 26: note = X can be any naturally occurring amino acid
VLQTTNPFQHWRRITTDRKVEQTEPXKQPITLGVDAGYKHVGLSATTAKEELLASEVELRQDVTGLLSDRLALRRARRNRKTRCRAPRFDNRVRSKHKGWLAPSVENRIRAHLSRIEAVLRLLPVTSVTVETAAFDMQKIKNPEIEGEGYQQGEQLGFWNVREYVLFRDGHVCQACKGRSKDLILNVHHIESRKTGGDAPGNLITLCEACHKAYHAGKLKQFSPRRGASFRAETFMGIMRWTVLNRLRERHPELPVTNAYGYLTKHKRIVAGLPKTHCADAFCIAGVLDAKRRGEYLFQKQTRRHNRQIHKLTILKGGVRKRHQAPYLVHGFRLFDKVLCKGEVGFIFGRRSSGAFDVRRLNGTKISAGISYKKLSLLEKRKMFLTELRKEGRDSSRV

SEQ ID NO: 7753 - protein, 455 aa, unidentified
MQKFEAKFQNVPMDAPQVHSSTSTLLNRDQNLSEVSIVRTSNNLEVDLLQHKGEQGLRVPATAYVLNQRGRPLMPCSERKARVLLQKGEAKVIRNYPFVIQLMKATGEQVQQCFLGIDSGYKYVGFSAITDKKEIVCGTFTLDGKTSERLTERRMHRKNRRNRLWYRKPRFNNRMRKVGWLPPSIQRKFNTHITLINILKKLLPTERVTIEVGNFDIQRIENPDIKGIQYQQGSLFEHQNMRSFLMAREHGKCQLCGKEFSKTNPSHIHHIIPRNKGGTDREKNLALLHKKCHDKLHKKSLYNSLKKNKQYKEATFMSIIRNKFRETIVGCRIVFGNETFVKRQQLRLEKSHSNDAFVIAGGTTQIKTIPNDMGQKHKNNRSLQTVRRRLGICVRRKRYSIQPFDLVTVDNLKYVSRGCSNRGKIVLCSRNNIDYKIYIKRVEDVFHTKSIYNII

SEQ ID NO: 7754 - protein, 414 aa, unidentified; identical to SEQ ID NO: 4252

SEQ ID NO: 7755 - protein, 425 aa, Aphanothece sp.; identical to SEQ ID NO: 6227

SEQ ID NO: 7756 - protein, 422 aa, unidentified; identical to SEQ ID NO: 3922

SEQ ID NO: 7757 - protein, 431 aa, unidentified
MPNKVYVINKHGRPLMPCSPAKARHLLDEGKAKIKKRTPFTIQLVYGSSGYTQEVILGVDAGSKTIGMSASTTKEELLSAEVKPRNDVVDLQSTRREFRRARRNRKTRYRKPRFDNRVRSKHKGWLAPSVEVKIQEHITSIKMVCRILPVSKVVIETAEFDLQLLKAIADGKPVPQGEDYQKGEMYGHYNVRQYVLWRDDYTCQCCGAHATKKKEVWLHVHHLESRKVGGDAPDNQVTLCESCHEKLHKGLITEKDFKKRKRRSTRDATFMGIMRKTLMQRLCSELPIPVVETRGYITKATREKLLVLPKSHTNDALAIAQGKRGFNVGYLPGIIQTDKIYTIRPVRHHNRQLHKAAILKGGIRKSNQVGKYVFGYRLFDKVQFNEQDCFIWGRRTTGIFTIKTINGKMIKDGISFKKLKLAEKSTSYLIA

SEQ ID NO: 7758 - protein, 419 aa, unidentified
MVYVISQDSKPLMPCSNVIARLLLKQGKAKVKRREPFTIKLTCETTNYTQDLTLGVDTGSGTIGTAVSKNNGDIVYMAEVVVRNDITDKMTQRAKYRRNRRNRKTRYRKARWLNRANSIRNDRFSPTMQSKLHSHIKEIEYIKSILPVTEMVFETGQFDTHLMKNPSLINPKVKHWGYQKGTNYGFENTKAFVLNRDNYTCQYCKGKHKDSKLEIHHIVFRSQGGSDEESNLITLCHTCHKDLHSGKINTKLSGKIKGNLKYATQMNSIRKQLFRLYPNAIETFGYVTKANRLHLGVDKEHYYDACTIATQGNAFNVKSNLYKKKCVSDGDFQQTKGIRSEQSIVTDKICGFRKYDKVKYFGREYFIKGRMSTGYAILMNINGEKADFSYLPRGFKTPKLSNCKRITARTSQMVQAVAI

SEQ ID NO: 7759 - protein, 431 aa, Klebsiella sp.; identical to SEQ ID NO: 2435

SEQ ID NO: 7760 - protein, 458 aa, unidentified; identical to SEQ ID NO: 7062

SEQ ID NO: 7761 - protein, 411 aa, Sulfobacillus sp.
MFVYVLNQHGQPLMPCSPRKARVLLKQNKAKVVNRTPFTIQLLYGSSGYKQGISLGVDAGTKHVGLSATTDQRVLYEAEVLLRTDIQELLATRREFRRARRNRKTRYRPSRFNNRKRPEGWLPPSIQNKVDAHVKVIGQVAKLLPITSITVEVAQFDTQLLKHPEISGVAYQQGEQMGFWNVREYVLFRDQHTCQWCHGKSGDKVLNVHHRESRKTGGDSPDNLVTLCETCHRDIHQKGLEDRVKRKTASLRDATQMTILRWFVYNGIKAVYPNAKLTYGYITKNTRIRHGLAKSHTVDARCISGNPNASPSEHFFLIRQVRRQNRQLHKAKIIKGGVRKANKAPRYLFGYQLFDKVQYEGQECFVFGRRSNGSFDLRLLDGTKITAGVSYKKLKLIERASAMLVQIQKTR

SEQ ID NO: 7762 - protein, 456 aa, unidentified; identical to SEQ ID NO: 4017

SEQ ID NO: 7763 - protein, 430 aa, unidentified; identical to SEQ ID NO: 4310

SEQ ID NO: 7764 - protein, 420 aa, unidentified
MQYVYVLNKHGEPLMPCSPGKARLLLKQQKAHVIKRTPFTIKLLYGSTGYKQPITLGVDAGSKHVGLSASTEKRELYREEFTPRNDVVDLLSTRKQNRRSRRNRKTRYRPPRFDNRVHSKHKGWLAPSVEVKIQEHITVIKRICRILPITLVRVETAEFDTQRLKAMLEGKPLPVGTDYQLGEMYDEYNVRQYVLKRDNYTCQCCGAHTTAKKAVKLHVHHLESRKMGGNAPGNLITLCITCHDALHKGKVSLDNKKRGKPMRDAAFMGIMRRTLMSRLREELPITVQGTYGYITKMQREQNDIKKSHVNDARCISKHPLAEPCSVCYRTKAIRHHNRQTHKANFSKGGIRKRSQMPYVVEGYRLWDKVLYKGQECFVSGRRTSGSFTLKKLDGTRISKGVTFKKLRLLEPATNYLIERM

SEQ ID NO: 7765 - protein, 411 aa, unidentified; identical to SEQ ID NO: 6901

SEQ ID NO: 7766 - protein, 410 aa, Finegoldia sp.
MVVYVLNIDNKPLMPTTRFGKVRRLLRNKKANVVKRTPFTIKLLYRTDNNVQDITLGVDSGSKYIGLSASTENKEIFSAEYELRNDIVKKLSSRRECRRTRRNRLRHRKARFNNRVSSKKKGWLAPSIRHKVNSHLKIISDVCSIIPIKKIIVEVASFDMQKIKNPDISGVEYQQGEQLGFWNIREYVLFRDNHTCQHCKGKSKDPILNVHHIESRQTGGNSPNNLITLCESCHNAYHKGKIKLNIKRGKSLKDSAFMGIMRWALYNRLKEIYDDVSLTYGYLTKNKRIENNLPKEHKIDAFCIANNLSAKLSDTTFYFKKVRCHNRQIHKANYLKGGIKKNNQASYLVKGFRLFDRVKYQDKEYFIFGRRSSGQFHIRDLSGNKVNKGSISCKKLEFIEPRKTVLVERR

SEQ ID NO: 7767 - protein, 373 aa, Moorena sp.; identical to SEQ ID NO: 3006

SEQ ID NO: 7768 - protein, 406 aa, unidentified; identical to SEQ ID NO: 6445

SEQ ID NO: 7769 - protein, 442 aa, unidentified; identical to SEQ ID NO: 2637

SEQ ID NO: 7770 - protein, 427 aa, Anabaena sp.
MCKVFVIDNEKRSLNPIHPAQARQLLKRGKAAVFRRFPFTIVVKESYTDATVSPLRLKFDPGAKYTGIALVNDVNGEVVFAAELKHRGFAIRDALTSRRQLRRSRRSRKTRYRQPRFFNRTRPQGWLAPSLQSRVENIKTWVNRLRKVAPITAISQELVKFDTQLIRHPDIQGKEYQQGTLAGFETRQYFLEKWNRECAYCGIKDVPLQIEHIHPKSKGGSNSITNLTLSCEKCNLKKGTQDIKNFLKKDKSRLEKILALTKKSLADAAAVNTTRFALLEVLKSTGLPVEIGSGGLTKFNRTQQGLNKSHWLDACCVGASTPILKIKGIRLLLITANGHGTRQSCRTDKYGFPIRHCSRTKFHFGFQTGDIVKAVVTKGKKIGTYIGRIATRATGSFNISTVQGLIQGISHKYCKTIHKKDGYAYAI

SEQ ID NO: 7771 - protein, 512 aa, unidentified; identical to SEQ ID NO: 3680

SEQ ID NO: 7772 - protein, 427 aa, unidentified; identical to SEQ ID NO: 3216

SEQ ID NO: 7773 - protein, 430 aa, Oscillatoria sp.
MSNFVFVVDTNGQPLNPVPPGQARRLLKLQKAAIYRRYPLTIVLKYTVSAPQIQPHQLKIDPGAKVSGLAIVRDDKVIWGAELTHRGQQIKHDLASRRALRSHRRNRKTRYRQPRFLNRTRKSGWLPPSLESRVENILTWVNRIRRYVPITGISQELVKFDTQAMQNPEISGIQYQQGELAGYEIREYLLEKWGRKCAYCNAQNIPLEIEHIHPRSKGGSSRVSNLTIACRHCNEAKGNQELKDFLAQQPELFDRIAKQAKQPLKDAAAVNSTRWQLFNRLKETSLPVEIGTGGQTKYNRTRLELPKTHWLDAACVGLVSQLKILTAGPLLIQASGWGSRQICQPNKYGFPIRHKTRCKEFFGFKTGDMVQATLPTGKFAGTHRGRLIVRASGVFEMMSPTGKVSPVRHKYCRAIHHNDGYTYTLSTCVQ

SEQ ID NO: 7774 - protein, 420 aa, unidentified; identical to SEQ ID NO: 7764

SEQ ID NO: 7775 - protein, 470 aa, unidentified
MSVFVVGLNGCRLMPVSERKARLLLKGGKASVYRKVPFTIKLNYKTGSTVQPGYLGIDTGSQHIGVSVVRKDGTVLHKEEIGLRDSMSKRKLLESRASSRRGRRYRKTRYRHPKWKPKTKRIYNEKADRKGRHWKKQKNTFTSKRQAGWLPPSLQSKTGHHIQWIRKLLDLLPEGYRLSIELGRFDPARMKDPEIHGELYQKGPQYDYENVRAYVLARDGYTCRVCKKKGGKLHVHHILYRSRGASDNPKYMAAVCSKCHTTENHLPGGILYQWMQDQKKFTRGLRDATFMNILKKRLRKAFPDAVFTYGNITKADREKLELPKSHGNDATAIALVKTEVKSVKDEEPVIHIQQVRRKKRSLHEETPRKGRKEPNRTASRSDKNTKSVTVTKGSGEKKASMTACLFDRVELDGKKGWITGFTGTSCYVKDKEDNYICTSSKYKQVSISRLRILHHCGNWAIGAEKPLGKG

SEQ ID NO: 7776 - protein, 462 aa, unidentified
MSVLVIGSNGRALMPTNPRKARLLLKKKTASVVCRHPFTIQLLYKTGCATQEGCIGIDTGSQHIGVGVTCGDRVILKEEHELRSSMEKRSLLVARAAMRRGRRYRKVRYRKPKWRHHTKCMYFEKPNRRGQHWRKVKTTTQSPRPKGWLPPSLQSKCDHHFRIIDRYLKYLPDSITRNLVIEVGRFDMARMNDPMIHGEMYQRGPMYDAENLRAYIFARDGYQCACCKAKAGTTRKADGTTVKLVAHHILFRSRGATDNPKYMVSVCDHCHTTKAHQPGGILYSWMENNKKVTRGLRDAAFMNILRQRLFARYPQAAFTYGNITATDRKQLRLPKSHANDAVAISLFGKEASAVRDTCQTVHYKQVRKSKRSLHEAIPRKGRKNPNTKAVRNKKNTTQVNGFKLWDSVLADGKKLFICSFTGTSVYLVDKNGCYVSQPGKTYKQWPLSKLKRLHPNGNWLVT

SEQ ID NO: 7777 - protein, 415 aa, unidentified
MENRIEYCFVVDKNNRPLTPTKVNKGWYLVRKSRAKLKSKYPMVIQLEKEVKSDEDDESHIVCGIDDGSAHVGLAIVQKCPTKNKVVFKGAIEQRQDVKHLMDVRRGHRRYHRYHKRYRQARFNNRSSSKRTCRLVPSIKQKKDAILRVLYQLNKWVNIQEYHLEDVCIDIRALTDDYKPYRWQYQKSNRLDENLRKATILRDECRCQECGKSNCVLEVHHIRARKYGGADTIGNLITLCSGCHQKTEGRERDFEDRYFNMIKSKPKRFDYAMHVMQGKTYLREKISELGSLHLTNGGETANKRIEWNMEKSHGNDAICVTDCIPDNCDVKEWIIKPMRRKSKAKTNNLLGIRHRDLVSYTYKNGETHTGYVTALYPEQLVLNFQSKTKHCKKVNARKCRLLWKFNKIYWLEQCV

SEQ ID NO: 7778 - protein, 442 aa, unidentified
MVTVQQSTHHLPFGRVFIRRNLFMVYVISQDGKPLMPCSDPIARLLLKQGKAKVKKREPFTIKLTYETTNHTQGLTLGVDTGSGTIGTAVSKDNGDIVYMSEVVVRNDITDKMTQRAKYRRNRRNRKTRYRKARWLNRSNSIKKDRFSPTMQSKLHSHVREIEYIQSILPVTEMVFETGQFDMQLMKNPSLANPKVRPWGYQKGANYGFENTKAMVLNRDNYTCQCCKGKHKDSKLEVHHIVFRSQGGSDEESNLLTLCHTCHKDLHSGKINPKLSGKLKGNLKYATQMNSIRKQLFRFYPNAIETFGYVTKANRLHLGVDKEHYYDACTIATQGNAFNVKSNLYKKKCVSDGDFQKTKGIRSEQPIVTDKICGFRKFDKVRYFGNDYFIKGRMSTGYAILMDIDGNKIDFSTMPRGYKTPKLSNCKRITARSTVMTQVKVV

SEQ ID NO: 7779 - protein, 417 aa, unidentified
MPCSPAKARLLLKERKAIVKRRTPFTIQLTIATGEAKQPVALGVDSGYKHIGLSATTEKAELYASEVELRQDITDLLSARLALRRSRRSRKTRYRAPRFDNRVASKREGWLAPSVENRIAAHMSRVEAVMQVLPVTAITVETAAFDTQLLKNPDIIGAAYQQGEQLGFWNVREYVLFRDGHVCQHRRGKSKDPILNVHHIESRRTGGDAPNNLITLCETCHKAFHRGEIKLKVRRGKSFKAETFMGIMRRTLFERLKKAHPELNVRNTYGYLTKHKRISYGIAKSHCADAYCIADNLGAKRLEGFFFQKQTRKHNRQIHKLLILKGGLKKKNQAPYEVKGFRLFDKVICKGEEAFIFGRRTSGSFDVRRLDGTRISAGINYKKLRLLEPRTTYLTEFRKEAALPPLHKCRGFCAEFL

SEQ ID NO: 7780 - protein, 499 aa, unidentified; identical to SEQ ID NO: 3843

SEQ ID NO: 7781 - protein, 429 aa, unidentified
MFVYVISKDGQPLMPTTRFGKVRRLLRDKKAKVVRRCPFTIKLLYEPKTSVVQEVILGQDTGSKYVGTACVANDKVSYQSEVTLRDNIKKKMDSRRGSRRNRKQRKTRYRKPRFLNRANSIKKDRLPPSVRHKVQAHVDEIEFCKKILPVSELVFETGKFDTQLMEKPWLQKYKWAYQKGVNYGFANARAHALDRDNYTCQCCGKKHVRLEVHHIIFRSLGGSDELDNLITLCEKCHIDIHAGKITLNLKGKRKRNLKHATQMSIIRSQLLKLYPDAIETFGYVTKANSENLGLSKEHCLDACVIASSGKEFEQSNWLFKKRRVARQNRQLCKGTHGETKLPTGKILGFRKCDKVKYLNEICFIKSRRSSGYFTLMDIDNTILDFRDRGGRKSPSYKLLERLNLQRSTLCIGQRIQRGERGNSCTKLKI

SEQ ID NO: 7782 - protein, 430 aa, unidentified; identical to SEQ ID NO: 4817

SEQ ID NO: 7783 - protein, 442 aa, unidentified; identical to SEQ ID NO: 2834

SEQ ID NO: 7784 - protein, 414 aa, Tolypothrix sp.
MSNFVLVLDTNKRPLDPVHPGTARKILTDKKASVFRRHPFTIILKDAFPSIAVKPIKIKLDPGSKTTGIALVQEGKVIFGAELQHRGQAIKGELETRKAVRRSRRNRHTRYRKPRFLNRVRRSGWLAPSLEHRVKTTMTWVNKLIRFAPIAEIFQELVRFDLQQLENPEISGIEYQQGELQGYEVREYLLEKWSRKCAYCNVENVPLQIEHIKPRASSGTNRISNLCLACEKCNIKKGTQDVALFLAKKPEVLKRVLSQAKCPLKDAAAVNSTRWTLFNALKETRLPVIVASGGKTKFNRRKLELPKTHWIDAACVGDCLSLKILTAKPLLIKSTGKGTRRLCRVNKLGFPCSKPRTTYTHGWNTGDIALCKGVVGRVVVQSSTRLEVRVDGKRIGGKLSDFRKLHNKDSYSYA

SEQ ID NO: 7785 - protein, 416 aa, unidentified
MTNCENYAFVLDAEGKQLSPTKEKKAWYLIRKKRAILVSKYPMVIQLNKIVSNDNICKDEIRCGIDDGGLHVGIALVQKCQTKNKTLFKGTIEQRNDVKHLMKVRWDYRRYRRYHKRYRPKRINNRSSSKRTDRIAPSILQKRQATLRVITQLNKWINITSYWLEDVAIDVRVLTDGFSSYGWQYQKSNRLDENIRKAVILRDGCRCMECGQSNCRLEVHHIKPRRLNGSNTLGNLITLCESCHQKTEGKEEQYMQHYFNILESSDNKNLNYASYVMIGKTWLRKQLSQLGVLNLTTGGNTANKRIDWNIEKSHSNDAVCITDLQPDSCNVKDWIIKPMRRQSKAKTDNVLGIKHRDLVSYVYKNGELHTGYVTALYPELNALNFQSPTKHCKKVNVRKCRVLWKYNKIYWLDSVS

SEQ ID NO: 7786 - protein, 442 aa, unidentified
MSTSVFVLDKKPRPLMPCRPARARRLLRAGRARVVKRFPFVIRLVDRTVEQSEVQPVLIKLDPGSRETGAAVVRDDEKKRHHALAFFVIKHRGGAIRDALKARSAFRRRRRSQNFRCRSPRFLNRVKPKGWLPPSLRHRVETTLSFVRRMCRYLPVSGIATELVKFDSQKLQNPEVSGVKYQQGTLFEYEVREYLLEKFGRKCVYCGAEGVPLNIDHVVPRAKGGSNRVSNLVLACVSCNQKKGARSLEDFLKGKPEVLARVRRELKTPLRDAAAVNATRWVLFNELKATGLPVETGSGALTKLNRHAFGVEKEHWLDALCVGRLNGVVTRKGLNVLEIRCMGRGSRQRTRLTKYGFPRGYLMRQKCVHGFATGDMVETNVPKGKKAGLWRGRVAVRVSGSFNIQTPKGVIQGVGWKHCRLISHNDGYGYAWLGHAPHSSPA

SEQ ID NO: 7787 - protein, 509 aa, unidentified; identical to SEQ ID NO: 7126

SEQ ID NO: 7788 - protein, 455 aa, unidentified
MVFVLDRHHKPLMPCHPARARRLLGKGRARIHKLYPFTIRLVDRELKDSTVQPVVLKLDPGSKETGMALVREDETKTHHALYFVNLKHRGSEIKQSLLQRSSFRRSRRSRNLHYRAPRFLNRTRPQGWLAPSLQHRVDTTLSWVERLRKLAPVATLEMELVKFDTQKMQNPEIDGVAYQQGELAGFEVREYLLEKFGRKCIYCGAEGVPLNIDHIVPKSAGGSNRVSNLVLACVDCNQKKNNLPFEVFLKGDKAKINRIRSQLKTPLKDAASVNTTRWQLFEALKLTGLSLTTATGARTKYNRHQFGVPKEHWLDALCVGETAAVRGWQPLGVLVVKCTGRGAYKRTRLTKDGFPRGYLTRTKRFFGFGTGDMVVATVFAGKKKGSYKGRVAVRKSGSFAIQTASRKVDGISYRYCRLLSRADGYGYSWHSSKSLINSTKETALLPRINTQVSAP

SEQ ID NO: 7789 - protein, 430 aa, Clostridium sp.; identical to SEQ ID NO: 3788

SEQ ID NO: 7790 - protein, 424 aa, Mastigocoleus sp.; identical to SEQ ID NO: 6040

SEQ ID NO: 7791 - protein, 433 aa, unidentified
MRIGPRAEQAEPAGIRKGDTLKVFVLNMRGKPLMPCSPAKARHMLKAGKAFVVRRTPFTIKLTIATGETKQDVTLGVDAGARHVGISATTEKEEVFASEVALRQDITGLLADRLAFRRARRNRKTRYRAPHFNNRVRSKHKGWLAPSVENRIQAHISRIEAVCRLLPVTKIVIETASFDIQKIRNPEVEGTGYQQGDQLGFWNVREYVLFRDGHICQHCRGRSKDPILNVHHLESRKTGGDAPNNLITLCETCHKAYHAGKIKLKVKRGQSFRAEAFMGIMRWTLLDRVRKTHPKLPVENTYGYLTKHKRIALGLPKTHCADAFCITGNLNALRRGDFLFQRQTRKHNRQIHKCSILKGGVRKLNQAPFLVKGFRLFDKVRIGGQIGFVFGRRVRGLFNIRRLDKTVIGTDINCKKLSLLETRKTFLTELRKE

SEQ ID NO: 7792 - protein, 414 aa, unidentified; identical to SEQ ID NO: 6579

SEQ ID NO: 7793 - protein, 413 aa, unidentified; identical to SEQ ID NO: 7120

SEQ ID NO: 7794 - protein, 459 aa, Leptospirillum sp.
MSVFVLDKRKTPLMPCSEKRARLLLERKKAVVHRMAPFTIRLKERIGGEVQPVRIKLDPGSKTTGLALVREEILVSPETGETEKTAHVLGLVELEHRGGKIRDRLAARRAFRRRRRSNLRHRTPRFDNRTKPEGWLAPSLQHRVDTTVAWVNRFRKLVPVAALSQELVRFDMQKMENPETSGALYQQGTLAGYEVREYLLEKWGRSCAYCGAENAPLEVDHIHPRSRGGSDRISNLTLACRPCNERKGSNPVETFLARRPEVLARVLSRAKAPLRDASAVNATRWALFRSLTQTGLPVEQASGGRTKWNRTRFGLPKSHCLDAACVGKVDRIEGGNRPVLSIKATGRGSYQRTRLDSFGFPRGILTRKKAHFGFATGDLVRAVVTTGKKIGTYVGRVAVRASGSFNLQAGSGLVQGISHKVCRLLQRADGYGYSLATSNRKESAFLPGINAGVSIARRG

SEQ ID NO: 7795 - protein, 414 aa, unidentified
MPCSPAKARLLLKEKKAIVVRRTPFTIQLTIATGEAKQPVSLGVDAGYKHVGLSASTEKAELYASEVELRQDVSDLLSARRALRQSRRSRNTRYRAPRFDNRIRTKRKGWLAPTVENRINVHLSRIETVLRLLPVTKITVETASFDTQLLKNPDIAGKEYQEGEQLGFWNVREYVLFRDGHVCQYCHGRSKDPVLNVHHLESRRTGGDSPGNLITLCETCHKALHRGEIKLRAKRGQSFRAETFMGIMRWEVLNRLKASHSKLEVNNTYGYLTKHARIKSGITKSHCSDAFCIAGNLGAKRLGEFLFQKQTRRNNRQIHKLSILKGGIRKRNQAPFEIKGFRLFDKVACKGEEGFIFGRRSSGSFDVRRLDGTRISAGISYKKLRLLQKRQTYLTEIRKEEALPPLPEGRDLRA

SEQ ID NO: 7796 - protein, 456 aa, unidentified
MSTCVCVLSNSGERLMPTFRLGKVRRLLKDGKAKIVKHHPFTIQLLYDSKTNTQPIEICEDVGYNYIGISVKSESHEYVSAQYDTLQDEKKHHDDCRKYRRTRRNRLRYRKPRFDNRKRSEGWLAPSLEHKKQLNIRLIERYVSVIPITRATVEVGSFDTMLLQAIQKGESKPEGVDYQKGPRYNLATLREAVFYRDNYTCQVCGRKIADGAILHMHHMFYWKGRHGYQLDELVTACEKCHTPANHQKGGKLFGFGEDKEFANLSGAAFMNAVRWQIVNALYATYGKEFVTITYGAMTKEKRIILGIEKTHNNDAYAMGDYHLAHRCVFRHYQKRRRNNRVLEKFYDATYIDARTGNKAKGKELFNGRINRNHKKDSENFHKYRSKKVSKGRRSIRRQRYAIQPYDTVRLEGKTYITSGCHNKGTRLLIPANGKSKSVAISKVQVVCHAGAWIQII

SEQ ID NO: 7797 - protein, 414 aa, unidentified; identical to SEQ ID NO: 2588

SEQ ID NO: 7798 - protein, 406 aa, unidentified
MVYVQDIDGKPMMPTTRHGKVRQLLKDKKAVVINTCPFTIKLMYKTSDYKQEIVLGVDAGTKHVGLSATTKSKELYSGEVILRSDIVELLSTRRESRRTRRNRLRYRKPRFNNRIKSKRLGWVAPSVRHRIDAHIRVIDNICSILPVSRVIVEVAQFDTQKIKNPDISGDEYQEGDQLGFWNVREYILARDGHKCQHCKGKSKDHILNVHHIESRKTGGDSPSNLITLCETCHKEYHKGNIDLKVKRGRSLRDAAVMGIMKWKLYEELKSRYPNVSMTFGYITKYNRIKYGIEKSHTSDAFVISRNFNAKRIERQYLKRLIRRHNRQIHKMKILKGGKKKNNQAPFEIFRFRLFDKVLYNNEILFVYGRRKSGNFNIRDFNGENPKDVSHKKLKLIRGKRHLIILK

SEQ ID NO: 7799 - protein, 414 aa, unidentified
MPCSPAKARLLLKEKKAIVVRRTPFTIQLTIATGETKQPVSLGVDAGYKHVGLSASTEKAELYASEVELRQDITDLLSARRALRQSRRNRKTRYRAPRFDNRIRTKRKGWLAPSVENRINAHLSRIEAVLRLLPITKITVETASFDTQLPKNPDIAGKEYQEGEQLAFWNVREYVLFRDGHVCQHCHGRSKDPVLNVHHLESRRTGGDSPGNLITLCETCHKALHRGEIKLSAKRGQSLRAEAFMGIMRWEVLNRLKLSHPELEVNNTYGYRTKHARIANGIAKSHCADAFCIAGNLGAKRLGEFFFQKQTRRNNRQIHKFSILKDGIRKRNQAPFEVNGFRLFDKVACKGEEGFIFGRRSSGYFDVRKLDGTCISAGISYKKLHLLEKRRTYLTEIRKEKALPPLPGGSGLRA

SEQ ID NO: 7800 - protein, 493 aa, unidentified; identical to SEQ ID NO: 2644

SEQ ID NO: 7801 - protein, 406 aa, unidentified; identical to SEQ ID NO: 6031

SEQ ID NO: 7802 - protein, 420 aa, unidentified; identical to SEQ ID NO: 4588

SEQ ID NO: 7803 - protein, 507 aa, unidentified
MSEYIYVLGMDGDPQMPTKRKRHVEKMLQTGRARVFRQVPFTIQLTYKNQPVLQPVTIAEDPGRSNIGMAVVSLSGELLSAAVVQTRNKEIVKLMEKRKQHRRASRNGERKARQRLAKKCHTMIKAGSLMRKLPMYGQDKRVQCNVIRNTEARFCNRKREDGWLTPSAEHLVRTHINLIHKMQKFLPITDVAIEVNRFAFLSLEDPSISGVDFQNGPLKGYDDLNAAVEDLQDGHCLMCNSPIEHRHHIVPRSMQGSNTIGNIAGLCCKCHERIHKDARFEDHLKKKKAGLNKRYAAVSVLNQAIPFICKRLEQEFGKEHVHYCSGRDTSMVRRSLGYHKTKEEQLHEVDVWCIAVLALRQIPEKAPEFDHVHEILQFRRQDRSIIDAQTSRMYYHEGKKVAKNRKKAEGQKDDSLQEWRERQVERYGKEQTRKMISQLEIKKSSRRYNRLDRLMPGAVFYYQGVRYVMRGQHSNRQYLQAVGMGSKDFPAKKCKIVVHNEGLVFVS

SEQ ID NO: 7804 - protein, 431 aa, unidentified
MPNKVYVINKHGRPLMPCSPAKARHLLDEGKAKIKKRTPFTIQLVYGSSGYTQEVILGVDAGSKTIGLSASAETEELLSAEVKPRNDVVDLLSTRREFRRARRNRKTRYRKPRFDNRVRSKHKGWLAPSVEVKIQEHITSIKRVCRILPVSKVVVETAEFDLQLLKAIADGKPVPQGEDYQKGEMYGHYNVRQYVLWRDNYTCQCCGTHPSKKKEVRLHVHHLESRKVGGDAPDNQVTLCESCHEKLHKGLIAEKDFKKRKRRSTRDATFMGIMRKTLMQRLCSELPIPVVKTRGYITKATREKLLVLPKSHTNDALAIAQGKRGFNVGYLPEIAQIDKIYTIRPVRHHNRQLHKATILKGGIRKSNQTEKYVFGYRLFDKVQFNGQDCFIWGRRTTGIFTIKTINGKMIKDGISFKKLKLVEKSTSYLIA

SEQ ID NO: 7805 - protein, 411 aa, unidentified; identical to SEQ ID NO: 3917

SEQ ID NO: 7806 - protein, 465 aa, unidentified
MSTCVCVLSNSGERLMPTFRLGKVRRLLKDGKAKIVKHHPFTIQLLYDSKTNTQPIEICEDVGYNYIGISVKSEFHEYVSVQYDTLQDEKDCHDGCRRVRRSRRNRLRYRQARFDNRKRDDGWLAPSFEHKKELNVNVIKMYCKVMPITHAIVEVGSFDTMLVKAIEEGKATPESADYQKGPRYKLATLREAVFYRDNYTCQVCGRKANEGAILHVHHMFYWKGRHGNSLSELITVCEKCHTPANHQKGGKLYGFGEDIKFANLSGAAFMNTVRWQIVNVLYAAFGKPFVTFTYGAMTKEKRIALHLEKSHNNDAYAMGSFHPVNRCAFEHYEKVKRNNRILEKFYDSQYIDTRTGELTNGKSLFNGRISRSHKKDSENLHKYRGKRICKGHRALRRKKVALNPGDLVSLNGEILVVHGTHTKKNGSVNVEFKTPSRGGKKSASFKKLKIVKTTDSMHSAWEKMS

SEQ ID NO: 7807 - protein, 544 aa, unidentified
MKQKKQKVMVYILNKKGKPLMPTTRCGHVRKLLDSKKAVVVNSNPFTIRLKYDTPNGVQDVFAGIDSGRENIGSGASNEDGDCLYLGELKTSNKSIKLKMTERAGFRKERRRHDRQNKQRKARKDHTEIQNGNADICRTTISCKSVQISYPAAEKSVTHKIIRGKEGKFANRHRDEGWITPSARQLVQMHMNDLKSICKILPISHVTLERVAFDFQKLENENIKAWEYGKGKLYGYDSPEEYIHDVQDGKCLVCGKPHIDYLHHIIPRSKGGSDKVSNLAGLCYDCHYGPIGVHNCQDTQDRLPELKNEVNKQYKVSLLNSVMPVLIEEMDKFCKANSIIFSICEGHDTAKVRDMYDLQKDHCLDGFAISLVGRNVKSVDVMPDRIHQKQRYKKKSKNIIQKRNYREYYDGKKLVAVNRHKGTDQKADSLEEYMNTYAETHTADECKKHFDSLTVKPARRTYTFHKEGRICPLHIGDKVRYEKKNKIKGNTKVETFICESIHFYKDENKAKVEHNKTKSKRMKFCRVLEAGCTPYIDYRKLALM

SEQ ID NO: 7808 - protein, 442 aa, Lactobacillus sp.; identical to SEQ ID NO: 3226

SEQ ID NO: 7809 - protein, 419 aa, Vibrio sp.
MFVFVLNKNGKALMPCKPQKARVLLKRGDVKVIKRTPFTIKLVGGSSGYKQKLVAGMDTGSKTIGYAVVGLGQVIYQSQVALRQDVSKKMEQRAMYRRNRRGRKCRYRPARWANRASMRANGRLAPSLKSKLDSHLRERDFVESILPISEWKVETASFDIHKITNPDVVGVDYQKGAQKGFYNTKAYVLHRDGYKCKSGRKGKHSNKLHVHHIVFRSNGGTDTPTNLITLCETCHRDLHAGKFELKVRKSRTKHATEMGILKSRLKSVWLFTETFGYETKFKREQVLKLTKEHYFDAVAICLEDGELITQNETVYFKRHVSKGDYQLTKGARSEKQIPVGKLFGLKKHDLISTPQGTGFVKGKRSTGYFALETITGEKIHASANVKKNTVRLSARTTTLIQQMEAAFPPAAKATGILAA

SEQ ID NO: 7810 - protein, 458 aa, Desulfobacter sp.; identical to SEQ ID NO: 4473

SEQ ID NO: 7811 - protein, 456 aa, Halomonas sp.
MAIFVLDKKKQPLMPCSEKRARLLLQRGRAVVHKRYPFTIRLKDRVGGSTQPLSLGIDPGSKTTGLALIREPDSQQRHVLCLFELIHRGYQIKKALQQRAAFRRRRRSANLRYRAPRFNNRTKPKGWLAPSLQYRVDTVTAWVNRLNRLAPVTAISQELVRFDTQKLDNPEINGVEYQQGTLLGYEVREYLLEKWGRECAYCGTADTPLEIEHVIPRSRGGSNRVSNLTLSCHPCNQSKDALSLVDFFATDKGLKKRLKANGHTANARLERVQRQLKQPLRDASAINATRWALFNALKATSLPVAVGTGGRTKYNRQRLGIPKTHALDAACVGAFDALHAWQVPTLTIKAMGRGSYQRTRLTKHGFPRGYLMRQKQVHGFQTGDMVRAMVPTGKKAGTHTGRVAVRKTGSFNIQTEQGAVQGISHKYCTLIQRGDGYGYHFTPFTHLTGGAGQAVA

SEQ ID NO: 7812 - protein, 286 aa, unidentified
VLRLLPITKITVETASFDMQRLKNPDISGKEYQEGEQLGFWNVREYVLFRDGHVCRHCHGRSKDPVLNVHHLESRRTGSDSPDNLITLCETCYKALHRGEITLKAKRGQSFRAQAFMGIMRREVLNRLKASYPELKVHETYGYLTKHARIANGIVKSHGADAFCIAGNLGAERLGEFFFQKQTRRNNRQIHKLSILKGGIRKRNQAPFEAKGFRLFDKVACQGEEGFIFGRRSSGSFDVRKLDGTRISAGISCKKLRLLEKRRTYLTEIRKEEALPPLPEGRGLRA

SEQ ID NO: 7813 - protein, 416 aa, unidentified
MVYVLDKNGQPLMPTDRHRKVRLMLQSGQAKVIKRCPFTIQLNYDSGHQTQEISLGIDAGSKHIGVSATTKIKVLYEADVELRNDIVNLLSSRRERRRGRRNRKIRYRQAKFNNRRRGNGWLAPSIRQKIGTHLIVVENICKILPISRIMVETASFDIQKIKNPDIQGAEYQQGDQLGFWNIREYVLFRDNHTCQCCKGKSKDKILNVHHIGSRKTGGNAPNNLITLCETCHTGYHKGTVQLPKAIKRGMRFKDAAFMGIMRWAFYEALKQQYEPVGTPVHDTYGYITKHTRIAYNLPKEHYVDARCISGNPEASSNGEYYYQKKVRCHNRQIHKLTVLKGGIRKQNQATYLVKGYRLFDKVSYQGKGYFVFGRRQSGFFDIRTLSGEKVNKGSLSCKKLKFIATRTYYLTERRAV

SEQ ID NO: 7814 - protein, 270 aa, unidentified
LSIKTLINIGKGVIYSSICTGLSLQTYQKRKEVPYMVYVLDIDGQPLMPTTRHGKVRRLLNSHLAKVVKRCPFTIQLLYQSTKETQPVSLGVDAGSKHIGMAATTEKKVVYQEELSPRNDVVKLLSARRTLRRTRRNRKTRYRKPRFNNRVHSKHKGWLAPSVEVKIQEHITATKRICQILPIFDIHVETAEFDLQRLKAMDEGSPLPVGIDYQLGEQYDFYNTRQYVLHRDGYTCQCCGTHDNNIKLHMHHIESRQTGGDAPNNLITLC

SEQ ID NO: 7815 - protein, 458 aa, Lactobacillus sp.
LKGVGMMSEIKKVDYIYVVDSKGTPLMPTSRLGMVRRWLKTGQAKWFGNSRNTIQFVRPVTTNTQELTLGVDAGFHLGLSVVGNNRECYVSESLRKSEKDRITSRRESRRTRRNRLRYRKARFDNRRRKDGWLAPSIQHRLDFTIKEIKRLYMFLPITNLVVEVTPFDNQKLLNPDIQGWQYQKGKMYGFKTIKDYLLARDNYRDALDGKQYPASQLRVHHLVQRKDGGSNQPDNLVLLSDINHNQANHNNGILAKLKENRQKTIDYRGAYFMSVLATRLSNYFDNYTITQGYLTANLRQKYEIEKSHLNDAFVIAGGTDTTLRTNNVYSRQKLRNNNRVLQKFYDAKYIDSRDGKQKAGKELSSGRTRRSQELNYDNLRQFRKEKVKKGRVSIRRGHYQLRPHDVVLNTRTNRIETVKGVQNSGTVIKFQTGKTCSIKSVVSLYHVNGILEKKMENV

SEQ ID NO: 7816 - protein, 456 aa, unidentified
MSTCVCVLSNNGERLMPTIRLGKVRHLLKDGKAKIIKHHPFTIQLLYDSKTNTQPIEICEDVGYNYIGISVKSESHEYVSAQYDTLQDEKEHHDDCRKYRRTRRNRLRYRKPRFDNRKRSEGWLAPSLEHKKQLNIRLIERYVSVIPITRATVEVGSFDTMLLQAIQKGESKPEGVDYQKGPRYNLATLREAVFYRDDYTCQVCGRKITDGAILHMHHMFYWKGRHGYQLDELVAVCEKCHTPANHQKGGKLYGFGKDKKFANLSGAAFMNAVRWQIVDALHATYGKEFVTITYGAMTKEKRIILGIEKTHNNDAYAMGDYHPAHRCVFRHYQKRRRNNRVLEKFYDATYIDARTGNKAKGKELFNGRINRNHKKDSEDLHKYRSKKVSKGRRSIRRQRYAIQPYDTVRLESKTYITSGCHNKGTRLLIPVNGKSKSVAISKVQVVCHAGAWIQII

SEQ ID NO: 7817 - protein, 431 aa, unidentified
MPNKVYVINKHGRPLMPCSPAKARHLLDEGKAKIKKRTPFTIQLVYGSSGYTQEVILGVDAGSKTIGVSASTKKEELFAANVIPRNDVVDLLSTRREFRRARRNRKTRYRKPRFDNRVRSKHKGWLAPSVEVKIQEHITSIKRACRILPVSKVVVETAEFDLQLLKAIADGKPVPQGEDYQKGEMYGHYNVRQYVLWRDDYTCQCCGAHATKKKEVRLHVHHLESRKVGGDAPDNQVTLCESCHEKLHKGLITEKDFKKRKRRSTRDATFMGIMRKTLMQRLCSELPIPVVETRGYITKATREKLLVLPKSHTNDALAIAQGKRGFNVGYLPGILQIDKIYTIRPVRHHNRQLHKAAILKGGIRKSNQAGKYVFGYRLFDKVQFNGQDCFIWGRRTTGIFTIKTINGKMIKDGISFKKLKLVEKSTSYLIA

SEQ ID NO: 7818 - protein, 431 aa, unidentified; identical to SEQ ID NO: 3401

SEQ ID NO: 7819 - protein, 515 aa, unidentified
MATVYVLNKDSKPLMPMTRCGHVRYLLKEKKARVVRANPFTIKLLYETDDVVQPLYLGIDPGRTNIGVAVAKGDGTAVFTAHLETRNKEIPKLMAKRKEYRQGRRHYRRCKRQRRAAAHGTLSKRCKKQDTAQGSNISERAQKIGVFERNLPGCEKPVLCIGIKNKEARFNNRVRPAGWLTPTANQLLLTHINFVKKICKYLPISDVVLEINKFAFMALDNPNIQKWQYQQGPLYQKGSLENAVSEQQDHHCLFCKKAIEHYHHVVPRSENGSNTIANIVGLCTKHHDLVHKDTAWQKKLAKKKTGLNKKYGALSVLNQIIPALTKELSSRFQGHLYVTTGKSTYDYRAAHGVSKDHWLDAYCIACSVLPDGCFDNTVNSRIPHELRQFRRHDRQVCHQQNAKRKYYLDRKLVAINRHKATEQKTDSLEEYRNNGGATDKLVVKEHKPTSKRLNRILPGALMTANGKLNVMVASKGLHNGIPDYYVFADNSEAKPTKYTLINKNKGIVFVLNSVS

SEQ ID NO: 7820 - protein, 512 aa, unidentified; identical to SEQ ID NO: 2792

SEQ ID NO: 7821 - protein, 518 aa, Erysipelotrichaceae sp.; identical to SEQ ID NO: 7410

SEQ ID NO: 7822 - protein, 242 aa, unidentified
VQLRQSDAGQSFVLCCLSDKKKGRHNHMYVYVINKHGQPVMPCRPRMARVLLQEGKAAVVKQVPFTIRLLYGSSGYKQPVSLGMDAGSRHIGIAVTTGKKVLYAEELSPRNDVVKLLSVRRQNRRTRRSRKTRYRQARFDNRVRSKHKGWLAPSVEVKIQEHISAVLRIQKMLPVSEIHVETAEFDTQRLKALEEGRPVPVGTDYQKGEMYDQYNVRQYVLFRDGYRCQCCGKHGVKASCAS

SEQ ID NO: 7823 - protein, 416 aa, unidentified
MVYVLDQNGQPLMPTSRHGKVRRMLQSGRAKVVNRCPFTIQLNYESGHQTQEISLGIDAGSQHIGVSATTKVKVLYEAEVELRNDIVDLLSSRRELRRGRRTRKTRYRQSRFQNRKKKDGWLAPSIRQKVGTHMAVVEKVCKILPISKVIVETASFDLQKIKNPEIHGMEYQQGDQLGFWNVREYVLCRDHHTCQCCHGKSKDKILNVHHIESRKTGGNAPNNLITLCETCHTGYHQGAVKLPESIKRGMSFKDATFMGIMRWIFYEDLKKKYEPIGMSVSNTYGYITKHTRISHDLPKEHYIDARCINGNPEAATNGEVYCQKKIRCHNRQIHKLTILKGGTRKKNQAEYLVKGLRLFDQVSYLGKAYFIFGRRQSGFFDIRTLSGEKVNKGSISYRKLKFLAPRSYYITERRPV

SEQ ID NO: 7824 - protein, 568 aa, Streptomyces sp.
VSGRVTSPSHHGPKDQGGAPMTTFPVGEQTHQAVLPQQPALESVGADTPGSRDETAHGHSATARGTGREHGRGETDGHGTRTRRRHAKNAATAAEATENGSGDAPPRSPSYAGGIGAGRVFVLSKDGQPLMPCHPARARELLSKGRAVVARQVPFTIRLKDRTLAESEVDGVQLRIDPGSKGTGLALTDEKKEADGEGAVVTVRRGLVAVELQHRGDQIHLCMQQRAGYRHRRRSANRRYRAPRSNNRPRRAGWLPPSLRHRVDTTFSQAARLCRYAPVTEIHVERVAFDTHAMSAGKPLTGAEYQQGPLAGTDARAYLHAKWNSACAYCDASGVPLNIEHLRPRSRGGSSRISNLVLACVPCNEAKGSKPVEVFLAHWPERLAKILQQVKAPLHDAAAMNATRWQLTEALGELGRPVHAWSGGRTKWNRSAMGLEKTHTLDALSVGCLDHENGDAVVRFPGQVLVAKATGRGSYARTTPDRFGFPRLRRARTKQHFGYVTGDLVRANMPTGRWAGTWTGRISVRANGQHSLTTPAGRFNVRHRNMRLLQRGDGYAYSFRSEPGSSTS

SEQ ID NO: 7825 - protein, 412 aa, unidentified
RARVVKRFPFVIRLVDRTVEQSEVQPVLIKLDPGSRETGAAVVRDDEKKRHHALAFFVIKHRGGAIRDALKARSAFRRRRRSQNFRCRSPRFLNRVKPKGWLPPSLRHRVETTLSFVRRMCRYLPVSGIATELVKFDSQKLQNPEVSGVKYQQGTLFEYEVREYLLEKFGRKCVYCGAEGVPLNIDHVVPRAKGGSNRVSNLVLACVSCNQKKGARSLEDFLKGKPEVLARVRRELKTPLRDAAAVNATRWVLFNELKATGLPVETGSGALTKLNRHAFGVEKEHWLDALCVGRLNGVVTRKGLNVLEIRCMGRGSRQRTRLTKYGFPRGYLMRQKCVHGFATGDMVEANVPKGKKAGLWRGRVAVRVSGSFNIQTPKGVIQGVGWKHCRLISHNDGYGYAWLGHAPHSSPA

SEQ ID NO: 7826 - protein, 451 aa, unidentified; identical to SEQ ID NO: 2436

SEQ ID NO: 7827 - protein, 423 aa, unidentified; identical to SEQ ID NO: 3951

SEQ ID NO: 7828 - protein, 426 aa, unidentified
LAKDHYRSIDREETNLRVYVLNKRGEPLMPCSAAKARILLKEKKAKVKRRTPFTIQLTIATGETKQPVTLGVDSGYRHVGLSASTEKAELYASEIELRQDIPELLAARRALRGARRSRKTRYRAPRFDNRKRDKGWLAPSVENRIGAHVSRVEAVLRILPVTKIIVETASFDVQRIKNPDVQGVEYQEGEQLGFWNVREYVLFRDGHECQHCHGKSKDRVLNVHHIESRRTGGDAPNNLITLCETCHKAFHRGEFELKVKRGRSFQAEAFMGVMRWTFFERLRARHPEIEVRNTYGYLTKDTRIANKIEKSHCADAFCIAGNLKAKRLGYYFFQKQTRRHNRQIHKLTILKGGVRKRHQTPYEIKGFRLYDKVLYRGKTAFIFGRRSSGYFDIRTLDGERISAAVNSKKLRLLEKRRTFLIELRRN

SEQ ID NO: 7829 - protein, 414 aa, unidentified; identical to SEQ ID NO: 5236

SEQ ID NO: 7830 - protein, 447 aa, unidentified; identical to SEQ ID NO: 2820

SEQ ID NO: 7831 - protein, 499 aa, unidentified
MRYIYVLDMNGEPLMPTCRYGKVRRMLKSGQAKAVDTLPFTIQLLKPTKTRILQPVIAGQDPGRTNIGMAAVRSDGTELYRAHIETRNKEIVSLMNDRRSFRQASRRGERLARKRLAKKLHTTARHLNGRILPGCKEPLAVKDIINTESRFNNRLRPEGWLTPTATQLLRTHLEAFRKLSGILPVTEVVLEVNRFAFMQLDNQDMEKRDIDFCRGPLYGTGGVKAAVSLQQDGLCLLCREREIEHYHHIVPRSRRGSNTISNIAGLCKKCHERVHKDQAAAERLQSKKDGLSKKYGGTSVLNQIILSLAEKLGIRYPGHAHVTNGWNTKEFRKKHELEKDHDIDAYCIAASILEDVQPVMQTEPYEIKQFRRHNRARIHHQTERTYRYDGKIIAKNRKKRMDQKMDSLKDWVTDMTEQYGRDTASRMLSKATVQKSTRHYNTKGRMMPGTVFICRGKRFVMTGQLTGGAYYRAYGQDKKNFPAKAVQVIQKNKGLVYVA

SEQ ID NO: 7832 - protein, 376 aa, Bacillus sp.; identical to SEQ ID NO: 4597

SEQ ID NO: 7833 - protein, 627 aa, unidentified
  source 1..627: note = Lachnospiraceae bacterium UBA2826
MQELEACICAVGDTMNAPTALVQVVALLQFMVKFRVHGIRNTVTLLPQKVPHWMHSNAFYDSELSFQKDVTVYMYVRVIAKDGTPLMPTRRCGNVRHLLETGMAVAIRTKPFTIRLKYETSKYVQALYAGIDTGRENIGSAVSKENGENVYLADTRSNNGTVHSKMYDRAGFRRKRCRHDRQNKQRKAKFDGTEMKKGDADKVRTTHDCISRKVSYPVAEKSVTHKVIQGKEGKFNNRKHPDGWITPSAKQLVQITMNEVKFMCDTMPIRQLSVERVSFDFQKLANVNIRAWEYGKGPLYGYRSYKDYFCDEQKGKCPFCGEDIAHYHHIMPRHRRGTDTVRNIIGVCESCHEKIHSGQITDEMLHEVKDGVAESFEVGLLNSVMPALIDAMKQFCDARNIRLVVMDGRTTSETRNRYHIRKDHCTDAYCISLAGRNIDPADVKLDDFIFMKRRFKKKSKNIINTLNQRVYYDGKKPVAYNRHRAMDQKTDSLEEYMTKYRRTHTGAETDKHFRSLTVRPAKRTYTFHKNGTIAAVHAGDVVRYVKYNKTYGNTKIDTFVALSCEMFGEGHVKYGNGTQGRKLKFCKTIASGALQCVGIEKTDTYLREVALEEAKRRAARVRRKRTG

SEQ ID NO: 7834 - protein, 406 aa, Geobacillus sp.; identical to SEQ ID NO: 3747

SEQ ID NO: 7835 - protein, 493 aa, unidentified; identical to SEQ ID NO: 2644

SEQ ID NO: 7836 - protein, 456 aa, unidentified; identical to SEQ ID NO: 5717

SEQ ID NO: 7837 - protein, 406 aa, unidentified
MPTERFGKVRRLLKNNKAKVIRRCPFTIQLLYEIENPVTQEIVLGIDAGSKVIGVSASTEKKEVYAAEVELRKDVSSLLSARRELRISRRNRKTRYRKPRFNNRVHAKKKGWLAPSILQKIGTHLKVVENITKLLPVSKIVVETASFDIQKIKNPAIQGVEYQQGEQLDFWNAREYVLFRDGHTCQCCKGKSKDRILNVHHIESRQTGGNAPNNLITLCETCHKKYHRGELELPKTIRRGMKFKDSAFMGIMRWSFYNRLKEIYAPLGIAVDMTYGYITKNTRIHHGLPKTHRVDALCATGHPTAARNTEYFYQKKVRCHNRQIHKLTIAEGGYRKRNQAEYKVKGYRLFDKVRYLGQEAFIFGRRSSGSFDIRNLKGEVLSAGVSYKKLRFLEPRKNLSTERRQA

SEQ ID NO: 7838 - protein, 420 aa, unidentified; identical to SEQ ID NO: 5662

SEQ ID NO: 7839 - protein, 473 aa, unidentified; identical to SEQ ID NO: 3562
  source 1..473: note = uncultured beta proteobacterium

SEQ ID NO: 7840 - protein, 414 aa, unidentified; identical to SEQ ID NO: 4264

SEQ ID NO: 7841 - protein, 413 aa, unidentified
MTNYAFVLDANGKQLSPTKEQKAWFLIRKKRAILISKYPMVIQLNREILDDKVCKDEIRCGIDDGGLHVGVALVQKCKTKNKTIFKGTMEQRNDVKYLMEVRKGHRCHHRYYKRYRQARYNNRISSKRKGRVAPSILQKKQAIIRVINQLNKWINITNYWLEDVAIDIRALTDGYNPYRWQYQKSNRLDENIRKAVILRDGCKCKECGKSKCRLEVHHIKPRRLNGSNTLDNLITLCEKCHQNTEGREELFMKKYFSLLNSSDNKNLNYASHVMIGKNWLREQLSNFGILYLTNGGDTGNKRIDWNIGKSHCNDAVCITNLNPDTCDVKEWIMKPMRRQSKAKTDNVLGIKHKDLVEYTYKNGETHRGYVTALYPKQEALNFQSPRKHCKKVNAKKCRLLWKYQKIYWLERET

SEQ ID NO: 7842 - protein, 427 aa, Parasutterella sp.; identical to SEQ ID NO: 3787

SEQ ID NO: 7843 - protein, 442 aa, unidentified; identical to SEQ ID NO: 2903

SEQ ID NO: 7844 - protein, 512 aa, unidentified; identical to SEQ ID NO: 6203

SEQ ID NO: 7845 - protein, 458 aa, Lactobacillus sp.; identical to SEQ ID NO: 6016

SEQ ID NO: 7846 - protein, 423 aa, unidentified; identical to SEQ ID NO: 3538

SEQ ID NO: 7847 - protein, 413 aa, unidentified
MTNYVFVLDANGKQLAPTKEAKAWFLIRKKRATLVSKYPMVIQLNKEISDDEICKDEIRCGIDDGGLHVGIALVQKCQAKNKVIFKGTIEQRNDVKHLMDVRRGYRRYHRCHKRHRQARFNNRSSSKRDGKIAPSILQKRQATVRVINQLNKWINITNYWLEDVSIDIRALTDGYKSYRWQYQKSNRLDENIRKAVILRDECKCMECGKSNCRLEVHHIRPRRLNGSNTLSNLITLCEKCHQKTEGREELFMDKYFSLLKSSDNKNLNYAQHVMIGKKWLREQLSNLGILYLTNGGDTANKRINWNIEKSHSNDAICITDLQPDTCNIKEWSIKPMRRQSKAKTDNVLGINHRDLVEYTFKNGETHKGYVTALYPKQNAINFQSLTKHCKKVNAKKCRLLWKFSKIYWLDNVF

SEQ ID NO: 7848 - protein, 423 aa, Moorena sp.
MRVFVLNKNRQPLDPCKPARARIILSTGKAKVYRRYPFTIILTEEIEEPITHTHQLKIDPGAKTSGLAIVQNSRVVWGGELTHRGFQIRDALTSRRQLRRARRNRKTRYRKPRFLNRPWSEGWLAPSLMSRVYNILTWVKKLTRLCPITGFSQELVRFDTQKLQNPEISGIEYQQGTLYGYELREYLLEKWNRKCAYCGTTDTQLEIEHIKPLSKGGSDRVYNLAIACHSCNQAKSNQEVEHFLSGKPDVLRRVKAQAKRPLADAASVNATRWKLYHELKSIGLPVEVGSGGLTKFNRCRQNLPKTHWLDAANVGKIETLVIEVTHPLIITAKGHGTRQLCRTNKYGFPIRYCSRTKVHKGFQTGDIVRAVVTKGKKIGTYVGRVATRKSGSFNISTKSGLVQGISHKYCQFIHRKDGYAYTI

SEQ ID NO: 7849 - protein, 431 aa, unidentified
MPGKVYVISRLGHPLMPCSPAKARHLLDDGKAKVVKRTPFTIKLLYGSTEYTQPVILGVDAGSKTIGLSASTTKEELFAAEVMPRNDVVENLSTRREFRRARRNRTTRYRKPRFNNRVHSKNNGWLAPSVEVKIQEHITSIKRVCAILPISKIVVETAEFDLQLLKAVQDGKPVPEGEDYQKGEMYGSYDVRQYVLWRDNYTCTCCGVKGTDKKPIKLHVHHFESRKHGGNAPDNYGTLCEDCHKKHHLGIITDISLKTRKRPSTRDAAFMGIMRKTLMQRLITGLSIPVAETKGYITKAAREEILKLPKTHTNDALAIAQGRHGFGIREPAYVKPTNRIYTVRPVRHHNRQLHKATILKGGIRKLNQASKYIFGFRLYDKVLYRGGECFVWGRRTSGSFLLRTIDGTKVKDGVGYRNLTLLERSTNYLIA

SEQ ID NO: 7850 - protein, 423 aa, Arthrospira sp.; identical to SEQ ID NO: 3251

SEQ ID NO: 7851 - protein, 447 aa, Allochromatium sp.
MAVFVLDKQKKPLMPCTEKRARLLLERGRAVVVRLAPFTIRLKDRIGGAVQPLRLKLDPGSRVTGLAIVRESEICDPDTGAVERLEHGLWFGELAHRGQAIREALETRRQYRRARRARKTRYRAPRFLNRTRRAGWLPPSLQHRLDTTVTWVQRLRRIAPISALSQELVRFDTQALQNPEISGVEYQQGELAGYEVREYLLEKWNRRCAYCGARAVALEIEHIVPRARGGSDRVSNLTLACRPCNVSKGHQSIETFLKGRPALLHQIQVQAPLKDAAAVNATRWALFNALNATGLPVETGSGGRTKFNRTRLNLPKTHALDAACVGTVDQVRDWNRPVLSIRATGRGAYSRTRTFKNGFPRGYLRCQKRVQGFQTGDWVRAEVPKGKKAGVHVGRVAVRQTGSFNIQAQAGTVQGISYRHCRLLQRADGYGYSFQLKPEMEAARRAA

SEQ ID NO: 7852 - protein, 417 aa, unidentified
MFVYVLDKNGQPLMPTQRFGKVRRMLRDRKAKVVKRCPFTIRLLYEPETKIVQDVVLGVDTGSKHVGVACIGNDKVLYQSQVELRDDIKRKMDSRRMYRRSRRNRKTRYRKTRFLNRGNSIKNDRYCPTITSKFYGHIREIEFCKKILPIKDTVLETGKFDTQLMEKPWLQEHKWAYQKGVNYGYANAREHALIRDNYTCQCCGKKNCRVEAHHIVYRSKNGSNELENYITLCEDCHKAVHLGKIELNLKGKRRSNIRYATQMSIIRSMLLKRCPDAIETYGYVTKANRENLGLKKDHHIDACVIASGGLEFKPLDILYRKRCVSKQDRQLRKGIRGEKRIPTGKVFGFKKFDLVEYMREHCFIKGRRSRGSFVLMDISNNSIDFRGRGGVCEPSYKHIKRLNARRSVLCVRERLER

SEQ ID NO: 7853 - protein, 418 aa, Bacteroides sp.; identical to SEQ ID NO: 2425

SEQ ID NO: 7854 - protein, 512 aa, unidentified; identical to SEQ ID NO: 2444

SEQ ID NO: 7855 - protein, 415 aa, Bacillus sp.; identical to SEQ ID NO: 2431

SEQ ID NO: 7856 - protein, 446 aa, unidentified
MAVFVLDRRKRPLMPCSEKRARLLLARGRARIHRLTPFTIRLVNRTVEQSVLQPVRIKLDPGSRTTGIALVRDGETGRTAHVLFLAELHHRGQVIRDALTQRRAFRRRRRTANLRYRAKRFYNRTRPEGWIAPSLRHRIETTVSWVNRLRRWTPVAAISQELVRFDTQKLQNPEISGVEYQKGTLFGLEVREYLLEKWNRACAYCGARNVPLEIEHIQPRSRGGSDRVSNLTLACDRCNKRKGNKSIEEFLAHDPKRLAQVKAQAKSPLKDAAAVNSTRWTLWRQLRDMDLEIEVGTGGRTKWNRTRLGLPKTHALDAVCVGDVKAVQGWAVPVLQVKAAGHGSYQRTRLDRFGFPRGCLIRQKRVQGFQIGDLVKAAISKGIKAGIYVGRVAVRASGSFNVQTAHGVVEGISYRYCRLLQRADGYGYFVQLCGIALGKEELREAA

SEQ ID NO: 7857 - protein, 446 aa, unidentified; identical to SEQ ID NO: 7856

SEQ ID NO: 7858 - protein, 442 aa, unidentified; identical to SEQ ID NO: 4418

SEQ ID NO: 7859 - protein, 461 aa, Parasutterella sp.; identical to SEQ ID NO: 3646

SEQ ID NO: 7860 - protein, 461 aa, unidentified
VQPLYLGIDPGRTNIGVAVVKADGTAVFAAHLETRNKKIPKLMQDRKKARRARRTNGRRCRRQRRAKANGTISKKCVKQDTAQSKNPSKRAKEIGVIKRHLPGCKKDVLCVGIKNKEAKYTNRARLEGWLTPTANQLLQTHINLVKKIQKFLPISDAVLEVNKFAFMRLDNPNIQKWQYQQGPLYQKGSLENAVSEMQEHHCLFCEKPIEHYHHVVPKSENGSNTIANIVGLCAEHHNLVHKDVAWQEKLVEEKTGLNKKYGALSVLNQIIPALTKELSFLFPKHSFMTNGKSTHDYRAAHGISKDHWLDAYCIACSVLPIDVCDSTINNCVPYELKQFRRHDRRALNNENMNRVYTLNDKVVATNRHKATEQEAASLEEFRKEHPNDVCKLKVKEHHPTYRNMNRNYPGSVFLVGKQIHVMQGIASSKDGKATKYNDTRATTIAAGKCKFVAKNSGILFV

SEQ ID NO: 7861 - protein, 472 aa, unidentified
  source 1..472: note = Burkholderiales bacterium UBA4657
MSVFVLDRRGKPLMPCSEARARKLLAAGRARVHRVMPFAIRLTDRFQADCELQPLRLKLDPGSKITGLALVRESQTLDLSTGEIERNAAVVSLIEIVHRGRQISETLTARRQMRRRRRNQLRYRAPRFLNRGGDKKGWLAPSLMHRVHTTMSWVHRLQRWAPITALSQELVRFDMQAMQNPEISGMEYQQGTLAGYEVREFLLEKWGRQCAYCGVTDTPLQIEHIHPKSRGGSDRVSNLTLACAPCNQRKNHLPVEVFLAKKPEVLKSILAQAKAPLRDAAAVNATRWALANALKDTGLSVELASGGRTKFNRHRLSIPKSHALDAACVGDIAIVTDWRQTTLQVKCTGRGSYQRTRLDRFGFPRGYLTRKKRVFGFQTGDRVRATVARGKNAGTHTGRVAVRATGSFNIQTGLSVVQGIGYRHCQLIQRGDGYGYSQLKIALAPKGCGNQGAASQPALSLLPIHGEVSRAD

SEQ ID NO: 7862 - protein, 415 aa, unidentified; identical to SEQ ID NO: 3582

SEQ ID NO: 7863 - protein, 431 aa, Klebsiella sp.; identical to SEQ ID NO: 2435

SEQ ID NO: 7864 - protein, 401 aa, unidentified
RRQRRAKTNGTISKKCVKQTTAQNGSVSKRAKEIGVIKRHLPGCEKDVLCIGIKNKEAKFTNRARPEGWLTPTANQLLQTHINLVKKIQKFLPISDVVLEVNKFAFMQLDNPNIQKWQYQQGPLYQKGSLENAVSEMQEHHCLFCEKPIEHYHHVVPKSENGSNTIANIVGLCTEHHNLVHKDATWQKKLAKEKVGLVKKYSALSVLNQIIPALTKEMNSLFPKHFFVTNGKSTYDYRTAHGVSKDHWLDAYCIACSVLPNDVCDSNINSHVPYELKQFRRHDRRVLHKANMSRVYTLNGKTVATNRHKAIKQTTDSLEEFRQSHPGDVCKLKVKEHHPAYRNLNRNYPGSVFLVDGQVHVMQGVSGSHNGKADGYYNTNGNAYPYYKCKFVVKNEGIVFA

SEQ ID NO: 7865 - protein, 420 aa, unidentified
MVYVLSLDGQPLMPIRRHGKVRRLLNSKKAKVVCREPFTIQLLFDTKENISCLTLKVDTGSKYVGAGVTDDNACVYYVSEVEIRNDIHTKMGRRAAYRRARRNRKLRYRKARWLNRHNSIKKNRFSPTMASKFNSHIREIEYVKSILPISKLVIETGTFDPNLLNYEDKAFNRHWGYQKGPNYGFKNSQEACFNRDSYKCQCCKTKKGTLNAHHIIYRSNGGADMLDNLITLCEDCHKKLHRGELCEFESKLVGKKKGQLKYATQMNSIRIQLLKYYPNAIETFGFITKANREWLGLEKTHWMDAVSMGLTAQPIFLVDRVYKKKHIAKGQYPLYQGQNSDKKLPRGKVYGFLNKDIVEYRNQLYLIKGLMSLGYCRLSNIDGIEQKFENPKTVKLSACKRVSARKTTRCISQKIIPNIA

SEQ ID NO: 7866 - protein, 406 aa, unidentified; identical to SEQ ID NO: 7347

SEQ ID NO: 7867 - protein, 442 aa, unidentified; identical to SEQ ID NO: 2903

SEQ ID NO: 7868 - protein, 236 aa, unidentified
MVYVQDIDGKPMMPTTRHGKVRRLLKDSKAVVVNTCPFTIKLMYKTSDYKQEIVLGVDAGTKHVGLSATTKSKELYSSEVILRSDIVELLSTRRESRRTRRNRLRYRKPRFNNRIKSKRTGWVAPSVRHRIDAHIRVIDNICSILPISRIIVEVAQFDTQKIKNPNISGNEYQEGDQLGFWNVREYVLTRDGHKCQHCKGKSKDPILNVHHIESRKTGGDSPSNLITLCETCHKEY

SEQ ID NO: 7869 - protein, 420 aa, unidentified
MQYVYVLNNHGKPLMPCSPGKARLLLKQQKACVVKRTPFTIKLLYGSAGYKQPITLGVDAGSKHVGLSASTEKRELYSEEFTPRSDVVELLSTRRQNRRSRRNRKTRYRAPRFDNRVHSKHKGWLAPSVEVKIQEHITIIKRICKILPISLVRVETAEFDTQRLKAMLAGKPLPIGTDYQLGEMYDEYNVRQYVLKRDHYTCQCCGAHNTAEKVVKLHVHHFESRKVGGNTPSNLVTLCTTCHKNLHKGKATLDGKERGKPLRDAAFMGIMRKTLMARLKEELPIPVQGTYGYITKMSREQNDIKKSHVNDARCISKHPLAEPCSVCYRTKAIRHHNRQTHKANFSKKGIRKRSQMPYLVEGFRLWDKVLYKGQECFVSGHRSSGSFALKKLDGTSISKGVTFKKLRLLEPATNYLIERM

SEQ ID NO: 7870 - protein, 415 aa, Bacillus sp.
MVSYCFVLDRKRRKLSPTNENRGWVLIRKNKAALINKFPMVIQLFKEVADEEIDQTPIHFNIDDGSKFTGIALVQECQTKNKPVFKGTIEHRTDVKEKMDKRRGYRRYKRSHKKYRPKRFHNRSSSTRKGRIPPSIKQKKEATLRVLNNLMKWIRVNHIHLENVMIDIHKLEKGSQPYRWDYQKSNRLDENLRKAALMRDHFTCQDCGKKHCRLEVHHIIPRRLQGSNSIHNLITLCSSCHENVTGEESNHAKRFFDKIQGKKIIFLDAMHVMQGKTYLQQEVKKIAPLTLTTGGDTANRRIDWDIEKSHSNDAIVLSQLHVSSKQCDMKDWIIKPMRRRSKKKVEEVNGFQHRDFVRYTKRNGDVYEGYITALYPKKKQCNLTTTEGKVLKRYGVNRLKLLWRFNHIYFLNKHE

SEQ ID NO: 7871 - protein, 425 aa, Aphanothece sp.
MSNFVFVLDTTKKPLNPVHPGQARRLLKLSLAAVFKRFPFTIILKEEVTETPKKITLKLDPGSRFTGIALVQDNQVIWGAELQHRGQQIKDNLTSRRQLRRGRRGRKTRYRKARFLNRKRPPGWLAPSLQHRVDTTLTWVKRLMRYCPINSLAVELVKFDLQKQENPEISGVEYQHGTLMGCEIREYLLAKFNRTCKYCGAVDQPLEIDHIYPKSKGGSDRISNLTLSCHLCNQKKGTQDIKVFLTGKSDLVNHILKQAKTPLKDAAAVNSTRWKLFNSLKELGLPIETGSGGLTKFNRKRLNVPKTHFSDAACVGQVSDNLSFKTLQPLLIKATGHGCRQRCRTDKFGFPQSHALKAKFFEGFQTGDLVSASIPSGKFVGQYVGRIAIRFRPSFVLQLPNQKFNVHPKYLTHIHRNDGYNYAFK

SEQ ID NO: 7872 - protein, 442 aa, unidentified; identical to SEQ ID NO: 2637

SEQ ID NO: 7873 - protein, 470 aa, Anaerostipes sp.; identical to SEQ ID NO: 2949

SEQ ID NO: 7874 - protein, 512 aa, unidentified; identical to SEQ ID NO: 3680

SEQ ID NO: 7875 - protein, 416 aa, unidentified
MVYVLDKNGQPLMPTDRHRKVRLMLQSGQAKVIKRCPFTIQLTYNTGHQAQEISLGIDAGSKHIGVSATTKTRVLYEADVELRNDIVDLLSSRRELRRGRRNRKTRYRPARFDNRRREDGWLAPSIRQKIGTHLTVVENICKILPISRITVETASFDIQKIKNPDIQGAEYQQGDQLGFWNNREYVLFRDNHTCQCCKGKSKDKILNVHHIESRKTGGNAPNNLITLCEICHTGYHKGAVQLPKTVKRGMRFKDAAFMGIMRWAFYEALKQQYEPVGTPVHNTYGYITKHTRIEHNLPKEHYVDARCISGNPDAFPNGEYYYQKKVRCHNRQMHKLTILKGGIRKQNQATYLVKGYRLFDKVSYQRKEYFVFGRRKSGFFDIRTLSGKQVNKGSLSCKKLKFIATRMYYLIERRAV

SEQ ID NO: 7876 - protein, 257 aa, unidentified; identical to SEQ ID NO: 5154

SEQ ID NO: 7877 - protein, 406 aa, unidentified; identical to SEQ ID NO: 4082

SEQ ID NO: 7878 - protein, 456 aa, Streptomyces sp.
VSRVFVLSKDGQPLMPCHPARARELLTKGRAVVARQVPFAIRLKDRTRAESAVDGVQLRIDPGSKGTGLALTDEKKETDGQGATVTVRRGLVSIELQHRGDQIHSCMQQRAGYRHRRRSANCRYRKPRSRNRARSAGWLSPSLRHRVDTSFSMANRLCRYAPVTEIHVEQVSFDTHSMSAGRALRGSEYMHGPLAGTTTRDYLRDRWDNACAYCGATGVPLNIEHLRPRSRGGSNRTANLVLACIPCNTAKGSESVEVFLADRPDRLAHILRQITSSLRDAAAMNSTRRLLMAALGDLGLPVHAWTGQTTMENRNIMGLAKTHTLDALSVGQLDHEAGDVIVRYPEQVLVAKATGRGSYARTTPDRFGFPRLRRTRAKQHFGYITGDLVRATIPTGKWAGTWTGHISVRARGQHSLRIHTGRLNVSHWNLELLQRGDGYGYSVRPELPPSTSRKIG

SEQ ID NO: 7879 - protein, 397 aa, unidentified
VVRRTPFTIQLTIATGESKQPVSLGVDAGYKHVGLSASTEKAELYASEVELRKDITDLLSARRALRQSRRNRKTRYRAPRFDNRIRTKRKGWLAPSVENRINAHLSRIKAVLRLLPITKITVETASFDMQRLKNPDISGKEYQEGEQLGFWNVREYVLFRDGHVCRHCHGRSKDPVLNVHHLESRRTGSDSPDNLITLCVTCHKALHRGEITLKAKRGQSFRAQAFMGIMRREVLNRLKASYPELKVHETYGYLTKHARIANGIVKSHGADAFCIAGNLGAERLGEFFFQKQTRRNNRQIHKLSILKGGIRKRNQAPFEAKGFRLFDKVACQGEEGFIFGRRSSGSFDVRKLDGTRISAGISCKKLRLLEKRRTYLTEIRKEEELPPLPEGRGLRAI

SEQ ID NO: 7880 - protein, 427 aa, Parasutterella sp.; identical to SEQ ID NO: 4733

SEQ ID NO: 7881 - protein, 451 aa, unidentified
MSVAVMSKTGMRLMPTSEYRARKLLKSKKATVYRYNPFTIQLTERETGDVQTVELCMDTGYLHIGTSVKSEKHEYFGVQIDTLTDEKQKHDACRMYRRQRRGRKRYSQSRFNNRKRSDGWIAPSLEHKKDIHIQTISRICNAMPITNITLEMGNFDTQVLKALEENRPLPQGTDYQHGERYGIATLREAVFARDKYTCQCCRKTIADGAILHVHHIIYRSRGGTNRMSNLATVCDRCHTPANHKPGGRLYNWKPKIASFKGATFMTAVRWKMYNEVKSKFSDINIHITYGAETKEQRRAFDITKSHVNDAFVMGQFHPKHRSRPVCYKKKRRNNRCLEKFYDAKYIDSRDGKKRSGQELFNGRINRNHKKDSENLHQYRQQKVSSGRKTIRKQHYSIQPHDIVVFNRQQFETSGCHCNGARAILLPQKKSVAIKKLSIHKYAGGYFKSDFT

SEQ ID NO: 7882 - protein, 292 aa, unidentified
MSTVYVLNKDGKPLMPTTRCGHVRHLLKEQKARVVTSKPFTIQLLYETDDVVQPLYLGIDPGRTNIGVAVVKADGTAVFTAHLETRNREIPKLMKKRKDSRRTRRTNGRRCRRQRRAKANGTISKKCVKQDTAQNGSVSKRAKKIGVIKRHLPGCEKEVLCIGIKNKEAKFSNRVRPEGWLTPTANQLLQTHINLVKKIQKFLPISDVVLEVNKFAFMQLDNPNIQKWQYQPKKCAFRKTAFAYTCDSSYIVRNLFHSSSSKRTITQCVFGFNLGFLPYLLFFFMLLILSIL

SEQ ID NO: 7883 - protein, 431 aa, Escherichia sp.; identical to SEQ ID NO: 4170

SEQ ID NO: 7884 - protein, 458 aa, unidentified
MSVFVLDSSGTPLMPCSEKRARKLLGAGRARVHRLVPFVIRLIDRTADACEFQALRIKLDPGSKSTGVALVRDREDEAAVLNLMELVHRGRQISEALTARRTMRRRRRGNLRYRAPRFLNRTKPNGWLAPSLQHRVDATLAWVQRIRRWAPVASISTELVRFDMQALENPEISGVEYQQGTLAGYELREYLLEKWNRQCCYCDAKDTPLNIEHLHPKARGGTNRASNLAIACVPCNQRKGAMPLDAFVSDPKHLAQIQAQARRPLKDAAAVNATRWALTEGLKATGLPVELASGGRTKFNRTRFGIPKTHALDAACVGKTEALTGWRKPTISIKCAGRGSYQRTRLDKYGFPRGYLARRKAVRGFQTGDLVRADVPASSKKAGCYVGRVAVRASGSFNIQTGCEVVQGISHKHCRVIQRSDGYGYTRIASQGEARVGRAMRAALSLPALNGEVSRATR

SEQ ID NO: 7885 - protein, 427 aa, Parasutterella sp.; identical to SEQ ID NO: 3787

SEQ ID NO: 7886 - protein, 414 aa, unidentified; identical to SEQ ID NO: 2588

SEQ ID NO: 7887 - protein, 420 aa, unidentified; identical to SEQ ID NO: 3987

SEQ ID NO: 7888 - protein, 418 aa, unidentified; identical to SEQ ID NO: 4934

SEQ ID NO: 7889 - protein, 395 aa, unidentified
MDTGYIHIGISVKSEKHEYLTEQIDTLTDERSRHNARRMYRSQRRNRKRYRQPRFNNRKKDKGWIAPSLEHKKNIHVQAISRINNVMPLTDITMEMGNFDTQVLKAKEEGRPLPQGVDYQHGERYSIATLREAVFARDGYKCQCCGRTIKDGAILHVHHIKYRSQGGTNSISNLATVCDKCHTPKNHKPGGKLYGWKPKLPSFKGATFMTTIRWQLYNEAKALFPDIDIHITYGAATKERRRELNIDKSHINDAFVMGQFHPRHRIKAVLYKKKRRNNRCLEKFYDAKYIDSRDGKKRSGQELFNGRINRNHKKDSENLHQYRLQKVTAGKRTVRKQHYSVQPHDIIIYESRKRETTGCHCNGARVMLLPDKKSVSIKKIKIYRYAGGYFKSTFN

SEQ ID NO: 7890 - protein, 554 aa, Acidithiobacillus sp.
VLNKKISSRNRIGARYYTFSAAALSRGRLLPTWLSRGPVLSGSSWRRVAKTHSGMLPQSRTLEGEDHAGERQSAEGSHRCQKAGAGRQQPRGETAARGHSRKLALQRPVRAWGIVVAVFVLDKCKKPLMPCSEKRARLLLARGRARVHRMVPFTIRLVDRLQADSVLQPLRLKIDPGGKTTGLALVREVESVNENGDSNRTAYVVALMELKHRGYQIRRKLYQRRGHRNRRRWHLWYRPSRFRNRTRSPGWLPPSVRHRVDSVATWIYRLKKWTPISGISLELPRFDMRRLTEEEDDSTDRQRDLFRFEARAYLLKKYGRRCAYCGAQDVPLTIDHICPRSRGGSNRLSNLTLACIPCNQRKGNQSVSEFLAQDPRRVASIEQSRQKSLKEAAAVNSSRSELLRCIKATGLDIETGSGVGTQWNRSRLAVPKAHCLDAACVGKVDVLISWKQKPVLVITATGRGRYGRTMLDSNGFPKAYLIKTKGVFGFQTGDLARATVTRGKNHGIYIGSVAISARGYFDLHTLTGMRLVVSHRYCKLIQRSDGYRYQFSSV

SEQ ID NO: 7891 - protein, 344 aa, Streptomyces sp.
MHLRASYRRRRRSRNTRYRAPRYDNRRRPDGWLPSSLRHRVDTTHSWVRRLQQWAPVAEMHIERTAFDVHALSVGVPLQGIEYQQGTLAGYEVRQYLLEHWGRACAYCGASGVPLQVEHIRPRSRGGSDRVSNLTLACRPCNHAKGSLSVEAFLKGKPQLVAKILSRAKAPLRDAAAMNSTRWALWGSLKDLRVPVHSWSGGRTKYNRSRHGLTKTHSLDALAVGEVPDDMTIERFPAIVLLVSCTGRGTHARTRTDKHGFPRLKLPRIKRFFGYATGDLVTAAVLTGKNAGTHTGRVAVRSNGRFNIRTAHGLVQGVHRRHFRLLQRADGYGYARRAEESAAE

SEQ ID NO: 7892 - protein, 509 aa, unidentified
MPDTDYIYVLGADGKPQMPTKRKRHVKRLLDTGKARIACHVPYTIQLLYENTPVLQPVMLAEDPGRTNIGMAVLSVKGELLMSAVVETRNREIVRLMNHRRGYRKASRNGERKARQRLAKRFGTMLKAGMLMRRLPKFASDKFITCHYIRNTESRFCNRKRPDGWLTPTSRQLVETHTNLIHKIQKYLPVTDIAMEVNRFAFLSLENPSVSGVNFQNGPLKGFDSLHDAVNELQHGKCLLCDKKIEHYHHIVPRSMNGSNTIGNIAGLCMECHDKVHKSAKYQKKLNDVKKGLDKKYGALSALNQAVPFICKQLETEFGKEHVSYCTGRDTAKMRNSFGFQKTKDNQMHETDAWCIGILALNRIPDVIPDFGRTYCIRQFRRQDRSLVYAQTERVYKLDGVAVAKNRKKRTEQKTDSLEDWYNRQVVLYGKKKADFMRSRLTVVKSKRRYNDLTRVMPGAVFIYNGVRHVLSGRLTEGQYFRAVGDTRTNYPSSKCKIIRHNEGLVFVC

SEQ ID NO: 7893 - protein, 448 aa, unidentified; identical to SEQ ID NO: 4180

SEQ ID NO: 7894 - protein, 456 aa, unidentified
MSTCVCVLNNSGERLMPTIRLGKVRHLLKDGKAKIVKHHPFTIQLLYDSKTNTQPIEICEDVGYNYIGISVKSESHEYVSAQYDTLQDEKEHHDDCRKMRRARRNRLRYRKPRFDNRKRSEGWLAPSLEHKKQLNISLIERYVSVIPITRATVEVGSFDTILLQAIQKGKSKPEGVDYQKGPRYNLATLREAVFYRDNYTCQVCGRKIADGAILHMHHMFYWKGRHGYQLDELVTACEKCHTPANHQKGGKLFGFGEDKEFANLSGAAFMNAVRWQIVDALHATYGKEFVTITYGAMTKEKRIILGIEKTHNNDAYAMGDYHPVHRCVFRHYQKRRRNNRVLEKFYDATYIDARTGNKAKGKELFNGRINRNHKKDSENFHKYRSKKVSKGRRSIRRQRYAIQPYDTVRLEGKTYITSGCHNKGTRLLIPANGKSKSVAISKVQVVCHAGAWIQII

SEQ ID NO: 7895 - protein, 514 aa, unidentified
MSTVYVLNKNGKPLMPTTRCGRVRHLLKEQKARVVTSNPFTIQLLYETDDVVQPLYLGIDPGRTNIGVAVVKTDGTAVFTAHLETRNKEIPKLMQGRKKARRARRTNGRRCRRQRRAKANDTISKKCVKQDTAQSGSASKRAKKIGVIKRHLPGCEKGVLCIGIKNKEAKFSNRTRPEGWLTPTANQLLQTHINLVKKIRKFLPISDVVLEINKFAFMQLDNPNIQKWQYQQGPLYQKASLEEAVSEMQEHHCLFCKKPIAHYHHVVPQSENGSDTIGNIIGLCTKHHDLVHKDTAWQKKLAKKKTGLNKKYGALSVLNQIIPALTKGLGSRFQGHFYVTTGKSTYDYREVHGVSKDHWLDAYCIACSVLPNDVCDSDINNRVPYELKQFRRHDRRALHKANINRVYTLNGKSVATNRHKAIKQTTDSLEEFRQCQPDDVCKLKVKEHHPEYRNPERNFPGCVFLVGKHTHVMQGTSGSHNGQADGYYDTNGNSYSSGKCKFVAKNEGVVFTLN

SEQ ID NO: 7896 - protein, 413 aa, unidentified; identical to SEQ ID NO: 2636

SEQ ID NO: 7897 - protein, 249 aa, unidentified
  source 1..249: note = Archaeon sp.
VEVIGRVKEHIKSSSSSLLLYNVSRTVLANNNSAQDIPSGRSRKNLRVPVLNMSGKPLMPTSPRKARILLKQGKATVVQKMPFTIQLKYPSGETKQDITLDINDRYSTIGFSAITEKSELISGELTLRKGISKLLEQKRNYRRVRRNKLLHRKPRLNNRSKHKCWLASGIHHKFNTHLRLIEKLKEVLPITKVIVEVSAFDTQKLQNPEIRDVKYQQEELQGHGVIEDLLEKWKHKVCLLWKGWSSSGN

SEQ ID NO: 7898 - protein, 442 aa, unidentified; identical to SEQ ID NO: 3218

SEQ ID NO: 7899 - protein, 456 aa, Achromobacter sp.
MPCSEKRARKLLAACRARVHRLVPFVIRLVAHRAGTCNFQPLRIKLDPGSRATGLALVRDVETVDAATGCILRGAAVLTLMELVHRGRQISEVLTARRNTRRRRRGNLRYRAPRFRNRTRRAGWLAPSLQHRVDTTLAWVIRVRRWAPVTAISSELVRFDLQALENPEISGIEYQQGTLSGYEVREYLLEKWDRKCAYCDATGVPLQIEHLHARARGGSNRIANLALACGPCNQKKAALPLEAFLAKDPGRMARIQAQAKRPLKDGAAVNATRWALANGLTVTGLPVELSSGGRTKYNRSQLGVPKTHALDAACVGSVDAIKAWRRPTLQVKCTGRGSYQRTRLDKYGFPRGYLMRCKAVRGFQTGDLVRADVPASSKKAGRYVGRVAVRASGSFNIQTGSEVVQGISHKHCRIVQRSDGYGYSRIAISKGDAGAGHVARAALSLPGLKPEASRAI

SEQ ID NO: 7900 - protein, 478 aa, unidentified
  REGION 1..478: note = Ga0315294_10000834
MQKLERRDTYTPTDASQVRGNREILLGTITERCDGNCDSVIKHGMKPFQVLQDSKTLSNNPDVNQQSGRTGQDLRVPVLNMRGEPLMPTNPAKARHLLKQNKAKVMSRKPFTIQLNYATGETKQPITLGIDSGYKTIGFSAITEKKELISGEVALRTDISKLLEERMMYRRIKRNKLWYRQPRFDNRRKDENWLAPSIKHKLDTHIRLVNKIKKLLPVTEVIVEVAKFDIQKIKNPEITGEQYQQGEQLGFWNVREYVLHRDNHICQHCFGKKKDKILEVHHINGKKEGATNRPEELLTICKTCHEEHHTGIDIIPKKEIKQFKPETFMSSIRWKLINILNCEHTYGYITKSIRVGLKLPKLHVNDAFVIAGGTSQERCRPFDVKQVRRNNRCIQINRKGFKPAIRKKHYSLQPHDKIIYKNNEYLVRGIHSKGTQVMIFNLIERMDVNVKKIKLICYGKGMQFFYEPKLIIFSNGVL

SEQ ID NO: 7901 - protein, 472 aa, unidentified
VVDNRLLSIKPLINIGEGVIYSSICTGLSLQTYQKRKEVPCMVYVLDINGQPLMPTTRHGKVRRLLNSHLAKVVKRCPFTIQLLYQSTKEIQPVSLGVDAGSKHIGMTATTEKKVVYQEELSPRNDVVKLLSARRTLRRTRRNRKTRYRKPRFNNRVHSKHKGWLAPSVEVKIQEHITAIKRICQILPISEIHVEISEFDLQRLKAMEEGRTLPVGTDYQLGEQYDFYNTRQYVLHRDGYTFQCCGTHDNNIKLHVHHIESRQTGGDAPSNLITLCEHCHKALHKGKLELPKGKKRGKTYRDATFMGIMRKTLLERLRKEVDVPASGTYGYITKYWRERAGLEKSHINDAICISKYPYAKPLDTYYLTKAVRNHNRQIHKSNFSKGGIRKRNQAPYLVKGFRLFDKVLYQGKEYFIFGRRATGYFDIRTLDGTKVNKGSISYKKLRIQDTAKAYLKEARAIPHMNKFTCVLA

SEQ ID NO: 7902 - protein, 420 aa, unidentified; identical to SEQ ID NO: 6833

SEQ ID NO: 7903 - protein, 442 aa, unidentified; identical to SEQ ID NO: 2637

SEQ ID NO: 7904 - protein, 442 aa, unidentified; identical to SEQ ID NO: 3333

SEQ ID NO: 7905 - protein, 435 aa, unidentified
MVYVQNHLGQPLMPTQDHRKVRLLLKSGAAVVVRRTPFTIRLTTRSKTYVQPVTLSVDAGSKKIGLTAATRNRELFAAEVMPRNDVVKLMSDRRELRRSRRNRTTRYRQPRFDNRVHSKHKDWLAPSVEVKIQEHITAIKRACRLLPVSRVVVETAEFDLQMLKAVAAGKPVPQGEDYQKGEMYGFYNSRQYVFFRDGYTCQCCGASNKSLRGEARKKGLIFHTHHLESRKTGGDAPDNLVTICDKCHKDFHAGRLTNDKLKKRRSKSTRDAAFMGIMRKTLMRRLREELPVPVAETKGYVTKATREQLLKLPKSHTNDALAIAMGRDGFGIQGVTYIPQVDHIYQMRAVRHHNRQLHKANPKKGGVRRRNQGPKRVQGFQRFDKVLYRGKECFIWGLRTSGYFQLKQIDGRKVHESAKASELVLLEHSSGYLIT

SEQ ID NO: 7906 - protein, 413 aa, Blautia sp.; identical to SEQ ID NO: 5365

SEQ ID NO: 7907 - protein, 425 aa, unidentified; identical to SEQ ID NO: 5668

SEQ ID NO: 7908 - protein, 411 aa, unidentified; identical to SEQ ID NO: 3917

SEQ ID NO: 7909 - protein, 456 aa, Halomonas sp.
MAVFVSDKHKQPLMPCSEKRARLLLERGRAVVHKRYPFTIRLRDRVGGDTQALRLGIDPGSKATGLALMRESDGRQRHVLCLFELLHRGFQIKKALEQRAAFRRRRRSANLRYRAPRFDNRTRPKGWLAPSLQHRVDTVTAWVERLRRLAPITALDQELVRFDTQKLDNPEIGGVEYQQGTLLGYEVREYLLEKWGRACAYCGATETPLEIEHVEPRSRGGSNRVSNLALACHDCNQAKGNQPLGDFLAHDKGLKKRLKANGLSASGRLERVQRQFKQPLRDASAVNATRWALFTALKATGLSVTVASGGRTKYNRQRLGIPKTHALDAACVGAVEALHDWPVPTLMIKATGRGSYQRTRLTRHGFPRGYLMRQKQVHGFQTGDRVKAIVPAGRKAGTHTGRVAVRKTGRFNIQTPQGAVQGISHQHCTLIQRGDGYGYHLTPSINHKGGAGQAVA

SEQ ID NO: 7910 - protein, 470 aa, Allochromatium sp.
VDTVGRDIPPTIRLNDLCDLDEETLTAARRAPVRAGIEMNNRVFVLSSTKKPLMPCTPARARKLLHAGRAAIYRRQPFTIILLERAAGDTQPIEVKLDPGSKTTGIALVADFLCGRTVIWAANLHHRGQAIRSALTDRRAFRRGRRARKTRYRAPRFLNRTRLAGWLPPSLRARVDNVRHLTTKLQARAPIASAAVETVRFDTQALQNPEISGVEYQQGELAGYEVREYLLEKWNRTCAYCGARDVPLEVEHIVPRSRGGSDRVSNLTLACRPCNERKGSQPIEEFLKGKPEVLRRIQAQARTPLKDAAAVNATRYAIGEAVKSVGLPTTFWSGGRTKKNRVTQGYVKDHWIDAACVGESGAAVRIASGMQALTIKATGRGRRRVQGNDRFGFPRGTPRSAKRVHGFQTGDLAKLTCTTGKSAGVHVGRIAAIRARGWFVLNKHDRPAREFRLLQRADGYDYTNDQPSPS

SEQ ID NO: 7911 - protein, 442 aa, unidentified; identical to SEQ ID NO: 2637

SEQ ID NO: 7912 - protein, 450 aa, unidentified; identical to SEQ ID NO: 2437

SEQ ID NO: 7913 - protein, 413 aa, Blautia sp.; identical to SEQ ID NO: 2636

SEQ ID NO: 7914 - protein, 413 aa, unidentified; identical to SEQ ID NO: 3695

SEQ ID NO: 7915 - protein, 420 aa, unidentified
MQYVYVLNRHGEPLMPCSPGKARLLLKQQKACVVKRTPFTIKLLFGSAGYKQPITLGVDAGSKHVGLSASTEKRELYSEEFTPRSDVVELLSTRKQNRRSRRYRKTRYRAPRFDNRVHSKHKGWLAPSVEVKIQEHITVIKHICKILPISLVRVETAEFDTQRLKAMLAGKPLPVGTDYQLGEMYDEYNVRQYVLKRDHYTCQCCGAHNTAKKVVKLHVHHLESRKTGGNAPSNLVTLCTTCHKNLHKGRVTLDGKERGKPLRDAAFMGIMRKTLMVRLKEELPIPVQGTYGYITKMRREQNDIKKSHTNDARCISKHPLAEPCSVCYRTKAIRHHNRQTHKANFSKKGIRKRSQMPYLVEGFRLWDKVLYKGQECFVSGRRSSGSFALKKLDGTSISKGVTFKKLRLLEPATNYLIERK

SEQ ID NO: 7916 - protein, 512 aa, unidentified; identical to SEQ ID NO: 3870

SEQ ID NO: 7917 - protein, 352 aa, Parasutterella sp.
  VARIANT 40: note = X can be any naturally occurring amino acid
MLSASPATLAPKGSANSSSRSRRVGTTGRFISFPSSKAAXIRTKRKGWLAPSVENRINAHLSRIESVLRLLPVTKITVETASFDTQLLKNPDISGKEYQEGEQLGFWNIREYVLCRDRHVCQHCYGRSKDPVLNVHHLESRRTGGDSPGNLVTLCETCHKALHRGEITLKAKRGQSFRAEAFMGIMRWEVQNRLKASHPELEVNNTYGYRTKHARIANDIAKSHCADAFCIAGNLGAERLGEFFFQKQTRRNNRQSHKLSILKGGIRKRNQAPFEVNGFRLFDKVACKGEEGFIFGRRSSGFFDVRKLDGTRISAGISYKKLHLLEKRRTYLTEIRKEEVLPPLPEGRGLRA

SEQ ID NO: 7918 - protein, 414 aa, unidentified
MPCSPAKARLLLKEKKAIVKRRTPFTIQLTIATGETKQPVSLGVDAGYKHVGLSASTEKAELYASEVELRQDITDLLSARRALRQSRRNRKTRYRAPRFDNRIRTKRKGWLAPSVENRINAHLSRIEAVLRLLPVTKITVETASFDLQLLKNPDISGKEYQEGEQLGFWNVREYVLFRDGHVCQHCHGRSKDPVLNVHHLESRRTGGDSPGNLITLCETCHKELHRGEITLKAKRGQSFRAETFMGIMRWEVLGRLKASHPELEVNNTYGYRTKHARIANDIAKSHCADAFCIAGNLGAERLGEFFFQKQTRRNNRQIHKLSILKGGIRKRNQAPFEIKGFRLFDKVACKGEEGFIFGRRSSGYFDVRKLDGTHISAGISYKKLRLLEKRQTYLTEIRKEEALPPLPEGRGLRA

SEQ ID NO: 7919 - protein, 419 aa, unidentified; identical to SEQ ID NO: 4877

SEQ ID NO: 7920 - protein, 446 aa, unidentified
VAFSLATIQKKEEGIMPNKVYVINKHGRPLMPCSPAKARHLLDAGKAKVKKRTPFTIQLVYGSSGYTQEVILGVDAGSKTIGMSASTTKEELLSAEVKPRNDVVDLLSTRREFRRARRNRKIRYRKPRFDNRVRSKHKGWLAPSVEVKIQEHITSIKRVCRILPVSKVVVETAEFDLQLLKAIADGKPVPQGEDYQQGEMYGHYNVRQYVLWRDGYTCKCCGAHTTKKKEVRLHVHHLESRKVGGDAPDNQVTLCESCHEKLHKGLIAEKDFKKRKRKSTRDATFMGIMRKTLMQRLCSELPIPVIETRGYITKATREKLLVLPKSHTNDALAIAQGKQGFNVGYLPGIVQIDKICTIRPVRHHNRQLHKATILKGGIRKSNQTEKYVFGYCLFDKVQFNGQDCFIWGRRTTGIFTIKTINGKMIKDGISFKKLKPVEKSTGYLIA

SEQ ID NO: 7921 - protein, 456 aa, unidentified
MSTCVCVLSNNGERLMPTIRLGKVRRLLKDGKAKIVKHHPFTIQLLYDSKTNTQPIEICEDVGYNYIGISVKSESHEYVSAQYDTLQDEKKHHDDCRKYRRTRRNRLRYRKPRFDNRKRSEGWLAPSLEHKKQLNIRLIERYVSVIPITRATVEVGSFDTMLLQAIQKGEPKPEGVDYQKGPRYNLATLREAVFYRDNYTCQVCGRKIADGAILHMHHMFYWKGRHGYQLDELVTACEKCHTPANHQKGGKLFGFGENKEFANLSGAAFMNAVRWQIVNALYATYGKEFVTITYGAMTKEKRIILGIEKTHNNDAYAMGDYHPAHRCVFRHYQKRRRNNRVLEKFYDATYIDARTGNKAKGKELFNGRINRNHKKDSENFHKYRSKKVSKGRRSIRRQRYAIQPYDTVRLEGKTYITSGCHNKGTRLLIPANGKSKSVAISKVQVVCHAGAWIQII

SEQ ID NO: 7922 - protein, 458 aa, Lactobacillus sp.; identical to SEQ ID NO: 4474

SEQ ID NO: 7923 - protein, 428 aa, unidentified
MSNQNYVFVLDTNGKPLNPCRPITARKLLNANKAAVFRRYPFTIILKKEVVDTPEPITLKLDPGSKATGIALLQREKVVFGASLAHRGQAIKASLDSRRAIRRSRRARHTRYRQPRFLNRTRAKGWLAPSLQHRVETTLTWIDRFIRFAPIGSIVQELVRFDLQRLENPEISGIEYQQGELQGYEVREYLLNKWDRKCAYCGAENVPLQVEHIHPKAKGGSNRISNLCLACDKCNAKKGTQDIKQFLAKKPEVLKRVLAQAKRPLKDAAAVNSTRWALFNRLKAIGLPVSTASGGLTKFNRTRLQLPKAHWLDAACVGKVESLLLLTQQPLLIKALGWGCRQMVQTDKYGFPRKGYRAKQKVKNWNTGDIVSVVAGKFAGITGKRLKTVRFKGNFDIRLSKELVISVSRNDIKAVHRKDGYDYKFAQV

SEQ ID NO: 7924 - protein, 413 aa, unidentified
LMPCSPAKARLLLKEKKAIVVRRTPFTIQLTIATGESKQPVSLGVDAGYKHVGLSASTEKAELYASEVELRQDITDLLSARRALRQSRRNRKTRYRAPRFDNRIRTKRKGWLAPSVENRINAHLSRIETVIRLLPVTKISVETTSFDMQLLKNSDIAGKEYQESEQLGFWNVREYVLFRDGHVCQHCHGRSKDPVLNHLESRRTGGDSPGNLITLCETCHKELHRGEITLKAKRGQSFRAETFMGIMRWEVLDRLKASHPKLEVQNTYGYRTKHARIVNGIAKSHCADAFCIAGNLGAERLGEFLFQKQTRRNNRQIHKLSILKGGIRKRNQVPFEVKGFRLFDKVACKGEEGFIFGRRSSGYFDVRKLDGTRISAGISYKKLRLLEKRQTYLTEIRKEEALPPLPEGRGLRA

SEQ ID NO: 7925 - protein, 456 aa, unidentified
MSTCVCVLTNNGERLMPTFRLGKVRHLLKDGKAKIVKHHPFTIQLLYDSKTNTQPIETCEDVGYNYIGISVKSESHEYVSAQYDTLQDEKEHHNDCRKYRRTRRNRLRYRKSRFDNRKRDKGWLAPSLEHKKQLNISLVERYVSVIPITHVTVEVGSFDTMLLQSIQKGEAKPEGADYQEGPRYNLATLREAVFYRDNYTCQVCGRKIADGAILHMHHMFYWKGRHGYKLDELVTACEKCHTPANHQKGGKLFGFGEDKEFADLSGAAFMNAVRWQIVNALHTTYSKEFVTITYGAMTKENRIALQLEKSHNNDAYAMGDFHPVHRCGFRHYQKRRRNNRVLEKFYDATYIDTRTGNKAKGKELFNGRISRNHKKDSENLHKYRSKKVSKGRRSIRRQRYAIQPYDTVRLEGKTYITSGCHNKGTRLLIPANGKSKSVAISKIQVVCHAGAWIQII

SEQ ID NO: 7926 - protein, 434 aa, Lactobacillus sp.; identical to SEQ ID NO: 2383

SEQ ID NO: 7927 - protein, 418 aa, Moorena sp.; identical to SEQ ID NO: 6948

SEQ ID NO: 7928 - protein, 413 aa, unidentified; identical to SEQ ID NO: 3119

SEQ ID NO: 7929 - protein, 432 aa, unidentified; identical to SEQ ID NO: 4244

SEQ ID NO: 7930 - protein, 344 aa, unidentified
MYVFVIGLDGTRLMPCKPRKARKLIEAHKAEIYKKQPFTIRLLYKTGCASQPITLGIDTGSQHIGIAVTSENKVLYQAEIELRSTMDKRSLMETRYSYRRSRRYRKTRYRSPKFRFHTKRTYSETLVKRKTTGIMTHWVKHTNSMSTNRPDGWLAPSMQSKVDHHIRWINRFLDVLPPDTKLRLEIARFDMARMKNPEVHNELYQHGPQYDYENLKAYVFNRDHYKCVVCKRKLGSKQPDGHSLKGMMHHITFRSKGATDNPDQLVTVCEYCHTPQAHKEGGVLWDLKEKHKSVQRGLRDATQMNIIRTRLVKAFPDAELTYGNITAADRKKMHQSHMLVMQLQ

SEQ ID NO: 7931 - protein, 418 aa, unidentified; identical to SEQ ID NO: 2425

SEQ ID NO: 7932 - protein, 469 aa, unidentified; identical to SEQ ID NO: 6998

SEQ ID NO: 7933 - protein, 331 aa, unidentified
LLSARRAFRRNRRNRKTRYRAPRFNNRVHSKHKGWLAPSVEVKIQEHITLIKRVCRILPVTLVRVETAEFDTQRLKAMLEGKPLPVGTDYQLGEMYDEYNVRQYVLKRDKYTCQCCGAHPTKTKAVKLHVHHIETRRTGGNAPNNLITLCTACHKALHAGKVTLNGKKRGKPLKDAAFMGIMRKTLMERLLKELKIPVQETYGYITKYLREKHSIPKSHTNDARCISKNPLAIPCDTCYYTKAIRHHNRQLHKATILKGGIRKANQAPYTVKGYRLWDKVSYNGSECFITGRRTSGYFALKKLDGTVVSNSASYKKLRLQEIATNYITERR

SEQ ID NO: 7934 - protein, 411 aa, unidentified; identical to SEQ ID NO: 2663

SEQ ID NO: 7935 - protein, 418 aa, Anoxybacillus sp.
IRPLAPCHEAVARKLLKQGKAAIYRRFPFTIILKKSVDESEIKATYRLKIDYGSRHTGLAILRGQEVVWLGQLDHRTDIKERIDKRRAFRRARRNRKTRYRKPRFLNRKRKEGWLPSSLESRVQNIQTWVNRLKKLCPIGNISYENAKFDTQLMRNPEINGVEYQQGTLQGYEVREYLLEKFGRKCCYCGKENVPLEVEHIIPKSRGGTDRVDNLCLACHDCNQRKGSKTAEEFGYSHIQEMVKKTLKDASVVNATRWKVYEVLKQTGLDVECGTGARTKMNRIRLDLPKTHYFDACCVGESTPNHLYFKTKEVLFIRAKGRGSRSRTNLDRYGFPRGYLARQKFFFGFQTGDMVKAVVPRGKYQGVWFGEVACRKTGSFDIKGKDGKRIAQGINYRYVQVIQRFDGYAYGKGVAELA

SEQ ID NO: 7936 - protein, 556 aa, Streptomyces sp.; identical to SEQ ID NO: 3394

SEQ ID NO: 7937 - protein, 431 aa, unidentified
MPDKVYVISRLGHPLMPCSPAKARHLLDDKKAKVVKRMPFTIRLLYGSTKYIQPIILGVDAGSKTIGLSASTAKEEVFAAEVMPRNDVVENLSTRREFRRARRNRTTRYRKPRSDNRVRSNHERRLAPSVKVKIQEHITSIKRVCTILPISKVVIETAEFDLQLLKAIQEGKPIPEGEDYQKGEMYGSYNVCQYVLWRDNYTCICCGVRGTPKNPVRLHVHHFESRKYSGNAPDNHGTLCDDCHKKFHLGIITDVKLKTRRRQSTRDAAFMGIMRKTLMWRLRTELFIPVAETKGYITKATREKLLVLPKSHTRDALAIAQGRHGFCIKEYAYVEPANHIYTVRPVRHHNRQLHKASILKGGIRKRNQASKYVFGFRLYDKVLYQGKACFVWGRRTSGTFLLRTIDGIKVKDGVSYRNLTLLERSSNYLIA

SEQ ID NO: 7938 - protein, 419 aa, unidentified
MVYVISQDGKPLMPCSDPIARLLLKQGKAKVKKREPFTIKLTYETTNYTQGLTLGVDTGSGTIGTAVSKDNGDIVYMSEVVVRNDITDKMTQRAKYRRNRRNRKTRYRKARWLNRASSIKKDRFSPTMQSKLHSHVREIEYIQSILPVTEMVFETGQFDMQLMKNPSLANSKVRPWGYQKGANYGFENTKAMVLNRDNYTCQCCKGKHKDSKLEVHHIVFRSQGGSDEESNLLTLCHTCHKDLHSGKINPKLSGKVKGNLKYATQMNSIRKQLFRFYPNAIETFGYVTKANRLHLGVDKEHYYDACTIATQGNAFNVKSNLYKKKCVSDGDFQKTKGIRSEQPIVTDKICGFRKFDKVRYFGNDYFIKGRMSTGYAILMDIDGNKIDFSTMPRGYKTPKLSNCKRITARSTVMTQVKVV

SEQ ID NO: 7939 - protein, 456 aa, unidentified
MSTCVCVLSNSGERLMPTFRLGKVRRLLKDGKAKIVKHHPFTIQLLYDSKTNTQPIEICEDVGYNYIGISVKSESHEYVSAQYDTLQDEKEHHDDCRKYRRTRRNRLRYRKPRFDNRKRSEGWLAPSLEHKKQLNIRLVERYVSVIPITHATVEVGSFDTMLLQAIQKVESKPEGVDYQKGPRYNLATLREAVFYRDNYTCQVCGRKIADGAILHMHHMFYWKGRHGYQLDELVTACEKCHTPANHQKGGKLFGFGEDKEFANLSGAAFMNAVRWKIVDALHATYGKEFVTITYGAMTKEKRIILGIEKTHSNDAYAMGDYHPVHRCVFRHYQKRRRNNRVLEKFYDATYIDARTGNKAKGKELFNGRISRNHKKDSEDLHKYRSKKVSKGRRSIRRQRYAIQPYDTVRLESKTYITSGCHNKGTRLLIPANVKSKSVAISKVQVVCHAGAWIQII

SEQ ID NO: 7940 - protein, 415 aa, unidentified
MVYVQDIDGKPMMPTTRHGKVRRLLKSNKAIVVNLCPFTIKLTYVTSDYKQEIVLGVDAGTKHVGLSATTKSKELYSSEVILRNDIVDLLSTRRELRRARRNRLRYRKPRFNNRIKSKRPGWIAPSVKYKIDAHIRVVENVCSILPISRIVIEVAQFDTQKIKNPNISGKEYQEGDQLGFWNTREYVLARDGHKCQYCKGKSKDKILNVHHIESRKTGGDSPSNLITLCETCHKEYHKGNIDLKIRRGKSLRDAAVMGIMKWRLYEEIKSKYDRVSMTFGYVTKYNRINHGFEKSHVSDAFVISKNFNAIRLGYYYKARLVRSHTRQIHKQKIQKGGIKRLNQSPFEVFGFRLFDRVMFENSYYFIFGRRKTGSFDIRYIDGKNQKNVTYKKLKLSRCKRFMIQMELNKKNTDMF

SEQ ID NO: 7941 - protein, 425 aa, Tolypothrix sp.; identical to SEQ ID NO: 6179

SEQ ID NO: 7942 - protein, 441 aa, unidentified
MELRITYRKVKYFQGVDILVYIISIDGKPLMPCKPVIARLLLKQHKAKVIKKYPFTIKLLYKTKTEYTQPLTLGIDTGSSKIGSAVVDENNNVLYLSQVEVRNDITDKMKQRAKYRRNRRNRKTRYRKARWLNRKNSIKEDRFSPTIVSKINSHLKEINFVKSILPIQNVILETATFDPYALKNPAVLHNKWLYQKGVNYGFANTRAYVLGRDNYTCQYCKGKSKDSKLEVHHIIFRSQSGSDESKNLITLCKTCHGKLHNGKINLKKNGKVKGQLKHATQMNSIRQQLLRLLPEATETFGFITKEHRQLMKLPKEHYYDAVAIACLNNIENTGLIGVNFKTKNILFKRCIADGDFQQTKGIRSEQRIITGKIQGFRKLDKVEYQGKEYFIKGRMSTGYAILMDIEGNKINLKPIPKFERMKRMQARKSWILSQEVIQNIC

SEQ ID NO: 7943 - protein, 268 aa, unidentified
MVYVVANDGQPLMPTERHGKVCRMLRSGMAKVIKKCPFTIQLQYESERNVQPVSLGVDAGSKHIGISATTKTKVLYESDVELRDDIVKLLATRRQLRRSRRSRKTRYRPARFDNRKRKEGWLAPSIQQKIGSHLTVVANVCKILPINQIIVETASFDIQKIKNPEIQGIEYQQGEQMDFWNVREYVFFRDGHTCQCCKGRSKDKILNVHHIESRKIGGNAPNNLITLCETCHKGYHNGTVILPKNIKRGMQFKDAAFMGIMRWAFTMH

SEQ ID NO: 7944 - protein, 406 aa, unidentified
MVYIKDIDGRPLMPTKRHGKVRWLLKENKAVVINLCPFTIQLTYKSTDHKQPVTLGIDAGAKHIGFSATAEKEELFACETTLRTDIVDLLSTRLQNRRTRRSRLRYRKPRFNNRGSSKKKGWVAPSVKQRIDSHLNEVNEIHKILPITKIVIEVAQFDTQKMKNHDISGSDYQNGEQLGFWNVREYVLFRDGHKCSHCKGKSKDPVLNVHHLESRKTGGDSPSNLVTLCESCHKAFHKGEIELKKKRGKSLRDAAVMGIMKWKLYEELKSRYDNVSMTFGYITKYNRIKYGIEKSHTSDAFVISRNFNAKRIERQYLKRLVRRHNRQIHKMKILKGGKKKNNQAPFEVFRFRLFDKVLYNNEICFIYGRRKSGNFNIRDFNGENPKDVSYKKLKLIRGKMHPIILK

SEQ ID NO: 7945 - protein, 427 aa, Enterococcus sp.; identical to SEQ ID NO: 5630

SEQ ID NO: 7946 - protein, 393 aa, Exiguobacterium sp.; identical to SEQ ID NO: 7321

SEQ ID NO: 7947 - protein, 442 aa, unidentified; identical to SEQ ID NO: 2939

SEQ ID NO: 7948 - protein, 419 aa, unidentified; identical to SEQ ID NO: 6355

SEQ ID NO: 7949 - protein, 465 aa, unidentified; identical to SEQ ID NO: 6840

SEQ ID NO: 7950 - protein, 437 aa, Sulfobacillus sp.
MVFVLDRQKNPLMSCTEKRARQLLERGRAIVHKMAPFTIRLKDRTAEGSTFQPLRVKFDPGSKTTGVALVLEGAKGSKVVFFGELVHKAGIKAKLDARRALRRGRRHRKTRYRKPRFQNRRRKAGWLPPSLEARVDQTLHVLVKLRKLAPFTDLSVEHVRFDTQKLENPEISGVEYQQGTLLGYEVREYLLEKWGRACVYCGATDVPLEVEHIIPKSRGGTDRVSNLALACHACNQVKGSRTAEEFGYPDIQVQARKPLKDVAMMNATRWRLYEQLKATGLPVEAGSGARTKMQRLNHGFPKEHYYDALCAGESTPDRFTSLPAYVQVWTAKGRGNRQRCRTDKHGFPIRYLSGKKVHFGFRTGDLVRTQKRRGKQVGTWAGRLTVRADGRFVVTTADGLRIEASWRSCHLLQRGDGWQYAQKLANLERREAASSPA

SEQ ID NO: 7951 - protein, 410 aa, unidentified
LTERETGDVQTVELCMDTGYLHIGTSVKSEKHEYLGVQIDTLTDEKQKHDACRMYRRQRRSRKRYRQSRFNNRKRSDGWIAPSLEHKKDIHIQTISRICNAMPITNITLEMGNFDTQVLKALEENRPLPQGTDYQHGERYGIATLREAVFARDKYTCQCCRKTIADGAILHVHHIIYRSRGGTNRMSNLATVCDRCHTPANHKPGGRLYNWKPKIASFKGATFMTAVRWKMYNEVKSKFSDINIHITYGAETKEQRRAFDITKSHVNDALVMGQFHPKHRSRPVCYKKKRRNNRCLEKFYDAKYIDSRDGKKRSGQELFNGRINRNHKKDSENLHQYRQQKVSAGRRTIRKQHYSIQPHDIIVFNRQQFETSGCHCNGARAILLPQKKSVAIKKLSIHKYAGGYFKSDFT

SEQ ID NO: 7952 - protein, 431 aa, unidentified
MPNKVYVINKHGRPLMPCSPAKARHLLDAGKAKVKKRTPFTIQLVYGSSGYTQEVILGVDAGSKTIGMSASTTKEELLSAEVKPRNDVVDLLSTRREFRRVRRNRKTRYRKPRFDNRVRSKHKEWLAPSVEVKIQEHITSIKRVCRILPVSKVVIETAEFDLQLLKAIADGKSVPQGEDYQKGEMYGHYNVRQYVLWRDDYTCQCCGAHTTKKKEVRLHVHHLESRKTGGDAPSNLITLCDSCHEKLHKGLIAEKDFKKRKRRSTWDATFMGIMRKTLMQRLCSELPIHVVETRGYITKATREKLLVLPKSHINDALAIAQGKHGFNVGYLPGILQIDMIYTIRPVRHHNRQLHKATILKGGIRKSNQTGKYVFGYRLFDKVQFNGQDCFIWGRRTTGIFTIKTINGKMIKDGISFKKLKLVEKSTSYLIA

SEQ ID NO: 7953 - protein, 413 aa, unidentified; identical to SEQ ID NO: 5215

SEQ ID NO: 7954 - protein, 355 aa, Halomonas sp.
FRRRRRSANLRYRAPRFNNRIKPKGWLAPSLQHRVDTVMAWVNRLSKSAPITGISQELVRFDTQKLESPEISGVEYQQGTLLGYEVREYLLEKWGRECAYCGTADTPLEIEHVVPRSRGGSNRVSNLTLSCHPCNAEKDSQTLTDFFATNKGLKKRLKANGLSADAQLERVQRQLKQPMRDASAVNATRWALFSALKTTDLPVAVSSGGRTKYNRQRLNIPKTHALDAACVGAFGKLYDWTVPTLTIKAMGRGSYQRTRLTKHGFPRGFLMRQKQVHGFQTGDMVRAIVPTGKKAGTHTGRVAIRKTGSFNIQAEYGAVQGISHKYCTLIQRSDGYGYYVTLFSNLTGEAGRAVA

SEQ ID NO: 7955 - protein, 427 aa, Moorena sp.; identical to SEQ ID NO: 4008

SEQ ID NO: 7956 - protein, 413 aa, Clostridium sp.; identical to SEQ ID NO: 4134

SEQ ID NO: 7957 - protein, 399 aa, unidentified
KAIVVRRTPFTIQLTIATGEAKQPVSLGVDAGYKHVGLSASTEKAELYASEVELRQDVSDLLSARRALRQSRRSRNTRYRAPRFDNRIRTKRKGWLAPTVENRINVHLSRIETVLRLLPVTKITVETASFDTQLLKNPDIAGKEYQEGEQLGFWNVREYVLFRDGHVCQHCHGRSKDPVLNVHHLESRRTGGDSPGNLITLCETCHKALHRGEIKLKAKRGRSFRAETFMGIMRWGVLNRLKASHPKLEVHNTYGYRTKHARIANGIAKSHCADAFCIAGNFGAKRLGEFFFQKQTRRNNRQIHKLSILKHGLRKRNQAPFEVKGFRLFDKVVCQGEEGFIFGRRSSGSFDVRKLDGTRISAGISYKKLRLLEKRRTYLKEIRKEEALPPLPEGRSLRA

SEQ ID NO: 7958 - protein, 464 aa, unidentified; identical to SEQ ID NO: 3972

SEQ ID NO: 7959 - protein, 418 aa, Moorena sp.
MQNYVFVIDANKQPLNPIHPRKARRLLDKGKAAVFRMYPFTIILKTAISNPTISPGQIKIDPGSKVTGFALVQNNQVIWGMELEHRGGFIKKKLESRKAVRRGRRNRHTRYRKPRFLNRKRSEGWLPPSLEHRVSTIETWVKRLTKFCPINEIWVERVKFDTQKMQKPEISGVEYQQGELAGYEVREYLLEKWRRECTYCGKQSVPLQIEHIQPKSLGGSNRVSNLCLACEKCNQRKGNKPIEEFLKNKPSLLQKIKTKAKQPLLDAAAVNTTRNKLVKVLQNILLVVTGTGAQTKYNRIKLGLPKQHWIDAACVGDIETLVLKTYQPLLVTCKGQGGRQKAALNKYGYPIRHNPLKPIKGWVTGDIAKHQKLGIGKVTPRSKGSFGFTPLGTKGYKSCKRQDISAIHRKDGYTYRFC

SEQ ID NO: 7960 - protein, 458 aa, unidentified; identical to SEQ ID NO: 4474

SEQ ID NO: 7961 - protein, 518 aa, Anaerostipes sp.; identical to SEQ ID NO: 3878

SEQ ID NO: 7962 - protein, 422 aa, unidentified
LNKRGKPLMPCSPAKARLLLKEKKAIVVRRTPFTIQLTIATGESKQPVSLGVDAGYKHVGLSASTEKAELYASEVELRKDITDLLSARRALRQSRRNRKTRYRAPRFDNRIRTKRKGWLAPSVENRINAHLSRIEAVLRLLPITKITVETASFDMQRLKNPDISGKEYQEGEQLGFWNVREYVLFRDGHVCRHCHGRSKDPVLNVHHLESRRTGSDSPDNLITLCETCHKALHRGEITLKAKRGQSFRAQAFMGIMRREVLNRLKASYPELKVHETYGYLTKHARIANGSVKSHGADAFCIAGNLGAERLGEFFFQKQTRRNNRQIHKLSILKGGIRKRNQAPFEAKGFRLFDKVACQGEEGFIFGRRSSGSFDVRKLDGTRISAGISCKKLRLLERRRTYLTEIRKEEALPPLPEGRGLRA

SEQ ID NO: 7963 - protein, 432 aa, unidentified
MSQVFVLDRDRQPLDPCHPARARELLRNGRAAVLRRLPFTIILNDRRRAASVVHEHRVKIDPGSRTTGLALVAGARLLWAAELSHRGQRITAALRSRHAIRRGRRQRQTRYRPPRFLNRRRPASWLPPSLQSRVCHVMTWVQRLARSCPMTALSQELVRFDTQRMQHAEITGVAYQQGVLAGYEVREYLLEKWHRTCAYCHKTGVPLQVEHIVPKVRGGSDRVSNLTLACGPCNQKKGAQTASEFGFPQVQAQARMPLHDAAAVNATRWALYGQLCATGLPVETGTGGRTKYNRTRLGIPKSHWGDAACVGASTPETLHVAGIAPLGIRAMGHGTRQMCRTEAHGFPKNHRGRQKRYWGLQTGDLVKAMVPTGKYVGTWVSRVVVRASGWFDLVIDGKKTSVHHKHCTRLWAADGYTYTLPAVAGPAVSSPR

SEQ ID NO: 7964 - protein, 512 aa, unidentified
MSTVYVLNKDGKPLMPTTRGGHVRHLLKEQKARVVRTKPFTIQLLYETNDVVQPLYLGIDPGRTNIGVAVVKTDGTAVFTAHLETRNKEIPKLMQGRKKARRARRTNGRRCRRQRRAKANGTISKKCVKQATAQNGSVSKRANEIGVIKRHLPGCEKEVLCIGIKNKEAKFSNRTRPEGWLTPTANQLLQTHINLVKKIQKFLPISDVVLEINKFAFMRLDNPNVQKWQYQQGPLYQKASLEEAVSEMQEHHCLFCKNTIDHYHHVVPQHKNGSNTIGNIVGLCAKHHDLVHKDTSWQEKLAKKKTGLNKRYGALSVLNQIIPALTKELSSLFPKHFFATNGKSTYDYRAAHGVSKDHWLDAYCIAGSVLPNDACDNNINNRVPYELKQFRRHDRRALHKENMSRVYTLNGKKVATNRHKAVEQATDSLEEFCQNHPDDVCKLKVKEHHPEYRNPKRNFPGCVFLVGKHTHVMQGTSGSHNGKADGYYDTNGNSYSSGKCKFVVKNEGIVFT

SEQ ID NO: 7965 - protein, 456 aa, unidentified; identical to SEQ ID NO: 7423

SEQ ID NO: 7966 - protein, 275 aa, unidentified
VETASFDLQLLKNPDISGKEYQEGEQLGFWNIREYVLCRDGHVCQHCYGRSKDPVLNVHHLESRRTGGDSPGNLITLCETCHKALHRGEITLKAKRGQSFRAEAFMGIMRWEVHNRLRALHPGIEVSNTYGYRTKHARIANGIAKSHCADAFCIAGNLGAERLCEFFFQKQTRRNNRQIHKLSILKGGIRKRNQAPFEVKGFRLFDKVACQGEEGFIFGRRSSGFFDVRKLDGTRISAGISCKKLHLLEKRRTYLTEIRKEEALPALPEGRGLRA

SEQ ID NO: 7967 - protein, 415 aa, unidentified; identical to SEQ ID NO: 6883

SEQ ID NO: 7968 - protein, 268 aa, unidentified
LLKAIADGKPVPQGEDYQQGEMYGHYNVRQYVLWRDGYTCKCCGAHTTKKKEVRLHVHHLESRKVGGDAPDNQVTLCESCHEKLHKGLIAEKDFKKRKRRSTRDATFMGIMRKTLMQRLCSELPIPVIETRGYITKATREKLLVLPKSHTNDALAIAQGKQGFNVGYLPGIVQIDKICTIRPVRHHNRQLHKATILKGGIRKSNQTEKYVFGYCLFDKVQFNGQDCFIWGRRTTGIFTIKTINGKMIKDGISFKKLKLVEKSTSYLIA

SEQ ID NO: 7969 - protein, 419 aa, Moorena sp.; identical to SEQ ID NO: 3991

SEQ ID NO: 7970 - protein, 442 aa, unidentified; identical to SEQ ID NO: 2903

SEQ ID NO: 7971 - protein, 458 aa, unidentified; identical to SEQ ID NO: 4474

SEQ ID NO: 7972 - protein, 417 aa, Ktedonobacter sp.; identical to SEQ ID NO: 7380

SEQ ID NO: 7973 - protein, 431 aa, unidentified
MPNKVYVINKHGRPLMPCSPAKARHLLDAGKAKVKKRTPFTIQLVYGSSGYTQEVILGVDAGSKTIGVSASTKREELFAANVIPRNDVVDLLSTRREFRRARRNRKTRYRKPRFDNRVRSKHKGWLAPSVEVKIQEHITAIKTVCRILPVSKVVVETAEFDLQLLKAIADGKPVPQGEDYQKGEMYGHYNVRQYVLWRDNYTCQCCGTHPSKKKEVRLHVHHLESRKVGGDAPDNQVTLCESCHEKLHKGLIAEKDFKKRKRRSTRDATFMGIMRKTLMQRLCSELLIPVIETRGYITKATREKLLVLPKSHTNDALAIAQGKRGFNVGYLPEIAQIDKIYTIRPVRHHNRQLHKAAILKGGIRKSNQAGKYVFGYRLFDKVQFNGQDCFIWGRRTTGIFTIKTINGKMIKDGISFKKLKLVEKSTSYLIA

SEQ ID NO: 7974 - protein, 437 aa, unidentified
MSTCVCVLSNSGERLMPTFRLGKVRRLLKDGKAKIVKHHPFTIQLLYDSKTNTQPIEICEDVGYNYIGISVKSQSHEYVSAQYDTLQDEKACHDSCRKLRRTRRNRLRYRKPRFDNRKRGEGWLAPSLRHKKELNVNVVKMYCAVMPITHATVEVGSFDTMLLHAIQKGESKPEGVDYQKGPRYNLATLREAVFYRDNYTCQVCGRKIADGAILHMHHMFYWKGRHGYQLDELVTACEKCHMPANHQKGGKLFGFGEDKEFANLSGAAFMNAVRWQIVNALYATYGKEFVTITYGAMTKEKRIALQLEKTHSNDAYAMGNCHPAHRCEFRHYQKRCRNNRVLEKFYDATYIDTRTGNKAKGKELFNGRISRNHKKDSEDLHKYRSKKVSKGRRSIRRQRYAIQPYDTVRLEGKTYITSGCHNKGTRLLISANGKSKS

SEQ ID NO: 7975 - protein, 483 aa, Oscillochloris sp.; identical to SEQ ID NO: 6098

SEQ ID NO: 7976 - protein, 512 aa, unidentified
MSTVYVLNKDGKPLMPTTRCGHVRHLLKEQKARVVTSKPFTIQLLYETDDVVQPLYLGIDPGRTNIGVAVVKADGTAVFTAHLETRNKEIPKLMKKRKDSRRARRTNGRRCRRQRRAKANGTISKKCVKQTTAQNGSVSKRAKEIGVIKRHLPGCEKDVLCIGIKNKEAKFSNRTKSEGWLTPTANQLLQTHINLVKKIRKFLPISDVVLEINKFAFMQLDNPNVQKWQYQQGPLYQKANLEEAVSEMQEHHCLFCKKPIAHYHHVVPQSENGSNTIGNIVGLCTKHHDLVHKDTAWQKKLAKKKTGLNKKYGALSVLNQIIPALTKELSSLFPKHFFATNGKSTYDYRAAHGVRKDHWLDAYCIACSVLPNDVCDKNINSRVLYELKQFRRHDRRALNNENMSRVYTLNENVVATNRHKATKQTTDSLEEFRQNHPDDACKLKVKEHHPTYRNMSRNYPGSVFLVGNQVHVMQGVAGSKDGKATTYKDTNANSIAAGKCKFVAKNSGILFV

SEQ ID NO: 7977 - protein, 442 aa, unidentified
MSTSVFVLDKKHRPLMPCRPARARRLLRAGRARVVKRFPFVIRLVDRTVEQSEVQPVLIKLDPGSRETGAAVVRDDGKKRHHALAFFVIEHRGGAIRDALKARSAFRRRRRSQNFRCRSPRFLNRVKPKGWLPPSLRHRVETTLSFVRRMCRYLPVSGIAAELVKFDSQKLQTPEVSGIEYQQGTLFEYEVREYLLEKFGRKCVYCGAEGVPLNIDHVVPRAKGGSNRVSNLVLACVSCNQKKGARSLEDFLKGKPEVLARVRRELKTPLRDAAAVNATRWVLFNELKATGLPVETGSGALTKLNRHAFGVEKEHWLDALCVGRLNGAVTRKGLNVLEIRCMGRGSRQRTRLTKYGFPRGYLMRQKCVHGFATGDMVEANVPKGKKAGLWRGRVAVRVSGSFNIQTPKGVIQGVGWKHCRLISHNDGYGYAWLGHAPHSSPA

SEQ ID NO: 7978 - protein, 419 aa, unidentified; identical to SEQ ID NO: 3670

SEQ ID NO: 7979 - protein, 480 aa, unidentified
LYTKPLDNIGEGSLPPSGEINLKGMTFMVYVKSIDGKALMPTSNAKARKLLKQKKAKVVSLRPFVVKLTYKTKTEYIQKLNLGVDSGYSNIGFSVIDAKQEYIAGEVKLLEGMKKRLLEKASYRRIRRSRLRYRKARWNNRVKSKKKGWLAPSLKHKLDTHIKFIDYLKNILPIEKITIEVANFDIQKMKDDLISGIDYQNGDMFGFWNVREFVLHRDGHKCQNPNCKHKDKKEQILKVHHIRYRSEGGSDRPENLITLCSKCHIPANHKKGKFLYDWCVNGKKVRGFKDATFMSMIRWYLVNELKSKHNNVSITYGYITKNHRIQNGIEKSHLNDAFAITKGTNQARTKDRFLVIQDRLKNRSLEKFYDSKIIDIRTGKKVSGGDLSCGRSTRNKNLNTENLRKYRGAKISKGQRRIRKQKYFYQPNDLVKYDGKVYTVKGTQNEGKYIALKEIKKVPKVELLIPYVFKKGLNWSYGLC

SEQ ID NO: 7980 - protein, 413 aa, unidentified
MTSYAFVLDANGKQLAPAKEQKAWFLIRKKRAALVSKYPMVIQLKKEIPENEICKDEIRCGIDDGGLHVGIALVQKCKTKNKVVFKGTIEQRNDVKHLMEVRRSYRHYHRYHKRYRPARFDNRKSSKRKKRIAPSILQKRQAIIRVIHWLNKWINITNYWLEDVSIDIRALTDGYKPYRWQYQKSNRLDENIRKAAILRDGGKCMECGKLNCRLEVHHIKPRRRNGSDTLDNLITLCKSCHQKTEGQEELYMARYFSLLKSSDHKNLNYAQHVMIGKEWLRKQLSSLGVLYLTNGGDTANKRIDWNIEKSHANDAVCITNLQPDTYDMKEWTVKPMRRQSKAKTDNVLGIKHRDLVEYTLKNGETHRGYVTALYPEQKAINFQSPTKHCKKVNARKCKLLWKYSKIYWFENAS

SEQ ID NO: 7981 - protein, 454 aa, Calothrix sp.; identical to SEQ ID NO: 4352

SEQ ID NO: 7982 - protein, 419 aa, unidentified
MVYVISQDGKPLMPCSDPIARLLLKQGKAKVKKREPFTIKLTYETTNYTQGLTLGVDTGSGTIGTAVSKDNGDIVYMSEVVVRNDITDKMTQRAKYRRNRRNRKTRYRKARWLNRASSIKKDRFSPTMQSKLHSHVREIEYIQSILPVTEMVFETGQFDMHLMKNPSLANPKVRPWGYQKGANYGFENTKAMVLNRDNYTCQCCKGKHKDSKLEVHHIVFRSQGGSDEESNLLTLCHTCHKDLHSGKINPKLSGKVKGNLKYATQMNSIRKQLFRFYPNAIETFGYVTKVNRLHLGVAKEHYYDACTIATQGNAFNVKSNLYKKKCVSDGDFQKTKGIRSEQPIVTDKICGFRKFDKVRYFGNDYFIKGRMSTGYAILMDIDGNKIDFSTMPRGYKTPKLSNCKRITARSTVMTQVKVV

SEQ ID NO: 7983 - protein, 442 aa, unidentified
MSTSVFVLDKKHRPLMPCRPARARRLLRAGRARVVKRFPFVIRLVDRTVEQSEVQPVLIKLDPGSRETGAAVVRDDEKKRHHALAFFVIKHRGGAIRDALKARSAFRRRRRSQNFRCRSPRFLNRVKPKGWLPPSLRHRVETTLSFVRRMCRYLPVSGIATELVKFDSQKLQNPEVSGVKYQQGTLFAYEVREYLLEKFGRKCVYCGAEGVPLNIDHVVPRAKGGSNRVSNLVLACVSCNQKKGARSLEDFLKGKPEVLARVRRELKTPLRDAAAVNATRWVLFNELKATGLPVETGSGALTKFNRHAFGVEKEHWLDALCVGRLNGVVTRKGLNVLEIRCMGRGSRQRTRLTKYGFPRGYLMRQKCVHGFATGDMVEANVPKGKKAGLWRGRVAVRVSGSFNIQTPKGVIQGVGWKHCRLISHNDGYGYAWLGHAPHSSPA

SEQ ID NO: 7984 - protein, 411 aa, unidentified
MVYVISKDGKPLMPTKRYGKVRRLLKQKLARVVKREPFTIQLLYDTTDYTQDVIVGVDIGSKTVGISAVSEKEELFSAEITLRQDIKDLLLERRGYRRSRRYRKRRYRKARFLNRKRPEGWLAPSIKWKVDAHVRIVKFLSKILPILKVVVEVAPFDTQKIVNPNIQGKEYQEGPQKGFWDVREYCLWRAGYKSEISGKKGVLEVHHIIPRSKGGTNNPSNLIVLTVEEHEAIHEGKLKIPKSKLEKIKILKDASHVSIIGWYIVNTLKEKQYNVKVTYGSFTKAKRIEIGLEKSHRNDAFVIAGGNKNVKRTNLWYIGKFFRRQNRSLHKANPIKGGRRPVNTIKQAYEFRRFDKVKYQGKVYIITALRSKGYFSIGDLSGKKIHDGVKYTKLKRIEIAKTLMFVGSNIT

SEQ ID NO: 7985 - protein, 467 aa, Erysipelotrichaceae sp.
MPTRRRGHVKRLLNKGKARIVSHVPFVIQLKYDGSKNTQPLFGGIDPGRTNIGAAVVTPEGKCVYRSHTASRNRDVPKKMEARKSHRQASRRGERLRRKRRARANGTTTEFPDGRMLPGYKKPVMVKDIINTTAKFNYRKRPEKWLTPTANQLVQTHENLICRISAILPVTDWTIEANKFAFMQMDNGKCYGTDFQNGRMKGYKNSHEYVYIRQNGVCPMCGAPIEHYHHIIPRSRGGSDLPENILGVCMKCHAQIHKGELRSDMKGVMKKYGSLSVLNQAIPYIWQWMTETYGEDHAHFCTGVETQTVRDDSGLPKDHDIDALCIACIGSGITPVRRLPRTFEIVQFCRHSRANINNQRERTYRLDGRIVCRNRHKRFEQKGDSIEEFRQKYPDQVSRLTVTKSTRYYNDADRLMPGAVFLFDGERYVLQSQLTGGRYYRAVGCEKRNFPAAKCTIIRENAGLVYV

SEQ ID NO: 7986 - protein, 430 aa, unidentified
MPKVYVLNRHGRPLMPCTPAKARHLLDAGKAKVRHRTPFTIQLLYGSTGYTQEVILGVDAGSKTIGLSAATETEELFSAEVKPRNDVVELMSARRQFRRARRNRTTRYRKPRFDNRVRSKHKGWLAPSVEVKIQEHMTAIRRACAILPVSKVVVETAEFDLQLLKAVAEGKPVPQGEDYQKGEMYGHYNVRQYVLWRDSYTCCICGVHGSVRKGVPLHVHHLESRRVGGDAPDNLVTLCTACRDKLHKGIIMAADIKKRKRRSTSDATFMGIMRMTLLRRLREQLPVPVVETRGYITKATRENLLVLPKSHANDALAIAHGPQGFRAEHLPNIRQADRLYTIRPVRHHNRQLHKATILKGGVRKTNQAEKYICGFRLYDKVLYNGIECFVWGRRTSGSFLLRQLNGEKVKDGVSYKHLKLLERSQSYLVA

SEQ ID NO: 7987 - protein, 416 aa, unidentified
  REGION 1..416: note = Ga0373625_0013209
MVYVLSKEGKPLMPTNRHGKVRHLLKDGKAKVIKRTPFTIQLLYDSEEYTQPITLGIDSGYQNIGLSAVTESQEVFSAEVKLRTDIVKLNSERRQYRRARRNRKTWYREPRFLNRKKDNGWLAPSIQHKLDSHLKLIDTVKKILPITKINIEVANFDIQKIKNPEIDGIGYQNGDQSGFWNIREYVLYRDGHICQHCKGKSGDKILEVHHINSRQTGGDRPDNLITLCGLCHEKVSQNKLQLKIKVSKGYKAESFMSMVRWRLVNILRNTNPEENPNVSYTYGYITKGNRIALGVEKTHINDAFVIAGGTKGISQTCFNSYLIQQVRKCNRKLYKGIRSHIKNTASRFVNGFQRFDKILFENIECFIFGRRVTGRFDIRLLDGTVVSSSVSYKQLTLLECSSTLLIERGSGNSSNS

SEQ ID NO: 7988 - protein, 424 aa, Enterococcus sp.; identical to SEQ ID NO: 4410

SEQ ID NO: 7989 - protein, 360 aa, unidentified
MSTTVFVLDKKHRPLMPCRPARARRLLRAGRARVVKRFPFVIRLVDRTVEQSEVQPVLIKLDPGSRETGAAVVRDDGKKRHHALAFFVIEHRGGAIRDALKARSAFRRRRRSQNLRCRSPRFLNRVKPKGWLPPSLRHRVETTLSFVRRMCRYLPVSGIAAELVKFDSQKLQTPEVSGIEYQQGTLFEYEVREYLLEKFGRKCVYCGAEGVPLNIDHVVPRAKGGSNRVSNLVLACVSCNQKKGARSLEDFLKGKPEVLARVRRELKTPLRDAAAVNATRWVLFNELKATGLPVETGSGALTKFNRHAFGVEKEHWLDALCVGRLNGAVTRKGLNVLEIRCMGRGSRQRTRLTKYGFPRG

SEQ ID NO: 7990 - protein, 453 aa, unidentified
MSVAVVSKTGMLLMPTSEYRARKLLKSKKAIIHGYHPFTIQLTERETGYIQPVELCMDTGYIHIGTSVKSEKHEYLGEQIDTLTDERQKHDACRMYRRQRRNRKRYRQPRFNNRERDDGWIAPSLEHKKTIHIQAISRICKVMPVTDITLEMGNFDTQVLKAREEGRPLPQGLDYQHGERYSVTTLREAVFLRDGYTCQCCGRTIKDGAILHAHHVVYRSQGGTNRMSNLITVCDKCHTPANHKPGGKLYGCKPKVASFKGATYMTTIRWKLYNEVKALFPDIDIHITYGAETKERRRAFDITKSHVNDAFVMGQFHPKHRSKPVCYKKKRRNNRCLEKFYDAKYIDSRNGKTRTGQELFNGRISRNHKKDSENLHQYRRQKISAGKRTIRKQHYAIQPHDIVIFNGEKFETSGCHNNGTRVILLPQKKSVAIKKLNIYRYAGGYFKSAFNQK

SEQ ID NO: 7991 - protein, 405 aa, Pseudomonas sp.
VAVYVLDKTGTPLMPCSEKRARLLLERGRARIHRQVPFVIRLVDRRQADSALQSLTLKFDPGSKFTGIALVRQKGQRVSVLSLMELAHRGAAIRQAMQQRAAFRRRRRGQNLRHRTPRFDNRTRPEGWLPPSLRHRLDTTLGWVGRMRNWAPISDLAVERVKFDMQAIQNPEISGVQYQQGELAGYEVREYLLEKWGRCCAYCDAENTPLEIEHIVPRSAGGSDRVPNLTLACRPCNQRKGNQPVEVFLKARPELLARIKAKAKVPLRDAAAVNATRNALFRALLDTGLSVTTGTGAQTKFNRRCLGLPKTHALDAASVGEIRAIEHWQRPTLAIKATGRGEYQRTRLTAHGFPRGYLTRQKRHFGFQTGDQVRAEVPTGKRLAPTRVASPCARPAASTSRRLMA

SEQ ID NO: 7992 - protein, 431 aa, unidentified
MPNKVYVINKHGRPLMPCSPAKARHLLDAGKAKVKKRTPFTIQLLFGSTGYTQEVILGVDAGSKTIGLSASAETEELLSAEVKPRNDVVDLLSTHREFRRARRNRKTRYRKPRFDNRVRSKHKGWLAPSVEVKIQEHITSIKRVCRILPVSKVVIETAEFDLQLLKAIADGKPVPQGEDYQKGEMYGHYNVRQYVLWRDDYTCQCCGAHATKKKEVRLHVHHLESRKVGGDAPDNQVTLCESCHEKLHKGLITAKDFKKRKRRSTRDATFMGIMRKTLMQMLCSELPIPVVKTRGYITKATREKLLVLPKSHTNDALAIAQGKRGFNVGYLPEIAQIDKICTIRPVRHHNRQLHKAAILTGGIRKSNQAEKYVFGYRLFDKVQFNGQDCFIWGRRPTGIFTIKTINGKMIKDGISFKKLKPVEKSTSYLIA

SEQ ID NO: 7993 - protein, 451 aa, unidentified
MSVAVISKTGERLMPTSEYRARKLLKSGKAIKHSYHPFTIQLTEREAGDIQPIELCMDTGYIHIGISVKSKKHEYLAEQIDTLTDERGRHDACRMYRRQRRSRKRYRQARFNNRKRDQGWIAPSLEHKKKIHIQAISRINKVMPITDITMEMGNFDTQVLKAKEEGKPLPQGAEYQHGERYGIATLREAVFARDGYKCQCCGRTIKDGAILHVHHIKYRSQGGTNSMSNLATVCDKCHTPKNHKPGGKLYNWKPKLPSFKGATFMTTIRWQLYNEVKALFPDIDIHITYGAATKERRRELDIDKSHVNDAFVMGQFHPKHRIKAVLYKKKRRNNRCLEKFYDAKYIDSRDGKKRSGQELFNGRINRNHKKDSENLHQYRLQKVTAGKRAVRKQHYKIQPHDIVIYESRKRETAGCHCNGTRVMLLPDKKSISVKKVKIYKYAGGYFKSAFN

SEQ ID NO: 7994 - protein, 431 aa, unidentified
MPNKVYVINKHGRPLMPCSPAKARHLLDAGKAKVKNRTPFTIQLVYGSSGYTQEVILGVDAGSKTIGMSASTTKEELLSAEVKPRNDVVDLLSTRREFRRVRRNRKTRYRKPRFDNRVRSKHKEWLAPSVEVKIQEHITSIKRVCRILPVSKVVIETAEFDLQLLKAIADGKSVPQGEDYQKGEMYGHYNVRQYVLWRDDYTCQCCGAHATKKKEVWLHVHHLESRKVGGDAPDNQVTLCESCHEKLHKGLITEKDFKKRKRRSTRDATFMGIMRKTLMQRLCSELPIPVVETRGYITKATREKLLVLPKSHTNDALAIAQGKRGFNVGYLPGIIQTDKIYTIRPVRHHNRQLHKAAILKGGIRKSNQVGKYVFGYRLFDKVQFNGQDCFIWGRRTTGIFTIKTINGKMIKDGISFKKLKLAEKSTSYLIA

SEQ ID NO: 7995 - protein, 413 aa, unidentified; identical to SEQ ID NO: 2636

SEQ ID NO: 7996 - protein, 451 aa, unidentified; identical to SEQ ID NO: 7526

SEQ ID NO: 7997 - protein, 431 aa, unidentified
MPNKVYVINKHGRPLMPCSPAKARHLLDAGKAKVKKRTPFTIQLLFGSTGYTQEVILGVDAGSKTIGLSASAETEELLSAEVKPRNDVVDLLSTRREFRRARRNRKTRYRKPRFDNRVRSKHKGWLAPSVEVKIQEHITSIKRVCRILPVSKVVIETAEFDLQLLKAIADGKPVPQGEDYQKGEMYGHYNVRQYVLWRDDYTCQCCGAHATKKKEVRLHVHHLESRKVGGDAPSNLITLCDSCHEKFHKGIITAANLKKRKRRSMRDATFMGIMRKTLIQRLRAELTIPVAETRGYITKTTREKLLVLPKSHTNDALAIALGKHGFNVGYLPEIAQIDKIYTIRPVRHHNRQLHKVTILKGGIRKSNQAEKYVFGYRLFDKVQFNGQDCFIWGRRTTGIFTIKTINGKMIKDGISFKKLKPVEKSTSYLIA

SEQ ID NO: 7998 - protein, 406 aa, unidentified; identical to SEQ ID NO: 3980

SEQ ID NO: 7999 - protein, 392 aa, Moorena sp.
MQNYVFVIDTNKQPLNPIPPKKARRLLNKGKAAVFRMYPFTIILKTAIRQSRRCANNNPSISPCQIKIDPGSKVTGFALVQNNQVIWGMELEHRGGLIKKKLESRGAVRRGRRNRNTRYRKPIFLNRKRPEGWLPPSLEHRILTIQTWVKRLIKFCPVNEIWVERVKFDTQKMQNPEISGIQYQQGELAGYEVREYLLEKWGRECTYCGKQSVPLQIEHIHPRSLGGSDSALPTLRERVSNLCLACEKCNQRKGNKPIEDFLKKKPSLLQKIKSKAKQPLKDATAVNATRNKLVKVLQLIKVVVTGTGAQTKYNRTRLELPKQHWIDAACVGDIETLVLRTSQPLLVTCKGPGGRQKAALNKYGYPIRHNPLKPIKGACYWGHSQASKTRNR

SEQ ID NO: 8000 - protein, 462 aa, unidentified
MSAFVLDRNGRPLMPCSEKRARHLLARGRARVHRVMPFVIRLVDRMADSCALQPLRIKLDPGSKVTGVALVREADSGIAVINLFELIHRGRQISEALTARRGFRRRRRGANLRYRAPRFLNREKPEGWLPPALQHRVDTTMAWVQRIRRWVPITALSSELVRFDLQQLENPEISGLEYQQGTLAGYEVREYLLEKWKRTCIYCDAKDRPLQIEHLTARARQGSNRVGNLGLACGDCNQDKGALDVRAYVKDSKRLARILATASHPLRDAAAVNTTRWALTDTLRATGLPLEVASGGRTKFSRITHDLPKTHALDAVCVGRVDAINDWKRPSLSIKASGRGSYQRTRLTRHGFPRGYLMRQKQVQGFQTGDHVRADVPNGKKAGMHVGRVAVRATGYFNIQTASTVVQGINHRHCRLIQRGDGYAYSLQSTDSYRQGDAGVWRAAHAALSLPGLNPEVSRAFG

SEQ ID NO: 8001 - protein, 480 aa, unidentified
LYTKPLDNIGEGSLPPSGEINLKGMTFMVYVKSIDGKALMPTSNAKARKLLKQKKAKVVSLRPFVVKLTYKTKTEYIQKLNLGVDSGYSNIGFSVIDAKQEYIAGEVKLLEGMKKRLLEKASYRRIRRSRLRYRKARWNNRVKSKKKGWLAPSLKHKLDTHIKFIDYLKNILPIEKITIEVANFDIQKMKDDLISGIDYQNGDMFGFWNVREFVLHRDGHKCQNPNCKHKDKKEQILKVHHIRYRSEGGSDRPENLITLCSKCHIPANHKKGKFLYDWCVNGKKVRGFKDATFMSMIRWYLVNELKSKHNNVSITYGYITKNHRIQNGIEKSHLNDAFAIAKGTNQARTKDRFLVIQDRLKNRSLEKFYDSKIIDIRTEKKVSGGDLSCGRSTRNKNLNTENLRKYRGAKISKGQRRIRKQKYFYQPNDLVKYDGKVYTVKGTQNEGKYIALKEIKKVPKVELLIPYVFKKGLNWSYGLC

SEQ ID NO: 8002 - protein, 431 aa, unidentified
MPNKVYVINKHGRPLMPCSPAKARHLLDEGKAKIKKRTPFTIQLVYGSSGYTQEVILGVDAGSKTIGMSASTKKEEVFAADVTPRNDVVDLMSTRREFRRARRNRKTRYRKPRFDNRVRSKHKGWLAPSVEVKIQEHITSIRRACRILPVSKVVIETAEFDLQLLKAIEEGKPVPQGEDYQQGEMYGHYNVRQYVLWRDGYTCQCCGAHATKKKEVRLHVHHLESRKVGGDAPDNQVTLCESCHEKLHKGLIAEKDFKKRKRRSTRDATFMGIMRKTLMQMLCSELPIPVVKTRGYITKATREKLLVLPKSHTNDALAIAQGKQGFNVGYLPGIVQINKIYTIRPVRHHNRQLHKAAILTGGIRKSNQTEKYVFGYRLFDKVQFNGQDCFIWGRRTTGIFTIKTINGKMIKDGISFKKLKPVEKSTSYLIA

SEQ ID NO: 8003 - protein, 502 aa, unidentified; identical to SEQ ID NO: 2616

SEQ ID NO: 8004 - protein, 427 aa, Parasutterella sp.; identical to SEQ ID NO: 4733

SEQ ID NO: 8005 - protein, 427 aa, Parasutterella sp.; identical to SEQ ID NO: 3787

SEQ ID NO: 8006 - protein, 446 aa, Bacillus sp.; identical to SEQ ID NO: 5749

SEQ ID NO: 8007 - protein, 407 aa, unidentified
QPLMPTDRHRKVRLMLQSGQAKVIKRCPFTIQLNYDSGHQTQEISLGIDAGSKHIGVSATTKIKVLYEADVELRNDIVDLLSSRRELRRGRRNRKTRYRQAKFNNRRRGNGWLAPSIRQKIGTHLTVVENICKMLPISRIMVETASFDIQKIKNPDIQGAEYQQGDQLGFWNVREYVLFRDGHTCQCCKGKSKDKILNVHHIESRKTGGNAPNNLITLCETCHTGYHKGTVQLPKAIKRGMRFKDAAFMGIMRWAFYEALKQQYEPVGTPVHNTYGYITKHTRIAYNLPKEHYVDARCISGNPEASSNGEYYYQKKVRCHNRQIHKLTVLKGGIRKQNQATYLVKGYRLFDKVSYQGKGYFVFGRRQSGFFDIRTLSGEKVNKGSLSCKKLKFIATRTYYLTERRAV

SEQ ID NO: 8008 - protein, 435 aa, unidentified
MPKVYVLNKYGHPLMPCTPAKARHLLDSGKAKVRKRTPFTIQLLYGSSGYKQSVILGVDAGSKTIGLSASTEKQELFAAEVKPRNDVVELLSSRREFRQARRNRKTRYRTPRFDNRVKSKHKGWLAPSVEVKIQEHITAIARVCALLPIAKVIVETAEFDTQRLKAMLEGRPLPVGTDYQLGEMYDEYNVRQYVLKRDNYTCQCCGAHPSAKKGVKLHVHHLESRKTGGNSPNNLITLCEHCHKLLHKGKITLDKKKRGHSMRDAAFMGIMRKTLILRLRSELAIPVVETYGYITKLVRETHHMDKSHTVDALCIAGHPLADASDVIYLIKPVRRHNRQLHKATILKGGVRKANQAPRSVFGFRLFDKVRYQGQECFIWGRRSSGSFLLKKLDGTKVKDGISYKKLTLLERETNYLIEERRRCSSPCLKAGVSAA

SEQ ID NO: 8009 - protein, 434 aa, Anoxybacillus sp.; identical to SEQ ID NO: 3421

SEQ ID NO: 8010 - protein, 425 aa, unidentified
MENTLKVFVLNMRGQPLMPCSPPKARKLLRAGKAVPVRRTPFVIQLTVPTGETKQPITLGVDAGYKHVGLSATTAKEELLASEVELRQDVTGLLSNRLALRRARRNRKTRCRAPRFDNRVRSKHKGWLAPSVENRIQAHISRIEAVCRVLPITKIVIETASFDIQKIKNPEVEGTDYQQGEQLGFWNVREYVLFRDGHVCQACKGRSKDLILNVHHIESRKTGGDAPGNLITLCEACHKAYHAGKLKQFSPRRGASFRAETFMGIMRWTVLNRLRERHPELPVTNTYGYLTKHKRIVAGLPKTHCADAFCIAGVLDAKRRGEYLFQKQTRRHNRQIHKLTILKGGVRKRHQAPYLVHGFRLFDKVLCKGEVGFIFGRRSSGAFDVRRLDGTKISAGISYKKLSLLEKRKMFLTELRKEGRDSSRV

SEQ ID NO: 8011 - protein, 419 aa, unidentified
MVYVINKQGQALMPTERFGKVRRLLKNSLAHVVCRIPFTIQLDYDTTDYTQPVSLGVDAGSKHIGISATTSEKEMYAADVELRNDIVDKLSTRREQRRTRRSRLRYRKARFNNRVSSKRKGWLAPSVENKIQTHLTVVEKIHKFLPITNIVVETASFDIQKINNPSISGSEYQQGEQLDFFNVREYVLFRDNHTCQHCKGKSKDKVLNVHHIESRKTGGDSPNNLITLCETCHKAYHRGEFKLNVKRGKSFRDAAFMGIMRWKLYDRLKNIYPNVSMTFGYITKNTRITNNLPKEHYVDARCISGNPVAKPLGYYFYQKKVRCQNRQIHKVNFLKGGRKKLNQAPFLVKGFRLFDLVEYQKDLYYIFGRRNSGFFDIRKLDGTKVNKGSINCKHLRLMATRKSILIEKRMQINYENTGF

SEQ ID NO: 8012 - protein, 284 aa, unidentified; identical to SEQ ID NO: 3117

SEQ ID NO: 8013 - protein, 431 aa, unidentified
MPNKVYVINKHGRPLMPCSPAKARHLLDAGKAKVKKRTPFTIQLIYGSSGYTQEVILGVDAGSKTIGMSVSTTKEELLSAEVKPRNDVVDLLSTRREFRRARRNRKTRYRKPRFDNRVRSKHKGWLAPSVEVKIQEHITSIKRVCRILPVSKVVIETAEFDLQLLKAIADGKPVPQGEDYQKGEMYGHYNVRQYVLWRDGYTCQCCGAHATKKKEVRLHVHHLESRKVGGDAPDNQVTLCESCHEKLHKGLIAEKDFKKRKRKSTRDATFMGIMRKTLMQRLCSELPIPVVKTRGYITKATREKLLVLPKSHTNDALAIAQGKRGFNVGYLPEIAQIDKIYTIRPVRHHNRQLHKATILKGGIRKSNQTEKYVFGYCLFDKVQFNGQDCFIWGRRTTGIFTIKTINGKMIKDGISFKKLKLVEKSTSYLIA

SEQ ID NO: 8014 - protein, 413 aa, unidentified; identical to SEQ ID NO: 2636

SEQ ID NO: 8015 - protein, 431 aa, unidentified
MQNKVYVLNKHGRPLMPCSPAKARHLLDEGKAKVKKRTPFTIQLIYGSSGYTQKVILGVDAGSKTIGVSASTTKEELFSAEVKPRNDVVELMSTRREFRKARRNRKNRYRKPRFNNRVRSKHKGWLAPSVEVKIQEHITAIKMVCRILPVSKVVVETAEFDLQLLKTIEEGKSVPQGEDYQQGEMYGHYNVRQYVLWRDGYACQCCGVQPTKKNEVRLHVHHLESRKYGGDAPGNLITLCESCHKKHHGGLITEKDLKKRKRRPTRDATFMGVMRATLVQRFCSELHIPVVETKGYITKATREKLLVLPKSHTNDALAIAQGKHGFNVSHLPGIVQVNKVYTIRPVRHHNRQLHKATVLKGGIRKSNQAERYVFGYRLYDKVLYNGIVCFVWGRRTSGSFLLRQLDGTKVKDGVNYKHLKLLERSRNFLIA

SEQ ID NO: 8016 - protein, 460 aa, unidentified; identical to SEQ ID NO: 7594

SEQ ID NO: 8017 - protein, 555 aa, unidentified
MLPQSQALESVSVDNRKGEDETGHGCCGNTTTGMQHGREDRFLELASSRNSYPTTSEQSEEVGARGVIAPPSSTTSRVFVIDKHGNPLMPCHPARARKLLKSGRARIHHLAPFVIRLVDKEVEQCEVPGVTVKIDPGSKHTGIVCACVDEAGITHGLVSIQLDHRGQRIHEKMEQRANYRRRRRSANLRYRAPRWNNRHPQACRACGKNAKHGRGYCGTCLKERNFVDNGYRQHRLPPSLFHRVATTTSWVNRLSSWSPVTSLVMELVRFDTLAMQNSKISGVEYQQGTLAGYEVREYLLEKWGRKCAYCGIKNAPLQIEHILARSKGGTNRISNLTLACRPCNESKGSENVEIWCERHFGGQKGKKIAKTVLDQAKAPLKDAAAVNSTRWALWRALKNTGLDVSVGTGGRTKWNRQRFGISKSHTLDALCVGMVNAIDVVPNNVLLIFCTGRGQHQRTKPDKYGFPRLALPRTKTHHGLRTGDLVRAVIPRGKHSGVRVDRVSVRSSGYIRVGRADGISAKNCTVLQRADGYGYERKKEAPLIPALTDGVSEAR

SEQ ID NO: 8018 - protein, 494 aa, unidentified; identical to SEQ ID NO: 6841

SEQ ID NO: 8019 - protein, 452 aa, Petrotoga sp.; identical to SEQ ID NO: 7138

SEQ ID NO: 8020 - protein, 472 aa, unidentified
VVGNNLLSIKPLINIGEGVIYSSICTGLSLQTYQKRKEVPYMVYVLDIDGQPLMPTTRHGKVRRLLNNHLAKVVKRCPFTIQLLYQSTKETQPVSLGVDAGSKHIGMAATTEKKVVYQEELSPRNDVVKLLSARRTLRRTRRNRKTRYRKPRFNNRAHSKHKGWLAPSVEVKIQEHITAIKRICQILPISEIHVETAEFDLQRLKAMDEGSPLPVGIDYQLGEQYDFYNTRQYVLHRDGYTCQCCGTHDNNIKLHVHHIESRQTGGDAPNNLIILCEHCHKALHEGKLELPKGKKRGKSYRDATFMGVMRKTLLERLKKEIDVPVEGTYGYITKYWRERAGLEKSHIHDAVCISKYPYAKPLDIYYLTKTVRHHNRQIHKSNFSKGGIRKRNQAPYLVKGFRLFDKVLYQGKEYFIFGRRATGYFDIRTLDGTKVNKGSISYKKLRIQDTAKAYLKEARAIPHMNKFTCVLA

SEQ ID NO: 8021 - protein, 526 aa, Streptomyces sp.
MVPFSPSERTHPSVLPQRRALESVAADTPGSRHETGHGLPASESGTGAEHGRGETPGGSPPAGRVTPDLSVGEEVRECHPAVFVLDKHGRALQPTTPARARKLLRNGRAVVARHTPFVIRLKDRTLAESGIDGVELGIDPGSKHTGIAVFTERAGERRCRYALQLDHRGPQIRKRLGQRTVYRHGCRSRNLRYRPPRFSNRSRKPGRLAPSLQHRVDTAISWTDRLARWAPVREVHVERVAFDSHALTADGPLEGVAYQHGTLAGTEAREYLLAKWQRCCAYCGRSGVPLNIDHIQPRSKGGSDRISNLTLACVPCNQAKGNRPVEEFVKDKALLARILAQARTPLRDAAAVNATRWALWRALDARLPTRTASGGRTKWNRTRCGLAKSHSLDALTVGELRTVTEYVSPVLVVRCTGRGTYARTRPDKHGFPRLRMPRQKHFFGFATGDLVRAVVPNGKSAGTHTGRVAVRATGRFNITTSHGTIQSIHHRHVRLLQRADGYGYTTRSEVTPRSDDPGIQREKESA

SEQ ID NO: 8022 - protein, 470 aa, unidentified; identical to SEQ ID NO: 2825

SEQ ID NO: 8023 - protein, 512 aa, unidentified; identical to SEQ ID NO: 4031

SEQ ID NO: 8024 - protein, 420 aa, unidentified; identical to SEQ ID NO: 3153

SEQ ID NO: 8025 - protein, 544 aa, unidentified; identical to SEQ ID NO: 4004

SEQ ID NO: 8026 - protein, 346 aa, unidentified; identical to SEQ ID NO: 4983

SEQ ID NO: 8027 - protein, 456 aa, unidentified
MSTCICVLSNSGERLMPTIRLGKVRRLLKDGKAKIVKHHPFTIQLLYDSKTNTQPIEICEDVGYNYIGISVKSESHEYVSAQYDTLQDEKACHDSCRKLRRTRRNRLRYRKPRFDNRKRGEGWLAPSLEHKKQLNIRLIERYVSVIPITHATVEVGSFDTMLLQAIQKGKSKPEGVDYQKGPRYNLATLREAVFYRDNYTCQVCGRKIADGAILHMHHMFYWKGRHGYQLDELVTACEKCHTPANHQKGGKLFGFGEDKEFANLSGAAFMNAVCWQIVDALHATYGKEFVTITYGAMTKEKRIILGIEKTHNNDAYAMGDYHPVHRCVFRHYQKRRRNNRVLEKFYDATYIDTRTGNKAKGKELFNGRISRNHKKNSEDLHKYRSKKVSKGRRSIRRQRYAIQPYDTVRLESKTYITSGCHNKGTRLLIPANGKSKSVAISKVQVVCHAGAWIQII

SEQ ID NO: 8028 - protein, 424 aa, unidentified
MASMQYVYVLNKHGEPLIPCSPGKARLLLKQQKACVVKRTPFTIKLLYGSAGYKQPITLGVDAGSKHVGLSASTEKRELYREEFTPRNDVVDLLSTRRQNRRSRRNRKTRYRAPRFDNRVHSKHKGWLAPSVEVKIQEHITVIKRICRILPITLVRVETAEFDTQRLKAMLKGKPLPVGTDYQLGEMYDEYNVRQYVLKRDNYTCQCCGAHPTEKKPVRLHVHHLESRHVGGNAPNNLITLCVACHKALHEGKITLDKGKKRGKPLRDAAFMGIMRNTLLARLKDELNIPVKQTYGYITKLLREKNKIPKSHVNDARCIAKAPNAKPCDTMLYTRALRHHNRQIHKAKILNGGIRKKNQAPYLVKGFRLWDKVRYNGEECFITGRRSSGYFALKKYDGTVISNSASYKKLMLLEAATNYITERS

SEQ ID NO: 8029 - protein, 428 aa, unidentified
MFVYVLDKNGQPLMPTQRFGKVRRMLRDKKAKVVHREPFTIRLLYEPETKIVQEVVLGVDTGSKHVGVACVGNNKVLYQAHVELRDDIKKKMDSRRMYRRNRRNRKTRYRKCRFSNRRNSIRDDRYCPTIVSKYCGHEREIEFCKKIPPISDKNIILEVSQFDTQLMKKPWLQEHKWAYQKGVNYGYANAREHALVRDRYTCQCCGKKNCRVEAHHIVFRSKNGSNDLENYVTLCEDCHKEVHSGEKELKLKGKRRGTLRYATQMSVIRSMLLKKYPDAIETFGFVTKANRENLGLQKDHYLDACVIASGGLECNPSDVLYLKRCVSKQDRVLTKGIRGEQKLPTGKIHGFKKFDKVKYLGETCFIKGRRSSGAFVLMDIDNNSIDFRDKGGKQNPSYKSIKRLNTRKSILCIYKRIEGEVRFIPTLS

SEQ ID NO: 8030 - protein, 532 aa, unidentified; identical to SEQ ID NO: 3169

SEQ ID NO: 8031 - protein, 415 aa, Bacillus sp.; identical to SEQ ID NO: 2431

SEQ ID NO: 8032 - protein, 420 aa, unidentified; identical to SEQ ID NO: 6582

SEQ ID NO: 8033 - protein, 465 aa, unidentified
MSTCACVLSKNGERLMPTIRLGKVRHLLKDGKAKIIKHHPFTIQLLYDSETNIQPIEICEDVGYNYIGISVKSQSHEYVSAQYDTLQDEKSCHDACRRMRRTRRNRLRYRQKRFDNRKRDKSWLAPSLKHKKELNVNVIKMYCEVVPITHATVEVGSFDTMLVKAIEEGKATPEGADYQKGPRYNLATLREAVFYRDNYTCQVCGREASEGAILHVHHMFYWKGRHDNSLSELITVCEKCHTPANHQKGGKLYGFGEDIKFANLSGAAFMNTVRWQIVNELYAAFGKPFVTFTYGAMTKEKRIALHLEKSHNNDAYAMGEFHPNCRCTFEHYEKVRRNNRILEKFYDSRYIDIRTGEIATGKELFNGRINRSHKKDSENSHKYRGKRIRKGYRALRRKKVALNPGDLVSLNGEILTVHGTHTKKNGSVNVEFKTPSKSGKKSTSLKKLKIIKTISPMRSAWDKVS

SEQ ID NO: 8034 - protein, 430 aa, unidentified
MPKVYVLNRHGRPLMPCTPAKARHLLDAGKAKVKKRTPFTIQLVYGSSGYTQEVILGVDAGSKTIGVSASTKKEELFAANVIPRNDVVDLLSTRREFRRARRNRKTRYRKPRFDNRVRSKHKGWLAPSVEVKIQEHITAIKTVCRILPVSKVVVETAEFDLQLLKAIADGKPVPQGEDYQKGEMYGHYNVRQYVLWRDGYTCQCCGAHATQKKEVRLHVHHLESRRVGGDAPDNLVTLCTACHDKLHKGIIMAADIKKRKRRSTRDATFMGIMRMTLLRRLREQLPVPVVETRGYITKATRENLLVLPKSHTNDALAIAHGPQGFRAEYLPNIRQADRLYTIRPVRHHNRQLHKATILKGGVRKANQAEKYICGFRLYDKVLYNGIECFVWGRRTSGSFLLRQLNGEKVKDGVSYKHLKLLERSQSYLVA

SEQ ID NO: 8035 - protein, 420 aa, unidentified
MQYVYVLNKHGEPLMPCSPRKARLLLKQKKACVIKRTPFTVKLLYGSTGYKQPVTLGVDAGSKHIGISATTEKHELYREEATPRNDVVDLLSARRAFRRSRRNRKTRYRAPRFDNRVHSKHKGWLAPSVEVKIQEHITLVEHVCRILPVTLVRVETAEFDTQRLKAMLEGKPLPVGTDYQLGEMYDEYNVRQYVLKRDNYTCQCCGAHSTKTKGVKLHVHHIETRRTGGNAPNNLITLCTACHKALHAGKVTLDGKKRGKPLKDAAFMGIMRKTLMERLRKELKIPVQGTYGYITKCLREKNGIPKSHTNDARCISKNPLAIPCDTCYYTKAVRHHNRQLHKTTILKGGIRKANQAPYIVKGYRLWDKVSCNGTECFITGRRTSGYFALKKLDGTVVSNSISYKKLRLLEAATNYITERK

SEQ ID NO: 8036 - protein, 411 aa, unidentified; identical to SEQ ID NO: 3917

SEQ ID NO: 8037 - protein, 431 aa, unidentified; identical to SEQ ID NO: 5002

SEQ ID NO: 8038 - protein, 398 aa, unidentified
RRAKANGTISKKCIKQDTAQSKNPSKRAKEIGVIKRHLPGCKKDVLCVGIKNKEAKYTNRARLEGWLTPTANQLLQTHINLVKKIQKFLPISDVVLEVNKFAFMRLDNPNIQKWQYQRGPLYQKGSLENAVSEMQEHHCLFCEKPIEHYHHVVPKSENGSNTIANIVGLCAEHHNLVHKDVAWQEKLVEEKTGLNKKYGALSVLNQIIPALTKELSFLFPKHSFMTNGKSTHDYRAAHGISKDHWLDAYCIACSVLPIDVCDSTINNCVPYELKQFRRHDRRALNNENMNRVYTLNDKVVATNRHKATEQEAASLEEFRKEHPNDVCKLKVKEHHPTYRNMNRNYPGSVFLVGKQIHVMQGIASSKDGKATKYNDTRATTIAAGKCKFVAKNSGILFV

SEQ ID NO: 8039 - protein, 431 aa, unidentified
MPNKVYVINKHGRPLMPCSPAKARHLLDAGKAKVKKRTPFTIQLVYGSSGYTQEVILGVDAGSKTIGVSALTKKEELFAANVIPRNDVVDLLSTRREFRRARRNCKTRYRKPRFDNRVRSKHKGWLAPSVEVKIQEHIIAIRRVCGILPVSKVVVETAEFDLQLLKAIADGKPVPQGEDYQKGEMYGHYNVRQYVLWRDDYTCQCCGAHATKKKEVRLHVHHLESRKVGGDAPDNQVTLCESCHEKLHKGLIAEKDFKKRKRRSTRDATFMGIMRKTLMQMLCSELPIPVVKTRGYITKATREKLLVLPKSHTNDALAIAQGKRGFNVGYLPEIAQIDKIYTIRPVRHHNRQLHKAAILKGGIRKSNQAGKYVFGYRLFDKVQFNGQDCFIWGRRTTGIFTIKTINGKMIKDGISFKKLKPVEKSTSYLIA

SEQ ID NO: 8040 - protein, 419 aa, Moorena sp.; identical to SEQ ID NO: 2999

SEQ ID NO: 8041 - protein, 320 aa, Parasutterella sp.; identical to SEQ ID NO: 4725

SEQ ID NO: 8042 - protein, 406 aa, unidentified
MPTMRHGHVRRLLKAKQAKVVKRCPFTIQLLYKSTTYTQNVTLGIDAGSKHIGVSATTVNKVLYESDVTLRNDIVDLLSARRALRYSRRNRKTRYRKARFDNRVHGKNKGWLAPSVRQKIDSHITVVDKVCTLLPITNIVVEVASFDIQKIKNPDVSGTDYQQGEQLGFWNIREYVLFRDGHECQRCHGQSKDPVLNVHHIESRRTGGNAPNNLITLCETCHKGYHKGTVILPKTIHRGMRFKDAAFMGIMRWAFYNRLKELYASKNIPVSMTYGYITKNTRIEHHLQKEHFVDARCISGHPDAAPSNEVFYQKKVRCHNRQIYKLTINKGGTRKRNQTSYEVHGYHLFDKVRYQKKPYFIFGRRKSGFFDIRDLSGNKVNNGSISYKKISFIEPGSYYLAERRPV

SEQ ID NO: 8043 - protein, 415 aa, Bacillus sp.; identical to SEQ ID NO: 2431

SEQ ID NO: 8044 - protein, 302 aa, unidentified
VYVLNKDGKPLMPTTRCGHVRYLLKEKKARVVKTKPFTIQLLYETNDVVQPLYLGIDPGRTNIGVAVVKADGTAVFTAHLETRNKEIPKLMKKRKDSRCARRTNGRRCRRQRRAKANGTISKKCVKQATAQNGSASKRAKEIGVIKRHLPGCEKEVLCIGIKNKEAKFNNRTRPAGWLTPTANQLLQTHINLIKKIQKLLPISDVVLEINKFAFMQLDNPNIQKWQYQQGPLYQKANLEEAVSEMQEHHCLFCKKKIDHYHHVVPQHKNGSNTIDNIVGLCTKHHDLVHKDTAWHAKTKAFG

SEQ ID NO: 8045 - protein, 494 aa, unidentified; identical to SEQ ID NO: 2450

SEQ ID NO: 8046 - protein, 425 aa, Aphanothece sp.; identical to SEQ ID NO: 6227

SEQ ID NO: 8047 - protein, 512 aa, unidentified
MPTVYVLNKDGKPLMPTTRCMHVRHLLKNGKARVVKSKPFTIQLLYETDDVVQPLYLGIDPGRTNIGVAVVKADGAAVFTAHLETRNKEVPKLMKKRKESRCARRTNGRRCRRQRRAKTNGTISKKCVKQTTAQNGSVSKRAKEIGVIKRHLPGCEKDILCIGIKNKEAKFTNRARPEGWLTPTANQLLQTHINLVKKIQKFLPISDVVLEVNKFAFMQLDNPNIQKWQYQQGPLYQKGSLENAVSEMQEHHCLFCEKPIEHYHHVVPKSENGSNTIANIVGLCTEHHNLVHKDATWQKKLVKEKVGLVKKYSALSVLNQIIPALTKEMNSLFPKHFFVTNGKSTYDYRTAHGVSKDHWLDAYCIACSVLPNDVCDSNINSHVPYELKQFRRHDRRVLHKANMSRVYTLNGKTVATNRHKAIKQTTDSLEEFRQSHPGDVCKLKVKEHHPAYRNLNRNYPGSVFLVDGQVHVMQGVSGSHNGKADGYYNTNGNAYPYYKCKFVVKNEGIVFA

SEQ ID NO: 8048 - protein, 413 aa, unidentified
MTSYAFVLDANGKQLAPTKEQKAWFLIRKKRAALVSKYPMVIQLKKEIQENEICKDEIRCGIDDGGLHVGIALVQKCKTKNKVVFKGTIEQRNDVKHLMEVRRGYRRYHRYHKRYRQARFNNRKSSKREGRIAPSILQKRQAIIRVIHWLNKWINITNYWLEDVSIDIRVLTDGYKSYRWQYQKSNRLDENIRKAAILRDGGKCMECGKLNCRLEVHHIKPRRRNGSDTLDNLITLCKSCHQKTEGQEELYMDRYFSLLKSSDNKNLNYAQHVMIGKEWLRKQLSSLGVLYLTNGGDTANKRIDWNIEKSHANDAVCITDLQPDTYDMKEWTMKPMRRQSKAKTDHVLGIKHRDLVEYTFKNGETHRGYVTALYPEQKAINFQSPTKHCKKVNARKCKLLWKYSKIYWFENAS

SEQ ID NO: 8049 - protein, 376 aa, unidentified
  source 1..376: note = Filamentous sp.
MAFRPASYEIKLDPGSKTTGIALLKGENIIFVGELNHRGQAIKASLDSRRAIRRSRRARHTRYRQARFLNRIRPKGWLAPSLKHRVDTTLTWVNKFIKFAPVNSIAMELVRFDLQQLEKPEISGVEYQQGELLGYEIREYLLNKWERKCTYCKVENIPLQVEHIHPKAKGGSNRISNLCLACEKCNLKKGTQDINDFLLKKPDLLKQIMAQVKQPLKDATAVNSTRWALFNQLKLTGLPVTTGSGGQTKYNRTRLELPKTHYFDAACVGKVDKLIVLTTQPLLIKANGHGTRQMCRTDKFGFPSRYVPRDKFVKGFQTGDLVKAVVTRGKKVGQYIGRVAVRSSGSFNISAKELVQGISHKYCQTLQRKDGYSYQF

SEQ ID NO: 8050 - protein, 414 aa, unidentified
MPCSPAKARLLLKEKKAIVVRRTPFTIQLTIATGETKQPVSLGVDAGYKHVGLSASTEKAELYASEIELRQDITDLLSARRELRRARRNRKTRYRAPRFDNRIRTKRKGWLAPSVENRINAHLSRIGAILRLLPVTKITVETASFDTQLLKNPDISGKEYQEGEQLGFWNVREYVLFRDGHACQHCHGRSKDPVLNVHHLESRRTGGDSPGNLLTLCETCHKALHRREIKLKTKRGQSFRAEAFMGIMRWEVLNRLKASHPELEVHNTYGYRTKHTRIVNGIDKSHCADAFCIAGNLGAKRLGEFFFQKQTRRNNRQIHKLSILKHGLRKRNQAPFEVKGFRLFDKVVCQGEEGFIFGRRSSGSFDVRKLDGTRISAGISYKKLRLLEKRRTYLKEIRKEEALPPLPEGRSLRA

SEQ ID NO: 8051 - protein, 442 aa, unidentified
MVTVQQSTHHLPFGRVFIRRNLFMVYVISQDSKPLMPCSNPIARLLLKQGKAKVKRREPFTIKLIYETTDYTQDLTLGVDTGSGTIDAAVSKDNGDIVYMSEVVVRNDITDKMTQRAKYRRNRRNRKTRYRKARWLNRSNSIKKDRFSPTMQSKLHSHVKEIEYIQSILPITEMVFETGQFDMHLMKNPSLANPKVRPWGYQKGTNYGFENTKAMVLNRDNYTCQCCKGKHKDSKLEVHHIVFRSQGGSDEESNLITLCHTCHKDLHSGKINLKLSGKVKGNLKYATQMNSIRKQLFRLYPNAIETFGYVTKANCLHLGVDKEHYYDACTIATQGNAFNVKSDLYKKKCVSDGDFQKTKGIRSEQPIVTDKICGFRKFDKVRYFGKDYFIKGRMSTGYAILMDIDGNKIDFSTMPRGYKTPKLSNCKRITARSTVMTQVKVV

SEQ ID NO: 8052 - protein, 406 aa, unidentified
MVYVQDIDGKPLMPTTRHGKVRRLLKSNKAVVVNLCPFTIKLMYVTSDYKQEIVLGVDAGTKHVGLSATTKSKELYSSEVILRNDIVDLLSTRRELRRSRRNRLRYRKPRFDNRIKSKRPGWVAPSVKYKVDAHIRVIDNVCSILPISRIVIEVAQFDTQKIKNPEILGKEYQEGDQLGFWNVREYVLARDGHKCQHCKGKSKDPVLNVHHIESRKTGGDSPSNLITLCETCHKEYHKGNIKLKVKRGTSFRDAAAMGIMKWKLLDKLKSLYPNVSMTFGYITKHNRIKHEIKKSHISDAFVISKNFEAKRPGYYFKEKLVRRHNRQIHKMKILKGGKKKMNQAPFKVFGFRLFDKVEFQGNEYFIYARRLSGYFNIRDINSENKKDVTYKKLTHIGHGLISVETG

SEQ ID NO: 8053 - protein, 314 aa, unidentified
KKAIVVRRTPFTIQLTIATGETKQPVSLGVDAGYKHVGLSASTEKAELYASEIELRQDITDLLSARRELRRARRNRKTRYRGPRFDNRIRTKRKEWFAPSVENRINAHLSRIEKVLRLLPVTTITVETASFDTQLLKNPDISGKEYQEGEQLGFWNIREYVLCRDGHVCQHCYGRSKDPVLNVHHLESRRTGGDSPGNLITLCETCHKALHRGEITLKAKRGQSFRAEAFMGIMRWEVLDRLKASHPELEVQNTYGYRTKHVRIANGIAKSHCADAFCIGGNLGAERLGEFFFQKQTRRNNRQIHKLSILKGAL

SEQ ID NO: 8054 - protein, 442 aa, unidentified; identical to SEQ ID NO: 2903

SEQ ID NO: 8055 - protein, 429 aa, unidentified
MSNFVFVLDTNKRPLDPVHPGKARRLLSTGNAAVFRRYPFTIILKQAYPEIPVQDLELKLDPGSQVTGIAVVQGTKVIFGAELEHRGQQIKDALLSRRQLRRSRRNRKTRYRQARFLNRTRPKGWLPPSLQHRVDTTMTWVNRFRRLAPIARIAQELVRFDLQLIQNPEISGIEYQQGELQGYELREYLLEKWNRKCAYCGAENLPLELEHIHPRSKGGTDRVSNLTLACHSCNQSKSNRDIRDFLSDKPSRLNRILKQSQSPLKDAAAVNSTRWALFNALKQTGLPVATGTGGQTKFNRTRLNLPKTHWLDAASVGKIDSLKVLTTNPLLIAAKGHGTRQMCGTDKFGFPKRHRSRVQIHQGFQTGDIVTAIVTKGKKIGSYVGRVLCRASGSFDITTQSGRVSGISHRYCQPIHKRDGYAYAFAHTL

SEQ ID NO: 8056 - protein, 442 aa, unidentified
MVTVQQSTHHLPFGRVFIRRNLFMVYVISQDGKPLMPCSDPIARLLLKQGKAKVKKRDPFTIKLTYETTNYTQGLTLGVDTGSGTIGTAVSKDNGDIVYMSEVVVRNDITDKMTQRAKYRRNRRNRKTRYRKARWLNRASSIKKDRFSPTMQSKLHSHVREIEYIQSILPITEMVFETGQFDMQLMKNLSLANPKVRPWGYQKGANYGFENTKAMVLNRDNYTCQCCKGKHKDSKLEVHHIVFRSQGGSDEESNLLTLCHTCHKDLHSGKINPKLSGKVKGNLKYATQMNSIRKQLFRFYPNAIETFGYVTKANRLHLGVDKEHYYDACTIATQGNAFNVKSNLYKKKCVSDGDFQKTKGIRSEEPIVTDKICGFRKFDKVRYFGNDYFIKGRMSTGYAILMDIDGNKIDFSTMPRGYKTPKLSNCKRITARSTVMTQVKVV

SEQ ID NO: 8057 - protein, 522 aa, unidentified
KPLMPTTRGGHVRHLLKEQKARVVQSNPFTIQLLYETNDAVQPLYLGIDPGRTNIGVAVVKADGTAVFTAHLKSRNKEIPKLMQDRKRARRARRTNGRRHRRQRRAKANGTISKKCVKQTTTQNGSVSKRAKEIGIIKRHLPGCEKDVLCIGIKNKETKYTNRERPEGWLTPTANQLLQTHVNLVKKVQKLLPISDVVLEVNKFAFMRLDNPDIQKWQYQQGPLYKKESLESAVSEMQEHHCLFCKKPIDHYHHVVPKSENGSNTIANIVGLCAEHHNLVHKDVAWQEKLAEEKTGLNKKYGALSVLNQIIPALTNKLSVLFPKHFFVTAGKSTHDYRAAHGVSKDHWLDAYCIACSVLPSNVCDSNINNHVPYELKQFRRHDRRVLHKANMSRVYTLNGKAVATNRHKAIKQTTDSLEEFRQNYPDDVYKLKVKEHHPAYRNLNRNYPGSVFLVGKQAHVMQGIASSKDGKTTKYNDTNATTITAGKCKFVAKNSGILFVQCKFRKTLSDGTTKKLQYPVR

SEQ ID NO: 8058 - protein, 464 aa, unidentified
MSTCACVLSNNGERLMPTIRLGKVRHLLKDGKAKIIKHHPFTIQLLYDSKTNTQPIEICEDVGYNYIGISVKSQSHEYVSAQYDTLQDEKDCHDDCRRMRRTRRNRLRYRQARFDNRKRDKGWLAPSLKHKKELNVNVIKMYCEVMPVTHAIVEVGSFDTVLVKAIQEGKATPESTDYQKGPRYNLATLREAVFYRDNYVCKVCGRKATEGAILHMHHMFYWKGRHGNSLSELLTVCEKCHTPANHQKGGKLYGFGEDIKFANLSGAAFMNTVRWQIVNELYAAFGKPFVTFTYGAMTKEKRIALHLEKSHNNDAYAMGSLHPTDRCAFEHYEKVKRNNRILEKFYDSQYIDIRTGEVATGKSLFNGRINRSHKKDSENLHKYRGKRVYKGHRALHRKKVPLNPGDSVSLNGETLIVHGTHTRKGDVNVEFKTPSKSGKKSASLKNLKIVKTINPMRSAWAKVS

SEQ ID NO: 8059 - protein, 442 aa, unidentified; identical to SEQ ID NO: 3218

SEQ ID NO: 8060 - protein, 420 aa, unidentified
MQYVYVLSKHGEPMMPCSPGKARLLLKRQKACVVRRTPFTIKLLYGSAGYKQPITLGVDAGSKHVGLSASTEKRELYREEFTPRNDVVELLSTRRQNRRSRRNRKTRYRAPRFDNRVHSKHKGWLAPSVEVKIQEHITIIKRICKILPISLVRVETAEFDTQRLKAMLAGKPLPVGTDYQLGEMYDEYNVRQYVLKRDNYTCQCCGAHTTAKKLVKLHVHHLESRKTGGNAPSNLVTLCTTCHKNLHKGKVTLDGKERGKPLRDAAFMGIMRKTLMARLKEELPIPVQGTYGYITKMRREQNDIKKSHTNDARCISKHPLAEPCSVCYRTKAIRHHNRQTHKANFSKKGIRKRSQMPYLVEGYRLWDKVLYKEQECFVSGRRSSGSFTLKKLDGTSVSKGVTFKKLRLLEPATNYLIERM

SEQ ID NO: 8061 - protein, 493 aa, unidentified
MAAVYVISASGKPLMPTTRCGHIRGLLNAGKARVVEREPFTIQLKYETPDVTQPLYLGIDPGRTNVGSAVVREDGECVFTAQLTTRNKDVPKLMKARKQFRMAHRRLKRRCKRQRRAKAAETLSQKGEFQRLLPGYEEPILCKGIRNKEARFNNRQRPAGWLTPTANHLLLTHLNMVKKLQKLLPITDVVLEVNRFAFMAMENPSIRRWQYQQGPLYGKGSVEDAVYAQQDGHCLFCGKPIAHYHHVVPQHKNGSETLENRVGLCNEHHDLVHKDRAWDAKMKETKAGLNKKYHALSVLNQIIPALTEQLTAMFPQHAFVTTGKDTADFREDYGIAKEHHLDAYCIACSVLAEPTKVAAPTGKPHRLMQFRRHDRQVCHKENIKRVYLSEGNAVATNRHKAIEQKDDSLEEFRKTHTQQEVSALTVKDHQPVYKDMRRFMPGGVFLFNGKVHTLQRSHGRYKGMPFYYIDTDGSKNHAKGCIFLQQNCGLRWV

SEQ ID NO: 8062 - protein, 512 aa, unidentified
MSTIYVLNKDGKPLMPTTRGGHVRHLLKEQKARVVRTKPFTIKLLYETNDVVQPLYLGIDPGRTNIGVAVVKTDGTAVFTAHLETRNKEIPKLMKKRKDSRRTRRTNGRRCRRQRRAKANNTISKKCVKQTTAQNGSVSKRAKEIGVIKRHLPGCEKEVLCIGIKNKEAKFNTRTRPEGWLTPTANQLLQTHINLVKKIRKFLPISDVVLEINKFAFMQLDNPNIRKWQYQQGPLYQKANLEEAVSEMQEHHCLFCKNTIDHYHHVVPQHKNGSNTIGNIVGLCAKHHDLAHKDISWQEKLAKKKTGLNKKYGTLSILNQIIPALTKELSSLFPKHFFATNGKSTYDYRAAHGVSKDHWLDAYCIACSVLANDVCDSNINSHVPYELKQFRRHDRRALHKENMGRVYTLNGKKVATNRHKAVEQTTDSLEEFRQNHPDDVCKLKVKEHHSAYRNPKRNFPGCVFLVGKQTHVMQGTSGSHNGQADGYYDTNGNSYSSGKCKFVAKNEGIVFT

SEQ ID NO: 8063 - protein, 413 aa, unidentified
MTNYVFVLDANGKHLSPTKEQKAWFFIRKKRATLVSKYPMVIQLNKEIPDDKICKDEIRCGIDDGGLHTGIALVQKCQTKNKVLFKGVIEQRNDVKHLMDVRRGYRRYHRYHKRYRPARFNNRSSSKKEGKIAPSILQKRQATIRAVAQLNKWINITDYWLEDVAIDIRALTDGFKPYKWQYQKSNRLDENIRKAVILRDGCQCVECGRTNCKLEVHHIKPRRSNGSNVLSNLITLCERCHQNTEGREELFMDKYFALLNSSDNKYLNYAQHVMIGKKWLREQLSSLGILHLTNGGDTANKRIDWNIEKFHSNDAICITNLQPDTCDVKEWTIKPMRRQSKAKADNVLGIKHRDLVEYTFKSGETHRGYVTALYPKQNAINFQSPTKHCKKVSAKKCRLLWKFNKIYWLDDVS

SEQ ID NO: 8064 - protein, 473 aa, unidentified; identical to SEQ ID NO: 3562
  source 1..473: note = uncultured beta proteobacterium

SEQ ID NO: 8065 - protein, 470 aa, unidentified; identical to SEQ ID NO: 2825

SEQ ID NO: 8066 - protein, 456 aa, Halomonas sp.; identical to SEQ ID NO: 3067

SEQ ID NO: 8067 - protein, 443 aa, unidentified
LTKDENRPSGRTTGLRAEQAEPAGIRKGDTLKVFVLNMRGKPLMPCSPAKARHMLKAGKAFVVRRTPFTIKLTIATGETKQDVTLGVDAGARHVGISATTEKEEVFASEVALRQDITGLLADRLAFRRARRNRKTRYRAPRFNNRVRSKHKGWLASSVENRIQAHMSRIDAVCRLLPVTKIVIETASFDIQKIRNPEVEGTGYQQGDQLGFWNVREYVLFRDGHICQHCRGRSKDPILNVHHLESRKTGGDAPNNLITLCETCHKAYHAGKIKLKVKRGQSFRAEAFMGIMRWTLLDRVRKTHPKLPVENTYGYLTKHKRIALGLPKTHCADAFCIAGNLKALRRGDFLFQQQTRKHNRQIHRCSILKGGVRKLNQAPFLVKGFRLFDKVRIGGQIGFVFGRRVRGIFNIRRLDKTVIGTDINCKKLSLLETRKTFLTELRKE

SEQ ID NO: 8068 - protein, 465 aa, unidentified
MSTCACVLSKNGERLMPTIRLGKVRHLLKDGKAKIIKHHPFTIQLLYDSETNIQPIEICEDVGYNYIGISVKSQSHEYVSAQYDTLQDEKSCHDACRRMRRTRRNRLRYRQKRFDNRKRDKGWLAPSLKHKKELNVNVIKMYCEVVPITHATVEVGSFDTMLVKAIEEGKATPEGADYQKGPRYNLATLREAVFYRDNYTCQVCGREASEGAILHVHHMFYWKGRHDNSLSELITVCEKCHTPANHQKGGKLYGFGEDIKFANLSGAAFMNTVRWQIVNELYAAFGKPFVTFTYGAMTKEKRIALHLEKSHNNDAYAMGEFHPNCRCTFEHYEKVRRNNRILEKFYDSRYIDIRTGEIATGKELFNGRINRSHKKDSENLHKYRGKRIRKGYRALRRKKVALNPGDLVSLNGEILTVHGTHTKKNGSVNVEFKTPSKSGKKSTSLKKLKIIKTISPMRSAWDKVS

SEQ ID NO: 8069 - protein, 416 aa, unidentified
MVYVLDKNGQPLMPTDRHRKVRLMLQSGQAKVIKRCPFTIQLNYDSGHQTQEISLGIDAGSKHIGVSATTKIKVLYEADVELRNDIVDLLSSRRELRRGRRNRKTRYRQAKFNNRRCGNGWLAPSIRQKIGTHLTVVENICKILPISRIMVETASFDIQKIKNPDIQGAEYQQGDQLGFWNVREYVLFRDGHTCQCCKGKSKDKILNVHHIESRKTGGNAPNNLITLCETCHTGYHKGTVQLPKAIKRGMRFKDAAFMGIMRWAFYEALKQQYEPVGTPVHNTYGYITKHTRIAYNLPKEHYVDARCISGNPEASSNGEYYYQKKVRCHNRQIHKLTVLKGGIRKQNQATYLVKGYRLFDKVSYQGKGYFVFGRRQSGFFDIRTLSGEKVNKGSLSCKKLKFIATRTYYLTERRAV

SEQ ID NO: 8070 - protein, 396 aa, unidentified
VVRRTPFTIQLTIATGESKQPVSLGVDVGYKHVGLSASTEKAELYASEVELRKDITDLLSARRALRQSRRNRKTRYRAPRFDNRIRTKRKGWLAPSVENRINAHLSRIEAVLRLLPITKITVETASFDMQRLKNPDISGKEYQEGEQLGFWNVREYVLFRDGHVCRHCHGRSKDPVLNVHHLESRRTGSDSPDNLITLCETCHKALHRGEITLKAKRGQSFRAQAFMGIMRREVLNRLKASYPELKVHETYGYLTKHARIANGIVKSHGADAFCIAGNLGAERLGEFFFQKQTRRNNRQIHKLSILKGGIRKRNQAPFEAKGFRLFDKVACQGEEGFIFVRRSSGSFDVRKLDGTRISAGISCKKLRLLEKRRTYLTEIRKEEALPPLPEGRGLRA

SEQ ID NO: 8071 - protein, 512 aa, unidentified
MSTVYVLNKDGKPLMPTTRGGHVRHLLKEQKARVVRTNPYTIQLLYETDNLVQPLYLGIDPGRTNIGVAVVKTDGTAVFTAHLETRNKEIPKLMKKRKDSRRARRTNGRRCRRQRRAKANGTISKKCVKQTTAQNGIVSKRAKDIGVIKRHLPGCEKEVLCIGIKNKEAKFSNRVRPEGWLTPTANQLLQTHINLVKKIQKFLPISDVVLEINKFAFMRLDNPNVQKWQYQQGPLYQKASLEEAVSEMQEHHCLFCKKPIDHYHHVVPQHKNGSNTIGNIVGLCAKHHDLVHKDTTWQKKLAKKKTGLNKKYGALSVLNQIIPALTKELSSLFSKHFFATNGKSTYDYRAAHGVSKDHWLDAHCIACSVLPNDVCDSDINNRVPYELKQFRRHDRRALHKENMSRVYTLNGKSVATNRHKAIKQTTDSLEEFRQRQPNDVCKLKVKEHHPEYRNPKRSFPGCVFLVGKQTHVMQGTSGSHNGKADGYYDTNGNSYSSGKCKFVAKNEGIVFT

SEQ ID NO: 8072 - protein, 518 aa, unidentified; identical to SEQ ID NO: 3878

SEQ ID NO: 8073 - protein, 438 aa, unidentified; identical to SEQ ID NO: 4848

SEQ ID NO: 8074 - protein, 424 aa, unidentified; identical to SEQ ID NO: 3434

SEQ ID NO: 8075 - protein, 438 aa, unidentified
LKDGKAKIVKHHPFTIQLLYDSKTNTQPIEICEDVGYNYIGISVKSEFHEYVSVQYDTLQDEKEHHDDCRKYRRTRRNRLRYRQARFDNRKRDDGWLAPSFEHKKELNVNVIKMYCEVMPITHAIVEVGSFDTMLVKAIEEGKATPESADYQKGPRYNLATLREAVFYRDNYVCKVCGRKATEGAILHVHHMFYWKGRHGNSLSELITVCEKCHTPANHQKGGKLYGFGEDIKFANLSGAAFMNTVRWQIVNVLYAAFGKPFVTFTYGAMTKEKRIALHLEKSHNNDAYAMGSFHPVNRCAFEHYEKVKRNNRILEKFYDSQYIDIRTGEIATGKELFNGRISRSHKKDSENLHKYRGKRICKGHRALRRKKVALNPGDLVSLNGEILVVHGTHTKKNGSVNVEFKTPSRGGKKSASLKKLKIVKTTDSMHSAWEKVS

SEQ ID NO: 8076 - protein, 529 aa, unidentified; identical to SEQ ID NO: 6786

SEQ ID NO: 8077 - protein, 426 aa, unidentified
MSNSTNYVFVLDAKKKPLAPCKPAMARSLLKAGKAKVFKRYPFTIILKKLVALDFQGLQLKIDPGSKQTGFALVTQSEEVIFAMVLVHRGQQIKNALERRRTLRRGRRYRKTRYRKCRFFNRKRKKGWLPPSLRHRVLTVETWVNRLCKLSPVSSLAIELVKFDTQKIQNPEISGVEYQKGELFGYDVREYLLEKWGRSCAYCGATDTPLEIEHIVPRSKGGSNRVSNLAIACHQCNQNKGAMDIREFLENKPSILAHVLKVAKTPLKDAAAVNSTRTQIFETLTATGLPVITGSGAGTKYNRRRLNLPKEHWIDAACIGEVEKLTILTNQPLVVTAMGHGCRQMVQMDKYGFPRIGYKAKKPVPGWKTGDIINVVKGKNAGLKGVRIKTVRSKGNFDIRQGDKILSVSRNHIQPVHRRDGYNYSF

SEQ ID NO: 8078 - protein, 544 aa, Streptomyces sp.
MTTFPAGQQTHQAVLPQQPALESVRADTPGSRDETAHGHPATTRDTGREHGRGETGGHSTRTRRRHAKSAATATQAAENRSGDAPTTNQLYEGGAGASRVFVLSKDGQPLMPCHPARARELLGKKRAVVARQVPFTIRLKDRTRAESEVDGVQLRIDPGSRGTGLALTDEKKETDEQGTTVIVRRGLSSVELQHRGDQIRACMRQRAGYRHRRRSANLRYRARRSNNRTTAPGWLPPSLRHRVDTTISQAKRLCRYAPVTEIHIEHVTFDTHSMSAGRSLRGTEYAQGPLAGTNARSYLRAKWNNACAYCDATGIPLNIEHLSPRGRGGSHRISNLVLACAPCNQAKGSKPVETFLAHRPGRLARILQQIKTPLTDAAAMNTTCRQLAEALSTLGPPVHAWPGWLTKENRDAMGLAKTHTLDALSVGPLDHTNGDKIVRSPRHVLVTKATGRGSYARTTPDRYGFPRLLRSRAKQHFGYATGDLVRAVMPSGKWAGTWTGRISVRARGQHSLMTPRGRFNVSHWHLKLLQRGDGYGYDVRPESS

SEQ ID NO: 8079 - protein, 559 aa, Planomonospora sp.
MRQPPHLKPVLTSLSHQRMEVPLMATFDTRQRTHRRVLPQPAALECAGADTPGRDETARADPAGDGRVPGIGHGRGETRTRRTRVHGRHPEAAAAVKGDRGLTASHVFVLDKSGEPLMPCHPARARTLLASGRAVVVRHTPFVIRLKDRTVDESAVPSVEVGIDPGSRHTGISLFMQTDEVRRGLFALQLDHRGGQIRDKLTARANYRRGRRSRNLRYRAPRFSNRIRSKGWLAPSLRHRVDGVASWVGRLRRWAPIRVLHVERTAFDTSALAVGKSLSGVEYQQGTLYGYEIREYLLEKWNRTCAYCGATGVPLNIDHIHPRCRGGSDRISNLALACVPCNQAKDALPVEEFLVGDPERLARIRIQAKTPLRDSAAMNATRQALWRALAATGLPTRAASGGRTKWNRWRTGASKSHTLDALHVGDLEYVTAWPATVLVATATGRGGYARTRPDRYGFPRLALPRIKQVHGFATGDLVRAVVPSGKKAGTHAGRVAVRTTGSFNIRTRQGLVQGIGYRHVRLLQRADGYGYIMIKEVIVASRSIALPRFEDLGCHAGGN

SEQ ID NO: 8080 - protein, 453 aa, unidentified
LDTVAVISASGKKLMPTNSYRARGLLKSKRAVIHKYRPVFTIKLVDRTNGYTQPIEYKCDTGYQNIGISICSDTKEFVNEQRDLLKDEVKKHSDSRRYRRTRRNHLRYRKKRFDNRRGMISRDGFAPSIRNKRDVHVRLYEEYYKIFPIAKAVFEMGQFDTQVLKAIEAGLPVPKGADYQRGEQYGYATLREAVFARDDYKCICCGKSAIKDRIKLRVHHIGYLSGDRSNRMANLGSVCENCHTPNNHKPGGKLYNLKPKLKELKGATFMTTVRYSMIKNLKAATPNADIKVTYGAATKLARKDLNVRKTHSNDAYCMGEFHPKHRSDFKHYKKCRRNNRVLSRFYDAKYRDLRDGSTKTGSQLSCGRTNRKILRHTKLDERIYRAHKISKGRISTRRQHYSLRPGDKVLYDGKVYFVKGIQSNGTSIKLANGKACPLKKVSILQHCNAWAII

SEQ ID NO: 8081 - protein, 476 aa, unidentified
LEVVDTEGVSHPGLPGKYKHKGGQLMSVAVISKTGERLMPTSEYRARKLLKSGKAIKHSYHPFTIQLTERETGDIQPIELCMDTGYIHIGISVKSEKHEYLAEQIDTLTDERGRHDACRMYRRQRRSRRRYRQARFNNRKRDQGWIAPSLEHKKKIHIQAISRINNVMPITDITLEMGNFDTQVLKAKEEGKPLPQGADYQHGERYSIATLREAVFSRDSYKCQYCGRTIKDGAILHIHHIKYRSQGGTNSMSNLATVCDKCHTPKNHKPGGKLYNWKPKLSFFKGATFMTVIRWQLYNEVKALFPDIDIHITYGAATKERRRELDIDKSHVNDAFVMGQFHPKHRIKAVLYKKKRRNNRCLEKFYDAKYIDSRDGKKRSGQELFNGRINRNHKKDSENLHQYRLQKVTSGKRTVRKQHYKIQPHDIVIYENRKRETAGCHCNGTRMMLLPDKKSASIKKVKIYKYAGGYFKSAFN

SEQ ID NO: 8082 - protein, 510 aa, unidentified
MPTVYVLNKDGKPLMPTTRCMHVRHLLKNGKARVVKSKPFTIQLLYETDDVVQPLYLGIDPGRTNIGVAVVKADGAAVFTAHLETRNKEVPKLMKKRKESRCARRTNGCRRQRRAKTNGTISKKCVKQTTAQNGSVSKRAKEIGVIKRHLQGCEKDVLCIGIKNKEAKFTNRARPEGWLTPTANQLLQTHINLVKKIQKFLPISDVVLEVNKFAFMQLDNPNIQKWQYQQGPLYQKGSLENAVSEMQEHHCLFCEKPIEHYHHVVPKSENGSNTIANIVGLCTEHHNLVHKDATWQKKLAKEKVGLVKKYSALSVLNQIIPALTKEMNSLFPKHFFVTNGKSTYDYRTAHGVSKDHWLDAYCIACSVLPNDVCDSNINSHVPYELKQFRRHDRRVLHKANMSRVYTLNGKTVATNRHKAIKQTTDSLEEFRQSHPGDVCKLKVKEHHPAYRNLNRNYPGSVFLVDGQVHVMQGVSGSHNGKADGYYNTNGNAYPYYKCKFVVKNEGIVFA

SEQ ID NO: 8083 - protein, 434 aa, unidentified
MQNYVFVVDKNVVPLNPIRPKRARQLLNQNKAAVLRPFPFTLILKQEISNANIHPLTLKIDPGSKTTGFALLDGDKVVWLGELEHRGQRIKDSLEKRRTIRRNRRSRKTRYRKARFLHRTGSIRPLPPSVHHRALTVETWLKRFTRFVPINKIAIEQVKFDMAKMQNAEITGVEYQQGTLWGYEVREYLLEKWGRECTYCGKKDVPLQIEHIVPKSKGGSNRVSNLCLACEECNQKKGNKPVEEFLKNKLEKLKKIKSKMKTPLKDAAAVNASRNKLAWICEFIISGITGKRSDCEVGTGAQTKYNRTRLGLPKEHSIDAACVGSVDTLEFRTSQPLLIKAAGHRNKQYVRMNKFGFPASKPRKKYDIGWKTGDIAISINKGVKCLGRVLINDAKRFEMRINGKRISGKYGELTKLHRSDGYSYSFSANYSVSP

SEQ ID NO: 8084 - protein, 366 aa, unidentified
VIKRHLPGCEKEVLCIGIKNKEAKFSNRTRPEGWLTPTANQLLQTHINLVKKIQKFLPISDVVLEINKFAFMRLDNPNIQKWQYQQGPLYQKASLEEAVSEMQEHHCLFCKKPIAHYHHVVPQSENGSNTIGNIVGLCTKHHDLVHKDTAWQKKLAKKKTGLNKKYGALSVLNQIIPALTKELSSLFPKHFFATNGKSTYDYRAAHGVSKDHWLDAYCIACSVLPNDVCDSNINSRVPYELKQFRRHDRRALHKANMNRVYTLDGKKVATNRHKAIKQTTDSLEEFRQRQPDDVCKLKVKEHHPEYRNPERNFPGCVFLVGKHTHVMQGTSGSHNGQADGYYDTNGNSYSSGKCKFVAKNKGIVFA

SEQ ID NO: 8085 - protein, 477 aa, unidentified
MIIALDKYKRPLGFLTERRCRILMERKRAVLYRVFPTVVILMDVDARTIPDLPSFRIKIDPGSKYTGIAIIRNDTDEFVYAMQIEHRGDTVRAALNKRKNARRNRRSRETGYRRAKWGNRCLSEKDKRSYDSSREDGWLPPSIRSAADNVISWVRRLGRWINLTECSFEAVRFDTQLMEDPDIEGEEYQHGTLFGLEIKEYLMEKFGHTCQYCGGKSGDPVLEWEHMRPKSRGGSDRVKNALLSCSSCNKDKGNRTPEEWLEQIKARLPREKGKRKELDEERVKLIQKVIDGKPQGSALRYAAWVSSSRRYLEKALFGIFGDVECSSGGRTKYNRTELGYPKEHHYDALCVGTVPEKGYHDRTNGYYLYAKAAGRGTRLRGHLNKCGVIVTKWTDRKKGFFGFQTGDIVVAEVPHKTPKPYKYEGRFVGRVMVRATGSFDIKTTDGKLVTVKEQYCRLLQANSGYHYTMKRAIPLGH

SEQ ID NO: 8086 - protein, 442 aa, unidentified; identical to SEQ ID NO: 3218

SEQ ID NO: 8087 - protein, 417 aa, unidentified
MPCSPAKARLLLKERKAIVKRRTPFTIQLTIATGEAKQPVTLGVDSGYKHIGLSATTEKAELYASEVELRQDITDLLSARLALRRSRRSRKTRYRVPRFDNRVASKRKGWLAPSVENRITAHMSRVEAVMRVLPVTAITVETAAFDTQLLKNPDITGAAYQQGEQLGFWNVREYVLFRDRHVCQHCRGKSKDPILNVHHIESRRTGGDAPNNLITLCETCHKAFHRGEIKLKVRRGKSFKAETFMGIMRRTLFERLKKAHPELNVRNTYGYLTKHKRISYGIAKSHCADAYCIADNLGAKRLEGFFFQKQTRKHNRQIHKLLILKGGLKKKNQAPYEVKGFRLFDKVICKGEEAFIFGRRTSGSFDVRRLDGTRISAGISYKKLRRLEPRTTYLTEFRKEAALPPLHKCRGLRAEFL

SEQ ID NO: 8088 - protein, 434 aa, Anoxybacillus sp.
MVFVLDTNKCPLAPCHEAVARKLLKQGKAAIYKRFPFTIILKKSVDESENETTYRLKIDYGSRHTGLAILRGQEVVWLGQLDHRTDIKERIDKRRAFRRARRNRKTRYRKPRFLNRKRKEGWLPPSLESRVQNIQTWVSRLKKLCPIGHISYENAKFDTQLMRNPEISGIEYQQGTLQGYEVREYLLEKFGRKCCYCGKENVPLEVEHIIPKSRGGTDRIDNLCLACRDCNQRKGNQTAEEFGCPHIQKQVKESLKDTSIINATRWKVYEVLKQARLDVECGTDARTKMNRIRLGLPKTHYFDACCVGESTPNHLYFKTKEVLFINAKGRGSRSRTNLDRYGFPRGYLARQKFFFGFQTGDMVKAIVPRGKYKGVWFGEVACRKTGNFDIKGKDGKRIAQGISYKYIQVIQRFDGYTYRKEEAELAQGAIPPRA

SEQ ID NO: 8089 - protein, 414 aa, unidentified; identical to SEQ ID NO: 4868

SEQ ID NO: 8090 - protein, 616 aa, Salipiger sp.; identical to SEQ ID NO: 3768

SEQ ID NO: 8091 - protein, 431 aa, Escherichia sp.; identical to SEQ ID NO: 3801

SEQ ID NO: 8092 - protein, 512 aa, unidentified; identical to SEQ ID NO: 3870

SEQ ID NO: 8093 - protein, 430 aa, unidentified
MPKVYVLNRHGRPLMPCTPAKARHLLDAGKAKVRHRTPFTIQLLYGSTGYTQEVILGVDAGSKTIGLSAATETEELFSAEVKPRNDVVELMSARRQFRRARRNRTTRYRKPRFDNRVRSKHKGWLAPSVEVKIQEHMTAIRRACAILPVSKVVVETAEFDLQLLKAVAEGKPVPQGEDYQKGEMYGHYNVRQYVLWRDSYTCRICGAHGSVRKGVPLHVHHLESRRVGGDAPDNLVTLCTACHDKLHKGIIMAADIKKRKRRSTRDATFMGIMRMTLLRRLREQLPVPVVETRGYITKATRENLLVLPKSHTNDALAIAHGPQGFRAEYLPNIRQADRLYTIRPVRHHNRQLHKATILKGGVRKANQAEKYICGFRLYDKVLYNGIECFVWGRRTSGSFLLRQLNGEKVKDGVSYKHLKLLERSQSYLVA

SEQ ID NO: 8094 - protein, 421 aa, unidentified; identical to SEQ ID NO: 5881

SEQ ID NO: 8095 - protein, 473 aa, Aneurinibacillus sp.; identical to SEQ ID NO: 6640

SEQ ID NO: 8096 - protein, 460 aa, Petrotoga sp.
MWTYRYIADLFPKGDLRMVYVLSKDETPLMPTKRHGKVKHLLREGKAKVVRNKPFTIQLTYDTTHYTQPITLGIDSGHKYIGFSAVTGKEELLSGEVELRDDISELIKEKVMYRRIRRSRLRYREPKFDNRVSSRKETPRKGFKEGWLAPSIKHKLDTHIRFIEFIKKILPITDIIIEVAKFDTQKIKNPEIKGKEYQQGEQRDFYNLREYILYRDNYTCQLCGKSNVPLEVHHIGYWKGERTNRPSNLITLCTKCHDPKNHLKGGKLYGMKPVQKPLKEATFMSTVRWKLVNALGCKYTYGYITKSKRIKLNLDKTHYNDAFCIAGGTRQRRIEPIYFEQIRRNNRSLEKFYDAKYIDTRDGSTKKGQELFNGRTTRNKNYNTQNLKKFRGQKVSKGRRSIRTQRYFYQPKDIVIYEGKKYTVKGIQNKGSYIKLAGLSKPVKTEIVEPYIFRKGLCVV

SEQ ID NO: 8097 - protein, 442 aa, unidentified; identical to SEQ ID NO: 2807

SEQ ID NO: 8098 - protein, 312 aa, Fischerella sp.
MARFDNRKRSEGWLPPSLMHRVLTVETWVKRLCRHAPIAQTVMELVKFDTQKMQNPEIDGIEYQQGQLAGYEVRQYLLEKWGRKCVYCDKEGVPLQIEHIHPKSKGGSNRVSNLAFSCKRCNLKKGTQLVDEFLKKDAKRLEKIKQQAKKPLKDAAAVNATRWTLFHTLKRILPTTTGTGAQTKYNRTLFQLEKQHWIDAACIGDIKAIKLLTLQPLLIKANGWGTRQMAGTNKYGFPIRHRTRQSLHFGFQTGDIVKAVVLSGKKVGQYVGRVLCRARGSFDIVTKTGTVGDINHRFCKPIHKKDGYSYAF

SEQ ID NO: 8099 - protein, 471 aa, unidentified
  source 1..471: note = Verrucomicrobia subdivision 3 bacterium UBA6082
MKDRTKFPRVLVVTQDRRPAMPCSPARARQLLASGQARILRRLPFVIALTNRVDVETQALRLKMDPGASETGLVLTAAKNDGEHVIWGANLRHRSNQIRRGLYKRRLCRNNRRRRKTRFRPQRCLRQRKGKLSPSLRSALDRTWTWVQRLRRWSPVTGVSVEVVRIDLQRMQDPDVQGCDYQRGPLVGVRLRDHLLHKHDRQCAYCSEKRRGRLEIDHISPVARGGTDRLNNLVIACEPCNRSKGAKSTTEIGHPHIQAGKSLRHATATNIMCVHLLRRLECLDLEVEVGNGAETHTNRGLQGYRKDHWIDAACVGRSGRKVWLELRMPVWHITSFRRHLRRVHLSDAYGFPRQNGRVSQVHGFRTGDVVVAVVRRGKHRGIHLGRIALRASGWFQIGSAAVPWKCCRVVQRNDGYGYALQNLPYHPKVDARNQSTRPSHQRKLMGLRGAERPQTHSEMALPVSDPAISGS

SEQ ID NO: 8100 - protein, 434 aa, unidentified; identical to SEQ ID NO: 5659

SEQ ID NO: 8101 - protein, 454 aa, unidentified
  source 1..454: note = uncultured beta proteobacterium
MAVFVLDRRGKPLMPCSEKRARLLLERGRARVHKMLPFTIRVVDRLAEDSEFQALRIKLDPGSKTTGIALVRETENNGVAVVNLFDLIHRGRQISEALTARRGHRRLRRSKLRYRAPRFDNRGNQQRGWLAPSLQHRVDTTLAWVKRIGKLAPISAISTELVRFDMQALENPDIEGAQYQQGTLAGYEVREYLLEKWGRTCAYCDAKDAPLQIEHIHPKAKGGSNRISNLTLACPSCNAKKAALPIEVFLARHPDRLKRIQAHARRPLKDAAAVNSTRWALVNALKATGLAIETASGGRTKFNRNQFNIPKTHALDAACVGAVGSITNWKKPTLCIKALGRGSYQRTRLDKFGCVRGYLTRSKSIQGFQTGDMVKAVVTKGKKTGSYSGRVAIRASGSFNIQTRTGLVQGVSHRYCTVVQRGDGYGYSQAAKTDATGTPPRAMDASHPRSTSPA

SEQ ID NO: 8102 - protein, 414 aa, unidentified; identical to SEQ ID NO: 2588

SEQ ID NO: 8103 - protein, 419 aa, unidentified; identical to SEQ ID NO: 6355

SEQ ID NO: 8104 - protein, 413 aa, unidentified; identical to SEQ ID NO: 2636

SEQ ID NO: 8105 - protein, 439 aa, Bacillus sp.
MMAYVISLNGNPLDPTHPAKARKLVRKGKANVLQVNPFTIQLTYETTEYTQDITLGIDSGYQHIGFSAVSEKKEHISGELDLLQGMTNRIEERRSYRRTRRGRLRYRQPRFGNRKRNEGWLAPSIQHKLDSHSRFIKKMKTLLPINNVIIEVANFDIQKIKNPDISGVDYQQGEQMGFWNVREYVLHRDHHKCQNPNCKNKAKEPILQVHHIVYRDNGGSDAPSNLITLCTKCHTSANHKKGKFLYEWQSNKPKLNRFKDSTFMSMVRWKLAAIEDANITYGYITKTNRIQFNLEKTHYNDAYVIVGGSTQLRCEPIYYQQVRRNNRSLEKFFDAKYIDSRTGEKSTGKELDSGRRTRNKNENSENSRVYRGEKISNGQRRIRTQRYFYQPNDLVKFKGQICGVVGTMNKGKNVKLNIGKSPNPAKLTPYKFSKGMVAT

SEQ ID NO: 8106 - protein, 424 aa, unidentified; identical to SEQ ID NO: 3351

SEQ ID NO: 8107 - protein, 439 aa, unidentified
MVFVLDKKKRPLMPCSEKRARLLLKRERAVVHRLQPFTIRLKDRLLEQSVLQPVGVKSDPGSKVTGAALVRREETVNGPVDHALHLSQIAHRGEMVHERMQKRAASRRRRRSANLRYRPPRFNNRTRSQGLLAPSLRSRVENVLAWVERYRRLAPIVFVDVETVRFDTQKIQNPEISGVEYQRGELFGYEVRGHLLEKWGRRCAYCGAEKVPLEIEHIVPKSRGGSDRVSNLSLACRPCNQAKGSRTAEEFGHAEVQAKAKPPLKDAAAVNTTRYAILDGLREMELAVRAWTGGRTKYNRVQFGIPKAHALDALCVGGMAGVSGWNVQVLEIKALGRGQRCRTNVDAHGFSRGYRMRHKTVHGFRTGDLVQAEVPHGKWAGTHVGFVAVRALGSFRVEKADGISWKRCRLLQRADGYEYRKIPSVVSSPGVNAGASNAA

SEQ ID NO: 8108 - protein, 475 aa, Blautia sp.; identical to SEQ ID NO: 4128

SEQ ID NO: 8109 - protein, 415 aa, unidentified; identical to SEQ ID NO: 6534

SEQ ID NO: 8110 - protein, 470 aa, unidentified; identical to SEQ ID NO: 2949

SEQ ID NO: 8111 - protein, 454 aa, Halomonas sp.
MRVYVKSQQGDWLMPTHPAKARWMLRLGKAQVIRRTPFAIQLTYAATEHGQPVVLGIDDGNVVVGIAAVANDEVVYQEEIHLRTDIKIKMDTRRSYRQGRRHRKTRYRTPRFDNRSASHKKGRLPPSIRSKKGAILRAVAQMPLPAPALIRLEDAYFDIQAIENPDITGTAYQQGPLLYDKNVKSACKTRDKHRCRVCSTEDYLQVHHLIHRTNGGSDKLSNLMTLCRDCHDDHHKNGLVLPRQKNVSFRSAAHVQQGKYYLQAQLETLAPVQTTFGYLTAHHRKHQGIDKIHANDAVVIAQVGVLPKSILIKTICLGGRKRSLHEATPRRGRKQSNREQKRNGKNVVSLKGFKRLDTVRFQGQVGYLSGFNGTSMAFVRGKDGRYITSPGKSYKQVSLSTLERLHHNQTRVRFLVKQTLTTSRPSSHASLADAPLRRGNPAACLLNLNWITPA

SEQ ID NO: 8112 - protein, 424 aa, Enterococcus sp.
MRVFVRNMQDKPLMPCSNRKARLLLKEGKAKIYQYNPFTIQLCYASREYVQECHIGIDTGTKHIGMAVTSEDKVLFKGEIELRQDVKSNLDTRRSYRRDRRNRKTRYRKARFLNRKKKESWLPPSIENRINHTFKWINKLVALLPNPKLHIEVGKFDVAKMINPNVQGVDYQHGQTYGFYNVRYFVFARDNYTCQCCKKSKNKILQTHHIVYRSNGGSNRADNLITVCTDCHTYENHQKGGILYQWQENRKKTKQYKEPPFMNVLRKRIFTQYPNAIITYGSETTPKRKELGLEKTHYNDAIVISGITKIKENPNEWLLIKQFRKKKRSLHEATARKGRKEPNRLQKRNAKNTPYYKGFYLNDKVRVFNQVGHITGFTSGGAYIKNSENEYITLPNKSYKQIGISNIRLLHHNNNWQYIHKHIA

SEQ ID NO: 8113 - protein, 562 aa, Streptomyces sp.; identical to SEQ ID NO: 3959

SEQ ID NO: 8114 - protein, 420 aa, unidentified
MQYVYVLNKHGEPLMPCSPGKARLLLKQQKACVVKRTPFTIKLLFGSAGYKQPITLGVDAGSKHVGLSASTEKRELYSEEFTPRSDVVELLSTRRQNRRSRRNRKTRYRVPRFDNRVHSKHKGWLAPSVEVKIQEHITVIKHICKILPISLVRVETAEFDTQRLKAMLAGKPLPVGTDYQLGEMYDEYNVRQYVLKRDHYTCQCCGTHNTAKKVVKLHVHHLESRKTGGNAPSNLVTLCTTCRKNLHKGRVTLDGKERGKPLRDAAFMGIMRKTLMVRLKEELPIPVQGTYGYITKMRREQNDIKKSHTNDARCISKHPLAEPCSVCYRTKAIRHHNRQTHKANFSKKGIRKRSQMPYLVEGFRLWDKVLYKGQEFFVSGRRSSGSFALKKLDGTSISKGVTFKKLRLLEPATNYLIERM

SEQ ID NO: 8115 - protein, 422 aa, unidentified; identical to SEQ ID NO: 3922

SEQ ID NO: 8116 - protein, 466 aa, unidentified
VRFEINWLIRGQKGDRKMQKLGERNTYTPTNASQVRSSVVVSLNREETLGEHDLKTCPNNLDGNQLSGKREQDLRVPVLNMRGKPLMPARPAKARHLLKEGKAMVVGRSPFTIQLTTATGEAKQDIALGVDCGYSHVGLSAVSRKKELFSAEVILRGDIVKLNSERRQYRRARRSRLWHRQPRFDNRKKDKGWLAPSIQHKLDSYFKLIGKIKEILPIAKINVEVAAFDIAKIKNPDIEGEGYQNGVQKNFWNTREYVLFRDNHTCQACKGKSKDPVLEVHHLESRKTGGDRPDNLIALCNTCHSKVSKGKFYLNVKIPKGFKAETFMNTVRWKLVNRLKELGNSVSHTYGYITKSKRIEIGLEKNHVNDAFVIAGGTTQERCSSFTVNQTRRNNRRLQTNRKGYRPSIRRKRYELQPNDLVRYDNTEKRVKGVFNYGTWVRLDDGVNTNVKNVEVLKYGKGIQFV

SEQ ID NO: 8117 - protein, 416 aa, unidentified
MVYVLSQHGQPLMPTENHAKVRALLKHGKAKVIQRCPFTIQLLYESTTHTQKINLGIDAGSKTIGVSATTDSKVLYESEVVLRNDIVELLSGRRALRNSRRSRKTRYRKPRFDNRKKPDGWLAPSIRQKIETHVTVVGNVMKILPVTKIIVETASFDIQKIKNPEIEGEGYQHGEQLDFWNVREYVLFRDGHTCQCCKGKSKDNILNVHHIESRKTGGNAPNNLITLCETCHKAYHKGIITLPKEIHRGMRFRDAAFMGIMRWAFYDRLKELYNPLGAEVINTYGYITKNTRIEHGLPKEHYVDARCISDNPAAKPLDHYYFQKKVRCHNRQIHKNTILKGGIRKRNQASYEVKGFRLYDQVLWKGQKCFIFGRRSTGRMDLRLLDGTHINASVGHKNLKLLSMRKNYLIEQRKAG

SEQ ID NO: 8118 - protein, 335 aa, unidentified
MSYVFVIDQEKRPLDPVHPGRARKLLSSGKAAVYRRFPFVLILKHPVSEAHPQPLRLKIDPGSKTTGLAVLNDTSGQVLWAAELVHRGEEVHQALQKRAGVRRGRRSRHTRYRAARFSNRRRKRGWLAPSLCSRMQNVQTWTRRLMRWCPLGAISYEAVRFDTQAIQNPEIKGVAYQHGTLAGLEVKEYLLLKWRHKCVYCQKGDIPLEVEHIVPKRRGGSDRITNLTLACEACNQQKGSQTAQAFGFPHLQAQALQPLKDAAAVNSTRWALYERLKATGLPIEVSTGGQTKWNRKQRGIPKSHWLDAVCVGPSTPERVQWQHVIPLLITARGRQ

SEQ ID NO: 8119 - protein, 465 aa, unidentified
  REGION 1..465: note = Ga0315279_10035668
MQKLERRNTYTPRNTSLVPGNCDPVIKHGQCDQVLQSSKTLSNNSEENQCQHTDRPTVIVYVLHQDGTPLMPYKPAKASHLLKQKKARVVSRKPFTIRLSWDCEKNVQPVTLGIDSGYKSVGLSATTGKKELFSAEVTLRTDIPKLMKERRMYRRQKRNKHHWYRPPRFNNRMKEDNLVPSIKHKLDSHIRLVEKVKKLLPISEVIIEVANFDIQKIKNPNIFGKEYQQGEQSGFWNTREYVLHRDNHECQHCHGKKKDQILQIHHINGKSEGATDRPEELLTVCKTCHEDHHAGKDIIPKKGIKQFKPETFMTAIRWKLVTALGCKHTYGYITKSGRIELKLSKSHINDAFVIAGGSNQERCRPFFVKQVRRNNRCLQINRKGFKPSIRKKHYRLQPSDIVRYNSKEYVSKGCHCKGASIVIVNDTEKLDVNTKKVELVCYGKGLQFRSWLKPGVSLDGAGEAL

SEQ ID NO: 8120 - protein, 325 aa, unidentified
LWGVDKLIEQRRGYRQRRRYWKRYRKERFSNRASTRRKGRITPTILQKRQAVVRVVDRLSKYIRIDSIYLEDVAIDVRVLTDEKKLYSWQYQRSNRLDENLRKATILRDNCKCQLCGKRNCRLEVHHITPRRMDGANTIGNLITLCSECHSNVTGREIEFAEQLYSKIGKKKNNASLQYASHVMVGKTWLREELSKRTPVFLTTGGDTANKRIDWNLEKSHEIDAVCITNLEPESVGVKPWNVKPLRHQRKTMKVKEILGFRHRDIVCYTFKNGEYHEGYVTALYPSEGKQKEGLNFLSPTKHCKRVNPKKCQRLNRPDKFLWLV

SEQ ID NO: 8121 - protein, 512 aa, unidentified
MSTVYVLNKDGKPLMPTTRCGHVRRLLKEQKARVVTSKPFTIQLLYETNDVVQPLYLGIDPGRTNIGVAAVKTDGTAVFTAHLETRNKEIPKLMQGRKKARRARRTNGRRCRRQRRAKANGTISKKCVKQTTAQNGSVSKRAKEIGVIKRHLPGCEKELLCIGIKNKEAKFSNRTRPEGWLTPTANQLLQTHINLVKKIQKFLPISDVVLEINKFAFMQLDNPNIQKWQYQQGPLYQKASLEEAVSEMQEHHCLFCKKPIAHYHHVVPQSENGSNTIGNIVGLCTKHHDLVHKDATWQKKLAKKKTGLNKKYGALSVLNQIIPALTKELSSLFPKHFFATNGKSTYDYRAAHGVSKDHWLDAYCIACSVLANDVCDSNINSHVPYELKQFRRHDRRALHKENMSRVYTLNGKSVATNRHKAIKQTTDSLEEFRQRQPNDVYKLKVKEHHPEYRNPKRNFPGCVFLVGKHTHVVQGTSGSHNSKADGYYDTNGNSYSSGKCKFVAKNKGIVFA

SEQ ID NO: 8122 - protein, 413 aa, unidentified; identical to SEQ ID NO: 2636

SEQ ID NO: 8123 - protein, 414 aa, unidentified
MPCSPAKARLLLKEKKAIVKRRTPFTIQLTIATGESKQPVSLGVDAGYKHVGFSASTEKAELYASEVELRQDVSDLLSARRALRQSRRNRKTRYRAPRFDNRIRTKRKSWLAPSVENRINAHLSRIEAVLRLLPVTKITVETTSFDMQLLKNPDISGKEYQEGEQLGFWNVREYVLFRDGHVCQHCHGRSKDPVLNVHHLESRRTGGDSPGNLITLCETCHKALHRSEITLKTKRGQSFRAEAYMGLMRWEVLNRLKTSHPGLEVHNTYGYRTKYTRIVNGIDKSHCADAFCIAGNLGAERLGEFFFQKQTRRNNRQIHKLSILKGGIRKRNQAPFEVNGFRLFDKVACKGEEGFIFGRRSSGFFDVRKLDGTCISAGISYKKLHLLEKRRTYLTEIRKEEALPPLPEGSGLRA

SEQ ID NO: 8124 - protein, 420 aa, unidentified
MQYVYVLNKHDEPLMPCSPRKARLLLKQKKAHVVKRTPFTIKLLYGSAGYEQPITLGVDAGSKHVGLSASTEKRELYREEFTPRNDVVELLSTRKKYRHSRRYRKTRYRAPRFDNRVHSKHKGWLAPSVEVKIQEHITVIKRICRILPIALVRVETAEFDTQRLKAMLEGKPLPVGTDYQLGEMYDEYNVRQYVLKRDYYTCQCCGAHTTTKKTVKLHEHHLESRKVGGNAPSNLITLCTTCHDALHKGKVSLDSKKRGKPMRDAAFMGIMRKTLMARLRDELPIPVQGTYGYITKMRREQNGIKKSHVNDARCISKHPLAEPCSVCYRTKAIRHHNRQTHKANFSKGGTRQRSQMPYVVEGYRLWDKVLYKGQECFVSGRRASGSFTLKKLDGTRISKGVTFKKLRLLEPATNYLIERM

SEQ ID NO: 8125 - protein, 438 aa, Thermoanaerobacter sp.
VADKTSQSNIGDEHLTPKGGLPHMVYVISKEGKPLMPTNRHGKVRRLLKQGLAKVVRREPFTIQLLYNTTSYTQPVVLGLDTGSKVDGISAITEKQELFSAEVELRQDINKLLLERREYRRNRRYRKRRYRKPRFLNRRKYKGKLAPSIQWKVDAHVRLVNFVAKILPVTKVIVEIAPFDTHKIINPDVESKGYQEGPQKGFWDVREYCLWRAGYKSELSGKKGVLEVHHIVPRNQGGTDNPSNLIVLTAEEHKAVHEGRIKIPNSKLEKVRILKDASHVSIVGWYVVNKLKQTYDIDITFGSRTKEKRIELGIEKSHRNDAFIIAGGSNNIEQIDHWYYGKFFRRQNRSLHKSNPIKGGIRPANTIKEVKGFRRFDKVRYEDMVGIIYGLRSSGYFDIITLNGEKIHSSAKWQNLKLIERAKTLMFERRKERFLSIL

SEQ ID NO: 8126 - protein, 451 aa, unidentified; identical to SEQ ID NO: 3199

SEQ ID NO: 8127 - protein, 515 aa, unidentified
MTALEERLSKTEYIYVLGFDGKPQMPTRRKRHVLKLLKTGRARIAEDIPFTIRLTYRNAPVLQPVTLAEDPGRTNIGAAVLSPLGDLLFAAVIETRNKEIKKLMADRQKSRQASRRGERKARQRLAKRYGSMVKSGMVMRKLPMYAADKFVICKFIRNTQARFCNRKRCPDWITPTVQHLVQTHLNIIRKISRYLPVTDIAFEVNRFAFMHMENPEAMGVDFQNGPLKGYGDVKEAIRTQQHGKCLMCKKPISHFHHIVPRSRGGSDTIQNLAGLCPECHTKVHTDTAFRKDFDEKKSGQLKKYGALSALNQAVPFICKKLLEEYGEEHVHFCRGLDTSLIRTALGFEKTKKNQMHEVDAYCIGLAALEVNEVETPAFDHTFQIRQFRRQDRSIIHHQTGRSYYQGKEKVAQNRKPGFEQKTTALSQWYKEQVRIHGEKEAEKLRSQLRVEKSCRHYNDMDRFLPGAVFLYEGKRYVLSGRITNGKYLRACGQGMKNFPAAECTFIRHNAGLVFI

SEQ ID NO: 8128 - protein, 408 aa, unidentified
RHLLDEGKAKVKKRTPFTIQLVYGSSGYTQEVILGVDAGSKTIGMSASTTKEELLSAEVKPRNDVVDLLSTRREFRRAQRNRKTRYRKPRFDNRVRSKHKGWLAPSVEVKIQEHITAIRRVCGILPVSKVVIETAEFDLQLLKAIADGKPVPQGEDYQQGEMYGHYNVRQYVLWRDGYTCQCCGAHATKKKEVRLHVHHLESRKVGGDAPDNQVTLCESCHEKLHKGLIAEKDFKKRKRKSTRDATFMGIMRKTLMQRLCSELPIPVIETRGYITKATREKLLVLPKSHTNDALAIAQGKQGFNVGYLPEIAQIDKIYTIRPVRHHNRQLYKATILKGGIRKSNQTKKYVFGYRLFDKVQFNEQDCFIWGRRTTGIFTIKTINGKMIKDGISFKKLKLAEKSTSYLIA

SEQ ID NO: 8129 - protein, 453 aa, Anaerotruncus sp.; identical to SEQ ID NO: 5442

SEQ ID NO: 8130 - protein, 470 aa, unidentified
MSVFVVGLNGCRLMPTSERKARLLLKEGKASVYRKVPFTIKLNYKTGSTIQPGYLGIDTGSQHIGITAVREDGTVLHKEEIGLRNSMTKRKLLESKASLRRGRRYRKTRYRHPKWRPKAKRVYCEKPDRKGRHWKKQKNTFTSKRQAGWLPPSLQSKTDHHIRWIRKILGLLPEGYRLSIELGRFDPARMKDPEIHGELYQKGPQYDYENVRAYVLDRDRYTCQACKKKGGKLQVHHILYKSSGATDNPQYMATVCSDCHTLENHQPGGILYRWQQEQKKFTRGLRDASFMNILRKRLMEAFPDAVFTYGNITKVDREALKLPKSHADDATAIALVRIGITSIKDNEPVIYIQQVRRKKRSLHEENPRKGRKEPNRTASRNSKNTKSITVNKKLGKKKIRVTACLFDRVELNGEKGWITGFTGTSCYMKDAEDNYIRTSEKCNQVSLSKLRILHHCGNWVIGARKTLGKG

SEQ ID NO: 8131 - protein, 455 aa, unidentified
MSVLVIGRNGRALMPTTSRKARILLKKETASVVCRHPFTIQLLYKTGCATQEGCIGIDTGSQHIGVGVTCEDRVILKEEHELRSSMEKRSLLVTRAAMRRGRRYRKVRYRKPKWRQHTKRMYFEKPNRRGQHWRKVKTTTQSPRPKGWLPPSLQSKCDHHFRIIDRYLKYLPASITRNLVIEAGRFDMARMNDPMIHGEMYQRGPMYDAENRRAYIFARDNYQCACCKAKAGTTRKTDGTTVKLVAHHILFRSRGATDNPKYMVSVCDHCHTTKAHQPGGILYSWMENNKKVTRGLRDATFMNILRQRLFARYPQAAFTYGNITAADRKQLRLPKSHANDAVAISLFGKEVSAVRDTCQTVHYKQVRKSKRSLHEAIPRKGRKHPNTKAVRNKKNTTQVNGFKLWDSVLADGKKLFICSFTGTSAYLIDKNGCYVSQPGKTYKQWPLSKLKRLHP

SEQ ID NO: 8132 - protein, 442 aa, unidentified
MVTVQQSTHHLPFGRVFIRRNLFMVYVISQDGKPLMPCSDPIARLLLKQGKAKVKKREPFTIKLTYETTNYTQGLTLGVDTGSGTIGTAVSKDNGDIVYMSEVVVRNDITDKMTQRAKYRRNRRNRKTRYRKARWLNRASSIKKDRFSPTMQSKLHSHVREIEYIQSILPVTEMVFETGQFDMQLMKNPSLANPKVRPWGYQKGANYGFENTKAMVLNRDNYTCQCCKGKHKDSKLEVHHIVFRSQGGSDEESNLLTLCHTCHKDLHSGKINPKLSGKVKGNLKYATQMNSIRKQLFRFYPNAIETFGYVTKANRLHLGVDKEHYYDACTIATQGNAFNVKSNLYKKKCVSDGDFQKTKGIRSEQPIVIDKICGFRKFDKVRYFGNDYFIKGRMSTGYAILMDIDGNKIDFSTMPRGYKTPKLSNCKRITARSTVMTQVKVV

SEQ ID NO: 8133 - protein, 424 aa, unidentified
VLDNHKQPLMPCVPARARQLLKKGKASVYRRFPFTIILNERVGGRTQPTELKYDPGSKTTGISLVVHGKTASRVVWAGELTHRSWSIVEALNTRRNIRRFRRYRKTRYRQPRFLNRTRKDGWLPPSIQSRVDNIVTITRKLQVFAPLSSLACEVVKFDTQKLRNPEIDGAEYQRGTLFGFELWEYLLVKWNHSCAYCNAKNTPLEKEHVVAKSKGGSNSVTNLVVSCRPCNERKGTKSIDEFLKKKPSVLKKIKSQLKAPLKDAASMNANRYAIARELETFNLPVNYGTGGQTKYNRTNQGYRKEHWIDASCATSTGENIQILDTMTPLIIKAVGRGSRKMCQTDGYGFPSSKPKAVKRINGFQTNDIVKAIVTKGKKKGVYVGKVSIRSTGYFNIKTKQGKIQGINHRYCNLLQRIDGYEYHT

SEQ ID NO: 8134 - protein, 413 aa, unidentified; identical to SEQ ID NO: 2636

SEQ ID NO: 8135 - protein, 434 aa, Anoxybacillus sp.; identical to SEQ ID NO: 5674

SEQ ID NO: 8136 - protein, 419 aa, unidentified
MVYVISQDGKPLMPCSNPIARLLLKQGKAKAKCREPFTIKLIYETTDYTQDLTLGIDTGSGTIGTAVSKNNGDIVYMSEVVVRNDITDKMAQRAKYRRNRRNRKTRYRKARWLNRSNSIKKDRFSPTMQSKLHSHVREIEYIQSILPITEMVFETGQFDMHLMKNPSLANPKVRHWGYQKGTNYGFENTKAMVLNRDNYTCQCCKGKHKDSKLEVHHVIFRSQGGSNEESNLITLCHTCHKNLHSGKVNLKLKGKMKGNLKYATQMNSICKQLFRLYPNAIETFGYVTKANRLHLGVDKEHYYDACIIATQGNAFDVKSNLYKKKCVSDGDFQKTKGIRSEQSIVTDKIWGFKKFDKVCYFGNDYFIKGRMSTGYAILMDIDGNKIDFSTMPRGYKTPKLSNCKRITARSTVMMQVEVV

SEQ ID NO: 8137 - protein, 509 aa, unidentified; identical to SEQ ID NO: 4404

SEQ ID NO: 8138 - protein, 468 aa, unidentified; identical to SEQ ID NO: 2405

SEQ ID NO: 8139 - protein, 430 aa, unidentified; identical to SEQ ID NO: 4504

SEQ ID NO: 8140 - protein, 443 aa, Anoxybacillus sp.
MVEENMTCFMQRKGENPMVFVLDTNKRPLAPCHEAVARKLLKQGKAAIYRRFPFTIILKKSVDESEIKATYRLKIDYGSRHTGLAILRGQEVVWLGQLDHRTDIKERLDKRRAFRRARRKRKTRYRKPRFLNRRRKDGWLPPSLESRVQNIQTWVERLRKICPIEHISYENAKFDTQLMRNPEINGVEYQQGTLQGYEVREYLLEKFGRKCCYCGKEGVPLEIEHIIPKSRGGTDRVDNLCLACHDCNQRKGSKTAEEFGYLHIQEMVKKTLKDASVVNATRWKVYEVLKQSGCEVECGTGARTKMNRIRLGLPKIHYFDACCVGESTTNHLYFKTKEALFIKAKGRGSRSRTNLDKYGFPRGFLARQKYFFCFQTGDIVKANVPKGKYQGVWFGEVACRKTGSFDIKGKDGKRIAQGINYRYVQVIQRFDGYTYRREGMNIA

SEQ ID NO: 8141 - protein, 544 aa, Blautia sp.; identical to SEQ ID NO: 4004

SEQ ID NO: 8142 - protein, 472 aa, unidentified
MNTCVCVLSNNGERLMPTFRLGKVRRLLKDGKAKIVKHHPFTIQLLYDSKTNKQPIEICEDVGYNYIGISVKSESHEYVSAQYDTLQDEKEHHDDCRKMRRARRNRLRYRKPRFDNRKRSEGWLAPSLKHKKELNVNVVKMYCAVMPITHATVEVGSFDTMLVKAIQEGKAIPEGADYQKGPRYNLATLREAVFYRDNYVCKVCGRKATEGAILHMHHMFYWKGRHGNSLNELLTVCEKCHTPANHQKSGKLYGFGEDVKFADLSGAAFMNTVRWQIVNELYAAFGKPFVTITYGAMTKEKRIALQLEKSHNNDAYAMGEFHPNHRCAFEHYEKVRRNNRILEKFYDSQYIDIRTGEIATGKELFNGRINRNHKKDSENLHKYRGKRTYAGHRALLRKKVNLNPGDLVSLNGEPLVVLGTHTRKNGAVNVEFETPSKSGRKSASLKKLKIVKAADSIHPAWEKVSQIIQRKK

SEQ ID NO: 8143 - protein, 406 aa, unidentified; identical to SEQ ID NO: 3415

SEQ ID NO: 8144 - protein, 413 aa, unidentified
MTSYSFVLDANGKQLAPTKEPKAWFLIRKKRAALVSKYPMVIQLKKKIQENEICKDEIRCGIDDGGLHVGIALVQKCKSKNKVVFKGTIEQRNDVKHLMEVRRNYRRYHRYHKRYRQARFDNRKSSKREGRIAPSILQKRQATIRVIHWLNKWINITNYWLEDVSVDIRALTDGYQSYRWQYQKSNRLDENIRKAAILRDDGKCMECGKSNCRLEVHHIKPRRRNGSNTLDNLITLCESCHQKTEGQEELYMDRYFSLLKSSDNKNLNYAQHVMIGKMWLRKQLSGLGVLYLTSGGDTANKRIDWNIEKSHANDAVCITDLQPDTCDIKEWAIKPMRRQSKAKTDHVLGIHHRDLVEYTFKNGETHRGYVTALYPDQKAINFQSQTKHCKKVNARKCKLLWNYSKIYWFENAS

SEQ ID NO: 8145 - protein, 527 aa, Streptomyces sp.
MGEGIPACDHLRERESQRTHFCRVREHELSVTTASSGKDHLMHDDEALGIPALLEPPPKPGSGAPRVFVLDRRGRPMMPCHPARARELLGKGRAAVARHTPFTLRIKDRLLEDSEVDGVAVRIDPGSRATGIAVTDDITRTFAAKGEVTVRRGLYAVELQHRGPAIRASVEQRASHRRRRRVANTRYRAPRFDNRRRRPGWLPPSLQHRVDTTWSLVERLSRLVPLAEVHIERVAFDTHAMTAGRGLFGIEYQRGTLAGYELRNYLLDQWGRCCAYCGRSGLPLEVEHIQPRSSGGTNRVSNLTLSCKPCNQAKGARPIEDFLRERPQPLAQLNRQAKAPLRDAAVMNATRWRLAERLQDLGRPVSCWSGGMTQHNRTLCGLGKTHTLDALAVGELGLGWRIARYPSHVLVAAATGRGSYARTRTDKYGFPRLALPRTKNHHGFQTGDLVRASVPTGKKAGTHVGRVAVRASGRFNIRTRRGIVQGIGHQYVSLLQRADGYGYSVRVEKRSTQPPAGAAGVHTGGIR

SEQ ID NO: 8146 - protein, 410 aa, Rhodococcus sp.
MTHCFVLDAQDNKLSPTKENRAWYLIRKEKAILKNKFPMVIQLKKEIPFDEIDSTPVHLGIDDGSKSVGIALVQEGKRKNKPLFKGTIELRTDVKDKMSVRRGYRRYRRSHKKYRPARFNNRSISKKKGRLAPSIRQKKDSILRVVNQLQKFVRINHIFLEDVLIDIRALEKGHKPYKWEYQQSNRIDENIRKAVVLRDHNCCQDCGMTNTRMEVHHIIPRRLNGNDSIHNLITLCSTCHGNVTGYELNHSARFLNKIKGRNISYHDAMHVMQGKSYLQNELIKIATLALTTGGDTANKRIDWGIDKSHANDGIVICHLKVKPDQCELKNWTIKTMRKRSSKKVESANGFFHRDFVKYTKRNGETYLAYITALYPKKNQCNMTTIEGKILKRYGLSRLSLIWRFSNIYWL

SEQ ID NO: 8147 - protein, 286 aa, unidentified
VLRLLPVTKITVETASFDMLLLKNPDIAGKEYQEGEQLGFWNVREYVLFRDGHVCQHCYGRSKDPVLNVHHLESRRTGGDSPGNLITLCETCHKALHRGEITLKTKRGQSFRAEAFMGIMRWEVQNRLKASHPELEVNNTYGYRTKHARIVNGIDKSHCADAFCIAGNLGAERLGEFFFQKQTRRNNRQIHKLSILKGGIRKRNQAPFEVKGFRLFDKVACQGEEGFIFGRRSSGYFDVRKLDGTCISAGISYKKLHLLEKRRTYLTEIRKEEALPPLPEGRGLRA

SEQ ID NO: 8148 - protein, 483 aa, unidentified; identical to SEQ ID NO: 6352

SEQ ID NO: 8149 - protein, 431 aa, unidentified; identical to SEQ ID NO: 4483

SEQ ID NO: 8150 - protein, 518 aa, unidentified; identical to SEQ ID NO: 2751

SEQ ID NO: 8151 - protein, 442 aa, Lactobacillus sp.; identical to SEQ ID NO: 5262

SEQ ID NO: 8152 - protein, 442 aa, Tepidiphilus sp.; identical to SEQ ID NO: 4402

SEQ ID NO: 8153 - protein, 396 aa, unidentified; identical to SEQ ID NO: 4508

SEQ ID NO: 8154 - protein, 407 aa, unidentified; identical to SEQ ID NO: 3417

SEQ ID NO: 8155 - protein, 408 aa, unidentified
MVYVQDINGKPMMPTTRHGKVRRLLKDKKAVVVNLCPFTIKLMYVTSDYKQEIVLGVDAGTKHVGLSATTKSKELYSSEVILRNDIVDLLSTRRELRRSRRNRLRYRKPRFDNRIKSKRPGWVAPSVRYKVDAHIRVIDNVCSILPISRIVIEVAQFDTQKINNPNISGKEYQEGDQLGFWNVREYVLARDGHKCQYCKGKSKDPVLNVHHLESRKTGGDSPSNLITLCETCHKEYHKGNIDLKIRRGKSLRDAAVMGIMKWRLYEKLKSKYDNISMTFGYVTKYNRIKHGIEKSHVFNAFVISKNFDAIRLGYYYKVRLVRRHNRQIHKQKIPKGGIKRLNQSPFEVFGFRLFDRVMFENSYYFIFARRKTGSFNIRDIDGKNQRDITYKKLKLSRCKRFMVQKEMD

SEQ ID NO: 8156 - protein, 491 aa, Allochromatium sp.
MAVFVLDKQKRPLMPCTEKRARLLLERGRAVVVRLAPFTIRLKDRIGGALQPLRLKLDPGSRVTGLALVRESETCDADTGAVERLEHGLWFGELVHRGQAIREALTRRRHYRRARRSRKTRYRAPRFLNRPRREGWLPPSLQHRLDTTVNWVQRLRRLAPITALSQELVRFDTQALQNPEISGVEYQQGELAGYEVREYLLEKWRRTCAYCGAMHVPLEIEHIVPRARGGSDRVSNLTLACRACNQRKANQSIEDFLQRQPALLHQIQAQARAPLKDATAVNATRWALLNALKTTGLPVETASGGRTKFNRTRLDIPKTHALDAACVGAVDQVRDWNRPVLSIRATGRGAYSRTRTFNNGFPRGYLIRHKRVQGFQTGDWVRAEVLKGKKAGVHVGRVAIRRTGSFNVQTPGGTVEGLSHRYCRVLQRADGYGYTIHTKPVTEDARRAATPNRATRGALFLPASQGRGFSRKTDEHSARCSGPYAPSSIRE

SEQ ID NO: 8157 - protein, 465 aa, unidentified; identical to SEQ ID NO: 3070

SEQ ID NO: 8158 - protein, 426 aa, unidentified; identical to SEQ ID NO: 3243

SEQ ID NO: 8159 - protein, 462 aa, unidentified; identical to SEQ ID NO: 2823

SEQ ID NO: 8160 - protein, 362 aa, unidentified
LKGLSRTCGSLRFKEKTLKVFVINKRGKPLMPCKPAKARHLLRDGKARVVRRTPFTIQLTIATGENVQPIHLGVDAGSKHIGLSATTEKEELFSSEVELRKDITDLLSSRREMRRARRNRKTRYRAPRFDNRVHAKNKGWLAPTLENKISAHLSRIKAIRAILPVSRITIEVAFFDIQKIKNPEIEGEQYQQGEQLGFWNVREYVLFRDGRKCCHCHGKSKDPILNVHHIESRKTGGDAPNNLITLCETCHKAYHAGKIQLTAKRGEKFTDATHMGIMRWELFKRAKEANLGIPVKATFGYITKVRRIQFGIAKTHCADAFCIAGNLNAKRLGEYLYQKQTRKHNRQIHKMAILKGGYRKRI

SEQ ID NO: 8161 - protein, 416 aa, unidentified; identical to SEQ ID NO: 4039

SEQ ID NO: 8162 - protein, 420 aa, unidentified
MQYVYVLNKHGEPLMPCSPRKARLLLKQKKACVVKRTPFTIKLLYGSTGYKQPITLGVDAGSKHIGISAATEKYELYCEEATPRNDVVDLLSARRAFRRSRRNRKTRYRAPRFNNRVHSKHKGWLAPSVEVKIQEHITLIKRVCRILPVTFVRVETAEFDTQRLKAMLEGKPLPVGTDYQLGEMYDEYNVRQYVLKRDNYTCQCCGAHPTKTKAVKLHVHHIETRRTGGNAPNNLITLCTACHKALHAGKVTLDGKKRGRSLKDAAFMGVMRKTLMERLLKELKIPVQGTYGYITKYLREKHSIPKSHTNDARCISKNPLAIPCDTCYYTKAIRHHNRQLHKATILKGGIRKANQAPYTVKGYRLWDKVSYNDSECFITGRRTSGYFALKKLDGTVVSNSASYKKMRLLEVATNYITERR

SEQ ID NO: 8163 - protein, 443 aa, unidentified
LTKDENRPSGRTTGLRAEQAEPAGIRKGDTLKVFVLNMRGKPLMPCSPAKARHMLKAGKAVVVRRTPFTIKLTIATGETKQDVTLGVDAGARHVGISATTEKEEVFASEVALRQDITGLLADRLAFRRARRNRKTRYRSPRFNNRVRSKHKGWLAPSVENRIQAHMSRIDAVCRLLPVTKIVIETASFDIQKIRNPEVEGTGYQQGDQLGFWNVREYVLFRDGHICQHCRGRSKDPILNVHHLESRKTGGDAPNNLITLCETCHKAYHAGKIKLKVKRGQSFRAEAFMGIMRWTLLDRVRKTHPKLPVENTYGYLTKHKRIALGLPKTHCADAFCIAGNLKALRRGDFLFQQQTRKHNRQIHKCSILKGGVRKLNQAPFLVKGFRLFDKVRIGGQIGFVFGRRVRGIFNIRRLDKTVIGTDINCKKLSLLETRKTFLTELRKE

SEQ ID NO: 8164 - protein, 419 aa, Geobacillus sp.; identical to SEQ ID NO: 2623

SEQ ID NO: 8165 - protein, 413 aa, unidentified; identical to SEQ ID NO: 2636

SEQ ID NO: 8166 - protein, 420 aa, unidentified
MQYVYVLSKHGKPLMPCSPGKARLLLKQQKACVVKRTPFTIKLLYGSAGYKQPITLGVDAGSKHVGLSASTEKRELYREEFTPRNDVVELLSTRRQNRRSRRNRKTRYRAPRFDNRVHSKHKGWLAPSVEVKIQEHITVIKHICKILPISLVRVETAEFDTQRLKAMLAGKPLPVGTDYQLGEMYDEYNVRQYVLKRDHYTCQCCGAHNTAKKVVKLHVHHLESRKTGGNAPSNLVTLCTTCHKNLHKGKVTLDGKERGKPLRDAAFMGIMRKTLMARLKEELPIPVQGTYGYITKMSREQNDIKKSHVNDARCISKHPLAEPCSVCYRTKAIRHHNRQTHKANFSKKGIRKRSQMPYLVEGLRLWDKVLYKGQECFVSGRRSSGKFALKKLDGTTISEGVTFKKLRLLEPATNYLIERM

SEQ ID NO: 8167 - protein, 407 aa, unidentified
LNSHLAKVAKRCPFTIQLLYQSTKETQPVSLGVDAGSRHIGLAATTEQKVVYQEELVPRNDVVKLLSARRALRSSRRSRKTRYRKPRFNNRVHSKHKGWLAPSVEVKIQEHITAIKRICQILPISEIHVETAEFDLQRLKAMEEGRTLPVGTDYQLGEQYDFYNTRQYVLHRDGYTCQCCGAHDNDVKLHVHHIESRQTGGDAPNNLITLCEHCHKSLHAGKAILPKDKKRGKSYRDAAFMGIMRKTLLERLKKEVDVPVTGTYGYITKYWREKAGLEKSHINDAICISKHPYAKPLDTYYLTKAVRHHNRQIYKSNFSKGGIRKRNQAPYLVKGFRLFDKVLYQGKSYFIFGRRATGFFDIRTLNGAKVNKGSISYKKLRIQDTANAYLKEIKAIPHMNKFTCVLA

SEQ ID NO: 8168 - protein, 507 aa, unidentified
MSEYIYVLGMDGDPQMPTKRKRHVEKMLQTGRARVFRQVPYTIQLTYKNQPVLQPVTIAEDPGRSNIGMAVVSLSGELLSAAVVQTRNKEIVKLMEKRKQHRRASRNGERKARQRLAKKCHTMIKAGSLMRKLPMYGKDKRVQCNVIRNTEARFCNRKREDGWLTPSAEHLVRTHINLIHKMQKFLPITDVAFEINRFAFLSLEDPSISGVDFQNGPLKGYDDLNTAIEDLQDGHCLMCNSSIEHRHHIVPRSMQGSNTIGNIAGLCCKCHERVHKDARFEDRLKKKKAGLNKRYAAVSALNQAIPFICKRLEQEFGKEHVHYCSGRDTSMVRRSLGYHKTKKEQLHEVDAWCIAVLSLRQIPEKAPEFDHVHELLQFRRQDRSRIKAQTSRAYYHEGKKIAKNRKKAEGQREDSLQEWRKQQVKRYGEEQTRKMISQLEIKKSIRRYNRLDRLMPGAVFYYQGIRYVMRGQHCEGTYLQAVGMGSKDFPAKKCKIVAHNEGLVFVS

SEQ ID NO: 8169 - protein, 393 aa, unidentified; identical to SEQ ID NO: 5287

SEQ ID NO: 8170 - protein, 415 aa, Bacillus sp.; identical to SEQ ID NO: 2431

SEQ ID NO: 8171 - protein, 421 aa, unidentified
MMVYVLSHTGQPLMPTEDYRKVRILLKQHKAKVLQRTPFTIKLLHYTHEYKQPISLGVDAGSKVIGLSATTEKKELFASEVILRNDIVKLLSTRREFRRARRNRKKRYRSPRFDNRVHSKNKGWLAPSIENKIDTHLKTVKNVYKILPITNIVVETAAFDTQMLRAKELGLPLPKGVDYQQGEQIYSYNVREYVLFRDNHTCQHCKGKSKDPVLQVHHIESRKIGGDAPNNLITLCKTCHAKYHAGLIKELRVKRGASYRDAAFMGVMRWAFYDRLKQIYPNVSMTFGYITKHTRIKHQLEKKHYIDARCISGHPNALPTENLYLQKAVRKRNRQLHKATINKGGIRKSNQSPKYVYGFQLFDKVFYDNKECFIFGRRATGYFDIRMLDGTKLSAGVSYKKLKLLERRKTILMQQVEDFAT

SEQ ID NO: 8172 - protein, 373 aa, Moorena sp.; identical to SEQ ID NO: 3006

SEQ ID NO: 8173 - protein, 431 aa, unidentified; identical to SEQ ID NO: 3235

SEQ ID NO: 8174 - protein, 428 aa, unidentified
MSKVFVLDTNKQPLNPIHPGRARMLLSQGKAAVFRRYPFTVILKQEVSNPKIEPLRIKIDPGAKTTGLALVNDSTGEVVWVAELQHRGFRIRDALTSRRQLRWSRRNRKTRYRKPRFLNRTRSQGWLPPSLGSRVANILTWVKRLSSLCRVTAISQELVRFDTQKMKNSDISGVGYQQGTLAGYEIREFLLEKWGRICAYCGEKDTKLEIEHIQPRSKGGSNRVSNLCLACTPCNQKKGNQDIKDFLKGKPDLLKRILAQAKRPLADTAAVNATRWNLYENLKKTGLTVEVDTGGRTKYNRTIRGLEKTHYWDAACVGVSTPEQLITTGIKPLLIAAKGHGTRQQCRTDKFGFPVRYCSRTKFHKGFQTGDIVKAVVTSGKKIGTYVGRVATRATGSFNISAKDGLVQGISYKYCTHIHKKDGYSYAN

SEQ ID NO: 8175 - protein, 442 aa, Moorena sp.
VVSPTSHYNIVKEHITNSEALTMQNYVFVIDTNFQPLNPIPPKKARRLLDKGKAAVLRMYPFTIILKTSVMNPTISPCQLKIDPGSKVTGFALVQNNQVIWGMELEHRGGLIKKKLESRRAVRRGRRNRHTRYRKPRFLNRKRPEGWLPPSLEHRILTIQTWVKRLIKFCPIKEIWVERVKFDTQKMENPEINGVQYQQGERRGYEVREYLLEKWGRECTYCGKQSVPLQIEHIHPKSLGGSNRVSNLCLACEKCNQRKGNKPIEEFLKKKPNLLQKIKNKAKQPLKDAAAVNVTRNKLVKVLQSIKSVVTGTGAQTKYNRNKFGFPKEHWIDAACVGDIETLVLRTSQPLLVNCKGHGGRQKAALNKYGYPIRHNPLKPIKGWCSGDIAKNLLTGEFGRVNPRSKSNSFNYTIPGEKAISLHVKNLVRVHKKDGYTYGFCQ

SEQ ID NO: 8176 - protein, 536 aa, unidentified
VLRPRYQCPTRWYPSREQGSGNGCLSGEENTDLEQEVSGTLSKGDHSHPGEQDFCVPAITIQGGPAMSVFVVGLNGCRLMPTSERKARLLLKHGKASVYRKVPFTIKLNYKTGSTTQSGYLGIDTGSQHIGVSVVREDGTVLHKEEIGLRDSMSKRKLMQSRASSRRGRRHRKTRYRHPKWRPKAKRVYCKTPDRKGRHWKKRKITFASKRPKGWLPPSLQSKTDHHIRWIKKLQDLLPEGYRLSIELGRFDPARLKDPEIHGELYQKGPQYDYENVRAYVLNRDRYTCQVCGKKGGKLHVHHILYRSHGATDDPQYMATVCSDCHNTENHQQGGILYQWMQKQKKFTRGLRDATFMNILRKRLIEAFPGATFTYGNITKADRERLILPKSHGNDATAIAIVKTGIMTVKDKEPVIYIQQVRRKKRSLHEETPRKGRKEPNRKASRYDKNTKAVTVTKRKNKKKISITGCLFDRVELNGKKGWISGFTDKSCYVKDENDQYIRTSPKYKQVSLSKLKILHHCGNWAIGARRSLGKG

SEQ ID NO: 8177 - protein, 456 aa, unidentified; identical to SEQ ID NO: 7921

SEQ ID NO: 8178 - protein, 421 aa, unidentified
MRIFVKNMRGKPLMPCTPRKARLLLKQKRAKIVSYKPFTIQLQYATGEAVQEIVVGVDEGARHIGIALVSQGKILAKGEIELRQDVHSLLLSRAQYRRGRRFRKTRYRKARFLNRKRSDSWLPPSIQAKLDANFAWIDKFCSLVPSPKLRIEVGKFDVAKMINPDIQGVDYQHGQTYGYYDVRYFVFARDEYTCQVCKKKNKILHTHHIIYRSKGGTDRADNLITVCSDCHTSENHKQGGILYQWMCEHKKTRQYKEPSFMNILRRRTFQKYPDAEITYGSETSPRRKELGLNKTHYNDAIAITGVEAIKDKEQECFRIKQFRKKKRSLHEATARKGRKVKNVNAKRNKKNTKQLRGWYLNDEVICFGRCGWISGFTGTSSAYVIDCNGEYIQNPSKSYKRVNLSDLKLICHNNNWQYGVA

SEQ ID NO: 8179 - protein, 518 aa, unidentified; identical to SEQ ID NO: 3878

SEQ ID NO: 8180 - protein, 424 aa, Moorena sp.
MRVFVLDKNKKPLDPCKPARARILLKQGRAKVFRRYPFTIIMRDLEELECVTHNHQIKLDPGSQTTGLAIVQEKVVVWGAELTHRGLQIRDGLTSRRQLRRSRRNRKTRYRQPRFLNRKRPDGWLAPSLMSRVYNIITWVKKLTRFCPITGISQELVRFDTQKMENPEISGTEYQQGTLYGYEVREYLLSKWNRKCAYCGVTDTPLEVEHIKPKSKGGSDRVSNLAIACRKCNQTKGNQEIEQFLSGKPDVIKRILSQAKRPLVDGAAVNSTRWKLYNELKALGLPIETGSGGLTKYNRCRQNLPKTHWLDAANVGKVDTLYIEVYQPLLISAKGHGTRQMCRTNKFGFPTRYVPRLKFVKGFQTGDIAKAVVTKGKKVGTYTGRIATRKTGSFNISTKHGLVQGISHQYCSIVHRKDGYAYSF

SEQ ID NO: 8181 - protein, 432 aa, unidentified
MVITLDKNKRPLGFMSERRCRILLEKKRAVLYRYFPTIVILKDVDARKLSGLSSYRIKIDPGAKYTGIAIVMDDTNEFMYAMQIEHRGEQIKKNLDTRRSARRNRRSRETGYRRPKWGNRCTAKEQRQSYDSRRDENWLPPSVKSTADNIISWIRRLCRWINITNCSIESVRFDTQLMENPEIEGVEYQRGTLYGYEVKEYLLEKYGHTCQYCGGKSNDPILEWEHMLPRSRGGSDRLKNASLACHNCNQDKGNHTLEEWKTILQDRIPKERGKQKELDQIRQKFVQQVMERKAPVKGLRYAAWVNSSRRYSQRHLYLRFPELECSSGGRTKYNRNLLKYPKEHHYDALCVGEIPEDGFVDRTHGYYLYAKATGRGTRLRGQINQCGVIIRKWMDRSKTAFGFQTGDLVVADVPKDTKYKYKAINEQVRDFA

SEQ ID NO: 8182 - protein, 470 aa, unidentified; identical to SEQ ID NO: 2949

SEQ ID NO: 8183 - protein, 455 aa, unidentified
MVFVLDRHHKPLMPCHPARARRLLGKGRARIHKLYPFTIRLVDRELKDSTVQPVVLKLDPGSKETGMALVREDETKTHHALYFVNLKHRGSEIKPSLLQRSSFRRSRRSRNLHYRAPRFLNRTRPQGWLAPSLQHRVDTTLSWVERLGKLAPVATLEMELVKIDTQKMQNPEIDGVAYQQGEVAGFEVREYLLEKFGRKCIYCGAEGVPLNIDHIVPKSAGGSNRVSNLVLACVDCNQKKNNLPFEVFLKGDKAKINRIRSQLKTPLKDAASVNTTRWQLFEALKLTGLSLTTATGARTKYNRHQFGVPKEHWLDALCVGETAAVRGWHPLGVLVVKCTGRGAYKRTRLTKDGFPRGYLTRTKRFFGFGTGDMVVATVFAGKKKGSYKGRVAVRKSGSFAIQTASRKVDGISYRYCRLLSRADGYGYSWHSSKSLINSTKETALLPRINTQVSAP

SEQ ID NO: 8184 - protein, 442 aa, unidentified
MSTSVFVLDKRHRPLMPCRPARARRLLRAGRARVVKRFPFVIRLVDRTVEQSEVQPVLIKLDPGSRETGAAVVRDDEKKRHHALAFFVIKHRGGAIRDALKARSAFRRRRRSQNFRCRSPRFLNRVKPKGWLPPSLRHRVETTLSFVRRMCRYLPVSGIATELVKFDSQKLQNPEVSGVKYQQGTLFEYEVREYLLEKFGRKCVYCGAEGVPLNIDHVVPRAKGGSNRVSNLVLACVSCNQKKGARSLEDFLKGKPEVLARVRRELKTPLRDAAAVNATRWGLFNELKATGLPVETGSGALTKLNRHAFGVEKEHWLDALCVGRLNGVVTRKGLNVLEIRCMGRGSRQRTRLTKYGFPRGYLMRQKCVHGFATGDMVEANVPKGKKAGLWRGRVAVRVSGSFNIQTPKGVIQGVGWKHCRLISHNDGYGYAWLGHAPHSSPA

SEQ ID NO: 8185 - protein, 424 aa, unidentified; identical to SEQ ID NO: 4427

SEQ ID NO: 8186 - protein, 453 aa, Halomonas sp.
MSVFVVGKHKQRLMPCTEKRARLLLDRGRAVVHKRYPFTIRLKDRTDGELQSLRLSIDPGSRETGLAITREVGNKRHVLSLFELVHRGFQIREALEQRRAFRRRRRGQLRHRQPRFNNRTKCKGWLAPSLQHRVDTTLAWVDRLCQLAPITSLSQELVRFDTQKLENPEISGIEYQRGTLLGYEIREYLLEKWGRECAYCGDKDTPLEIEHVIAKSNGGSNRVTNLTLACHPCNQAKGNDTLEAFFTRDKGLKKRLRQNKLSAETRYQRVIREQKRSLRDAAAVNATRWALHRDLNVTGLPVEVGTGGQTKFNRMTLGIPKTHALDAACVGSLKAQHDWNVPTLVIKAMGRGSYQRTRLNKYGFPRGYLMREKRAYGFQTGDMVSALVPTGEKTGRHQGRVAIRKTGNFNIQTTNGAIQGISHRHCTLVQRGDGYRYHQTATIQPKGEGKQVA

SEQ ID NO: 8187 - protein, 420 aa, unidentified
MQYAYVLNKRGEPLMPCSPGKARILLKQQKACVVKRTPFTIKLLHGSAGYKQPITLGVDAGSKHVGLSASTEKRELYSEEFTPRNDVVELLSTRRQNRRSRRNRKTRYRAPRFNNRVHSKHKGWLAPSVEVKIQEHITVIKRICRILPVTLVRVETAEFDTQRLKAMLAGKPLPVGTDYQLGEMYDEYNVRQYVLKRDNYTCQCCGAHTTAKKAVKLHVHHLESRKVGGNAPSNLITLCTTCHNNLHKGKITLDGKKCGKTLRDAAFMGIMRNTLLTRLRNELHIPVQNTYGYITKLLREQNDIKKSHVNDARCISKHPLAEPCSICYRTKAIRHHNRQIHKAKILKYGIRKANQAPYIVKGFRLWDKVLYNGQECFISGRRTSGYFALRKLDGTTITNSISFKKLRLLEPATNYLIERK

SEQ ID NO: 8188 - protein, 427 aa, Enterococcus sp.; identical to SEQ ID NO: 2410

SEQ ID NO: 8189 - protein, 415 aa, unidentified
VLGQDGHPLMPTCRHGKVRRMLKSGMAKVVQRCPFTIQLQYESTTHTQKINLGIDAGSKTIGVSATTDSKVLYESEVVLRNDIVELLSGRRALRRSRRNRKTRYRKPRFDNRRRPDGWLTPSIRQKIKTHVTVVENVMKILPVTKIIVETASFDIQKIKNPEIEGAEYQYGEQLDFWNVREYVLFRDGHTCQCCKGKSKDNILNVHHIESRKTGGNAPNNLITLCETCHKAYHKGVITLPKEIHRGMRFRDAAFMGIMRWAFYDRLKELYNLLGVEVINTYGYITKNTRIEHGLPKEHYVDARCISGNPAAKPLGHYYFQKKVRCHNRQIHKNTILKGGIRKRNQAAYLVKGYRLFDKVKYQNQEYFIFGRRSSGFFDIRTLDGTKVNKGSISCKKLQLVEKSKHYLTEQRKVTA

SEQ ID NO: 8190 - protein, 470 aa, unidentified
MSVFVVGLNGCRLMPVSERKARLLLDDGKASVYRKVPFTIKLNYKTGSTTQPGYLGIDTGSQHIGVSVVRKDGTVLHKEEISLRDSMTKRKLLEAKASLRRGRRYRKTRYRHPKWRSKTKRVYCEVPDKKRRHWKKQKSTFTSGRPEGWLPPSLQSKTDHHIRWIKKLQNLLPEGYRLSIELGRFDPARMKDPEIHGELYQKGPQYDYENVRAYVLDRDRYTCQVCRRKGGKLHVHHILYRSQGASDTPQYMATVCSSCHTTENHLPGGILYQWMQEQKKFTRGLRDATFMNILRKRLMKTFPDAVFTYGNITKVDREKLKLPKSHGNDATAIALVRTGVTSVKDEEPVLYIQQVRRKKRSLHEETPRKGRKEPNRTAARNSKNTKAVTVTKRRDGKKVSVTACLFDRVELNGKKGWITGFTGKACRIVDTEGNYVAATDKYTQVNISSIRILHHTGNWVTGLKRNVGKR

SEQ ID NO: 8191 - protein, 438 aa, Calothrix sp.; identical to SEQ ID NO: 7577

SEQ ID NO: 8192 - protein, 414 aa, unidentified; identical to SEQ ID NO: 2588

SEQ ID NO: 8193 - protein, 420 aa, unidentified
  REGION 1..420: note = Ga0307928_10020951
MTQKVFVIDADGKQLLPTHPARARKLVQAGRAQVHQVVPFTIQLARVVENPVGTFTVGIDDGAKHVGIAMVNEHTKEVVFRGTVRLRQDVTRKMTQRAAYRRTRRNRKLRHRPARFLNRGRKGFLSPTIRQKKDSILRVIRDLGKVLHITKAVVEEGQFDISSMAAGRKLVGAEFQQSEYEGRNFRAKVLWRDRYKCTRCSSTEWLQAHHIKPKSVGGGNSPSNGLTLCRTCHKELHDGLWVLTARPKRFLYPAHLQAGKKYLREGLRSCGLAVNTCCGWMTKLWRDTLKLPKAHDLDAVAMVCRAYRPTITERMFTIIPRRTKVWEDNPTKKCHERMGFRHWDLVRARHRSRGVVVGSVRSLKERGLTLRTHGDSNFPVSYSKTQLLWRPKGLVYIGVLGLFCPSALQEEVRCVLLWSS

SEQ ID NO: 8194 - protein, 458 aa, Anoxybacillus sp.
MVEENMTCFMQRKGENPMVFVLDTNKRPLAPCHGAVARKLLKQGKAAIYRRFPFTIILKKSVDESEIKATYRLKIDYGSRHTGLAILRGQEVVWLGQLDHRTDIKERIDKRRAFRRARRNRKTRYRKPRFLNRKRKEGWLPSSLESRVQNIQTWVNRLKKLCPIGYISYENTKFDTQLMRNPEINGVEYQQGTLQGYEVREYLLEKFGRKCCYCGKENVPLEVEHIIPKSRGGTDRVDNLCLACHDCNQRKGSKTAEEFGYPHIQKQVKESLKDASAINSTRWKAYEVLKQTGLDVECGTGARTKMNRIRLDLPKTHYFDACCVGESTTNHLYFKTKEVLFIKAKGRGSRSRTNLDRYGFPRGYLARQKFFFGFQTGDMVKAVVPRGKYQGVWFGEVACRKTGSFDIKGKDGKRIAQGINYRYVQVIQRFDGYAYGKGGRNLRKVQFLPVPKGRGFLA

SEQ ID NO: 8195 - protein, 410 aa, Bacillus sp.
MAVYCFVLDQNGKPLSPTKENKGWYLIRKGRAILVKKYPMVIQLKKEVTDKEQGKSEFVCGIDDGSKYAGIAIVQKGKSKNIAVFKGIIEQRHDVKKLMDVRRAYRRYRRSHKRYRQARFQNRSSSKRKERIAPSIKQKRDAILRVVQQLMKWIPIHQFRLEDVLLDVRKLTEGRTLYKWQYQKSNRLDENLRKATLLRDQFQCKKCGAKECRLEAHHITPKRFGGANTISNLITLCSDCHSFIGNHEMNYADEFYSIIKGKNIRFDYVQHVMQGKTYLRNELSKRASLELTTGCDTANKRIDYEVEKTHSNDALMIANLNGNNVDIKEYKIRPMRRKRQGKTKEVKGFNHRDIVKYTKRNGEFYIGWITALYPDKNQCNITTFNGEKLKRYGMNRLKLLWKCNKIQWFV

SEQ ID NO: 8196 - protein, 465 aa, unidentified
MSTCVCVLSNSGERLMPTFRLGKVRHLLKDGKAKIVKHHPFTIQLLYDSKTNTQPIEICEDVGYNYIGISVKSESHEYVSAQYDTLQDEKKHHDDCRKYRRTRRNRLRYRKPRFDNRKRSEGWLAPSLEHKKQLNIRLIERYVSVIPITRATVEVGSFDTMLLQAIQKGESKPEGTDYQKGPRYNLATLREAVFYRDNYTCQVCGRKVADGAILHMHHMFYWKGRHGDSLNELLTVCEKCHTPANHQKGGKLYGFGENVKFADLSGAAFMNTVRWQIVNELYAAFGKDFVTVTYGAMTKEKRIALHLEKSHNNDAYAMGSFHPVNRCAFEHYEKVKRNNRILEKFYDSQYIDTRTGELTNGKSLFNGRISRSHKKDSENLHKYRGKRICKGHRALRRKKLALNPGDLVSLNGEILVVHGTHTKKNGSVNVEFKTPSRGGKKSASLKKLKIVKTSNLMHSAWTKVS

SEQ ID NO: 8197 - protein, 518 aa, Kandleria sp.; identical to SEQ ID NO: 7410
  source 1..518: note = isolate UBA3656

SEQ ID NO: 8198 - protein, 430 aa, unidentified
MPKVYVLNRHGRPLMPCTPAKARHLLDAGKAKVRHRTPFTIQLLYGSTGYTQEVILGVDAGSKTIGLSAATETEELFSAEVKPRNDVVELMSARRQFRRARRNRTTRYRKPRFDNRVRSKHKGWLAPSVEVKIQEHMTAIRRACAILPVSKVVVETAEFDLQLLKAVAEGKPVPQGEDYQKGEMYGHYNVRQYVLWRDSYTCCICGVHGSVRKGVPLHVHHLESRRVGGDAPDNLVTLCTACHDKLHKGIIMAADIKKRKRRSTRDATFMGIMRMTLLRRLREQLPVPVVETRGYITKATRENLLVLPKSHTNDALAIAHGPQGFRAEHLPNIRQADRLYTIRPVRHHNRQLHKATILKGGVRKANQAEKYICGFRLYDKVLYNGIECFVWGRRTSGSFLLRQLNGEKVKDGVSYKHLKLLERSQSYLVA

SEQ ID NO: 8199 - protein, 417 aa, unidentified
MIVYVLNKYGKPLMPCKPSKARKLLKQGKAKVVKKSPFTIQLLYGSSGYKQPITLGVDAGSKFIGLSATTDKQELFSAEVDLRNDIVRLLSDRRQYRKSRRSRTTRYRKPRYNNRVKSKNKGWLAPSVENKIQAHFNIIDKTHQILPISKIIVEVASFDIQKIKNPDIQGKEYQQGEQLNFWNTREYVLWRDGHKCQGKKGCKGNILNVHHIESRKTGGNSPDNLITLCENCHKDYHNGKLKLNLKRGQSFKDATFMGIMRWTFYNRLKEIYPNVNMTYGYITKNTRINNKLGKAHRIDARCISGNPTVKPLNYWYRIKQVRKHNRQIHKAKILKGGLRKLNQAPYEVKGFRLFDKVKYNGKECFIFGRRSSGYFDLRRLDGEVIHRSANYKNLELVDRRKSMLWEREVSVAVSSHD

SEQ ID NO: 8200 - protein, 427 aa, Microcoleus sp.
MCKVLLIDTEKRPLSPIYPAQARQLLRNKKAAVFRRFPFTLILKESRPDSPISPLRLKIDPGAKFTGIALVNDSTGEVVFAAELKHRGLAIRDSLTSRRQLRRSRRNRKTRYRPPRFLNRTRPLGWLAPSLQSRIGNIKAWVEKLRKFAPIAAISQELVRFDLQLMRNPDLQGKEYQQGTLAGYETREYLLEKWNRQCAYCGVKDVPLQIEHIYPRAKGGSNSITNLTLSCEKCNKKKGTKALKEFLKKDQSRLEKILKQAKRPLADAAAVNATRFALLYVLKETGLPVEIGSGGLTKFNRSQQNLEKSHWLDAACVGISTPILNIKGVKPLLICANGHGTRQSCRTDKFGFPIRHCSRTKFHFGFQTGDLVKAVVTRGKKVGEYVGRIVTRASGSFNISAKDGLVQGISHRYCSIIHKKDGYSYAS

SEQ ID NO: 8201 - protein, 381 aa, Moorena sp.; identical to SEQ ID NO: 6015

SEQ ID NO: 8202 - protein, 415 aa, unidentified
MIYVRSKDGKALMPSERGGRIGYLLRHGKAHVVSRVPFVVQLDYESTTYTQEVSLGIDAGSKHIGVSASSEKKELLAAQVELRIDVVNLLSTRRELRRTRRNRKTRYRKSRFDNRKRKDGWLAPSVEQKIESHLKVIRLVHKLLPITKTTIEVAQFDAQKIKNPDINGEEYQQGEQMGFWNVREYVLARDGNKCVHCKGKSKDPILNVHHLESRKTGGNSPSNLVTLCETCHKAYHRGEFELKIKRRNSLRDAAVMNIMRWAVYERAKEEFENVHLTYGYVTKHTRIENGIAKTHAADAFCIAKNINAMRLSTFFMCRCVPSHTRRLHVANPKKGGIRRSTIASHKIGKSRFQRFDMVRWKGKECFIFGSTHGNVVLRKINGVKVHETQAVSAKTIKFLKRIRNNILVEVRASEN

SEQ ID NO: 8203 - protein, 413 aa, unidentified
MTSYSFVLDANGKQLAPTKEPKAWFLIRKKRAALVSKYPMVIQLKKKIQENEICKDEIRCGIDDGGLHVGIALVQKCKSKNKVVFKGTIEQRNDVKHLMEVRRNYRRYHRYHKRYRQAGFDNRKSSKRKGRIAPSILQKRQATIRVINRLNKWINITNYWLEDVSIDIRVLTDGYKSYSWQYQKSNRLDENIRKATILRDGGKCMECGKSNCRLEVHHIKPRRRNGSNTLDNLITLCESCHQKTEGQEELYMDRYFSLLKSSDNKNLNYAQHVMIGKMWLRKQLSGLGVLYLTSGGDTANKRIDWNIEKSHTNDAVCITDLQPDTCDIKEWAIKPMRRQSKAKTDHVLGIHHRDLVEYTFKNGETHRGYVTALYPDQKAINFQSQTKHCKKVNARKCKLLWNYSKIYWFENAS

SEQ ID NO: 8204 - protein, 424 aa, Moorena sp.; identical to SEQ ID NO: 8180

SEQ ID NO: 8205 - protein, 512 aa, unidentified
MSTVYVLNKDGKPLMPTTRCGHVRRLLKEQKAQVVTSKPFTIQLLYETDDVVQPLYLGIDPGRTNIGVAVVKTDGTAVFTAHLETRNKEIPKLMQGRKKARRARRTNGRRCRRQRRAKANGTISKKCVKQATAQNGSVSKRAKKIGVIKRHLPGCEKEVLCIGIKNKEAKFSNRTRPEGWLTPTANQLLQTHINLVKKIQRFLPISDVVLEINKFAFMRLDNPNVQKWQYQQGPLYQKASLEEAVSEMQEHHCLFCKKPIAHYHHVVPQSENGSDTIGNIVGLCTKHHDLVHKDTAWQKKLAKKKTGLNKKYGALSVLNQIIPALTKELSFLFPKHFFATNGKSTYDYRAAHGVGKDHWLDAYCIAGSVLPNDVCDNNINNHVPYELKQFRRHDRRALHKENMGRVYTLNGKSVATNRHKAIKQTTDSLEEFRQRQPNDVCKLKVKEHHPEYRNPKRSFPGCVFLVGKQTHVMQGTSGSHNGKADGYYDTNGNSYSSGKCKFVAKNEGIVFA

SEQ ID NO: 8206 - protein, 470 aa, unidentified; identical to SEQ ID NO: 2825

SEQ ID NO: 8207 - protein, 533 aa, unidentified
MSTVYVLNKDGKPLMPTTRGGHVRHLLKEQKARVVQSNPFTIQLLYETNDAVQPLYLGIDPGRTNIGVAVVKADGTAVFTAHLKSRNKEIPKLMQDRKRARRARRTNGRRHRRQRRAKANGTISKKCVKQTTTQNGSVSKRAKEIGIIKRHLPGCEKDVLCIGIKNKETKYTNRERPEGWLTPTANQLLQTHVNLVKKVQKLLPISDVVLEVNKFAFMRLDNPDIQKWQYQQGPLYKKESLESAVSEMQEHHCLFCKKPIDHYHHVVPKSENGSNTIANIVGLCAEHHNLVHKDVAWQEKLAEEKTGLNKKYGALSVLNQIIPALTNKLSVLFPKHFFVTAGKSTHDYRAAHGVSKDHWLDAYCIACSVLPSNVCDSNINNHVPYELKQFRRHDRRVLHKANMSRVYTLNGKAVATNRHKAIKQTTDSLEEFRQNYPDDVYKLKVKEHHPAYRNLNRNYPGSVFLVGKQAHVMQGIASSKDGKTTKYNDTNATTITAGKCKFVAKNSGILFVQCKFRKALSDGTTKKLQYPVR

SEQ ID NO: 8208 - protein, 470 aa, Anaerostipes sp.; identical to SEQ ID NO: 2825

SEQ ID NO: 8209 - protein, 414 aa, unidentified
MPCSPAKARLLLKEKKAIVKRRTPFTIQLTIATGESKQPVSLGVDAGYKHVGFSASTEKAELYASEVELRQDVSDLLSARRALRQSRRNRKTRYRAPRFDNRIRTKRKGWLAPSVENRINAHLSRIEAVLRLLPVTKITVETASFDMQLLKNPDISGKEYQEGEQLGFWNVREYVLFRDGHVCQHCHGRSKDPVLNVHHLESRRTGGDSPGNLITLCETCHKALHRSEITLKTKRGQSFRAEAYMGLMRWEVLNRLKTSHPGLEVHNTYGYRTKYTRIVNGIDKSHCADAFCIAGNLGAERLGEFFFQKQTRRNNRQIHKLSILKGGIRKRNQAPFEVNGFRLFDKVACKGEEGFIFGRRSSGYFDVRKLDGTCISAGISYKKLHLLEKRRTYLTEIRKEEALPPLPEGSGLRA

SEQ ID NO: 8210 - protein, 410 aa, unidentified
MLVYVLNKDGKPLMPCKPRKARKLLEEKKAKVVKREPFTIQLLYGSSGYKQEITLGVDAGSKNIGLSATTEKSELYSSEIQLRTDIVDLLSTRRQNRRTRRNRLRYRKPRFLNRVRSKNKGWLAPSIEHKIATHLRCIENAHKILPISKIIVEVASFDIQKIKNPDIQGIEYQQGEQLDFWNVREYVLFRDSHTCQCCKGKKKDKILNVHHIESRKTGGDAPNNLITLCETCHNGYHNGTVKLPKTIKRGMSFKDATFMGIMRWSFYNRLKLQYSNVSLTYGYITKNTRIQSGLEKSHRVDARCISGNPLAKSLECWYFVKQVRKNNRQIHKANILKGGKKKLNQAPYEVKEFRLFDKVEYVGKEGFIFGRRSTGYFDIRTLDGISIHKSASYRKLKLIGLRRSLLLERR

SEQ ID NO: 8211 - protein, 456 aa, unidentified
MSTCVCVLSNNGERLMPTFRLGKVRRLLKDGKAKIVKHHPFTIQLLYDSKTNKQPIEICEDVGYNYIGISVKSESHEYVSAQYDTLQDEKEHHDDCRKMRRARRNRLRYRKPRFDNRKRSEGWLAPSLEHKKQLNISLIERYVSVIPITHVTVEVGSFDTMLLQAIQKGEAKPEGADYQKGPRYNLATLREAVFYRDNYTCQVCKRKIADGAILHMHHMFYWKGRHGYQLDELVTVCEKCHTPANHQKGGKLYGFGKDKKFANLSGAAFMNAVRWQIVNALYATYGKEFVTITYGAMTKEKRIALQLEKTHNNDAYAMGDYHPARRCKFRHYQKRRRNNRVLEKFYDATYVDTRTGNKAKGKELFNGRISRNHKKDCENLHKYRSKKVSKGRRSIRRQHYAIQPYDTVRLEGKTYITSGCHNKGTRLLIPVNGKSKSVAISKVQVVCHAGAWIQII

SEQ ID NO: 8212 - protein, 413 aa, unidentified; identical to SEQ ID NO: 8063

SEQ ID NO: 8213 - protein, 431 aa, unidentified
MPNKVYVINKHGRPLMPCSPAKARHLLDAGKAKVKKRTPFTIQLVYGSSGYTQEVILGVDAGSKTIGVSALTKKEELFAANVIPRNDVVDLLSTRREFRRARRNCKTRYRKPRFDNRVRSKHKGWLAPSVEVKIQGHITAIRRVCGILPVSKVVVETAEFDLQLLKAIADGKSVPQGEDYQKGEMYGHYNVRQYVLWRDNYTCQCCGAHATKKKEVRLHVHHLESRKVGGDAPSNLITLCDSCHEKFHKGIITAANLKKRKRRSMRDATFMGIMRKTLMQRLCSELPIHVVETRGYITKATREKLLVLPKSHINDALAIAQGKHGFNVGYLPEIAQIDKIYTIRPVRHHNRQLHKVTILKGGIRKSNQTGKYVFGYRLFDKVQFNGQDCFIWGRRTTGIFTIKTINGKMIKDGISFKKLKLVEKSTSYLIA

SEQ ID NO: 8214 - protein, 456 aa, unidentified
MNTCVCVLSNNGERLMPTFRLGKVRRLLKDGKAKIVKHHPFTIQLLYDSKTNKQPIEICEDVGYNYIGISVKSESHEYVSAQYDTLQDEKEHHDDCRKMRRARRNRLRYRKPRFDNRKRSEGWLAPSLEHKKQLNISLVERYVSVIPITHATVEVGSFDTMLLQAIQKGETKPEGADYQEGPRYNLATLREAVFYRDNYTCQVCGRKITDGAILHMHHMFYWKGRHGYKLDELVTACEKCHTPANHQKGGKLFGFGDDKEFADLSGAAFMNAVRWQIVNALHTTYSKEFVTITYGAMTKEKRIALQLEKSHNNDAYAMGDFHPVHRCGFRHYQKRRRNNRVLEKFYDATYIDTRTGNKAKGKELFNGRISRNHKKDSENLHKYRSKKVSKGRRSIRRRRYAIQPYDTVRLEGKTYITSGCHNKGTRLLIPVNGKSKSVAISKVQVVCHAGPWIQII

SEQ ID NO: 8215 - protein, 466 aa, unidentified
MSTCACVLSKNGERLMPTIRLGKVRHLLKDGKAKIIKHHPFTIQMLYDSKTDTQPIEICEDVGYNYIGISVKSESHEYVSAQYDTLQDEKDCHDDCRKMRRSRRNRLRYRQTRFDNRKRGEGWLAPSLEHKKELNVNVIKMYCEVAPITHATVEVGSFDTMLVKAIEEGKAAPEGVDYQKGPRYNLATLREAVFYRDNYTCQVCGREAQKDSAILHVHHMFYWKGRHGNSLSELLTVCEKCHTPANHQQGGKLYRFGENIKFANLSGAAFMNTVRWQIVNELYTAFGKLFVTFTYGAMTKEKRIAFHLEKCHNNDAYAMGNFHPVDRCAFEHYKKVKRNNRILEKFHDSQYIDIRTGKVANGRSLFNGRINRSHKKNSENLHKYRGKRTRKGYRALRRKKVALNPGDLVSLNGEILVVHSTHAGKNGYVGVEFKAPSKSGKKSASLKKLKIVKTSNSMRSAWTKVS

SEQ ID NO: 8216 - protein, 442 aa, unidentified; identical to SEQ ID NO: 4418

SEQ ID NO: 8217 - protein, 418 aa, Moorena sp.; identical to SEQ ID NO: 6948

SEQ ID NO: 8218 - protein, 419 aa, Moorena sp.
MQNYVFVIDANKQPLNPIHPRKARRLLDKGKAAVFRMYPFTIIIKTAIPNPTISPCQIKIDPGSKTTGFAIVQNDQVIWGMELEHRGGLIKKKLESRRAVRRGRRNRNTRYRKPRFLNRRRPQGWLPPSLEHRILTTQTWVKRLIKFCPVNEIWVERVKFDTQKMQNPEISGVEYQQGELAGYEVREYLLEKWGRECTYCGKPNTPLQIEHIHPRSKGGSNRVSNLCLACEKCNIRKGDKSIEDFLKKKPDLLKKIKSLAKQPLKDAAIVNATRNKLVKVLRTLKPVVTGTGAQTKYNRTKLRLPKQHWIDAACVGGIETLVLRTSQPLLVTCIGQGGRQKAALNKYGYPTRHNPLKPIKGWTTGDLAKHQKLGIGKVTPRSKGSFGFTPLGTKGYKSCKPQDISAIHRKDGYIYSFCQ

SEQ ID NO: 8219 - protein, 435 aa, Leptolyngbya sp.
MSNFVFVLDTKRQPLAPCHPARARELLAKGKAAIYRRYPFTIVLNRAVGDVPPSYQLKIDPGSQTTGLALVNRSQLVWGAELQHRGARIKAKLATRRVCRRNRRNRKTRYRKPRFLNRTRPKGWLTPSLNHRVETTMTWVNRLRKLCPIVCVSQELVRFDTQKLQNPEVSGIEYQQGELLGYEVREYVLQKWGRKCVYCGVENVPLEVEHIQPQSKGGSDRVSNLTLACRPCNQSKGNRDVREFLLEKPSVLERILRQAKTPLKDAAAVNATRWQLYQRLKETGLPVEVGTGGLTKFNRTRLGLPKAHWLDAACVGETPSLHLATETPIAILSKGHSTRFRTLIDRYGFPRAVRQTKAQVNGLQAGDIVRAIVPNGKYRGQWTGAIAGVRKKRPPALRPFGKKQIDLTAQTQIQIVHKQDGYEYDINSCGHSSRR

SEQ ID NO: 8220 - protein, 481 aa, unidentified
MWTTVLRDEKPYGRSSALPVRECVSITKGRRHRMVAVLSKAGIRLMPTSSYRARKLLARKKAVICGYRPFTIRLTERETGDVQPVELAVDTGYFHVGNSLKTAKHELAAVEIRTLMDEKQRYDDRRRYRRMRRSRLRYRAPRFDNRRRPEGWLAPSIQGRMEQNLAFLRRVLSVVPVTRIVMEMGQFDTQVLKAVEEGRPIPEGTDYQQGERYRIATLREAVFTRDNYTCQCCEKTVHDGVILHVHHIVYRSQGGTNRMGNLITVCEKCHTPKNHKPGGKLYKWKPTVKSFKGATFMTAVRWIMYRSVKDSFPDVDVRITYGAKTKLQRRTLDITKSHVNDAYVMGDFHPKHRVRPVILQKKRRNNRILEKFYDAKYIDTRDGSKKTGQQLFNGRTNRNHNTDTENLRLYRGKKLSKGRRAIRTTRYRIQPHDILVYQGQEMEASGCHNKGTRVMTTAKKSLPIGKVRVRRYSGGYYAVAE

SEQ ID NO: 8221 - protein, 420 aa, unidentified
MQYVYVLNKHGEPLMPCSPRKARLLLKQKKACVVKRTSFTIKLLYGSTGYKQPITLGVDAGSKHIGISATTEKHELYREEATPRNDVVDLLSARRAFRRSRRNRKTRYRAPRFNNRVHSKHEGWLAPSVEVKIREHITLIKRVCRILPVTLVRVETAEFDTQRLKAMLEGKPLPVGTDYQLGEMYDEYNVRQYVLKRDNYTCQCCGAHSTKTKDVKLHVHHIETRRTGGNAPNNLITLCTDCHKALHAGKVTLDGKKRGKPLKDAAFMGVMRKTLMERLHKKLKIPVQGTYGYITKYLREKNGIPKSHTNDARCISKNPLAIPCDTCYYTKAVRHHNRQLHKATILKGGIRKANQAPYIVKGYRLWDKVSCNGTECFITGRRTSGYFALKKLDGTVISNSISYKKLRLLEVATNYITERR

SEQ ID NO: 8222 - protein, 413 aa, unidentified; identical to SEQ ID NO: 5215

SEQ ID NO: 8223 - protein, 456 aa, unidentified
MSTCVCVLTNNGERLMPTFRLGKVRHLLKDGKAKIVKHHPFTIQLLYDSKTNTQPIETCEDVGYNYIGISVKSESHEYVSAQYDTLQDEKEHHDDCRKYRRTRRNRLRYRKSRFDNRKRDKGWLAPSLEHKKHLNISLIERYVSVIPITHVTVEVGSFDTMLLQSIQKGEAKPEGADYQKGPRYNLATLREAVFYRDNYTCQVCKRKIADGAILHMHHMFYWKGRHGYQLDELVTVCEKCHTPANHQKGGKLYGFGKDKKFANLSGAAFMNAVRWQIVNALYATYGKEFVTITYGAMTKEKRIALQLEKTHNNDAYAMGDYHPARRCKFRHYQKRCRNNRVLEKFYDANYVDTRTGNKAKGKELFNGRISRNHKKDCKNLHKYRSKKVSKGRRSIRRQHYAIQPYDTVRLEGKTYITSGCHNKGTRLLIPVNGKSKSVAISKVQVVCHAGAWIQII

SEQ ID NO: 8224 - protein, 418 aa, unidentified; identical to SEQ ID NO: 2425

SEQ ID NO: 8225 - protein, 412 aa, unidentified
MPCSPAKARLLLKEKKAIVVRRTPFTIQLTIATGEAKQPVSLGVGYKHVGLSASTEKAELYASEVELRQDVSDLLSARRALRQCRRNRKTRYRAPRFDNRIRTKRKGWLAPSVENRINAHLSRIEAVLRLLPVTKITVETASFDMQLLKNSDIAGKEYQESEQLGFWNVREYVLFRDGHVCQHCHGRSKDPVLNVHHLESRRTGGDSPGNLITLCETCHKELHRGEITLKAKRGQSFRAETFMGIMRWEVLDRLKASHPKLEVQNTYGYRTKHARIVNGIAKSHCADAFCIAGNLGAERLGEFFFQKQTRRNNRQIHKLSILKGGIRKRNQAPFEVKGFRLFDKVACQGEEGFIFGRRSSGFFDVRKLDGTRISAGISYKKLHLLEKRQTYLMEIRKEEAFPPLPEGRGLRA

SEQ ID NO: 8226 - protein, 430 aa, unidentified
LLKSGKAAVYKYHPFTIILVERKDGYTQSIEYCCDTGYQHIGISIKSQKHEYVNEERILLKDETERHNDCRKYRRTRRNRLRYRKALWNNRHDNLICKDGFAPSIRNKRDTHIILFKMYYEVCPITSATFEMGQFDTQLLKAIENGENIPQSTDYQHGEQYGYSTLREAVFTRDNYKCICCGKSAIKNGSILKIHHLGYRIGDRTNRMNNLATVCSNCHTSKNHQKGGKLYDLKPRLKGFKGATFMTMVRYDMFAKLKEVTPNIDFNMTYGALTKLKRKDYHIKKSHSNDAYVMGMFHPKHRTDFKCYQKLRRNNRILSKFYDAKYIDLRDGTVKSGKQLSYNRTSRNELRNSNKNERIYRGQKVSKGKIVVRKQHYQYRPYDFIWYENVKYIVKGVQDKGKRIALQNHLPVSLSRVDKCVHTNGWSLVN

SEQ ID NO: 8227 - protein, 423 aa, unidentified
MRVFVFNMRGEPLMPCTQRKARLLLKTGKAKIYKYNPFTIQLKYVTGENKQECHVGIDTGSKYIGLAVTSENKVLFKGEVELRQDVKSKIDTKRIYRRSRRNRKTRYRRCRFLNRKRFGKWLPPSLQNRINHTFKWIDKLCSFIPESILHIEVGKFDIAKMINPEVHSVDYSQGQTYGYQGERYFIFARDNYTCQVCGERNKPLQTHHIIYVSNGGTNRVDNQITVCKECHTSTNHKNGGIFYKWQKEHKKVKQYKAPPFMNVLRQQILNQYPQALITYGFETTIKRKNIGLEKTHYNDAIVISGVSTISENFHEWLLIRQFRKKKRSLHEGVPRKGRKEPNRIQKRNSKNTPYYRGFYLNDKVSVFGKSGYITGFTNSGAYVKGVDGEYIVLPNKSYKRVNIASLKFICHNNNWQYITKNAV

SEQ ID NO: 8228 - protein, 451 aa, unidentified
MSVAVISKTGERLMPTSEYRARKLLKSGKAIKYSYRPFTIQLTERETGDIQPIELCMDTGYIHIGISVKSEKHEYLADQIDTLTDERSRHDACRMYRRQRRNRKRYRQPRFNNRKKDKGWIAPSLEHKKDIHVQAISRINNVMPLTDITMEMGNFDTQVLKAKEEGKPLPQGADYQHGERYGIATLREAVFARDGYKCQCCGRTIKDGAILHVHHIKYRSQGGTNSMSNLATVCDKCHTPKNHKPGGKLYDWKPKLSSFKGATFMTTIRWQLYNEIKTLFPDIVIHITYGAATKERRQELNIDKSHVNDAFVMGQFHPKHRIKAVLYKKKRRNNRCLEKFYDAKYIDSRDGKKRSGQELFNGRINRNHKKDSKNLHQYRLQKVTAGKRTVRKQHYAIQPHDIVIFDKKQFETSGCHNNGTRAILLPQKKSIAIKNLSIWKYAGGYFKSKFV

SEQ ID NO: 8229 - protein, 456 aa, unidentified; identical to SEQ ID NO: 7423

SEQ ID NO: 8230 - protein, 453 aa, Lactobacillus sp.; identical to SEQ ID NO: 6768

SEQ ID NO: 8231 - protein, 379 aa, Arthrospira sp.; identical to SEQ ID NO: 2727

SEQ ID NO: 8232 - protein, 408 aa, unidentified
MVYVQDIDGKPMMPTTRHGKVRQLLKDKKAVVINTCPFTIKLMYKTSDYKQEIVLGVDAGTKHVGLSATTKSKELYSSEVILRSDIVDLLSTRRELRRTRRNRLRYRKPRFDNRIKSKRTGWVAPSVRHRIDAHIRVIDNVCSILPISRIIVEVAQFDTQKIKNPNISGNEYQEGNQLGFWNVREYVLTRDGHKCQHCKGKSKDPILNVHHIESRKTGGDSPSNLITLCETCHKEYHKGKIDLRVKRGKSLRDAAVMGIMKWKLYEELRSRYDNVSMTFGYITKYNRIKYGIEKSHISDAFVISKNFNALMLEYHYKVRLIRRHNRQIHKQKVLKGGVKKPNQSSFEVFGFRLFDRVMFEGNCYFIFGRRKSGSFNIRDIDGGNQRDITYKKLKLLRCKRFMIQKETN

SEQ ID NO: 8233 - protein, 421 aa, unidentified
MFVYVLDKNGQPLMPTQRFGKVRRLLRDKKAKVVKRCPFTIRLLYEPETKIVQDIVLGVDTGSKYVGVACVGNSKVLYQSQIELRDDIERKMDSCRMYRRSRRNRKTRYRKPRFLNRRNSIRKDRYCPTIVSKYYSHEREIEFCKKILPIKDIVLEAGKFDTQLMEKPWLQQYKWAYQRGVNYGYANAREHALVRDSYTCQCCGKKNCRLEVHHIKFRSEGGSDTLENLITLCEDCHKAVHLGKITLKLKGKHKSNLRHATQMSIIRSMLLKKYSDAIETFGFVTKANRENLSLKKDHYLDACVIASGGLEFEQSDILYRKRCVPVQNRVLTRGIRSERKIPTGKVHGFKRYDKVEYLGKVCFVKARRTKGDFVLMDIGNNSIDFRVIGGCQNPSHKKIKRLNTRRGVICIIQKVQNREER

SEQ ID NO: 8234 - protein, 431 aa, unidentified
MPNKVYVINKHGRPLMPCSPAKARHLLDAGKAKVKKRTPFTIQLVYGSSGYTQEVILGVDAGSKTIGVSALTKKEELFAANVIPRNDVVDLLSTRREFRRARRNRKTRYRKPRFDNRVRSKHKGWLAPSVEVKIQEHITSIKRVCRILPVSKVVIETAEFDLQLLKAIADGKPVPQGEDYQKGEMYGHYNVRQYVLWRDDYTCQCCGAHATKKKEVRLHVHHLESRKVGGDAPDNQVTLCESCHEKLHKGLIAEKDFKKRKRRSTRDATFMGIMRKTLMQRLCSELPIPVIETRGYITKATREKLLVLPKSHTNDALAIAQGKHGFNVGYLPGILQIDKIYTIRPVRHHNRQLHKAAILKGGIRKSNQAGKYVFGYRLFDKVQFNGQDCFIWGRRTTGIFTIKTINGKMIKDGISFKKLKPVEKSTSYLIA

SEQ ID NO: 8235 - protein, 442 aa, unidentified; identical to SEQ ID NO: 4418

SEQ ID NO: 8236 - protein, 413 aa, unidentified; identical to SEQ ID NO: 3587

SEQ ID NO: 8237 - protein, 416 aa, unidentified
MVYVLDKNGQPLMPTDRHRKVRLMLQSGQAKVIKRCPFTIQLNYDSGHQTQEISLGIDAGSKHIGVSATTKIKVLYEADVELRNDIVDLLSSRRELRRGRRNRKTRYRQAKFNNRRRGNGWLAPSIRQKIGTHLTVVENICKMLPISRIMVETASFDIQKIKNPDIQGAEYQQGDQLEFWNVREYVLFRDGHTCQCCKGKSKDKILNVHHIESRKTGGNAPNNLITLCETCHTGYHKGTVQLPKAIKRGMRFKDAAFMGIMRWAFYEALKQQYEPVGTPVHNTYGYITKHTRIAYNLPKEHYVDARCISGNPEASSNGEYYYQKKVRCHNRQIHKLTVLKGGIRKQNQATYLVKGYRLFDKVSYQGKGYFVFGRRQSGFFDIRTLSGEKVNKGSLSCKKLKFIATRTYYLTERRAV

SEQ ID NO: 8238 - protein, 535 aa, unidentified
MYRLTTEAGIPLIPERLHDTKKRKEASRMSEYIYVLGMDGDPQMPTKRKRHVEQLLQTGRARVFRQIPFTIQLTYENKPVLQPVTIAEDPGRSNIGMAVVSLSGELLSAAVVQTRNKEIVKLMEKRKQHRRASRNGERKARQRLAKKCHTMIKTGFLMRKLPMYGKDKRVRCNVIKNTEAKFCNRKREDGWLTPSAEHLVQTHINLIHKMQKFLPITDVAIEINRFAFLSLEDPSISGVDFQKGPLKGYDDLNAAVEDLQDGHCLMCNSPIEHRHHIVPRSMQGSNTIGNIAGLCCKCHEKVHKDSAFEDSLKKKKAGLNKRYAAVSVLNQAIPFICKRLEQEFGKEHVHYCSGRDTSMVRRSLGYHKTKEEQLHEVDAWCIAVLSLQHVPEKAPEFDHVHEILQFRRQDRSRIKAQTSRAYYYKGKKIAKNRKKAEGQREDSLQEWRKRQVERYGKEQTRKMISQLEVKESIRRYNRLDRLMPGAVFYYQGVRYVMRGQHCEGTYLQAVGMGSKDFPAKKCKIVAQNEGLVFVS

SEQ ID NO: 8239 - protein, 418 aa, unidentified; identical to SEQ ID NO: 5724

SEQ ID NO: 8240 - protein, 408 aa, unidentified
MVYVQDINGKPMMPTTRHGKVRRLLKDKKAVVVNLCPFTIKLTYVTSDYKQEIVLGVDAGTKHVGLSATTKSKELYSSEVILRNDIVDLLSTRRELRRARRDRMRYRKPRFNNRIKSKRPEWVAPSVRYKIDAHIRVVENVCSILPISRIVIEVAQFDTQKIKNPNISGKEYQEGDQLGFWNVREYILARDGHKCQYCKGKSKDSILNVHHIESRKTGGDSPSNLITLCETCHKEYHKGNIDLKIRRGKSLRDAAIMGIMKWRLYEELKSKYDRVFMTFGYVTKYNRIHNNIEKSHVSDAFVISKNFDAIRLGYYYKVRLVRRHNRQIHKQKIPKGGIKRLNQSPFEVFGFRLFDRVMFENSYYFIFGRRKTGRFNVRDIDGKNQKDITYKKLKLSRCKRFMIQKEMN

SEQ ID NO: 8241 - protein, 438 aa, Moorena sp.
MSNYVFVLDTNLKPLNPCTPTIASKLLDAGKAAVFRRYPFSIILKKEANSTPKTYRLKLDPGSKTTGIAILQDNKVIWGAELEHRGQQIKHGLESRRSLRRGRRVRKTRYRKPRFNNRKHPDSWLSPSLEHRVLTTMTWVNRLIKLCPISSIAQELVKFDTHKLQNPELQEREYQQGTLYQYEVREYLLEKWHHTCAYCATKDVPLEVEHIVPRSKGGSNRISNLAIACVPCNQAKSNHDIKDFLRGQPDLLKRLLAQAKSPLKDAAAVNSTRWKLFNALKGTGLSVTTATGGQTKFNRTQQGLPKSHWLDAACVGDIPKLEVKVSQPLLIKCAGHGKRQVMQVDKYGFQKRNKKGELVRKSTKVKNVLGFETGDLVKAVVTKGKKVGTYLGKVAIRKTGSFNIKTREGTIEGISWKYCQKIHRKDGYVYGLAHTDGE

SEQ ID NO: 8242 - protein, 423 aa, unidentified
MRVFVFNMRGEPLMPCTQRKARLLLKAGKAKIYKYNPFTIQLKYATGENKQECHVGIDTGSKHIGLAVTSENKVLFKGEVELRQDVKSKIDTKRIYRRSRRNRKTRYRRYRFLNRKRFGKWLPPSLQNRINHTFKWIDKLCSFIPESILHIEVGKFDIAKMINPEVHSMDYSQGQTYGYQGERYFIFARDNYTCQVCGERNKPLQTHHIIYVSNGGTNRVDNQITVCKNCHNSTNHKNGGIFYKWQKEHKKVKQYKEPPFMNVLRQQILNQYPQALITYGFETTIKRKNIGLEKTHYNDAIVISGISTISENLDEWLLIKQFRKKKRSLHEGVPRKGRKEPNRIQKRNSKNTPYYRGFYLNDKVSVFGKSGYITGFTNSGAYVKGVDGEYIVLPNKSYKRVNIASLKFICHNNNWQYITKNAV

SEQ ID NO: 8243 - protein, 437 aa, Clostridium sp.
MVYVLSKKGKPLMPTNRYAKVRVLLKFKKAVLVSSKPFTIKLLYNTKDFVQPITLGIDSGYLNIGFSAITKEKELISGEVKLLKCMSERLKEKAMYRRQRRSRLRYRKPRFDNRKRSENWLAPSIQHKYDSHIRFIDKLKKLLPITNIIIEVANFDTHKLKNPSIEGTAYQNGEQKDFFNLREYILYRDGHKCQNPNCKNKSPEPILQVHHIGFWKQDRSDRPGNLITLCNKCHTPKNHKGKGFLYGWHPKVKSFKEATFMSMIRWQLVNTLCCKHTYGYITKHNRIALNLEKTHYNDAFCIAGGSNQNRVKPSIFEQIKRNSRSLEKFYDAKVIDIRTNTKVSGAELFNGRRTRNKSFNSENLRKYRGIKISKGQRRIRTKRYFYQPGDLVKYEDKIYTVKGTQNKGKYIALKELKKVPKVELLAPYKFRKGLVCV

SEQ ID NO: 8244 - protein, 406 aa, unidentified; identical to SEQ ID NO: 2752

SEQ ID NO: 8245 - protein, 458 aa, Sharpea sp.
VIKPFCGIGTVLPTKKPLSNIGDGTPTALRSEKLNPLMGLRKGVRTMVYVLNQNGQPLMPTENHAKVRILLKSKKAKVIKKCPFTIQLLYSSTNYTQEISLGVDSGSKHIGLSATTKNKVLFESDVELRNDIVDLLSTRRQNRRTRRNHKTRYRKPRFDNRKRTDGWLAPSVQNKVDSHLTVIRKVHEILPISKIIVEVASFDIRKIKNPLISGTYYQQGEQLGFWNIREYVLFRDGHTCQCCKGKSKDKILNVHHIESRHTGGDAPNNLITLCETCHTGYHKGFVKLPKTIKRGMSFRDATFVGIMRWAFYNKLKELYPNVSLTYGYITKNTRIENGLLKDHYIDARCISGNPLAVSDGIVYYQKKVRCHNRQIHKNTILKGGIKKRNQASYEVMGFRLFDKVKWKGQNCFIFGRRSTGRMDLRLLDGTKVNASVGYKNLKMLEMRKNMLIELRKVV

SEQ ID NO: 8246 - protein, 447 aa, Marinobacter sp.
MAVFVLDRQKNPLMPCSEKRARLLLTRKRAVVVRVYPFSIRLKDRTGGTVQKVVIKIDPGSKETGLAVSRVSAQGEHVVCLIELIHRGRQISKALDQRRGFRSRRRGQLRYRAPRFNNRTKPKGWLAPSLQHRVDTTASIVKRLRALVPVKSISQELVRFDLQQMENPEISGVEYQQGTLLGYEVREYLLEKWGRECAYCTAIDTPLEIEHLVPKSNGGSNRISNLTIACHDCNQEKGSQTLAEFFQTSSRLKDKQNRMDNVLIQCKRPLRDAAAVNSTRWALFQSLKNTELPVNVGTGGQTKFNRQRLGIPKTHALDAACVGVVEQVFDWQKTTLRIKATGRGSYKRTRLTKHGFPRGYLMREKSVHGFQTGDMVRAIVPTGKKEGTWLGRVAIRKTGSFNIQTSDGAVQGIHHRHCRLMQKADGYGYHLQPTPQKGEGKQESLSC

SEQ ID NO: 8247 - protein, 422 aa, unidentified
MVICPLMPCTPAKARHLLDAGKAKVRHRTPFTIQLLYGSTGYTQEVILGVDAGSKTIGLSAATETEELFSAEVKPRNDVVELMSARRQFRRARRNRTTRYRKPRFDNRVRSKHKGWLAPSVEVKIQEHMTAIRRACAILPVSKVVVETAEFDLQLLKAVAEGKPVPQGEDYQKGEMYGHYNVRQYVLWRDSYTCYICGVHGSVRKGVPLHVHHLESRRVGGDAPDNLVTLCTACHDKLHKGFIMAADIKKRKRRSTRDATFMGIMRMTLLRRLREQLPVPVVETRGYITKATRENLLVLPKSHANDALAIAHGPQGFRAEHLPNIRQADRLYTIRPVRHHNRQLHKATILKGGVRKTNQAEKYICGFRLYDKVLYNGIECFVWGRRTSGSFLLRQLNGEKVKDGVSYKHLKLLERSQSYLVA

SEQ ID NO: 8248 - protein, 491 aa, Pseudomonas sp.; identical to SEQ ID NO: 6873

SEQ ID NO: 8249 - protein, 428 aa, unidentified; identical to SEQ ID NO: 3486

SEQ ID NO: 8250 - protein, 442 aa, unidentified; identical to SEQ ID NO: 3218

SEQ ID NO: 8251 - protein, 455 aa, unidentified
MSVFVISKNGKRLMPTTRFGHVRHLLKDGRAKIYCRKPFTIQLLYDGPENVQDLELCIDTGAQHIGISLKSSKKEFISEQRDLLKDEKEKHDDQRMYRRTRRNRLRYRKPRFNNRISNKKEGWFAPSLKNKADQHIMLIQRLATVAPIKDIYLEVGSFDTQLLDAIAKGLPIQEGTDYQQGALYGEETLRKAVFQRDNYTCQVCGRTIKDGAKLHTHHFLYWKGRHGNRLDELCTVCEKCHTSANHQKGGKLYGWGADKKFKSYVSAAFMNTVRWYIVNQVKDLVSDTEVHTTYGAATKLARKDFQFEKSHVNDAYAMGKLHPNIRCETEYYKKVRRNNRCLEKFYDAKYIDIRDGKKKSGKELGCQRINRREPRMSEKNLRIYHGQKVSKGRRSIRKQRYSIRPGDVVLFNGQKYISKGCGSYGTQVLLDIGKSVSIKKVQIIRHTGGWINLNI

SEQ ID NO: 8252 - protein, 431 aa, unidentified
MPNKVYVINKHGRPLMPCSPAKARHLLDEGKAKVKKRTPFTIQLVYGSSGYTQEVILGVDAGSKTIGMSASTTKEELLSAEVKPRNDVVDLLSTRREFRRARRNRKTRYRKPRFDNRVRSKHKGWLAPSVEVKIQEHITAIRRVCGILPVSKVVIETAEFDLQLLKAIADGKPVPQGEDYQQGEMYGHYNVRQYVLWRDGYTCQCCGAHATKKKEVRLHVHHLESRKVGGDAPDNQVTLCESCHEKLHKGLIAEKDFKKRKRKSTRDATFMGIMRKTLMQRLCSELPIPVIETRGYITKATREKLLVLPKSHTNDALAIAQGKQGFNVGYLPGIVQINKIYTIRPVRHHNRQLHKATILKGGIRKSNQTEKYVFGYCLFDKVQFNGQDCFIWGRRTTGIFTIKTINGKMIKDGISFKKLKLAEKSTSYLIA

SEQ ID NO: 8253 - protein, 518 aa, unidentified; identical to SEQ ID NO: 7468

SEQ ID NO: 8254 - protein, 544 aa, unidentified
MKQKKQKVMIYILNKKGKPLMPTTRCGHVRKLLDSKKAVVVNSNPFTIRLKYDTPNGIQDVFAGIDSGRENIGSGASNEDGDCLYLGELKTSNKSIKIKMTERTGFRRERRRHDRQSKQRKAKKDHTEIQNGNDDICRTTISCKSVQISYPVAEESVTHKIIRGKEGKFANRHRDEGWITPSARQLVQMHMNDLKSMCKILPINHVTLERVAFDFQKLENENIKTWEYGKGKLYGYDSPEEYIHDVQDGKCLVCGKPHIDYLHHIIPRSKGGSDKVSNLAGLCYDCHYGPMGVHNCRETQDRLPELKNEANKQYKVSLLNSVMPVLIEEMDKLCKANSIIFSICEGHDTAKVRDMYDLQKDHCLDGFAISLVGRNVKSVDVMPDRIYQKQRYKKKSKNIIQKRNCREYYDGKKLVAVNRHKGTDQKADSLEEYMNTYAETHTADECKKHFDSLTVKPARRTYTFHKKGCICPFHIGDKVRYEKKNKIKGNTKVETFICESIHFYKDENKAKVEHNKTKSKRMKFCRVLEAGCTPYIDYRKLALM

SEQ ID NO: 8255 - protein, 413 aa, unidentified
MTGYAFVLDAAGKTLSPTKEQKAWFFVRKKRAKLISKYPLVIQLCRIISDDEICTDEIRCGIDDGGLHVGIAVVQRCKKKNKVLFKGTIEQRDDVKHLLCIRRGYRRHRRYQKRYRQVRFNNRIASTRKGRIAPSILQKRQATMRVIYRLQKWIKITSYWLEDVEIDIRALTDGCKLYKWQYQQSNRLDENIRKAVILRDGCKCVECGKEGSGLEVHHIKPKRLNGSNTLGNLVTLCGKCHQKTEGHELEFMDHYFAILKSSDNKYLNYATHVMIGKKWLRAKLSWLGMLHLTSGGDTANKRIDWGINKSHANDAVCITDLKPDIYDMKDWIIKPMRRQSKAKTDNVLGIRHRDLVEYTYRNGEIHQGYVTALYPELKALNFQSATKHCKKVNAYKCKLLWKFSKIYWLDNAG

SEQ ID NO: 8256 - protein, 458 aa, unidentified
LKGVGMMSEIKKVDYIYVVDSNGTPLMPTSRLGMVRRWLKTGQAKWFGNSRNTIQFVRPVTTNTQELTLGVDAGFHLGLSVVGNNREYYVSESLRKSEKDRITSRRELRRTRRNRLRYRKVRFNNRRRKDGWLAPSIQHRLDFTIKEIKRLYKFLPITNLVVEVTPFDNQKLLNPDIQGWQYQEGKMYGFKTIKDYLLARDNYRDALDGKQYPASQLRVHHLVQRKDGGSNQPDNLVLLSDINHNQANHNNGILAKLKENRQKTLDYRGAYFMSILATRLSNYFDNYTITQGYLTANLRQKYEIKKSHLNDAFIIAGGTDTTLRTNNVYSRQKLRNNNRVLQKFYDAKYIDSRDGKKKTGKELSSGRTRRSQELNYDNLRQFRKEKVKKGRVSIRRGHYQLRPHDVVLNTRTNRIETVKGVQNSGTVIKFQTGKTCSIKSVVSLYHVNGILEKKMKNI

SEQ ID NO: 8257 - protein, 406 aa, unidentified; identical to SEQ ID NO: 2703

SEQ ID NO: 8258 - protein, 408 aa, Bacillus sp.
MFVYVINKHGEPLMPCSPRKARILLKQQKAKVVKSTPFTIQLLYGSSGYKQPISLGVDAGTKHVGLSATTEKQVLLEGEAKLRTDIQELLATRLQFRRTRRSRTTRYRQPRFLNRTRKVGWLAPSVQNKVEAHIKLVNLIHKILPVTNLTVEVAQFDTQLLKNPSIQGEEYQQGDQMGFWNTREYIFYRDGHTCQWCKGKKKDKILNAHHIESSKTGGDSPDNLLTLCESCHTELHQKGLEHLFQRKSKPLRDASQMTVMRWFIYNGLKNGFPEVQLTYGYKTKHTRISHGLAKEHCIDARCISGHPLAGPTDTTYLWKFVRKNNRQLHKANTLKGGKRKSNKAERFVKGFQLFDKVRYEGQSCFIFGRRSSGYFDLRLLDGTKIHASANYKKLKKVEYATTLLSEGR

SEQ ID NO: 8259 - protein, 496 aa, Streptomyces sp.; identical to SEQ ID NO: 4777

SEQ ID NO: 8260 - protein, 413 aa, unidentified
MTNYAFVLDADGKQLAPTKEQKAWFLIRKKRAILVSKYPMVIQLKKEIPDKEICKNEIRCGIDDGGLHIGVALVQKCQIRNKVIFKGVIEQRNDVKHLMDVRRGYRRYHRYHKRYRPARFNNRKSSKREGRIAPSILQKRQATIRIINQLNKWINITNYWLEDVAIDIRALTDGYKPYRWQYQKSNRLDENIRKAVILRDGCKCMECGKSNCRLEVHHIKPRRLKGSSTLDNLITLCTKCHQKTEGIEELYMDRYFGLLNSSDNKNLNYAQHVMIGKKWLREQLSNLGMLHLTNGGDTANKRIDWDIAKSHSNDAICIADLRPDTCEIKEWTIKPMRRQSKAKTDNVLGIKHRDLVEYTFRNGETHRGYVTALYPEQNALNFQSPTKHCKKVNASKCRLLWKYSKIYWLDNVS

SEQ ID NO: 8261 - protein, 419 aa, unidentified; identical to SEQ ID NO: 3927

SEQ ID NO: 8262 - protein, 431 aa, unidentified
MDAWDIIVVLNKRGKPLMPCSPAKARHLLKEKKAAVVRRTPFTIQLTIATGESKQPVSLGVDAGYKHVGLSASTEKAELYASEVELRQDITDLLSARRALRQSRRNRKTRYRAPRFDNRIRTKRKGWLAPSVENRINAHLSRIETVIRLLPVTKISVETTSFDMQLLKNSDIAGKEYQEGEQLGFWNVREYVLFRDGHVCQHCHGRSKDPVLNVHHLESRRTGGDSPGNLITLCETCHKALHRGEITLKAKRGQSFRAETFMGIMRWEVLDRLKASHPKLEVQNTYGYRTKHARISNGIAKSHCADAFCIAGNLGAERLGEFLFQKQTRRNNRQIHKLSIPKGGIRKRNQVPFEVKGFRLFDKVAYKGEEGFIFGRRSSGYFDVRKLDGTHISAGISYKKLRLLEKRQTYLTEIRKEEALPPLPEGSGLRA

SEQ ID NO: 8263 - protein, 431 aa, unidentified
MNRVFVLSKTGKALMPCRPARARQLLQSKKARVKRLYPFTIQLTQRSDGYIQPVELKFDPGSRQTGIGLVLHGKNRLSAIFGAVLTHRGQEIKGNLDSRRMIRRARRNRKTRYRQARFLNRVRSKHKGWLAPSVQSRVDNIVEWSKRFMRLSPVGFITVESVKFDMQKMENAAVEGIEYQRGTLFDYEVKEYLLEKYNYSCVYCGVKNVSFEKEHVIPRSCGGSNRISNLVLSCHDCNQKKDNLPIDEFLKDNPALLKKIKAQLKSSLKDAAAVNITRRQIVKELGNINVPVLTGTGAETKYNRVSQGYKKEHYIDALCAGTTGAKVYIPKKLKPLLIKKERRNNRQMCLVDKYGFPRGKAKGSKIVHGFKTGDIVKAVVLKGKKKGTYKGKVAVRSSGSFNIKVKQGIVEGIGWKNCVMLYRFDGYSYTC

SEQ ID NO: 8264 - protein, 465 aa, unidentified
MNTCVCVLSNNGERLMPTFRLGKVRRLLKDGKAKIVKHHPFTIQLLYDSKTNKQPIEICEDVGYNYIGISVKSESHEYVSAQYDTLQDEKEHHDDCRKMRRARRNRLRYRKPRFDNRKRSEGWLAPSLKHKKELNVNVVKMYCAVMPITHATVEVGSFDTMLVKAIQEGKAIPEGADYQKGPRYNLATLREAVFYRDNYVCKVCGRKATEGAILHMHHMFYWKGRHGNSLNELLTVCEKCHTPANHQKSGKLYGFGEDVKFADLSGAAFMNTVRWQIVNELYAAFGKPFVTITYGAMTKEKRIALQLEKSHNNDAYAMGEFHPNHRCAFEHYEKVRRNNRILEKFYDSQYIDIRTGEIATGKELFNGRINRNHKKDSENLHKYRGKRTYAGHRALLRKKVNLNPGDLVSLNGEPLVVLGTHTRKNGAVNVEFETPSKSGRKSASLKKLKIVKAADSIHPAWEKVS

SEQ ID NO: 8265 - protein, 398 aa, unidentified
ELCMDTGYIHIGISVKSEKHEYLAEQIDTLTDERARHDACRMYRRQRRGRKRYRQPRFNNRKRDKGWIAPSLEHKKDIHVQAISRINKVMPLTNITMEMGNFDTQVLKAKEEGKPLPHGADYQHGERYGIATLREAVFSRDGYKCQCCGKTISDGAILHVHHIKYRSRGGTNSMTNLATVCDKCHTPKNHKPGGKLYNWKPKLPNFKGATFMTTIRWQLYNEVKSLFLDINIHVTYGAATKEQRRKLNIGKSHVNDAFVMGKFYPKHRANAVLYKKKRRNNRCLEKFYDAKYIDSRDGSKKTGQELFNGRINRNHKKDSENLHQYRLQKIKAGKRTIRKQHYSIQPHDIVIYENRKRETLGCHNNGTRVMLLPDKKSVAIKKIKIYKYTGGYFKSAFN

SEQ ID NO: 8266 - protein, 438 aa, unidentified
LKDGKAKIVKHHPFTIQLLYDSKTNTQPIEICEDVGYNYIGISVKSEFHEYVSVQYDTLQDEKDCHDGCRRVRRSRRNRLRYRQARFDNRKRDDGWLAPSFEHKKELNVNVIKMYCKVMPITHAIVEVGSFDTMLVKAIEEGKATPESADYQKGPRYKLATLREAVFYRDNYTCQVCGRKANEGAILHVHHMFYWKGRHGNSLSELITVCEKCHTPANHQKGGKLYGFGEDIKFANLSGAAFMNTVRWQIVNVLYAAFGKPFVTFTYGAMTKEKRIALHLEKSHNNDAYAMGSFHPVNRCAFEHYEKVKRNNRILEKFYDSQYIDTRTGELTNGKSLFNGRISRSHKKDSENLHKYRGKRICKGHRALRRKKVALNPGDLVSLNGEILVVHGTHTKKNGSVNVEFKTPSRGGKKSASFKKLKIVKTTDSMHSAWEKMS

SEQ ID NO: 8267 - protein, 442 aa, unidentified
MVTVQQSTHHLPFGRVFIRRNLFMVYVISQDGKPLMPCSDPIARLLLKQGKAKVKKREPFTIKLTYETTNYTQGLTLGVDTGSGTIGTAVSKDNGDIVYMSEVVVRNDITDKMTQRAKYRRNRRNRKTRYRKARWLNRASSIKKDRFSPTMQSKLHSHVREIEYIQSILPVTEMVFETGQFDMHLMKNPSLANPKVRPWGYQKGANYGFENTKAMVLNRDNYTCQCCKGKHKDSKLEVHHIVFRSQGGSDEESNLLTLCHTCHKDLHSGKINPKLSGKVKGNLKYATQMNSIRKQLFRCYPNAIETFGYVTKVNRLHLGVAKEHYYDACTIATQGNAFNVKNNLYKKKCVSDGDFQKTKGIHSEQPIVTDKICGFRKFDKVRYFGNDYFIKGRMSTGYAILMDIDGNKIDFSTMPRGYKTPKLSNCKRITARSTVMTQVKVV

SEQ ID NO: 8268 - protein, 442 aa, unidentified
MVTVQQSTHHLPFGRVFIRRNLFMVYVISQDGKPLMPCSDPIARLLLKQGKAKVKKREPFTIKLTYETTNYTQGLTLGVDTGSGTIGTAVSKDNGDIVYMSEVVVRNDITDKMTQRAKYRRNRRNRKTRYRKARWLNRASSIKKDRFSPTMQSKLHSHVREIEYIQSILPVTEMVFETGQFDMHLMKNPSLANPKVRPWGYQKGANYGFENTKAMVLNRDNYTCQCCKGKHKDSKLEVHHIVFRSQGGSDEESNLLTLCHTCHKDLHSGKITPKLSGKVKGNLKYATQMNSIRKQLFRFYPNAIETFGYVTKVNRLHLGVAKEHYYDACTIATQGNAFNVKSNLYKKKCVSDGDFQKTKGIHSEQPIVTDKICGFRKFDKVRYFGNDYFIKGRMSTGYAILMDIDGNKIDFSTMPRGYKTPKLSNCKRITARSTVMTQVKVV

SEQ ID NO: 8269 - protein, 442 aa, unidentified
MVTVQQSTHHLPFGRVFIRRNLFMVYVISQDGKPLMPCSDPIARLLLKQGKAKVKKREPFTIKLTYETTNYTQGLTLGVDTGSGTIGTAVSKDNGDIVYMSEVVVRNDITDKMTQRAKYRRNRRNRKTRYRKARWLNRASSIKKDRFSPTMQSKLHSHVREIEYIQSILPVTEMVFETGQFDMQLMKNPSLANPKVRPWGYQKGANYGFENTKAMVLNRDNYTCQCCKGKHKDSKLEVHHIVFRSQGGSDEESNLLTLCHTCHKDLHSGKINPKLSGKLKGNLKYATQMNSIRKQLFRFYPNAIETFGYVTKANRLHLGVDKEHYYDACTIATQGNAFNVKSNLYKKKCVSDGDFQKTKGIRSEQPIVTDKICGFRKFDKVRYFGNDYFIKGRMSTGYAILMDVDGNKIDFSTMPRGYKTPKLSNCKRITARSTVMTQVKVV

SEQ ID NO: 8270 - protein, 462 aa, unidentified
MSVLVIGRNGRALMPTNPRKARLLLKKKTASVVCRHPFTIQLLYKTGCATQEGCIGIDTGSQHIGVGITCGDRVILKDEHALRSSMEKRSLLATRAVMRRGRRYRKVRYRKPKWRHHTKRMYFEKANRRGQHWRKVKTTTQSPRPKGWLPPSLQSKCDHHFRIIDRYLKYLPDPITRNLVIEAGRFDMARMNDPTIHGEMYQRGPMYDAENLRAYIFARDNYQCACCKAKAGTTRKADGTTVKLVAHHILFRSRGATDNPKYIISVCDHCHTTKAHQPGGILYSWMENNKKVARGLRDATFMNILRKRLFARYPQSAFTYGNITAADRKLLRLPKSHANDAVAISLFGKEASTVKNICQTMHYKQIRKSKRSLHEAIPRKGRKNPNTKAVRNKKNTTQVNGFKLWDSVLADGKKLFICSFTGTSAYLIDKNGCYISQPGKTYKQWPLSKLKRLHPNGNWLMA

SEQ ID NO: 8271 - protein, 455 aa, unidentified
VSFTVRYVLAYHFKHIKKRKEVPCMVYVLDINGQPLMPTTRHGKVRRLLNSHLAKVVKRCPFTIQLLYQSTKEIQPVSLGVDAGSKHIGMAATTEKKVVYQEELSPRNDVVKLLSLRRASRSSRRSRKTRYRKPRFNNRVHSKHKGWLAPSVEVKIQEHITAIKRICQILPISEIHVETAEFDLQRLKAVEEGRTLPVGTDYQLGEQYDFYNTRQYVLHRDGYTCQCCGTHDNNIKLHVHHIESRQTGGDAPSNLITLCEHCHKALHKGKLELPKGKKRGKTYRDATFMGIMRKTLLERLRKEVDVPASGTYGYITKYWRERAGLEKSHINDAICISKYPYAKPLDTYYLTKAVRNHNRQIHKSNFSKGGIRKRNQAPYLVKGFRLFDKVLYQGKEYFIFGRRATGYFDIRTLDGTKVNKGSISYKKLRIQDTAKAYLKEARAIPHMNKFTCVLA

SEQ ID NO: 8272 - protein, 426 aa, Lactobacillus sp.; identical to SEQ ID NO: 3294

SEQ ID NO: 8273 - protein, 424 aa, unidentified
MRVFVFNMRGRPLMPCSQRKARLLLRENKAMIYKYHPFTIQLTYTTGETKQDCHIGIDTGSKYIGAAVRSEDKVFLKGEIELRQDIRSNLDTKRIYRRSRRNRKTRYRKPRFLNRKRRNEWLPPSLQSRINHTFHWIDTLSSLVPNPILHIEVGKFDVAKMINPEIHGVDYQHGQTYDFFDERYFVFARDNYTCQCCGKSKNKILNTHHIIYRSNGGTNRVDNLITVCTDCHTSQNHRKGGIFYQWQEQHKKVKQYKEPPFMNTLRKRIFVAYPDAEITYGSETTPKRKAMKLDKTHYNDAIVISGINEIKENPEEWLLIKQFRKKKRSLHEATARKGRKKPNRNQTRNSKNTPYYKGFYLNDKVSVFGKSGYITGFTSNAAYIKDENNDYITLPNKTYKQVSINKMKLECHNNNWQYIIKNAV

SEQ ID NO: 8274 - protein, 427 aa, Enterococcus sp.; identical to SEQ ID NO: 2410

SEQ ID NO: 8275 - protein, 417 aa, unidentified
MPCSPAKARLLLKEKKAIVKRRTPFTIQLTIATGEAKQPITLGVDSGYKHIGLSATTEKAELYASQVELRQDITDLLSARLALRRSRRSRKTRYRAPRFDNRVASKRKGWLAPSVENRITAHMSRVEAVMRVLPVTAITVETAAFDTQLLKNPDIAGAAYQQGEQLGFWNVREYVFFRDGHVCQHCRGKYKDPILNVHHIESRRTGGDAPNNLITLCETCHKAFHRGEIKLKVKRGKSFKAATFMGIMRWTLFERLKKAHPELSVRNTYGYLTKHKRISHGIAKSHCADAYCIADNLGAKRLEGFFFQKQTRKHNRQIHKLSILKGGLRKKNQAPYEVKGFRLFDKVICKGKEAFIFGRRTSGSFDVRRLDGTRISAGISYKKLRLLEPRTTYLTEFRKEAALPPLHKCRGFRAEFL

SEQ ID NO: 8276 - protein, 430 aa, unidentified; identical to SEQ ID NO: 4320

SEQ ID NO: 8277 - protein, 512 aa, unidentified
MSTVYVLNKDGKPLMPTTRCGHVRHLLKEQKARVVTSKPFTIQLLYEADDVVQSLYLGIDPGRTNIGVAVVKADGTAVFTAHLETRNKEIPKLMKKRKESRRARRTNGRRCRRQRRAKANGTISKKCVKHDTAQNGSVSKRAKEIGVIKRHLPGCEKDVLCIGIKNKEAKFSNRTRPEGWLTPTANQLLQTHINLVKKIQKFLPISDVVLEINKFAFMRLDNPNVQKWQYQQGPLYQKANLEETVSEMQEHHCLFCKKKIDHYHHVVPQHKNGSNTIDNIIGLCTQHHDLVHKDATWQKRLAKKKTGLNKKYGALSVLNQIIPALTKELSSLFPKHFFVTNGKSTYDYRAAHGVSKDHWLDAYCIACSVLPNDTCDKTINSRVPYELKQFRRHDRRALNNENMSRVYTFNGKMVATNRHKATEQTTDSLEEFRQRQPNDVCNLKVKEHHPTYRNMNRNYPGSVFLVGNQVHVMQGIAGSKDGEATTYKDTNANSIAAGKCKFVAKNSGILFV

SEQ ID NO: 8278 - protein, 346 aa, unidentified
LYSQSKIAQSAQEYGVCRGGIENRRSRRNRKTRYRPPRFDNRVHSKHKGWLAPSVEVKIQEHITVIKRICRILPITLVRVETAEFDTQRLKAMLEGKPLPVGTDYQLGEMYDEYNVRQYVLKRDNYTCQCCGAHTTAKKAVKLHVHHLESRKMGGNAPGNLITLCITCHDALHKGKVSLDNKKRGKPMRDAAFMGIMRRTLMSRLREELPITVQGTYGYITKMQREQNDIKKSHVNDARCISKHPLAEPCSVCYRTKAIRHHNRQTHKANFSKGGIRKRSQMPYVVEGYRLWDKVLYKGQECFVSGRRASGSFTLKKLDGTRISKGVTFKKLRLLEPATNYLIERM

SEQ ID NO: 8279 - protein, 410 aa, Finegoldia sp.; identical to SEQ ID NO: 7766

SEQ ID NO: 8280 - protein, 442 aa, unidentified
MSTSVFVLDKKHRPLMPCRPARARRLLRAGRARVVKRFPFVIRLVDRTVEQSEVQPVLIKLDPGSRETGAAVVRDDEKKRHHALAFFVIKHRGGAIRDALKARSAFRRRRRSQNFRCRSPRFLNRVKPKGWLPPSLRHRVETTLSFVRRMCRYLPVSGIATELVKFDSQKLQNPEVSGVKYQQGTLFEYEVREYLLEKFGRKCVYCGAEGVPLNIDHVVPRAKGGSNRVSNLVLACVSCNQKKGARSLEDFLKGKPEVLARVRRELKTPLRDAAAVNATRWVLFNELKATGLPVETGSGALTKLNRHAFGVEKEHWLDALCVGRLNGVVTRKGLNVLEIRCMGRGSRQRTRLTKYGFPRGYLMRQKCVHGFATGDMVETNVPKGKKAGLWRGRVAVRVSGSFNIQTPKGVIQGVGWKHCRLISHNDGYGYAWLGHAPHSSPA

SEQ ID NO: 8281 - protein, 455 aa, unidentified
VWLSKPLATLGKDFDSSLEENSFFLVVNLLGKERDIMYVYVINKHGEPLMPCSSRKARTLLNNKKACVVKRTPFTIKLLYGSAGYKQPITLGVDAGSKHVGLSASTEKRELYSEEFTPRSDVVELLSTRRQNRRSRRNRKTRYRVPRFDNRVHNKHKGWLAPSVEVKIQEHITVIKHICKILPISLVRVETAEFDTQRLKAMLAGKPLPVGTDYQLGEMYDEYNVRQYVLKRDHYTCQCCGTHNTAKKVVKLHVHHLESRKTGGNAPSNLVTLCTTCHKNLHKGKVTLDGKERGKPLRDAAFMGIMRKTLMARLKEELPIPVQGTYGYITKMRREQNDIKKGHTNDARCISKHPLAEPCSVCYRTKAIRHHNRQTHKANFSKKGIRKRSQMPYLVEGYRLWDKVLYKEQECFVSGRRSSGSFTLKKLDGTSVSKGVTFKKLRLLEPATNYLIERM

SEQ ID NO: 8282 - protein, 553 aa, unidentified
MHHVTSAATHQTDSGMLPQSRILEPHGKDRKGKASSVHRETAVAIKRSRGRARQRPTDAERRQSRGETTKARAAEVASRPKAEPKGSVEGQGRSVSSHVFVLDRHGKPLMPCSPARARQFLNKDRAKVHRFVPFTIRLVDRTVADSTLQPVALKLDPGSKTTGFALTRVEPESKTEHVLHLMELSHRGAAIKKAMTQRSGYRRRRRTVNLRYRPARFDNRTKPEGWLAPSLRHRVETVESWTRRYSRLAPLTDIHIESVKFDTHLLSNPEVSGIGYQQGELQGYEVREYLLERDGRTCVYCGIEHTPLQVEHVRPKASGGSNRVSNLVMACGPCNTRKGTRPVEEFLKGRPEVLARVLRQLKTPLRDAAAVNATRHAIRDRLKALGLPVSGWSGGRTKFNRSCLGVPKTHCLDAACVGELEHLAGWSDRSVLLVKATGRGDYQRTRVDASGFPRGYLLRRKDVNGFRTGDLVKAVVPSGKKRGTHVGRVAVRATGSFNVQKPSGTIQGVSCRHCVMLQRADGYGYSNGCVSSLTGAIGTAFLPVVNDRVSSGV

SEQ ID NO: 8283 - protein, 441 aa, unidentified; identical to SEQ ID NO: 6900

SEQ ID NO: 8284 - protein, 347 aa, Lactobacillus sp.; identical to SEQ ID NO: 3444

SEQ ID NO: 8285 - protein, 431 aa, unidentified
MNRVFVLSKTGKTLMPCSQARARQLLHSKKARVKRLYPFTIQLTQRSDGYIQPVELKFDPGSKETGIGIVLHGKNRLSAIYGSVLTHRGQEIKSNLDTRRMIRRSRRNRKTRYRQARFLNRVRSKHKGWLAPSIQSRMDNIIEWSKRFIRLSPVGFITVESVKFDMQKMENAAVEGLEYQRGTLFDYEIKEYLLEKYNYSCVYCGTKNVPFEKEHVIPRSRGGSNRISNLVLSCHDCNQKKDNLPIEEYLKDNPALLKKIKAQLKSPLKDAAAVNITRKQIVKELSDLNVSVMTGTGAETKYNRVSQGYPKEHYIDALCAGTTGAKVYIPSTLKPLLIKKERRNNRQMCLVDKYGFPRGKAKGPKIVRGFKTGDIVKAVVLKGKKKGVYKGKVAVRSSGSFNINVKQGRTEGIGWRNCVMLHRFDGYSYTY

SEQ ID NO: 8286 - protein, 442 aa, unidentified; identical to SEQ ID NO: 3333

SEQ ID NO: 8287 - protein, 411 aa, unidentified
MLVYVLNQKSEPLMPCSPSKARKLLKQDKAKVIKTEPFTIQLLHGSSGYKQEIILGVDAGSKVVGLTATTTKKELFSAEVQLRNDIVDLLSTRRQNRRTRRNRLRYRKPRFSNRVKSKNKGWLAPSIENKILTHLTIVSKVYKILPVSNIIVEVASFDIQKIKNPSISGVAYQQGEQMDFWNVREYVLFRDGHHCHGKKGCKNKILNVHHIESRKIGGDSPSNLITLCEECHDDFHKGKLKLNLKRGQTFKDATFMGIMRWSFYNKLKKLYPAVSMTYGYITKNTRITHSLPKEHRIDALCISGNPLVERLDHFYFLKKVRCHNRQIHKVNLLKGGVKKLNRAQYEVKGFRLFDKVQYQGRLYYIFGRRNSGFFDIRTLDGTKVNKGSVSCKSLKLIEKRKTILTERRMAG

SEQ ID NO: 8288 - protein, 427 aa, unidentified; identical to SEQ ID NO: 7675

SEQ ID NO: 8289 - protein, 413 aa, unidentified; identical to SEQ ID NO: 2636

SEQ ID NO: 8290 - protein, 442 aa, unidentified; identical to SEQ ID NO: 4843

SEQ ID NO: 8291 - protein, 433 aa, unidentified; identical to SEQ ID NO: 6804

SEQ ID NO: 8292 - protein, 470 aa, Cupriavidus sp.; identical to SEQ ID NO: 4434

SEQ ID NO: 8293 - protein, 310 aa, unidentified
TKRKGWLAPSVENRINAHLSRIEAVLRLLPITKITVETASFDMQRLKNPDISGKEYQEGEQLGFWNVREYVLFRDGHVCRHCHGRSKDPVLNVHHLESRRTGSDSPDNLITLCETCHKALHRGEITLKAKRGQSFRAQAFMGNMRREVLNRLKASYPELKVHETYGYLTKHARIANGIVKSHGADAFCIAGNLGAERLGEFFFQKQTRRNNRQIHKLSILKGSLRKRNQAPFEVKGFRLFDKVACQGEEGFIFGRRSSGSFDVRKLDGTRISAGISCKKLRLLEKRRTYLTEIRKEEALPPLPEGRGLRA

SEQ ID NO: 8294 - protein, 482 aa, unidentified; identical to SEQ ID NO: 2794

SEQ ID NO: 8295 - protein, 361 aa, unidentified
ICKDEIRCGIDDGGLHVGIALVQKCATKNKVILKGTIEQRNDVKHLMVTRKGHRKYRRYHKRYRQARFNNRASSRRKGRIAPSILQKRQATIRVVNQLNKWINVTNYWLEDVSIDIRVLTDGYRPYRWQYQISNRLDENIRKAVILRDKCRCMECGKSNCILEVHHIKPKRLNGSNTLENLITLCKSCHQKTEGNEELFMNKYFSLLKSSDNKGLNYAQHTMIGKYWLREHLSAMGLLHLTNGGDTANKRIDWDIVKTHCNDAICIADLKPDTCDVKEWTIKPIRRQSKAKTTSVLGIQHRDLVEYTLKNGETRRGYVTALYPQLTALSFQSPIQRYSKVNARKCKLLWKFNKIYWIENVI

SEQ ID NO: 8296 - protein, 468 aa, unidentified; identical to SEQ ID NO: 2405

SEQ ID NO: 8297 - protein, 424 aa, unidentified
MASMQYVYVLNKHGEPLMPCSPGKARLLLKQQKACVVKRTPFTIKLLYGSAGYKQPVALGIDAGSKHVGLSASTEKRELYREEFTPRNDVVELLSTRRQNRRSRRNRKTRYRAPRFDNRVHSKHKGWLAPSVEVKIQEHITVIKRICRILPITLVRVETAEFDTQRLKAMLKGKPLPVGTDYQLGEMYDEYNVRQYVLKRDNYTCQCCGAHPTEKKPIRLHVHHIESRHVGGNAPNNLITLCVACHKALHEGKITLDKGKKRGKPLRDAAFMGIMRNTLLARLKDELNIPVKQTYGYITKLLREKNKIPKSHVNDARCIAKAPNAKPCDTMLYTRALRHHNRQIHKAKILKGGIRKKNQAPYLVKGFRLWDKVRYNGEECFITGRRSSGYFALKKYDGTVISNSASHKKLMLLEAATNYITERS

SEQ ID NO: 8298 - protein, 431 aa, unidentified; identical to SEQ ID NO: 2933

SEQ ID NO: 8299 - protein, 406 aa, unidentified
MVYVQDIDGKPLMPTTRHGKVRRLLKSNKAVVVNLCPFTIRLTYISDSYKQEIVLGVDAGTKHVGLSATTKSKELYSSEVILRNDIVDLLSTRRELRKARRNRLRYRKPRFDNRVKSKRPGWIAPSVKYKVDAHIRVVENVCSILPISRIVIEVAQFDTQKIKNPEISGKEYQEGDQLEFWNTREYVLARDGHKCQYCKGKSKDSILNVHHIESRKTGGDSPSNLITLCETCHKEYHKGNIDLKIRRGKSLRDAAVMGIMKWRLYEELKSRYDRVFMTFGYITKHNRIKYGIEKSHTSDAFVISKNINAKRIERQYLKRLIRRHNRQIHKMKILKGGEKKNNQAPFEVFGFRLFDKVLYNNKIFFVYGRRKSGSFNIRDFNGENSKDVSRKKFKLIRGKRHPIILK

SEQ ID NO: 8300 - protein, 440 aa, Clostridium sp.
VPLMVYVLNKEGKPLMPTNRYAKIRVLLKSKKAVVVNSKPFTIKLLYNTEDFVQPITLGIDSGYLNIGLSAITKEKELISAEVKLLKGMSERLKEKAMHRRQRRSRLRYRKPRFDNRKRSKDWLAPSIQHKYDSHIRFIDKLKKLLPITNIIIEVANFDTHKLKDPSIEGADYQNGEQKDFFNLREYILHRDGHKCQNPNCKNKNAESILQVHHIGFWKQDRSDRPGNLITLCNKCHTPKNHKKNGFLYGWQPKVKSFKEATFMSMIRWRLVNTLDCNHTYGYITKSNRIALKLEKTHYNDAFCIAGGSSQSRVNPLIFEQIKRNSRSLEKFYDAKVIDIRTNTKVSGLELFNGRRTRNKNLNSENLRKYRGVKVSKGQRRIRTKRYFYQPGDLVKYEDKVYTVKGTQNKGKYIALKELKKVPKVELLAPYKFRKGLVCA

SEQ ID NO: 8301 - protein, 420 aa, unidentified
MVYVLNKNNEPVMPCSERKARLLLKQGRAVIYRKDVFTIKLINGSYGYKQHITLGIDCGSKHIGVSATTDKQELFSANAELRNDVVKLLSDRRMLRRSRRFRKTRYRKPRFDNRRIKEGWLAPSIRQKIDSHVRIVSLIHKLLPVKQVNVEVAAFDMQKIKNPDIKSSEYQMGEQLDSYNVREYVLSRDNHICQHCKGKSKDDVLQVHHIESRKTGGNAPNNLVTLCKTCHEKYHSGEITLNVNRGKSFRDASAMSTMRWFLYEELKSRFSNVNITYGYITKYKRIKLGLSKEHYNDAYCITGNLNTSRLCNHHLIRFIPRHSRILHMQKFSKGGVRRSASASYWLNGGKPSKSGAMFTMFDKVKFNGIVCFISGSSNGYAALRDINWNKVHGCKTTVTVNKLALVSRRRGSMLFGELCG

SEQ ID NO: 8302 - protein, 417 aa, unidentified
MPCSPAKARLLLKERKAIVKRRTPFTIQLTIATGEAKQPVTLGVDSGYKHIGLSATTEKAELYASEVELRQDITDLLSARLALRRSRRSRKTRYRVPRFDNRVASKRKGRLAPSVENRITAHMSRVEAVMRVLPVTAITVETAAFDTQLLKNPDIAGAAYQQGEQLRFWNVREYVLFRDGHVCQHCRGKSKDPILNVHHIESRRTGGDAPNNLITLCETCHKAFHRGEIKLKVRRGKSFKAETFMGIMRRTLFERLKKAHPELNVRNTYGYLTKHKRISYGIAKSHCADAYCIADNLGAKRLEGFFFQKQTRKHNRQIHKLLILKGGLKKKNQAPYEVKGFRLFDKVICKGEEAFIFGRRTSGSFDVRRLDGTRISAGINYKKLRLLEPRTTYLTEFRKEAALPPLHKCRGVCAEFL

SEQ ID NO: 8303 - protein, 425 aa, Aphanothece sp.; identical to SEQ ID NO: 6227

SEQ ID NO: 8304 - protein, 421 aa, unidentified
MLVFVKNKHGENLMPCKPSKARKLLKQKKAKIISYKPFTIQLLYGSSGYKQPVTLGVDLGSKHIGIAVTSEDKVLIKGEIELRNDVKKNLDIRRQYRRSRRYRKTRYRKPRFNNRKRPEDWLPPSIQSRIDNTFRWIDNFINLLPSPKLCIEVGKFDVQKMMNPDIEGVEYQQGETYGYYDVRYYVFARDNYTCQVCKKKGKILQTHHIVYKSKGGTDRPSNLITVCIDCHTHKNHQEGGIFYKWMMEKKKMPSYKETPFMNIVRRRVFEKYPEANIVYGSYTTIRRKELGLEKTHYNDAIAITGIESIKHNPDNYFKIKQFRKKKRSLHEAIPRKGRKEPNRTQKRNSKNTKYRNGFYLNDKVKVFGKVGFITGFTNGGAYIQDIEGNYITIPNRSYKQVSFKYIEFINHNNNWQFISHL

SEQ ID NO: 8305 - protein, 507 aa, unidentified
VLNKDGKPLMPTTRGGHVRHLLKEQKARVVRTKPFTIQLLYETDDVVQPLYLGIDPGRTNIGVAVVKTDGTAVFTAHLETRNKEIPKLMQGRKKARRARRTNGRRCRRQRRAKANGTISKKCVKQTTAQNGSASKRAKEIGVIKRHLPGCEKDVLCIGIKNKEAKFSNRTRPEGWLTPTANQLLKTHINLVKKIRKFLPISDVVLEINKFAFMRLDNPNIQKWQYQQGPLYQKASLEEAVSEMQEHHCLFCKKSIAHYHHVVPQSENGSNTIGNIVGLCTKHHDFVHKDTAWQKKLAKKKTGLNKKYGALSVLNQIIPALTKELSSLFPKHFFATNGKSTHDYRIAHGVSKDHWLDAYCIACSVLPNDTCDRTINSRVPYELKQFRRHDRRALHKENMSRVYTLNGKSVATNRHKATEQTTDSLEEFRQRQPNDVCKLKVKEHHPTYRNMNRNYPGSIFLIGKQVHVMQGIAGSKDGEATTYKDTNANSIAAGKCKFVAKNSGILFV

SEQ ID NO: 8306 - protein, 512 aa, unidentified; identical to SEQ ID NO: 5238

SEQ ID NO: 8307 - protein, 509 aa, unidentified
VYVLNKDSKPLMPTTRCGHVRYLLKEKKARVVKTKPFTIQLLYETNDVVQPLYLGIDPGRTNIGVAVVKADGTAVFTAHLETRNKEIPKLMKKRKDSRRARRTNGRRCRRQRRAKANGTISKKCVKQATAQNGSASKRAKKIGVIKRHLPGCEKEVLCIGIKNKEAKFNNRTRPAGWLTPTANQLLQTHINLIKKIQKLLPISDVVLEINKFAFMQLDNPNIQKWQYQQGPLYQKANLEEAVSEMQEHHCLFCKKKIDHYHHVVPQHKNGSNTIDNIVGLCTKHHDLVHKDTAWHEKLTKKKTGLNKKYGALSVLNQIIPALTKELSSIFPKHFFVTTGKSTYDYRAAHGVSKDHWLDAYCIACSVLPNDVCDSSINNRVPYELKQFRRHDRRALHKENMSRVYTLNGKKVATNRHKATEQTADSLEEFRQNHPDDVCKLKVKEHHSEYRNPERNFPGCVFLVGKRTHVMQGTSGSHNGKADGYYDTNGNSYSSSKCKFVAKNEGIIFA

SEQ ID NO: 8308 - protein, 427 aa, Enterococcus sp.; identical to SEQ ID NO: 5630

SEQ ID NO: 8309 - protein, 456 aa, unidentified
MSTCVCVLTNNGERLMPTFRLGKVRHLLKDGKAKIVKHHPFTIQLLYDSKTNTQPIETCEDVGYNYIGISVKSESHEYVSAQYDTLQDEKEHHNDCRKYRRTRRNRLRYRKSRFDNRKRDKGWLAPSLEHKKQLNISLVERYVSVIPITHVTVEVGSFDTMLLQSIQKGEAKPEGADYQKGPRYNLATLREAVFYRDNYTCQVCKRKIADGAILHMHHMFYWKGRHGYQLDELVTVCEKCHTPANHQKGGKLFGFGEDKEFADLSGAAFMNAVRWQIVNALHTTYSKEFVTITYGAMTKENRIALQLEKSHNNDAYAMGDFHPVHRCGFRHYQKRRRNNRVLEKFYDATYIDTRTGNKAKGKELFNGRISRNHKKDSENLHKYRSKKVSKGRRSIRRQRYAIQPYDTVRLEGKTYITSGCHNKGTRLLIPANGKSKSVAISKIQVVCHAGAWIQII

SEQ ID NO: 8310 - protein, 434 aa, unidentified; identical to SEQ ID NO: 6832

SEQ ID NO: 8311 - protein, 420 aa, Bacillus sp.; identical to SEQ ID NO: 5289

SEQ ID NO: 8312 - protein, 430 aa, unidentified; identical to SEQ ID NO: 4817

SEQ ID NO: 8313 - protein, 428 aa, unidentified; identical to SEQ ID NO: 5055

SEQ ID NO: 8314 - protein, 406 aa, unidentified; identical to SEQ ID NO: 6072

SEQ ID NO: 8315 - protein, 439 aa, unidentified; identical to SEQ ID NO: 3280

SEQ ID NO: 8316 - protein, 431 aa, unidentified
MLVYVLKQNGQPFMPTARFGKIRRLLKAKKAKVVRREPFTIRLLYEPETDVVQECYCGVDTGSKHIGVAVVGNDKVLYQSQIELRNDIKRKMDARRMYRRNRRSRKTRYRKPRFLNRSNSTKSNRLPPSVKHKVQAHIDEIEFCKKILPISDSNLIVEVSQFDTALMKDPSLISEKVKHWGYQQGFNYGYSSRRIAILHRDNYTCQCCGKKNCRLEVHHIKFRSDGGTDDEENLLTLCEECHKGVHTGTVTLNKKPKKSKNLKHATHMSIIRSYLLKKYPNAIETFGFVTSENRNHLKLEKDHYIDACVIASGGLEFKRSDVIYKKRRVSIQDRVLTKGVRGEQKLPTRKIFGFKKFDKVEYLGETCFVKARRSSGAFVLMDIDNNSIDFRDRGGKREPLYKSIEKINARKSVLCISKRTKRKKKLIPILS

SEQ ID NO: 8317 - protein, 415 aa, Selenomonas sp.
MRGQALMPCSQRKARLLLKQKKAKIVGYKPFTIQLTYATGEAKQEVTVGVDEGARHIGIAVVSKDKVLAKGEIELRQDVHSLLMTRVQYRRSRRFRKTRYRKARFLNRRKPEGWLPPSIQAKLDANFAWVDKFCNLVPNPKLRIEVGKFDTAKMINPEIQGVDYQHGQTYGYYDVRYYVFARDEYTCQVCKKKGKILHTHHIVYRSEGGTDRADNLITVCTDCHTSENHKQGGILWKWMKEHKKVKQYKESPFMNTLRIRTFRKYPDAEITYGSETSPKRKDLGLEKTHYNDAVAITGVESINENAEDVFYIKQFRKKKRSLHEATPRKGRKAPNATQKRNSKNTKKLRGWHLNDEVACFGKRGWISGFTGTSSAYIVDGDGQYIQMPNKNYKQVTLSNATKICHNNTWQYFVAS

SEQ ID NO: 8318 - protein, 413 aa, unidentified; identical to SEQ ID NO: 2636

SEQ ID NO: 8319 - protein, 451 aa, unidentified; identical to SEQ ID NO: 2436

SEQ ID NO: 8320 - protein, 424 aa, Enterococcus sp.
MRVFVRNMRGKPLMPCSNRKARLLLKEGKAKIYQYNPFTIQLCYATGEYMQECHIGIDTGSEHIGIAVTSEEKVLFKGEVELRQDVKSNLDTRRSYRRDRRNRKTRYRKARFLNRKKKESWLPPSIENRVNHTFKWINKLIALLPNPKLHIEVGKFDVAKMINPDIQGVDYQHGQTYGFYDMRYFVFARDKYTCQCCGKSKGKILQTHHIIYRSNSGSNRADNLITVCTDCHTYENHQKGGILYQWQEKHKKTKQYKEPSFMNVLRKRIFKKYPNAVITYGSETTPKRKELGLEKMHYNDAIIISGISTIKENPNEWLLIKQFRKKKRSLHEATARKGRKEPNRLQKRNAKNKPYYKGFYLNDKVEVFGRIGYITGFTSGGAYIKNAENEYIILPNKSYKQVGISNIKLLHHNNNWQYVNKRIS

SEQ ID NO: 8321 - protein, 428 aa, Enterococcus sp.; identical to SEQ ID NO: 4335

SEQ ID NO: 8322 - protein, 415 aa, unidentified; identical to SEQ ID NO: 3500

SEQ ID NO: 8323 - protein, 442 aa, unidentified; identical to SEQ ID NO: 2903

SEQ ID NO: 8324 - protein, 471 aa, Acidithiobacillus sp.; identical to SEQ ID NO: 3868

SEQ ID NO: 8325 - protein, 464 aa, unidentified; identical to SEQ ID NO: 6330

SEQ ID NO: 8326 - protein, 413 aa, unidentified
MPCSPAKARLLLKEKKAIVKRRTPFTIQLTIATGETKQPVGLGVDAGYKHVGLSASTDKAELYASQVELRQDITDLLSARRALRRARRNRKTRYRAPRFNNRIRTKRKGWLAPSVENRINAHLSRIEAVLRLLPVTKITVETASFDMLLKNPDIAGKEYQEGEQLGFWNVREYVLFRDGHVCQHCYGRSKDPVLNVHHLESRRTGGDSPGNLITLCETCHEALHRGEIALKTKRGHSFRAEAFMGMMRWEVLNRLKASHSELEVNNTYGYRTKHARIVNGIDKSHCADAFCIAGNLGAERLCEFFFQKQTRRNNRQIHKLSILKGGIRKRNQAPFEIKGFRLFDKVACKGEESFIFGRRSSGYFDVRKLDGTRISAGISYKKLRLLEKRRTYLTEIRKEEALPPLPEGRGLRA

SEQ ID NO: 8327 - protein, 414 aa, unidentified; identical to SEQ ID NO: 4252

SEQ ID NO: 8328 - protein, 473 aa, unidentified
MPLNSLDGVRTVGNPYKPWDNIGEGHLTDLPVWAACSSVAATQKEIQMVYVQNRSGQPLMPTEDHRKVRLLLKNGLAVVVKRTPFTIRLATGSKNYVQPVILGVDAGSRTAGLSVSTKQRELFAAEVTLRNDVVNNLSARREFRRARRHRKTRYRQPRFHNRVHSKQKGWLAPSVEVKIQEHITVIKRVCRILPVSRVVVETAEFDLQLLKAIADGRPVPQGEDYQKGEQAGFYNVRQYVLWRDGYRCQCCGMHGKGIKLHIHHKESRKTGGDAPENLVTLCEVCHRKLHQGLIAEQSLKKRSRMSTRDAVFMGIMRRTLTERLCRELKVPVASTKGYITKYTRVELLHLPKSHTGDALAIAQGRYGFGVGQATFIKPAERIYQIKPVRHHNRQLHKATILKGGTRKSNQPPKYVKGFRLYDKVLYQGQECFIWGRRTTGSFLLKLLDGTKVKDGVSCKHLKLLERSSQYLAA

SEQ ID NO: 8329 - protein, 420 aa, unidentified; identical to SEQ ID NO: 5918

SEQ ID NO: 8330 - protein, 516 aa, unidentified
VLAPLQVLVIFRVQVQLIRLYSDISSEMIYNLVSIRERSFMKQKKQKVMVYILNKKGKPLMPTTRCGHVRKLLDSKKAVVVSSNPFTIRLKYDTPNGVQDVFAGIDSGRENIGSGASNEDGDCLYLGELKTSNKSIKMKITERAGFRKERRRRDRQNKQRKARKDHTEIQNGNADICRTTISCKSVQISYPAAEKSVTHKIIRGKEGKFANRHRDEGWITPSARQLVQMHMNDLKSMCKILPISHVTLERVAFDFQKLENENIKAWEYGKGKLYGYDSPEEYIHDVQGGKCLICGKPHIDYLHHIIPRSKGGSNKVSNLAGLCYDCHYGPMGVHNCQDTQDRLPELKNEANKQYKVSLLNSVMPVLIEEMDKFCKANSIIFSICEGHDTAKVRDIYDLQKDHCVDGFAISLVGRNVKSVDVMPDRIHQKQRYKKKSKNIIKKRNCREYYDGKKLVAVNRHKGTDQKADSLEEYMNTYAETHTADECKKHFESLTVKPARRTYTFHKEGRICPFHIG

SEQ ID NO: 8331 - protein, 426 aa, unidentified; identical to SEQ ID NO: 6088
  source 1..426: note = Cyanobacteria bacterium UBA11371

SEQ ID NO: 8332 - protein, 441 aa, unidentified
MPTFRLGKVRRLLKDGKAKIVKPHPFTIQLLYDSKTNKQPIEICEDVGYNYIGISVKSESHEYVSAQYDTLQDEKEHHDDCRKMRRARRNRLRYRKPRFDNRKRSEGWLAPSLEHKKQLNISLVERYVSVIPITHATVEVGSFDTMLLQAIQKGETKPEGADYQEGPRYNLATLREAVFYRDNYTCQVCGRKITDGAILHMHHMFYWKGRHGYKLDELVTACEKCHTPANHQKGGKLFGFGEDKEFADLSGAAFMNAVRWQIVNALHTTYSKEFVTITYGAMTKEKRIALQLEKSHNNDAYAMGDFHPVHRCGFRHYQKRRRNNRVLEKFYDATYIDARTGNKAKGKELFNGRISRNHKKDSENLHKYRSEKVSKGRRSIRKRRYAIQPYDTVRLKGKTYITSGCHNKGTRLLIPVNGKSKSVAISKVRVVCHAGAWIQII

SEQ ID NO: 8333 - protein, 556 aa, unidentified
MSTSYSGEKTHQSVLPQRSALESVPADNPGAGTKRGAEIVHAVTGMRHGRGEHHQGVRQPDDRHGGTAQAEPPALFGSDPGVLQLNKKLPEPRHPRVFVLGKDKKPLMPSHPARARELLAKGRARVHRLHPFTIRLIDRRAEDSVVDGVAVKIDPGSRYTGISVASISDDGVVHGLHGIEVQHRGQQIREKMQVRAALRRGRRSRNIRYRAPRFSNRTRPNGWLAPSLRHRVEGTMTWVNRLHGLTPVASVAMELVRFDLQQQENPEITGVQYQQGTLAGFEVREYLLAKWGRMCAYCDATGVPLNIDHIQPRARGGSNRVSNLTLACIPCNQAKDSMPIEEFVANPARRQRITAQAKAPLRDAAVVNSTRWALYRALTATGLTVNTGSGGRTKFNRTRNGLPKSHALDALCAGKTGTVGSYAARVLVAESAGRGSYARTRSDRYGFPRLHLTRNKRHFGFQTGDHVRAVVRSGQKAGVYTGRVAVRASGSFNITTSAGIVQGIRHRHCTLLSRADGWAYTHREEEKRQSRAETETDRRAFFPALKHGVSAAFQDI

SEQ ID NO: 8334 - protein, 442 aa, unidentified; identical to SEQ ID NO: 2637

SEQ ID NO: 8335 - protein, 507 aa, unidentified; identical to SEQ ID NO: 6546

SEQ ID NO: 8336 - protein, 513 aa, Micromonospora sp.
VLPQPRTLESASADTAPRSHETGRGRHPAAGVRHGRGETGASRRHPEPASAGTGAGREAQTHPAVFVVDRHHRPLQPCTPARARKLIAGGRAVVHRHTPFVIRLKDRELASSQVDGVEVGIDPGSKFTGIAVFRTENADDDMVRTGLFGIEVRHRGGQIRDRLAARADLRRGRRSRNLRYRSSRYANRRRPQGWLAPSLRHRVDNTMSWVQRLCHWAPVTRLHVERVAFDTQLLQNPDISGVEYQHGTLHGYEVREYLLAKHGRKCAYCGAVGVPLNIDHIVPRSRGGSDRVSNLTLACIPCNQAKAAIPIGTFLADQPAVLARIRRQQKLPLRDAAAVSTTRWALWHALVATGLPVQVATGGRTKWNRHRTGAPKSHTLDALHVGVLTTVWSCPKQVLVATATGRGSYARTRADQHGFPRLRLPRTKTIRGFQTGDLVRAVVPTGKNTGRHEGRVAVRTTGRFNIRTRHTLVQSVHHRHVHLLQRADGWAYTREEERRFHPAPNDRVSTPHT

SEQ ID NO: 8337 - protein, 456 aa, unidentified
MSTCVCVLSNSGERLMPTFRLGKVRHLLKDGKAKIVKHHPFTIQLLYDSKTNTQPIEICEDVGYNYIGISVKSQSHEYVSAQYDTLQDEKACHDSCRKLRRTRRNRLRYRKPRFDNRKRSEGWLAPSLKHKKELNVNVVKMYCAVMPITHATVEVGSFDTMLVKAIEEGKATPESADYQKGPRYKLATLREAVFYRDNYTCQVCGRKANEGAILHVHHMFYWKGRHGNSLSELITVCEKCHTPANHQKSGKLYGFGENVKFADLSGAAFMNTVRWQIVNELYAAFGKDFVTVTYGAMTKEKRIALQLEKTHSNDAYAMGNCHPAHRCEFGHYQKRCRNNRVLEKFYDATYIDTRTGNKAKGKELFNGRISRNHKKDSEDLHKYRCKKVSKGRRSIRRQRYAIQPYDAVRLESKTYITSGCHNKGTRLLIPANGKSKSVAISKVQVVCHAGAWIQII

SEQ ID NO: 8338 - protein, 413 aa, unidentified; identical to SEQ ID NO: 2636

SEQ ID NO: 8339 - protein, 421 aa, unidentified; identical to SEQ ID NO: 8171

SEQ ID NO: 8340 - protein, 536 aa, Anaerostipes sp.
VLRPRYQYPTRWYPSREQGSGNGCLSGEENTDLKQEVSGTLSKGDHSHPGEQDFCVPAITIQGGPAMSVFVVGLNGCRLMPTSERKARLLLKHGKASVYRKVPFTIKLNYKTGSTTQSGYLGIDTGSQHIGVSVVREDGAVLHKEEIGLRDSMSKRKLMQSRASSRRGRRHRKTRYRHPKWRPKAKRVYCEIPDRKRRHWKKKEITFTSKRPKGWLPPSLQSKTDHHIRWIKKLQDLLPEGYRLSIELGRFDPARLKDPEIHGELYQKGPQYDYENVRAYVLNRDRYTCQVCGKKGGKLHVHHILYRSYGATDDPQYMATVCSDCHNTENHHQGGILYQWMQKQKKFTRGLRDATFMNILRKRLIEAFPGATFTYGNITKADRERLRLPKSHGNDATAIAIVKTGIMTVKDKEPVVYIQQVRRKKRSLHEETPRKGRKEPNRKASRYDKNTKAVTVTKRKNKKKISITGCLFDRVELNGKKGWISGFTDKSCYVKDENDQYIRTSPKYKQVSLSKLKILHHCGNWAIGARRSLGKG

SEQ ID NO: 8341 - protein, 428 aa, unidentified
MQYVYVLNKHGEPLMPCSPCKARLLLKQKKACVVKRTPFTIKLLHGSAGYKQPITLGVDAGSKHVGLSASTEKRELYSEEFTPRNDVVELLSTRKQNRRSRRNRKTRYRAPRFNNRVHSKHKGWLAPSVEVKIQEHITVIKRICRILPVTLVRVETAEFDTQRLKAMLAGKPLPVGTDYQLGEMYDEYNVRQYVLKRDNYTCQCCGAHTTAKKTVKLHVHHLESRKVGGNAPSNLITLCTTCHNNLHKGKITLDGKKRGKTLRDAAFMGIMRKTLLARLHEELPIPVQGSYGYITKMRREQNDIKKSHVNDARCISKHQLAEPCSVCYRTKAIRHHNRQTHKANFSKDGIRKRSQMPYVVDGYRLWDKVLYEGQECFVSGRRASGSFTLKKLDGTRISKGVTFKKLRLLEPATNYLIERIRTGNSSHD

SEQ ID NO: 8342 - protein, 371 aa, unidentified; identical to SEQ ID NO: 2871

SEQ ID NO: 8343 - protein, 369 aa, Homo sapiens
MIRKDFVKHMTQTLTKQTTQVCVLDQQGKPLMPTRRLGKVYRLLKNKKAHIFSYEPFTIQLDYEPKTHIIQPMTLGVDSGAIYSGYSVANEHREYYSAEVIARDNISDRISDRSMYRRNRRSRKTRYRKALFNNRKNQKEGWLPPSLKQKVAVQVNEIAHLHRYFPIEKIIIEVAEFDIQKIKNPDISGIEYQQGTLYGYNIRNYLLEKHGRKCFYCGKEVSDFEVEHMLPKARGGSNRIDNLTLSCHECNQKKGTLTAEEFIKQTLSARKAAAKLRQLPNERRLFKYMAHMNATRWTLYSNIKDNYENVQTTYGYITKYNCLQAHLPKAHHIDAKCITGFAVVPSIDQTVVKVKMRRHNRQLHRGNLQ

SEQ ID NO: 8344 - protein, 431 aa, unidentified; identical to SEQ ID NO: 3801

SEQ ID NO: 8345 - protein, 413 aa, unidentified
MTSYAFVLDANGKQLAPAKEQKAWFLIRKKRAALVSKYPMVIQLKKEIPENEICKDEIRCGIDDGGLHVGIALVQKCKTKNKVVFKGTMEQRNDVKHLMEVRRSYRRYHRYHKRYRLARFDNRKSSKRKKRIAPSILQKRQAIIRVIHWLNKWINITNYWLEDVSIDIRALTDGYKPYRWQYQKSNRLDENIRKAAILRDGGKCMECGKLNCRLEVHHIKPRRRNGSDTLDNLITLCESCHQKTEGQEELYMDRYFSLLKSSDHKNLNYAQHVMIGKEWLRKQLSSLGVLYLTNGGDTANKRIDWNIEKSHANDAVCITNLQPDTYDMKEWTVKPMRRQSKAKTDNVLGIKHRDLVEYTFKNGETHRGYVTALYPEQKAINFQSPTKHCKKVNARKCKLLWKYSKIYWLENAS

SEQ ID NO: 8346 - protein, 403 aa, unidentified
LRVFVLNKRGKPLMPCSPAKARLLLKEKKAIVKRRTPFTIQLTIATGETKQPVGLGVDAGYKHVGLSASTDKAELYASQVELRQDITDLLSARRALRRARRNRKTRYRAPRFNNRIRTKRKGWLAPSVENRINAHLSRIEAVLRLLPVTKITVETASFDMLLLKNPDIAGKEYQEGEQLGFWNVREYVLFRDGHVCQHCYGRSKDPVLNVHHLESRRTGGDSPGNLITLCETCHEALHRGEIALKTKRGHSFRAEAFMGMMRWEVLNRLKASHSELEVNNTYGYRTKHARIVNGIDKSHCADAFCIAGNLGAERLCEFFFQKQTRRNNRQIHKLSILKGGIRKRNQAPFEIKGFRLFDKVACKGEESFIFGRRSSGYFDVRKLDGTRISAGISCKKLRLLEKR

SEQ ID NO: 8347 - protein, 417 aa, unidentified
MPCSPAKARLLLKERKAIVKRRTPFTIQLTIATGEAKQPVTLGVDSGYKHIGLSATTEKVELYASEVELRQDITDLLSARLALRRSRRSRKTRYRAPRFNNRVASKHKGWLAPSVENRIAAHLSRVEAVMRVLPVTAITVETAAFDTQLLKDPDITGAAYQQGEQLRFWNVREYVLFRDGHVCQHCRGKSKDPILNVHHIESRRTGGDAPNNLITLCETCHKAFHRGEIKLKVRRGKSFKAETFMGIMRRTLFERLKKAHPELNVHNTYGYLTKHKRISHGIAKSHCADAYCIADNLGAKRLKGFFFQKQTRKHNRQIHKLSILKGGLRKKNQAPYEVKGFRLFDKVICKGEEAFIFGRRTSGSFDVRRLDGTRISAGINYKKLRLLEPRTTYLTEFRKEAALPPLHECRGFRAEFL

SEQ ID NO: 8348 - protein, 512 aa, unidentified
MSTVYVLNKDGKPLMPTTRGGHVRHLLKEQKARVVRAKPFTIQLLYETNDVVQPLYLGIDPGRTNIGVAVVKANGTAVFTAHLETRNKEVPKLMQDRKKARRARRTNGRRCRRQRRAKANGTISKKCVKQDTAQSKNPSKRAKEIGIIKRRLPGYKKDVLCIGIKNKEAKYTNRTRPEGWLTPTANQLLQTHINLVRKIQKFLPISDVVLEVNKFAFMRLDNPDIQKWQYQQGPLYQKGSLENAVSEMQEHHCLFCDKPIDHYHHVVPQSENGSNTIANIVGLCAEHHNLVHKDAAWQKKLAEEKVGLNKKYGALSVLNQIIPALTNKLSVLFPKHFFVTAGKSTHDYRAAHGVSKDHWLDAYCITCSVLPSNVCDSNINNHMPYELKQFRRHDRRVLNNENMNRVYTLDNKAVAINRHKATEQEAASLEEFRKEHPNDVCKLKVKEHHPTYRNMNRNYPGSIFLVGKHVHIMQGIAGSKDGKATTYKDSNANSITASKCKFVAKNSGILFV

SEQ ID NO: 8349 - protein, 413 aa, unidentified; identical to SEQ ID NO: 3290

SEQ ID NO: 8350 - protein, 431 aa, unidentified
MPNKVYVINKHGRPLMPCSPAKARHLLDAGKAKVKKRTPFTIQLVYGSSGYTQEVILGVDAGSKTIGVSALTKKEELFAANVIPRNDVVDLLSTRREFRRARRNRKIRYRKPRFDNRVRSKHKGWLAPSVEVKIQEHITTIRRVYGILPVSKVVVETAEFDLQLLKAIADGKPVPQGEDYQKGEMYGHYNVRQYVLWRDDYTCQCCGAHATKKKEVRLHVHHLESRKVGGDAPDNQVTLCESCHEKLHKGLIAEKDFKKRKRRSTRDATFMGIMRKTLMQRLYSELPIPVIETRGYITKATREKLLVLPKSHTNDALAIAQGKRGFNVGYLPEIAQIDKIYTIRPVRHHNRQLHKAAILKGGIRKSNQAGKYVFGYRLFDKVQFNGQDCFIWGRRTTGIFTIKTINGKMIKDGISFKKLKPVEKSTSYLIA

SEQ ID NO: 8351 - protein, 310 aa, Moorena sp.; identical to SEQ ID NO: 6328

SEQ ID NO: 8352 - protein, 441 aa, Anaerostipes sp.
MVTVQQSTHHLPFGRVFIRRNLFMVYVISQDGKPLMPCSDPIARLLLKQGKAKVKKREPFTIKLTYETTNHTQGLTLGVDTGSGTIGTAVSKDNGDIVYMSEVVVRNDITDKMTQRAKYRRNRRNRKTRYRKARWLNRASSIKKDRFSPTMQSKLHSHVREIEYIQSILPVTEMVFETGQFDMQLMKNPSLANPKVRPWGYQKGANYGFENTKAMVLNRDNYTCQCCKGKHKDSKLEVHHIVFRSQGGSDEESNLLTLCHTCHKDLHSGKINPKLSGKVKGNLKYATQMNSIRKQLFRFYPNAIETFGYVTKANRLHLGVDKEHYYDACTIATQGNAFNVKSNLYKKKCVSDGDFQKTKGIRSEQPIVTDKICGFRKFDKVRYFGNDYFIKGRMSTGYAILMDIDGNKIDFSTMPRGYKTPKLSNCKRITARSTVMTQVKV

SEQ ID NO: 8353 - protein, 430 aa, Mitsuokella sp.
MTWARRKILQKWKVAEMPNIKKYAFVLDAEGEQLDPTIEQNAWRQVRQHKAKLVSRFPMVIQLNKVVDIPNTDEIRCGIDDGANHVGIALVQKCQTRNKVLFKGIIEQRKDVKKKIEQRRSYRRYHRYHKHYRPARFNNRASSRRSGRLMPSIIQRKQATMRVIDRLRQWIRMDGYWLEDVKIDIRALTDGYKPYHWQYQKSNRLDTNLRIAAIFRDNCKCMECGKENTRFEVHHITPKKKGGADTISNLITLCPKCHARTFGREMQFADKYYKMIGPAGHIEGLDDAQRVMQGKHWFREQLQSRAPLVLTTGGDTANKREDWNIIKTHSNDAICIADLEPESVDIEEWSIKPMRRKSKAGVNEVCGFRHRDYVSYTYRNGETHAGYVTAMYPEIHALNFQAPTKHCKKANALKCRLIWRFDKIYWFKCA

SEQ ID NO: 8354 - protein, 433 aa, Candidatus Chloroploca sp.
  source 1..433: note = Khr17
MSLVFVLSSDRQPLDPCHPARARQLLTRGKAAIFRRFPFTIILTDRTAAERVTHPHRVKIDPGSKTTGIAVVAEGTGRVVWAGELTHRGQQIRDRLSQRRAVRRSRRQRKTRYRQPRFLNRRRPEGWLAPSLQHRVETTLTWVNRLRRYAPIAALSVELVRFDTQQMQNAEVSGVAYQQGTLAGYEVRQYLLEKWNRRCAYCHATDVPLQIEHMTPRSRGGSDRVSNLTLACEPCNTRKGTQTAAEFGYPHLQAQARLPLKDAAAVNSTRWALSQRLVATCLPVEAGTGGRTTFNRTRLGLPKGHWMDAACVGASTPEALDTRGVRPLLIRATGHGSRQMCRMDRFGFPRTGAKQARRVKGLRTGDMVRAVVTTGKKVGTYTGRVAVRASGSFNITTANRTVQGLSYRFVRAIQRNDGYTYQPQPVPAHAEAG

SEQ ID NO: 8355 - protein, 404 aa, unidentified
MLVYVLKQNGQPFMPTERFGKVRRLLKEGKAKVVRREPFTIKLLYEPEIDVVQECYCGVDTGSKHIGVAVVGNDKVLYQSQTELRDDIKRKMDRRRAFRRNRRIRKTRYRKSRFLNRGNSIKKDRLPPSVKHKVQAHIDEIEFCKRILPISDLILEVSQFDTSLMKTPSLINEKVRHWGYQKGFNYGYSSRRKAVLHRDNYTCQCCGKKNCRLEVHHIKFRSDGGTDDEENLITLCKECHDGVHAGTVVLNKKPKESKNLKHATNMSIIRSWLLREYLDAIETFGFVTAENRNHLQLEKDHYIDACVIASGGLEFKELDVIYKKRRVSIQDRVLTDGIRDEKKLPTGKVHGFKRYDKVKYLGEICFVKGRRTSGGFVLMGIDNNSIDFRNKGGNLNPHYKFIKR

SEQ ID NO: 8356 - protein, 430 aa, unidentified
MPKVYVLNRHGRPLMPCTPAKARHLLDAGKAKVRHRTPFTIQLLYGSTGYTQEVILGVDAGSKTIGLSAATETEELFSAEVKPRNDVVELMSARRQFRRARRNRTTRYRKPRFDNRVRSKHKGWLAPSVEVKIQEHMTAIRRACAILPVSKVVVETAEFDLQLLKAVAEGKPVPQGEDYQKGEMYGHYNVRQYVLWRDSYTCRICGAHGSVRKGVPLHVHHLESRRVGGDAPDNLVTLCTACHDKLHKGIIMVADIKKRKRRSTRDTTFMGIMRMTLLRRLWEQLPVPVVETRGYITKATREKLLVLPKSHTNDALAIAHGPQGFRTEYLPNIRQADRLYTICPVRHHNRQLHKATILKGGVRKANQAEKFICGFRLYDKVLYNGIECFVWGRRTSGSFLLRQLNGEKVKDGVSYKHLKLLERSQSYLVA

SEQ ID NO: 8357 - protein, 420 aa, unidentified
MVYILNKHNEPMMPCSERKARLLLKQGRAVIYRKDVSTIKLINGSYGYKQHITLGVDCGSKHIGVSATTDKQELFSANAELRNDVVKLLSDRRMLRRSRRFRKTRYRKPRFDNRRIKEGWLAPSIRQKIDSHVRIVSLIHKLLPVKQVNVEVAAFDMQKIKNPDIKSSEYQMGEQLDSYNVREYVLFRDNHICQHCKGKSKDDVLQVHHIESRKTGGNAPNNLVTLCKTCHEKYHSGEITLNVNRGKSFRDAIAMSTMRWFLYEELKSRFSNVNITYGYITKYKRIKLGLSKEHYNDAYCIAGNLNTSRLCNHHLIRFIPRHSRILHVQKFSKGGVRRSASAPYWLNGGKPSKHGIIFTRFDKVKFNSVVCFISGSSNGFASLRDINWNKVYGCKTTVTVNKLALVSRRRGSMLFGELCG

SEQ ID NO: 8358 - protein, 428 aa, unidentified
LKVFVLNMRGQPLMPCSPAKARHLLKAGKAVVKRRTPFTIQLRIATGETKQNVTLGVDAGAKHVGLSATTEKEEVFASEVELRQDITGLLAARLSLRRDRRHRKTRYRAPRFLNRVRSKHKGWLAPSVENRIQAHMSRIDAICGLLPVTKIVIETASFDIQKIKHPDVEGTDYQQGDQLGFWNVREYVLFRDGHVCQHCHGHAKDKILNVHHLESRQTGGDAPNNLITLCETCHKACHAGKIKLKVKRGQSFRAEAFMGIMRWTLLDRVRKAHPGLPVENTYGYLTKNTRITLGLPKAHCVDAYCIAGNLKAVRRGVYLHQRQVRKHNRQIHKCTVLSKTLKDGTKIGYRKFNQTPHLVKNFRLFDKVRCLGQTGFIFGRRSSGYFDVRRLDGVKISSCISYRKLTLLEKRSTCLTELRKEDGASSPV

SEQ ID NO: 8359 - protein, 515 aa, unidentified
MATVYVLNKDGKPLMPTTRCGHIRHLLKEKKARVVRTNPFTIKLVYETDDVVQPLYLGIDPGRTNIGVAVVKVDGTAVFTAHLETRNKEIPKLMVKRKEHRQGRRHYRRCKRQRRAAAHGTLSKKCKKKDTAQGGNISKRAQTIGVFERNLPGCENSVLCIGIKNKEARFNNRVRPARWLTPTANQLLLTHVNFVKKICKFLPISDVVLEINKFAFMALDNPNIQKWQYQQGPLYQKGSLENAVSEQQDHHCLFCEKTIEHYHHVILRSENGSDTIANIVGLCAEHHDLIHKDDKLKEELAKKKQGLNKKYGALSVLNQIIPALTYELGSRFQGHFYVTTGKSTYDYRAAHSVSKDHWLDAYCIACSVLPDGCFDNTINSRVPYELKQFRRHDRQVCQQQNVKRKYYLDKKLVATNRHKAIKQETDSLEEYRNNGGTTDKLVVKEHKPTNKRLNRILPGALMAANGKLNVMVASRGLHNGIPDNYVFDNNSKAKPSKCTLINKNKGIVFVSNSVS

SEQ ID NO: 8360 - protein, 512 aa, unidentified; identical to SEQ ID NO: 3870

SEQ ID NO: 8361 - protein, 442 aa, unidentified; identical to SEQ ID NO: 3161

SEQ ID NO: 8362 - protein, 420 aa, unidentified; identical to SEQ ID NO: 2681

SEQ ID NO: 8363 - protein, 417 aa, unidentified
MPCSPAKARLLLKEKKAIVKRRTPFTIQLTIATGEAKQPVALGVDSGYKHIGLSATTEKAELYASEVELRQDITDLLSARLALRRSRRSRKTRYRAPRFNNRVASKRKGWLAPSVENRIAAHMSRVEAVMRVLPVTAITVETAAFDTQLLKNPDIAGAAYQQGEQLGFWNVREYVLFRDGHVCQHCRGKSKDPILNVHHIESRRTGGDAPNNLITLCETCHKAFHRGEIKLKVRRGKSFKAETFMGIMRWTLFERLKKAHPELRVRNTYGYLTKHKRISHGIAKSHCADAYCIADNLGAKRLEGFFFQKQTRKHNRQIHKLSILKGGLRKKNQAPYEVKGFRLFDKVICKGEEAFIFGRRTSGSFDVRRLDGTRISAGISCKKLRLREPRTTYLTEFRKEAALPPLHKCRGFRAEFR

SEQ ID NO: 8364 - protein, 469 aa, Burkholderia sp.; identical to SEQ ID NO: 4167

SEQ ID NO: 8365 - protein, 448 aa, Solobacterium sp.
MYWLIALNILKKKGSALMVYVLDINGQPLMPTTRHGKVRRLLNGHLAKVVKRCPFTIQLLYQSTKETQSTSLGVDAGSKHIGLAATTEKKVVYQEEFTPRNDVVKLLSARRILRHSRRNRKTRYRKPRFNNRVHSKHKGWLAPSVEIKIQEHITAIKRICQILPISEIHVETAEFDLQRLKALEDGNPLPVGTDYQLGEQYDFYNTRQYVLHRDGYTCQCCGTHDNNVKLHVHHIESRQTGGNAPNNLITLCEHCHSALHEGKLKLPKGKKRGKSYRDTAFMGIMRKTLLERLRKEIDIPVTETYGYITKYWREKVGLEKGHINDAVCISKHPYAEPLDIYYLTKAVRHHNRQIHKTKFSKGGIRKRNQAPYLVKGFRLFDKVLYQNREYFIFGRRATGYFDIRTLDGTKVNKGSISYKKLRIQDTANAYLKEVKAIPHMNKFTCVLA

SEQ ID NO: 8366 - protein, 478 aa, Pantoea sp.
VAVFVLDIHGKALMPCTEKRARLLLDRGRARVHRLLPMVVRLVDRQAGDCEFQPLRLKIDPGSKTTGLALVREVAAVDALTGEVQLGVAVLNLLELVHRGRQISEAMTARRQMRRRRRGNLRYRAPRFLNRGGDKTGRLAPSLQHRVDTTMTWVRSIQRWAPVRAISSELVRFDMQALQNPEIDGIEYQQGTLFGYELREYLLEKWGRQCAYCGARNLPLQIEHIRAKAHGGSNRASNLTLACACCNQKKAARSIEDFLAQDHKRLNAILAQAQKPLRDAAAVNATRWALANALQATGLPVELASGGRTKFNRSALGVPKTHALDAACVGQVHSIENWNSPTLALKAMGRGSYQRTRLDKFGFPRGYLMRSKRVHDFATGDMVRADVPKGLKAGVHTGRVAIRATGRFNIQLHQAGVSAVVQGIHYRHCRIVQRNDGYGYFLNPANHTKRDQVRPKASDASHPALYLPGMNAEVSRAL

SEQ ID NO: 8367 - protein, 413 aa, unidentified; identical to SEQ ID NO: 2636

SEQ ID NO: 8368 - protein, 419 aa, unidentified
MQNYVFIVDTNKKPLNPIRPKRARNLLNSGKAAVLRMYPFTIILKTAVENPALRPVELKIDPGSKVTGLALVQDGEVIWGANLEHRGSEIKSDLQSRAATRRSRRNRKTRYREPRFSNRKRSKDWFPPSLMHRVLTIETWVKRICRYVPVTVIAMELVKFDTQALQSPETNGTAYQQGELFGYEVKEYLLAKWGRSCVYCGKENIQLEVEHIQPKSTGGSDRVSNLTLSCRCCNQKKGNKKIEEFLHKKPDLLKKIKAVAKTPMIDAAAVNSTRWKLYYTLNNIPELKITTGTGGRTKHNRIKNGFEKDHWIDASCVGETGMSVNLKTRQPIRIKANGVGSGRQMTRVNKFGFPCAKAKQCYQHGWRTGDIARFSDGRIGRVVVQSATRLEIRIGKQRISGTLNKFTKLHSLDGYNYAF

SEQ ID NO: 8369 - protein, 414 aa, unidentified
MPCSPAKARLLLKEKKAIVVRRTPFTIQLTIATGESKQPVSLGVDAGYKHVGLSASTEKAELYASEVELRPDVSDLLSARRTLRQSRRNRKTRYRAPRFDNRIRTKRKGWLAPSVENRINAHLSRIGAILRLLPVTKITVETASFDTQLLKNPDISGKEYQEGEQLGFWNVREYVLFRDGHACQHCHGRSKDPVLNVHHLESRRTGGDSPGNLLTLCETCHKALHRREIKLKTKRGQSFRAEAFMGIMRWEVLNRLKASHPELEVHNTYGYRTKHTRIVNGIDKSHCADAFCIAGNLGAKRLGEFFFQKQTRRNNRQIHKLSILKHGLRKRNQAPFEVKGFRLFDKVVCQGEEGFIFGRRSSGSFDVRKLDGTRISAGISYKKLRLLEKRRTYLKEIRKEEALPPLPEGRSLRA

SEQ ID NO: 8370 - protein, 456 aa, unidentified
MSTCVCVLSNNGERLMPTIRLGKVRHLLKDGKAKIIKHHPFTIQLLYDSKTNTQPIEICEDVGYNYIGISVKSESHEYVSAQYDTLQDEKEHHDDCRKYRRTRRNRLRYRKPRFDNRKRSEGWLAPSLEHKKQLNIRLIERYVSVIPITRATVEVGSFDTMLLQAIQKGESKPEGVDYQKGPRYNLATLREAVFYRDDYTCQVCGRKITDGAILHMHHMFYWKGRHGYQLDELVTACEKCHTPANHQKGGKLFGFGEDKEFANLSGAAFMNAVRWQIVDALHATYGKEFVTITYGAMTKEKRIILGIEKTHNNDAYAMGDYHPAHRCVFRHYQKRRRNNRVLEKFYDATYIDARTGNKAKGKELFNGRINRNHKKDSEDLHKYRSKKVSKGRRSIRRQRYAIQPYDTVRLESKTYITSGCHNKGTRLLIPVNGKSKSVAISKVQVVCHAGAWIQII

SEQ ID NO: 8371 - protein, 518 aa, Anaerostipes sp.; identical to SEQ ID NO: 3878

SEQ ID NO: 8372 - protein, 411 aa, unidentified
MVYVQDIDGKPMMPTTRHGKVRRLLKDNKAVVVNTCPFTIKLTYKTSDYKQEIVLGVDSGTKHVGLSATTKSKELYASEVILGSDVVDLLSTRRGLRRTRRSRLRYRKQRFNNRVKSKKDGWIAPSVRHKIDSHIRIISFVYPILPVSKLIVEVAKFDTQKIKNPEISGKEYQEGEQLGFWNVREYVLARDGHKCQHCKGKSKDPILNIHHIESRKIGGDSPSNLITLRETCHKEFHKGNIKLKVSGGKSLRDAAVMGIMKWKLYEELKSRYDNVSMTFGYITKYNRINHGIEKSHVSDAFVISRNFNSCRLGYYYKRKLVRRHNRQIHKMKILKGGIRKRNQAPFKVFGFKLFDKVMFQGEEYFIYARRLSGQFNIRDINGENKKDVSCKKLKYVSHGLVSVKTNLFLSQ

SEQ ID NO: 8373 - protein, 413 aa, unidentified; identical to SEQ ID NO: 2636

SEQ ID NO: 8374 - protein, 423 aa, unidentified
MSNYVFLIDQNKVPLNPVHPAHARKLLDSGKAAVFRRYPFVLILKRPIENPNVYSLTLKIDPGSKFTGIALVTNQGDVVWAMELQHRGQQIKDALEHRLAMRRGRRNRNTRYRQARFLNRKRPNSWLAPSLRHRVLTVETWVKRLQKFAPIGSFAQELVKFDTQAIQNPEISGTEYQQGTLHGYECREYLLEKWNRQCAYCGVKDVSLEIEHIQPKSKGGSDRISNLCLACHKCNQRKGNKDIKDFLKGKSDVLNRVLRQAKAPLKDAASVNATRWALFSALKSFDLPVSTGTGGQTKFNRIRFELPKAHWIDAACVGVVGTIKLVTAKILKVKATGFGGRQRCQTNKFGYPQKHRPLRPILGFSTGDIVRADVPKGKYTGTFTARVCPMSHGYGEFVINKKRRSIKLDYLTPVHRKDGYDYA

SEQ ID NO: 8375 - protein, 462 aa, Halomonas sp.; identical to SEQ ID NO: 5295

SEQ ID NO: 8376 - protein, 470 aa, unidentified; identical to SEQ ID NO: 2825

SEQ ID NO: 8377 - protein, 456 aa, unidentified
MSTCVCVLSNSGERLMPTFRLGKVRRLLKDGKAKIVKHHPFTIQLLYDSKTNTQPIEICEDVGYNYIGISVKSESHEYVSAQYDTLQDEKEHHDDCRKYRRTRRNRLRYRKPRFDNRKRSEGWLAPSLEHKKQLNIRLVERYVSVIPITHATVEVGSFDTMLLQAIQKGESKPEGADYQKGPRYNLATLREAVFYRDNYTCQVCGRKIADGAILHMHHMFYWKGRHSNSLDELLTVCEKCHTPANHQKSGKLYGFGEDVKFANLSGAAFMNTVRWQIVNELYAAFGKPFVTFTYGAMTKEKRIALHLEKSHNNDAYAMGDYHPAHRCEFGHYQKRCRNNRVLEKFYDATYIDTRTGNKAKGKELFNGRISRNHKKDSEDLHKYRSKKVSKGRRSIRRQRYAIQPYDTVRLESKTYITSGCHNKGTRLLIPANGKSKSVAISKVQVVCHAGAWIQII

SEQ ID NO: 8378 - protein, 512 aa, unidentified
MSTVYVLNKDGKPLMPTTRCGHVRHLLKEQKARVVTSKPFTIQLLYEADDLVQSLYLGIDPGRTNIGVAVVKADGTAVFTAHLETRNKEIPKLMKKRKESRRARRTNGRRCRRQRRAKANGTISKKCVKHDTAQNSSVSKRAKEIGVIKRHLPGCEKDVLCIGIKNKEAKFSNRTRPEGWLTPTANQLLQTHINLVKKIQKFLPISDVVLEINKFAFMRLDNPNVQKWQYQQGPLYQKANLEETVSEMQEHHCLFCKKKIDHYHHVVPQHKNGSNTIDNIVGLCTQHHDLVHKDATWQKRLAKKKTGLNKKYGALSVLNQIIPALTKELSSLFLKHFFVTNGKSTYDYRAAHGVSKDHWLDAYCIACSVLPNDTCDKTINSRVPYELKQFRRHDRRALNNENMSRVYTFNGKMVATNRHKATEQTTDSLEEFRQRQPNDICNLKVKEHHPTYRNMNRNYPGSVFLVGNQVHVMQGIAGSKDGEATTYKDTNANSIAAGKCKFVAKNSGILFV

SEQ ID NO: 8379 - protein, 429 aa, unidentified
MQIQANYVFLLNHDRTFLNMVHPARARELLTKQKAAVYRSYPFAIVLKQQILNPTLKPYRLKIDPGSKWTGFAIQCGEDIVFGMELKHRGLQISADLKQRASVRGSRRSRNLRYRAKRFNRKQPTGWLAPSLRHRVQTVETWIKRFMRYSPITEIEIEQVRFDTQLMQNPEISGVQYQAGELAGYEVKQYLLEKWEQKCSYCGATDTPLEVEHIQAKSKGGSNRVSNLALSCVPCNQKKGNRDIQDFLSGKPDLLQRILAQAKQPLKDVAAVNSTRFAIVRMAKELCDTVKCWTGGRTKFNRLRGLEKSHSIDAACVGKSGRSIQLRTTQPLIVTCFGHGTRQEIRVNKHGFPAVKNTRVRYKHVKTGDTVKFTLDTDRKNSRAGTYTARVKTPTAKSFEVLINQFRIGVSTIKNVKFIHRQDGYSYRF

SEQ ID NO: 8380 - protein, 456 aa, Halomonas sp.
MAVFVLDKQKQPLMPCSEKRARLLLQRGHAVVHKRYPLTLRLKDRIGGDTQPLRLGIDPGSKVTGLALMRESDGEQRHVLCLFELAHRGFQIRKALQQRAAFRRRRRSANLRYRAPRFNNRTKPKGWLAPSLQHRVDTVMAWVVRLRKLAPITALDQELVRFDTQKLENPEISGIEYQQGTLLGYEVREYLLEKWGRECAYCGDTETPLEIEHVVPRSRGGSNRVSNLTLSCHDCNTEKNRQSLADFFAASTGLRRRLKANGHTADARLDRVQRQLKQPLRDASAVNATRWALFNVLKATGLPVTVASGGRTKYNRQRLGIPKTHALDAACVGAFDTLNDWQVPTLTIKAMGRGSYQRTRLSKFGFPRGYLMRQKQVKGFQTGDMVKAIVPTGKKAGTHTGRVAVRKTGSFNIQTEQGAVQGISYKYCTVIQRGDGYGYHLTPTIHLIGGAEQAVA

SEQ ID NO: 8381 - protein, 521 aa, unidentified; identical to SEQ ID NO: 3983

SEQ ID NO: 8382 - protein, 451 aa, unidentified; identical to SEQ ID NO: 6972

SEQ ID NO: 8383 - protein, 413 aa, unidentified; identical to SEQ ID NO: 2636

SEQ ID NO: 8384 - protein, 427 aa, unidentified
MVYVISKRGKPLMPCENVVARLLLKDGKAKVKKRCPFTIQLTHDSTNYTQEVVLGQDTGSKHIGTACIGNDKVLYQSNVKLRDDIKLNMDSRRRARRNRRNRKTRYRESRFLNRKNSTKLNRLPPSVKHKVQAHIDEIEFCKKILPISKIVLEVSQFDTHLMKNPSLILEKVKHWGYQKGFNYGWASRREAILNRDGYTCQICGKKHTRLEVHHIVFRGRGGTDDENNLITLCEDCHTGVHSGKITLNKKPKKMNLKYATHMNIIRSQLLKAYPDAIETFGFVTKTNRENLNLPKDHFIDACVISSGGKEFKLNDTIYQKRRVSKGDYQLTRGVRGEQKIPVGKIQGFRKFDKVKYFGKEYFIKGRMSSGLAILMDIFNNKIDFGYMPRGYKTPKLSNCNRISARSSCLCISQKNHSQGEGANDDAI

SEQ ID NO: 8385 - protein, 473 aa, Actinoplanes sp.; identical to SEQ ID NO: 2808

SEQ ID NO: 8386 - protein, 457 aa, unidentified
MPCSPKRARKLLEAGRARVHRPHPFTIRLVDRRLEDSTLQPLALKLDPGSKATGLALVRVERTVDADTGEIGDPVLHLRFLMELVHRGQAIRNAMQRRTMLRRGRRGRKTRYRAPRFDNRTRPEGWLPPSLQHRIETTMTWVARLRRLAPIAELTQELVRFDMQAIQNPEISGLEYQRGELFGYEVKAYLLEKFHRTCQYCDATGVPVEVEHIVPKARGGSNRVSNLTLACRPCNEAKDARDVHEFLAHDPARLARVLARANAPLRDAAAVNTTRWALANALQATGLPLEFASGGRTRFNRARLGIAKSHALDAACVGVVADLKDLRLTTLQVKCNGRGSRSRTRLDSYGFPRGCLMREKSIKGFRTGDRVRADVPKGRKAGVHIGRVAVRRTGSFNIQTAAGVVQGISHKHCKVLMRGDGYSYHSIATPQGKREQGRALRAALSRPAMNGEVGRAI

SEQ ID NO: 8387 - protein, 431 aa, unidentified
MNRVFILGKTGKTLMPCHPARARQLLHSKKARVKRLYPFTIQLTQRSNGYIQPVELKFDPGSKQTGVGLVLHGKNRLSAIYGAVLTHRGQEIKSNLDSRRMIRRARRNRKTRYRQARFLNRVRSKHKGWLAPSVQSRVDNIVEWSKRFIRLSPVGFITVESVKFDMQKMENAAVEGLEYQRGTLFDYEVKEYLLEKYNYSCVYCGVKNVPFEKEHVIPRSRGGSNRISNLVLSCHDCNQKKDNLPIEVFLKDNPVLLKKIKAQLKSSLKDAAAVNITRKQIIKELSDLNVPVLTGTGAETKYNRVSQKYPKEHYIDALCAGTTGAKVYIPYKLKPLLIKKERRNNRQMCLVDKYGFPRGKAKGPKIVHGFKTGDIVKAIVLKGKKKGIYKGKVAVRSSGSFNIKVKQGVVEGIGWKNCVMLHRFDGYSYTY

SEQ ID NO: 8388 - protein, 452 aa, unidentified; identical to SEQ ID NO: 3322

SEQ ID NO: 8389 - protein, 419 aa, Moorena sp.; identical to SEQ ID NO: 2658

SEQ ID NO: 8390 - protein, 411 aa, unidentified; identical to SEQ ID NO: 3917

SEQ ID NO: 8391 - protein, 411 aa, unidentified
MSNFVFVLDTEKRPLNPVQPGQARRLLKTEKAAVFRKYPFTIILKVAVTTTPESITLKIDPGSKTTGIALVQGGKVIFGAELTHRGQSIAASLDSRRSLRRSRRNRHTRYRQARFLNRTRKEGWLAPSLQHRVETTLTWVIKFIKRFDLQQLDNPEISGVEYQQGELQGYEVREYLLNKWNRKCAYCSIGNVHLQVEHIHPKAKGGTNRISNLCLACEKCNQKKGTQDVKQFLVKKPDILKHIFAQAKRPLKDAAAVNSTRWALFSRLKETLLPVLTGSGGLTKFNRTRLQLPKTHWLDAACVGQIESLFVLTSKPLLIKATGHGTRQMCRTDKFGFPSRYVPRNKFVRGFQTGDIAKAVVTSGKKIGEYVGRVAVRTTGSFNISASELVQGISYKYCKIVHKKDGYSYAF

SEQ ID NO: 8392 - protein, 415 aa, unidentified
VAEMPKKYSFVLDADGKQLDPTIEQNAWRLVRQKKARLVSKIPMIIQLNKVVENPNQDEIRCGIDDGTNHVGLALVQKCQTRNKVLFKGVIKQRKDVKHLMDVRRGYRRYRRYHKWYRPLRFNNRASSKRSGRLPPSIKQRKQAVIRVIDRLCKWVRISSYWLEDLKIDIRALTDGFKPYKWQYQESNRLDNNLRLAAIYRDNCQCMECGKKNTRFEVHHITPRSKGGADTIRNLITLCPECHFRTFGREEQFAELYYSRISSIGNIKGLADAQRVMQGKTWLRKQLTQRGKLFLTTGADTANKRDDWNIAKTHSNDAVCITNLKPENIDVEEWTIKPMRRKSKARTEQVSGFRHQDLITYTYRNGETHTGYVTALYPDKNQLNFQSPTKHCKRVNTLKTKLLWRFNKIYWLKCL

SEQ ID NO: 8393 - protein, 451 aa, unidentified; identical to SEQ ID NO: 2424

SEQ ID NO: 8394 - protein, 417 aa, unidentified
MPCSPAKARLLLKERKAIVKRRTPFTIQLTIATGEAKQPVTLGVDSGYKHIGLSATTEKAELYASQVELRQDITDLLSARLALRRSRRSRKTRYRAPRFNNRVASKHKGWLAPSVENRIAAHLSRVEAVMRVLPVTAITVETAAFDTQLLKNPDVAGAAYQQGEQLGFWNVREYVLFRDGHVCQHCRGKSKDPILNVHHIESRRTGGDAPNNLITLCETCHKAFHRGEIELKVKRGKSFKAETFMGIMRWTLFERLKKAHPELNVRNTYGYLTKHKRISHGIAKSHCADAYCIADNLGAKRLEGFFFQKQTRKHNRQIHKLSILKGGLRKKNQAPYEVKGFRLFDKVICKGEEAFIFGRRTSGSFDVRRLDGTRISAGISYKKLRLLEPRTTYLTEFRKEAALPPLHKCRGFRAEFL

SEQ ID NO: 8395 - protein, 431 aa, Acidithiobacillus sp.; identical to SEQ ID NO: 4478

SEQ ID NO: 8396 - protein, 413 aa, unidentified
MTSYSFVLDANGKQLAPTKEPKAWFLIRKKRAALVSKYPMVIQLKKKIQENEICKDEIRCGIDDGGLHVGIALVQKCKSKNKVVCKGTIEQRNDVKHLMEVRRNYRRYHRYHKRYRQARFDNRKSSKRKGRIAPSILQKRQATIRVINRLNKWINITNYWLEDVSIDIRVLTDGYKSYSWQYQKSNRLDENIRKATILRDGGKCMECGKSNCRLEVHHIKPRRRNGSNTLDNLITLCESCHQKTEGQEELYMDRYFSLLKSSDNKNLNYAQHVMIGKMWLRKQLSGLGVLYLTSGGDTANKRIDWNIEKSHTNDAVCITDLQPDTCDIKEWAIKPMRRQSKAKTDHVLGIHHRDLVEYTFKNGETHRGYVTALYPDQKAINFQSQTKHCKKVNARKCKLLWNYSKIYWFENAS

SEQ ID NO: 8397 - protein, 447 aa, unidentified
MYWLIALNISKKEVSCMVYVLDIDGQPLMPTTRHGKVRRLLNSHLAKVVKRCSFTIQLLYQSTKETQPVSLGVDAGSKHIGLAATTDKKVVYQEELVSHNDVVKLISARRILRRSRRNRKTRYRKARFNNRVHSKHKGWLAPSVEVKIQEHITTIKRICQILPISEIQVETAEFDLQRLKAMKEGKPLPVGTDYQLGEQYDFYNTRQYVLHRDGYTCQCCGTHDNNIKLHVHHIESRQTGGDAPNNLIILCEHCHKALHEGKLELPKGKKRGKSYRDATFMGVMRKTLLERLKKEIDVPVEGTYGYITKCWREKTGLEKSHINDAICISKHPYAKPLDTYYLTKAVRHHNRQIHKSNFSKGGIRKRNQAPYLVKGFRLFDKVLYQGKEYFIFGRRATGYFDIRTLDGTKVNKGSIKYKKLRIQDTAKAYLKEARAIPHVNKFTCVLA

SEQ ID NO: 8398 - protein, 496 aa, Streptomyces sp.; identical to SEQ ID NO: 4777

SEQ ID NO: 8399 - protein, 442 aa, unidentified; identical to SEQ ID NO: 3161

SEQ ID NO: 8400 - protein, 434 aa, Lactobacillus sp.; identical to SEQ ID NO: 6197

SEQ ID NO: 8401 - protein, 421 aa, unidentified; identical to SEQ ID NO: 6697

SEQ ID NO: 8402 - protein, 435 aa, unidentified; identical to SEQ ID NO: 7905

SEQ ID NO: 8403 - protein, 427 aa, Parasutterella sp.; identical to SEQ ID NO: 4733

SEQ ID NO: 8404 - protein, 442 aa, unidentified
MVTVQQSTHHLPFGRVFIRRNLFMVYVISQDGKPLMPCSDPIARLLLKQGKAKVKKRDPFTIKLTYETTNYTQGLTLGVDTGSGTIGTAVSKDNGDIVYMSEVVVRNDITDKMTQRAKYRRNRRNRKTRYRKARWLNRASSIKKDRFSPTMQSKLHSHVREIEYIQSILPVTEMVFETGQFDMHLMKNPSLANPKVRPWGYQKGANYGFENTKAMVLNRDNYTCQCCKGKHKDSKLEVHHIVFRSQGGSDEESNLLTLCHTCHKDLHSGKINPKLSGKVKGNLKYATQMNSIRKQLFRCYPNAIETFGYVTKVNRLHLGVAKEHYYDACTIATQGNAFNVKSNLYKKKCVSDGDFQKTKGIHSEQPIVTDKICGFRKFDKVRYFGNDYFIKGRMSTGYAILMDIDGNKIDFSTMPRGYKTPKLSNCKRITARSTVMTQVKVV

SEQ ID NO: 8405 - protein, 428 aa, Enterococcus sp.; identical to SEQ ID NO: 4335

SEQ ID NO: 8406 - protein, 442 aa, unidentified; identical to SEQ ID NO: 2903

SEQ ID NO: 8407 - protein, 423 aa, Moorena sp.; identical to SEQ ID NO: 3865

SEQ ID NO: 8408 - protein, 427 aa, Parasutterella sp.; identical to SEQ ID NO: 3787

SEQ ID NO: 8409 - protein, 465 aa, unidentified
MSTCVCVLSNNGERLMPTIRLGRVRHLLKDGKAKIIKHHPFTIQLLYDSKTNTQPIEICEDVGYNYIGISVKSQSHEYVSAQYDTLQDEKACHDSCRKLRCTRRNRLRYRKPRFDNRKRGEGWLAPSLKHKKELNVNVVKMYCTVMPITHATVEVGSFDTMLVKAIQEGKVIPEGADYQKGPRYNLATLREAVFYRDNYVCKICGRKATEGAILHMHHMFYWKGRHGNSLNELLTVCEKCHTPANHQKSGKLYGFGEKIKFADLSGAAFMNTVRWQIVNELYVAFGKPFVTITYGAMTKEKRIALQLEKSHNNDAYAMGEFHPNLRCMFEHYEKARRNNRILEKFYDSRYIDIRTGEIATGKELFNGRINRNHKKDSENLHKYRGKRTYAGHRALLRKKVNLNPGDLVSLNGENLIVHSTHTKKNGAVNVEFETPAKSGQKSASLKKLKIVKAANSIHPAWKKIS

SEQ ID NO: 8410 - protein, 231 aa, unidentified; identical to SEQ ID NO: 2592

SEQ ID NO: 8411 - protein, 420 aa, unidentified; identical to SEQ ID NO: 6212

SEQ ID NO: 8412 - protein, 506 aa, unidentified
MVCVISNTGKRLMPTTEYKARKLMKKGRANIYQYEPFTIMILDREDGYTQSIELKCDIGDKHIGISVCSEKHEYVSVEVNPLKDEKERHNDQKKYRRTRRNRKRYRKPRFDNRKRKEGWLAPSLEHKVEIHKHWIEKYLKVIPIEKVILETGTFDTQRLKAINDGKTLPVGTDYQRGEQYDFYTMRDAVFSRDNYTCQCCKKSMNTNKNMVLRTHHIGYWKGDHSNRVSNLLTVCDKCHTQVNHQLSGKLYGLQPKSKKLPEAAFMNSVRYILVDEIYNLQEKLNVSFEVETTYGSMTKLKRKELGIEKSHVNDAYVIGAFHPKHRCKSEQYQKKRRNNRILSKFYDAKYIDSRDNSIKTGKELSSGRTNRNHKRDSEKLHQYRKQKVTKGKTTIRKNHYPFQPKDIVLYDGKKYKVNGTNNKGKSVQLYIEERVFIEDITLSKKKKNMQTEEIECGDKVIYEKKIYTIKKVIDTKHILLSGLISTKPENLKHLKYSNGYDKIEIV

SEQ ID NO: 8413 - protein, 501 aa, Nocardiopsis sp.
VLHQQLALESESADTPRNRDETGLGGRQASGAEDGRGEIPVASPGGESVTPNHQVREKGRESHPYVFVLDKHGTPLQPCTPARARKLLKKGRAVVHRHTPFVLRLKDRTAEDSEIDGVEVGVDPGSKHTGIAVFTAVAGERRGRYSVQLDHRGAQIRKKMEQRAAHRRRRRTSKLRYRAPRFLNRTRPEGWLAPSLHHRVATTMSWVGRLARWAPVRVVHVERVAFDTHAISVGEPLEGAEYQHGTLHGTEVREYLLAKWDRVCAYCGKQGVPLNIEHIRPRSCGGSDRVSNLAIACIPCNQAKSNRTVEDFLKGKPQLLTKILAQAKAPLRNAAAAQSTRWSLWRALDAMLPTHTDSGGRTKWNRGRCGLPKTHTLDALCVGKLGTVTEIVITALVAGCAGRGTHTRTRTDKHGFPRLRMPRQKQFFGYQTGDLVRAVVPTGKKTGVHTGRVAVRATGSFNITTAHGTVQGIRYKHVRLLQRADGYAYTTKREGVASSLV

SEQ ID NO: 8414 - protein, 430 aa, Vibrio sp.
MGSQPRCEAKLSGREEVEFAVCLKQSYTHNSKEIRAMLAYVLNKHGKPLMPCKAAKARKLLKNGMAKVIKRAPFTIKLLYGSSGHTQHVVAGMDTGSKYIGCAAIANGKVIYQSEVALRTDVSKKMQQRASMRKKGRLAPSLKSKLDSHLREKKQVEAILPISHWKVETASFDIHKITNPIVTGAGYQQGYYNVKAYVLQRDNYKCQSGHKTKHNAKLHVHHKVLRSQGGTDTPSNLIALCETCHNDLHAGKFDLKVKRSKTKHATEIGILKAQLKQCWDFEETFGYVTKFKREQVLGLPKTHYYDAVSICCENGELVQQAKHVLRKRHVASGDYQQIKGVRSEKRIPVGKLFGLKKHDFVQTPQGTGFVKGKRSSGYFALETILGDKVHASANIKKNTVRISARTTTLTQPMEAAIPLGTKVPRGIAVN

SEQ ID NO: 8415 - protein, 459 aa, Petrotoga sp.; identical to SEQ ID NO: 6495

SEQ ID NO: 8416 - protein, 506 aa, Halomonas sp.
MRAQGKTPKVLIAVGSAIVSRSRLSTFPRGDGAHASRHKTRKGIYTGENRMAVFVIDKQKQPLMPCSEKRARLLLGRGRAVVHKRYPFTIRLKDRVGGDMQPLRLGIDPGSKTTGLALMRETDTEQRHVLCLFGLVHRGYQIKKSLEQRAAFRRRRRSKNLRYRAPRFNNRTKPKGWLAPSLQHRVDTVMAWVNRLSRLAPITGICQELVRFDTQQLENPEISGVEYQQGTLLGYEVREYLLEKWGRECAYCGDTDTPLEVEHVVPRSRSGSNRVSNLTLSCHPCNQAKNSQALADFFAHDKGLHRRLKANGHTAAIRLERVQRQLKQSLRDASAVNATRWALFSALKTTDLPVAVSSGGRTKYNRQRLGIPKTHGLDAACVGAFDTLHAWQVPTLTIKAMGRGSYQRTRLNKYGFPRGFLMRQKQVRGFQTGDMVRALVPTGKKAGMHTGRVAVRKTGSFNIQTEHGAVQGVSHNYCTVIQRGDGYGYHHTPSINLTGGAGQAVA

SEQ ID NO: 8417 - protein, 552 aa, Streptomyces sp.
MTTFPVGEQTHQAVLPQQPALESVRADTPGSRDETAHGHPATARGTGREHGRGETDGRGTRPRRRHANSAATAAEAAENGSGDASPYNPSYAGGIGASRVFVLSKEGDPLMPCHPARARELLGKGRAVVARQVPFTIRLKDRTRAESEVDGVQLRIDPGSKGTGLALTDEKKEVDEQGAVVTVRRGLVAVELQHRGDQIHRSMQQRAGYRHRRRSANCRYRQPRSNNRTRPTGWLPPSMRHRVDTTYSQAARLCRYAPVTDIHIERVAFDTHAMSEGRALTASECQQGTLAGTEARAYLRAKWNNACVYCDATGVPLNIDHLRPRSRGGSDRISNLVLACAPCNQAKNNTSVEIFLADQPDRLAKIVRQLRTPLQDAAAMNATRWQLTGRLSDLGRPVHACSGGRTKWNRSAMGLPKTHTLDALSVGRLDHESGDAIVRYPARVVVVKATGRGSYARTTPDRFGFPRLRRSRTKQYFGYATGDLVRAKVPTGNWAGTWTGRIAVRANGQHSLTTSAGRFNVRHRNLRLMQRGDGYGYSSRPELAEATLRKTC

SEQ ID NO: 8418 - protein, 413 aa, unidentified; identical to SEQ ID NO: 2636

SEQ ID NO: 8419 - protein, 512 aa, unidentified; identical to SEQ ID NO: 3720

SEQ ID NO: 8420 - protein, 415 aa, Bacillus sp.; identical to SEQ ID NO: 6255

SEQ ID NO: 8421 - protein, 454 aa, unidentified
VSYTARYVPAYRIKHITKKEAPYMVYVLDIDGQPLMPTSRHRKVRKLLNSHLAKVVKRCPFTIQLLYQSTKETQPVSLGVDAGSRHIGLAATTEQKVVYQEELVPRNDVVKLLSARRALRSSRRSRKTRYRKPRFNNRVHSKHKGWLAPSVEVKIQEHITAIKRICQILPISDIHVETAEFDLQRLKAMEEGRPLPVGTDYQLGEQYDFYNTRQYVLHRDEYTCQCCGTHDNNVKLHVHHIESRQTGGDAPNNLITLCEHCHKLLHAGKTILPKGKKRGKSYRDATFMGIMRKTLLERLKKEIDVPVEGTYGYITKYWRERAGLEKSHINDAICISKHPYARPLETYYLTKAVRHHNRQIHKTKFSKGGIRKRNQAPYLVKGFRLFDKVLYQGESYFIFGRRITGYFDIRTLDGTKVNKGSTSYKKLRIQDTAEAYLTEVRAIPHMNEFTCVLA

SEQ ID NO: 8422 - protein, 415 aa, unidentified
MIYVRSKDGKALMPSERGGRIGYLLRHGKAHVVSRVPFVVQLDYESTTYTQEVSLGIDAGSKHIGVSASSEKKELLAAQVELRNDVVNLLSTRRELRRTRRNRKTRYRKVRFDNRKKKDGWLAPSVKQKVESHLKVIRLVRKLLPITKTTIEVAQFDAQKIKRPDIQGEEYQQGEQMGFWNVREYVLARDGHRCVHCKGKSKDHILNVHHLESRKTGGNSPSNLVTLCETCHKAYHRGEFELKIKRGNSLRDAAVMNIMRWVVYERAKEEFENVHLTYGYVTKHTRIENGIAKTHAADAFCIAKNVNAMRLSSFFMCRCVPRHTRVLHVANPKKGGIRRSTIASHKIGKSRFQRFDMVRWRGKECFIFGSTHGNVVLRKIDGVKVHETQAVSAKTIKFLKRIRNNILVEEIVSIS

SEQ ID NO: 8423 - protein, 494 aa, unidentified
MMMVYVQNKDGKPLMPTTRYCYVRLLLKEKKARVVCTTPFTIQLNYDTPDITQDLILGIDPGRTNIGVAVVKEDGSCVFSAHLETRNKDVPLLMQKRAAFRRNHRTLDRRRKRQRRAKAAGTTIAEGSVERLLSGYEKPIVCHHIRNKEARFNNRSRPAGWLTPTANHLLQTHINLIAKIAKVLPITKVVVELNRFAFMAMDNPNIRRWEYQQGPLYGLGPVEDAVYAQQDGHCLFCKKPIDHYHHVVPRHKGGSETLANRCGLCEKHHALVHKDKAWAEKLVTRKGGMNKKYHALSVLNQIIPHLMEYLGSETPYDVYATDGKSTKGFRVAKNVPKEHYTDAYCIACSILDADTKVSAPVEPFELKQFRRHDRQSCIRQMVDRKYLLDGKVVATNRHKSIEQKSDSLEEFREAYGDPAVSQLTVRPHLPQYKDMTRIMPGAVMDFDGIVGVFQGSEGFHNGKPDYYKSTKGAKVSTKRCALLAQNAGMVFIPA

SEQ ID NO: 8424 - protein, 512 aa, unidentified
MHTVYVLNKDGKPLMPTTRCGHVRRLLKEQKAQAVASKPFTIQLLYETDDVVQPLYLGIDPGRTNIGVAVVKTDGTAVFTAHLETRNKEIPKLMQGRKKARRARRTNGRRCRRQRRAKANGTISKKCVKQNTAQNGSVSKRAKEIGVIKRHLPGCEKEILCIGIKNKEAKFNNRTRPEGWLTPTANQLLQTHINLVKKIQKFLPISDVVLEANKFAFMQLDNPNIQKWQYQQGPLYQKANLKEAVSEMQEHHCLFCKKPIAHYHHVVPQSENGSNIIGNIVGLCTKHHDLVHKDAAWQEKLAKKKTGLNKKYGALSVLNQIIPALTKELSSLFPKHFFATDGKSTYDYRAAHGVSKDHWLDAYCIACSVLPKDVCDSSINSRVPYELKQFRRHDRRALHKENMKRMYTLNDKVVATNRHKAIKQTTDSLEEFRQRQPHDVCKLKVKEHHSEYRNPKRNFPGCVFLVGKHTHVMQGTRGSHNGKADGYYDTNGNSYSSGKCKFVVKNEGIVFT

SEQ ID NO: 8425 - protein, 515 aa, unidentified; identical to SEQ ID NO: 3339

SEQ ID NO: 8426 - protein, 413 aa, unidentified; identical to SEQ ID NO: 3476

SEQ ID NO: 8427 - protein, 445 aa, unidentified
  source 1..445: note = Microcoleaceae bacterium UBA11344
MSKIFVVDTNKNPLNPIHPGRARMLLQEGKAAVWKRYPFTIILKDVLPNPQIAPLRLKIDPGAKFTGLALVDDATGEVVWAAELEHRGFQIRDALTKRRQLRRGRRHRKTRYRQPRFDNRKRPTGWLPPSLQSRVENTVTWVRRLQKLALISDISQELVKFDTQLMENPDISGVAYQQGELAGYEVREFMLFKFNHTCMYCGAKDTRLEIEHLLPKSKGGSNRISNLGIACRNCHPKKGRQALREFLAQKPDLLQRILRQVKQQKADTAAVNSTRWALFNRLKETGLSVEVGTGGRTKFNRCRQNLPKTHWLDAACVGASTPLKLKVSGVVPLSIRAVGYGNRQMCQVDKFGFPKRGKEGKLIKRERQKNYFGFQTGDMVKAIVPTGKHAGTHVGKVTVRKSGAFDLTVAHVRLQSIRWKHCRAVHRFDGYSYASLSTNVEFLND

SEQ ID NO: 8428 - protein, 442 aa, unidentified; identical to SEQ ID NO: 3218

SEQ ID NO: 8429 - protein, 417 aa, unidentified
  REGION 1..417: note = Ga0307928_10010886
MLVYILNKQGKPLMPCKPTKAKHLLKEKKARVIQVEPFIIQLLFGSSNYRQPITLGVDPGYQNVGLSAISNKKEIYRSDVQLRIDIPKLLMERKMFRKNRRNRKTRYRKPRFDNRSKKNGRLVPSIKHKLDSHIRLVNAVEKILPITKIIIEVASFDSQKMQNPEISGVEYQQGTLHGYAVREYLLEKWSRECVYCGKRNVPLEIEHIVPKSRGGTDRVSNLTLSCHECNQEKSNMTAEEFGHPEIQKQAEKSLKATAFMNIVRWKLVNILNCKHTYGNITKRNRIKNDIVKSHSNDAFVIAGGTKDVDRSDVLIKQKQVRRNNRKLVKGQRGEISNKCPREVFGFRLFDKVVYNNKKYFVWGRRKGGSFLLKTLSGDKIERTYKKLQKVCGQVSFLVEIQFSSILNEGFLRGIINE

SEQ ID NO: 8430 - protein, 521 aa, Streptomyces sp.; identical to SEQ ID NO: 4093

SEQ ID NO: 8431 - protein, 462 aa, unidentified; identical to SEQ ID NO: 4177

SEQ ID NO: 8432 - protein, 512 aa, unidentified; identical to SEQ ID NO: 3870

SEQ ID NO: 8433 - protein, 424 aa, unidentified; identical to SEQ ID NO: 5907

SEQ ID NO: 8434 - protein, 529 aa, unidentified
LEVAAADKPRVGTKRAATGELTLTLCCTTWSRGAAPQGARHQALKGNAPDVFRRHNKELGLAVCVLDRSGKALMPCSEKRARLLLARGRARVHRVVPFIIRLVDRRAHASRFQPLRIKVDPGSRTTGLALVRDTQLVDATSGEIQRGAAVLNLFELVHRGRQISEALSARRAMRRRRRGNLRYRAPRFLNRTRPAGWLAPSLEHRVATTMAWVNRLMDWTPVAALSSELVRFDMQALENPEIASVEYQQGTLAGYEVREYLLAKWGRRCAYCDQEHVPLQIEHILARASGGTNRISNLTLACACCNAKKAARPIEAFLARDPKRLAVILAQAKRPLKDAAAVNATRWALANALRATGLPVELASGGCTQFNRKQLGLPKTHALDAVCVGKVASVSVWYKPTLAVKCTGRGSYQRTRLDRYGFPRGYLTRSRRVHGFQTGDLVRAEVPTGKKAGRHTGRVAVRATGSFNIQVAGNVVQGIAHRHCRLIQRSDGYGYSRIALLKGDASDGTASLSALSLPAVNDGVSRAAG

SEQ ID NO: 8435 - protein, 475 aa, Blautia sp.; identical to SEQ ID NO: 4128

SEQ ID NO: 8436 - protein, 447 aa, unidentified
VPAYRIKHITKKEAPYMVYVLDIDGQPLMPTSRHRKVRKLLNSHLAKVVKRCPFTIQLLYQSTKETQPVSLGVDAGSRHIGLAATTEQKVVYQEELVPRNAVVKLLSARRALRSSRRSRKTRYRKPRFNNRVHSKHKGWLAPSVEVKIQEHITAIKRICQILPISDIHVETAEFDLQRLKAMEEGRPLPVGTDYQLGEQYDFYNTRQYVLHRDEYTCQCCGTHDNNVKLHVHHIESRQTGGDAPNNLITLCEHCHKLLHAGKTILPKGKKRGKSYRDATFMGIMRKTLLERLKKEIDVHVEGTYGYITKYWRERAGLEKSHINDAICISKHPYARPLETYYLTKAVRHHNRQIHKTKFSKGGIRKRNQAPYLVKGFRLFDKVLYQGESYFIFGRRITGYFDIRTLDGTKVNKGSTSYKKLRIQDTAEAYLTEVRAIPHMNEFTCVLA

SEQ ID NO: 8437 - protein, 552 aa, Streptomyces sp.; identical to SEQ ID NO: 4251

SEQ ID NO: 8438 - protein, 442 aa, unidentified; identical to SEQ ID NO: 3791

SEQ ID NO: 8439 - protein, 447 aa, Halolactibacillus sp.
LRVFVKSMRGSNLDPCKNQKARQLLKEKKAKIISYKPFTIQMLIPTGETTHESHVGIDLGAKYTGVAITQEDRVLAKGDIECRQNVKGLLETKKIYRRSRRSRKTRYRKCKFKHKTTRVFSNKKGKWVKKKLSFTSPRPKGWLPPSLESRTQNLFFWIDTFTSLLPKVKVHIEVGKFDVQKMKNPDIQGKAYQEGDTFGYHNIRYFVFARDNYTCQVCKKKGNILNMHHIIYRSHGGSDAPSNLISVCTDCHTSDNHKRGHILWHWMEKRKKVPTYKEPPFMNTLRIRTFRRYPDARIIYGSETTPRRKELHLEKTHYNDAIAISAIQQIKQNPNSMFYIKQFRKKKRSLHEATARKGRKNKNLTKKRNKKNTKEMKGIHLNNTVRIFGKVGFVSGFTTSGLYIKDTHNVYITKPGKTYKQVGFKDVTVKNHNNNWQFISHLAPDGA

SEQ ID NO: 8440 - protein, 471 aa, unidentified
MTMVITLDKRKRPLGVCTERRARILLKKKRACVYKTFPFVIILKDKDTREVKPEGTYRVKIDPGAKYTGVAVVRNEDNAVVFFQQIEHRGDQVKKNLQTRNQCRRNRRSRETRYRKPKWGNKQLPEGKKPQYDSSRPDGWLPPSQRSIGDNVISWVIRLKRLFNITDCSFEAVRFDSQLMDNPDIEGVQYQQGTLAGTEIREYLLEKYAHTCQYCGGESNDSIMEWEHVIPRSRGGSDSVKNATLSCHTCNQEKGSMNPKEWLESINVKPKKTKLDKARLKGIKAVMDGKVQKNSNRYSAWAGILRRYEENGLFVIFGDVECSTGGKTKYNRTKLNLPKDHHYDALCVGTVPKEGFKDLTNGYFLYAEAMGRGTHFRGKINKCGIIIQKLGKTPKRIFGFQNGDIVTADVPKGKYKGKHTGRVSTRASGYFDIKTTEGERVTVNYKTCKFKQYGNGYRYSYKRTPLGDSSR

SEQ ID NO: 8441 - protein, 456 aa, unidentified; identical to SEQ ID NO: 5524

SEQ ID NO: 8442 - protein, 428 aa, unidentified
LKVFVLNMRGKPLMPCSPAKARHMLKAGKAFVVRRTPFTIKLTIATGETKQDVTLGVDAGARHVGISATTEKEEVFASEVALRQDITGLLADRLAFRRARRNRKTRYRAPRFNNRVRSKHKGWLAPSVENRIQAHISRIEAVCRLLPVTKIVIETASFDIQKIRNPEVEGTGYQQGDQLGFWNVREYVLFRDGHICQHCRGRSKDPILNVHHLESRKTGGDAPNNLITLCETCHKAYHAGKIKLKVKRGQSFRAEAFMGIMRWTLLDRVRKAHPGLPVENTYGYLTKHTRITHGLPKTHCVDAYCIAGNLKAVRRGVYLHQRQMRKHNRQIHKFTVLSKRLEDGTKIGYRKLNQSPYLVHGFRLFDKVRCLGQIGFIFGRRSSGYFDVQRLDGVKLSPSISWRKLTLLEKRSTYLTELRKQDGASSPV

SEQ ID NO: 8443 - protein, 521 aa, Streptomyces sp.; identical to SEQ ID NO: 4093

SEQ ID NO: 8444 - protein, 414 aa, unidentified
MPCSPAKARLLLKEKKAIVKRRTPFTIQLTIATGETKQPVSLGVDAGYKHVGLSASTEKAELYASEVELRQDITDLLSARRALRQSRRNRKTRYRAPRFDNRIRTKRKGWLAPSVENRINAHLSRIEAVLRLLPVTKITVETASFDMQLLKNPDISGKEYQEGEQLGFWNIREYVLCRDGHVCQHCYGRSKDPVLNVHHLESRRTGGDSPGNLVTLCETCHKALHRGEITLKAKRGQSFRAEAFMGIMRWEVLNRLKASHPELEVNNTYGYRTKHARIANDIAKSHCADAFCIAGNLGAERLGEFFFQKQTRRNNRQIHKLSILKGGIRKRNQAPFEVNGFRLFDKVACKGEEGFIFGRRSSGYFDVRKLDGTCISAGISYKKLHLLEKRRTYLTEIRKEKALPPLPGGSGLRA

SEQ ID NO: 8445 - protein, 452 aa, unidentified; identical to SEQ ID NO: 3325
  REGION 1..452: note = Ga0315285_10043415

SEQ ID NO: 8446 - protein, 494 aa, unidentified
MTMVYVQNKDGKPLMPTTRYCYVRLLLKEKKARVVSRTPFTIQLNYDTPDITQDLILGSDPGRTNIGVAVVKEDGQCVFSAHMETRNKDVPLLMKKRAGFRRQHRTLDRRRKRQRRAKAAGTTIAEDFVERLLPGYEKPVVCHHIRNKKARFNNRKRPQGWLTPTANHLLQTHINLIAKVAKFLPITKVVVELNRFAFMAIDNPNIHRWEYQQGPLYGLGSVEDAVYAQQDGHCLFCKKPIDHYHHVVPRHKGGSETLANRCGLCEKHHDLVHKDKAWAGKLVTRKEGMNKKYHALSVLNQIIPHLLEYLGDETLYDIYATNGRSTKGFRIAKNVPKEHYTDAYCIACSILDTDIKVSAPVEPFELKQFRRHDRQACIRQMVDRKYLLDGKVVAANRHKAIEQKSDSLEEFREAYGDAAVSQLTVRPHSPQYKDMTRIMPGAVMDFDGTVGVFQGSEGFHNGKPDYYKSTKGKKVLTRRCALLAKNVGMVFIPA

SEQ ID NO: 8447 - protein, 420 aa, unidentified
MQYVYVLNKHGEPLMPCSPRKARLLLKQKKACVVKRTSFTIKLLYGSTGYKQPITLGVDAGSKHIGISATTEKHELYREEATPRNDVVDLLSARRAFRRSRRNRKTRYRAPRFNNRVHSKHEGWLAPSVEVKIREHITLIKRVCRILPVTLVRVETAEFDTQRLKAMLEGKPLPVGTDYQLGEMYDEYNVRQYVLKRDNYTCQCCGAHSTKTKDVKLHVHHIETRRTGGNAPNNLITLCTDCHKALHAGKVTLDGKKRGKPLKDAAFMGVMRKTLMERLRKKLKIPVQGTYGYITKYLREKNGIPKSHTNDARCISKNLLAIPCDTCYYTKAVRHHNRQLHKATILKGGIRKANQAPYIVKGYRLWDKISCNGTECFITGRRTSGYFALKKLDGTVVSNSTSYKKMRLLEVATNYITERR

SEQ ID NO: 8448 - protein, 456 aa, Halomonas sp.
MAIFVLDKKKQPLMPCSEKRARLLLARGRAVVHKRYPFTIRLKDRVGGSTQPLRLGIDPGSKTTGLALMREPDSQQRHVLCLFELIHRGFQIKKALQQRAAFRRRRRSANLRYRAPRFNNRTKPKGWLAPSLQHRVDTVTAWVNRLNRLAPVTAISQELVRFDTQKLDNPEINGVEYQQGTLLGYEVREYLLEKWGRECAYCGTGDTPLEIEHVVPRSCGGSNRVSNLTLSCHPCNQSKDALSLVDFFATDKGLKKRLKANGHTANARLERVQRQLKQPLRDASAVNATRWALFSALKTTDLPVAVSSGGRTKYNRQRLNIPKTHALDAACVGAFGKLYDWTVPTLTIKAMGRGSYQRTRLTKHGFPRGFLMRQKQVHGFQTGDMVRAIVPTGKKAGTHTGRVAIRKTGSFNIQAEYGAVQGISHKYCTLIQRSDGYGYYVTLFSNLTGEAGRAVA

SEQ ID NO: 8449 - protein, 427 aa, Nostoc sp.; identical to SEQ ID NO: 2670

SEQ ID NO: 8450 - protein, 408 aa, unidentified; identical to SEQ ID NO: 6548

SEQ ID NO: 8451 - protein, 466 aa, unidentified
LSIKPLINIGEGVIYSSICTGLSLQTYQKRKEVPCMVYVLDINGQPLMPTTRHGKVRRLLNSHLAKVVKRCPFTIQLLYQSTKEIQPVSLGVDAGSKHIGMAATTEKKVVYQEELSARNDVVKLLSARRTLRRTRRNRKTRYRKPRFNNRVHSKHKGWLAPSVEVKIQEHITTIKRICQILPISEIQVETAEFDLQRLKAMEEGRTPPVGTDYQLGEQYDFYNTRQYVLHRDGYTCQCCGTHDNNIKLHVHHIESRQTGGDAPNNLIILCEHCHKALHEGKLELPKGKKRGESYRDATFMGVMRKTLLERLKKEIDVPVEGTYGYITKYWRERAGLEKSHIHDAVCISQYPYAKPLDIYYLTKTVRHHNRQIHKSNFSKGGIRKRNQAPYLVKGFRLFDKVLYQGKEYFIFGRRATGYFDIRTLDGTKVNKGSVSYKKLRIQDTAKAYLKEARAIPHMNKFTCVLA

SEQ ID NO: 8452 - protein, 419 aa, unidentified
MVYVISQDGKPLMPCSDPIARLLLKQGKAKVKKREPFTIKLTYETTNHTQGLTLGVDTGSGTIGTAVSKDNGDIVYMSEVVVRNDITDKMTQRAKYRRNRRNRKTRYRKARWLNRASSIKKDRFSPTMQSKLHSHVREIEYIQSILPVTEMVFETGQFDMQLMKNPSLANPKVRPWGYQKGANYGFENTKAMVLNRDNYTCQCCKGKHKDSKLEVHHIVFRSQGGSDEESNLLTLCHTCHKDLHSGKINPKLSGKLKGNLKYATQMNSIRKQLFRFYPNAIETFGYVTKANRLHLGVDKEHYYDACTIATQGNAFNVKSNLYKKKCVSDGDFQKTKGIRSEQPIVTDKICGFRKFDKVRYFGNDYFIKGRMSTGYAILMDIDGNKIDFSTMPRGYKTPKLSNCKRITARSTVMTQVKVV

SEQ ID NO: 8453 - protein, 456 aa, unidentified; identical to SEQ ID NO: 5876

SEQ ID NO: 8454 - protein, 419 aa, unidentified
MVYVINKEGQALMPTERFGNVRRLLKNGLAHVVCRIPFTIQLDYETTNFVQPISLGVDAGSKHIGISATTSEKELYAADVELRNDIVDKLSTRREQRRTRRSRLRYRKARFNNRVSSKHKGWLAPSVENKIQTHLTVVEKIHKFLPITKIIVETASFDIQKIKNPSISSKEYQQGEQLGFFNVREYVLFRDNHTCQHCKGKSKDHILNVHHIESRKTGGNSPSNLITLCESCHKAYHYGNIDIKIKRGASFRDATFMGIARWTTYERLKNIYPNVSMTFGYITKNTRITNWLPKEHHVDARCISGNPKSKPLGYYFYQKKVRCQNRQIHKANFLKGGRKKLNQSPFLVKGYRLFDLVEYQNNLYYIFGRRDSGFFDIRKLDGTKVNKGSISCKHIRLVNIRKSILTERRNSCSIPPTKL

SEQ ID NO: 8455 - protein, 413 aa, unidentified; identical to SEQ ID NO: 7541

SEQ ID NO: 8456 - protein, 424 aa, unidentified
MFVFVLNSSRKPLNPTHPARARKLLKTGKAAVFKRYPFTIILKEEVAEPNNQQLRIKIDPGAKTTGIAILRNESVLWGAELTHRGDQIRSALTSRRQLRRSRRNRKTRYRQPRFNNRCRQEGWLPPSLISRVENILTWVKRLWLLSPIAHISTELVRFDTQLIQNPEISGIEYQQGTLAGYELREYMLEKWHRRCVYCGATDTKLEIEHIVAKSKGGSNRLSNLTLSCRKCNQKKGNKPIEQFLENNPLLLKSILSQAKRSLADTAAVNATRWKLFNGLKELGIPVETGTGGRTKYNRCRQNLPKTHWLDAANVGYSTPDTLKILVSRPMRIKATGHGNRQMCGTNAFGFPIRHRSNTKKHFGFQTGDIVKAVVTKGKKVGSYIGRVLCRATGSFDITTATGRVAGISHKYCSFVHRSDGYSYQ

SEQ ID NO: 8457 - protein, 465 aa, unidentified; identical to SEQ ID NO: 8068

SEQ ID NO: 8458 - protein, 430 aa, unidentified; identical to SEQ ID NO: 7477

SEQ ID NO: 8459 - protein, 424 aa, unidentified; identical to SEQ ID NO: 7441

SEQ ID NO: 8460 - protein, 443 aa, Ktedonobacter sp.; identical to SEQ ID NO: 5715

SEQ ID NO: 8461 - protein, 439 aa, Aeromonas sp.; identical to SEQ ID NO: 5240

SEQ ID NO: 8462 - protein, 411 aa, unidentified
MVYVQDIDGKPMMPTTRHGKVRRLLKDNKAVVVNTCPFTIKLTYKTSDYKQEIVLGVDSGTKHVGLSATTKSKELYASEVILRSDVVDLLSTRRGLRRTRRSRLRYRKQRFNNRVKSKKDGWIAPSVRHKIDSHVRIISFVYSILPVSKLIVEVAQFDTQKIKNPEISGKEYQEGEQLGFWNVREYVLARDGHKCQHCKGKSKDPILNIHHIESRKIGGDSPSNLITLCETCHKEFHKGNIKLKVSRGKSLRDAAVMGIMKWKLYEELKFRYDNVSMTFGYITKYNRINHGIEKSHVSDAFVISRNFNSCRLGYYYKRKLVRRHNRQIHKMKILKGGIRKRNQAPFKVFGFRLFDKVMFQGEEHFIYARRLSGQFNIRDINGENKKDVSCKKLKYVSHGLVSVKTNLFLSQ

SEQ ID NO: 8463 - protein, 518 aa, unidentified; identical to SEQ ID NO: 3878

SEQ ID NO: 8464 - protein, 457 aa, unidentified
VWLTQTTCDIGEGFQLSAKRERLLFSRQIFRKEHGIMQYVYVLNKHGKPLMPCSPGKARLLLKEGKARVVKRTPFVIKLLHGSAGYKQPVALGVDAGSRHVGLSACTEGRELYKEELSPRNDVVELLSVRRQYRRSRRNRKTRYRAPRFNNRVHSKHKGWLAPSVEVKIQEHITVIKRVCRILPIVLVRVETAEFDTQRLKAMLEGKPLPVGSDYQLGEMYDEYNVRQYVLKRDNYTCQCCGAHPAEKKPVRLHVHHIESRHVGGNAPNNLITLCAECHKALHEGKITLGNGKKRGKPLRDAAFMGIMRNTLLARLKDELNIPVKQTYGYITKLLREENHVEKSHTNDARCIAKAPNAKPCDTMFRTRALRHHNRQIHKAKILKGGTRKKNQAPYLVKGFRLWDKVRYNGEEYFITGRRTSGYFAIKKYDGTVISNSASYKKLTLLEAATNYITERS

SEQ ID NO: 8465 - protein, 384 aa, unidentified
LRVFILNKRGKPLMPCSPAKARLLLKEKKAIVVRRTPFTIQLTIATGEAKQPVSLGVDAGYKHVGLSASTEKAELYASEVELRQDVSDLLSARRALRQSRRSRNTRYRAPRFDNRIRTKRKGWLAPSVENRINAHLSRIETVIRLLPVTKISVETTSFDMQLLKNPDISGKEYQEGEQLGFGNIREYVLCRDGHVCQHCYGGSKDPVLNVHHLESRRTGGDSPDNLLTLCETCHKALHRGEITLKTKRGQSFRAETFMGIMRWEVLNRLKASHSELKVHNTYGYLTKHARIENGIAKSHGADAFCIAGNLGAERLGEFFFQKQTRRNNRQIHKLSILKGALRKRNQAPFEVKGFRLFDKVACQGEEGFIFGRRSSGFFDVRKLD

SEQ ID NO: 8466 - protein, 413 aa, unidentified
MPCSPAKARLLLKEKKAIVARRTPFTIQLTIATGEAKQPVSLGVDAGYKHVGLSASTEKAELYASEVELRQDVSDLLSARRALRQSRRSRNTRYRAPRFDNRIRTKRKGWLAPTVENRINVHLSRIETVLRLLPVTKITVETASFDTQLLKNPDIAGKEYQEGEQLGFWNVREYVLFRDGHVCQHCHGRSKDPVLNVHHLESRRTGGDSPGNLITLCETCHKALHRGEIKLKAKRGRSFRAETFMGIMRWGVLNRLKASHPKLEVHNTYGYRTKHARIANGIAKSHCADAFCIAGNFGAKRLGEFFQKQTRRNNRQIHKLSILKGGIRKRNQAPFEVKGFRLFDKVACQGEEGFIFGRRSTGYFDVRKLDGTCISAGISYKKLHLLEKRRTYLTEIRKEEALPPPPEGRGLRA

SEQ ID NO: 8467 - protein, 442 aa, Lactobacillus sp.; identical to SEQ ID NO: 5193

SEQ ID NO: 8468 - protein, 431 aa, Aphanizomenon sp.
MEGLMSKTLVLDTNKRPLYPIHPAQARQLLKNKKAAVFRQFPFTIILKESRPDSPVSPLRLKIDPGAKFTGMALVNDSTGEVVFAAELKHRGFVIRDALTSRRQLRRSRRARKTRYRQPRFLNRTRPNGWLAPSLQSRVENIKTWVKKLRKFAPIEAISQELVRFDMQLMANPDIQGKEYQQGTLAGYETKEYLLEKWNRQCAYCGVKDVPFQVEHIHPRAKGGSNSITNLTLSCEKCNTKKGTKDIKDFLKKDPTRLQKILKQAKRPLADAAAVNATRWALFRVLKDTGLPVETGSGGLTKFNRSQQNLAKTHWIDAACVGQSTPILTIKGIKPLLIAANGHGSRQSCRTDKFGFPSRYVPRFKFVKGFQTGDIVKAVVTAGKKVGEYFGRVAIRTSGTFNISTNSRLVQGISHKYCLATHKKDGYSYAN

SEQ ID NO: 8469 - protein, 417 aa, unidentified; identical to SEQ ID NO: 8087

SEQ ID NO: 8470 - protein, 408 aa, unidentified; identical to SEQ ID NO: 3257

SEQ ID NO: 8471 - protein, 430 aa, unidentified
MPKVYVLNRHGRPLMPCTPAKARHLLDAGKAKVRHRTPFTIQLLYGSTGYTQEVILGVDAGSKTIGLSAATETEELFSAEVKPRNDVVELMSARRQFRRARRNRTTRYRKPRFDNRVRSKHKGWLAPSVEVKIQEHMTAIRRACAILPVSKVVVETAEFDLQLLKAVAEGKPVPQGEDYQKGEMYGHYNVRQYVLWRDSYTCCICGVHGSVRKGVPLHVHHLESRRVGGDAPDNLVTLCTACHDKLHKGIIMAADIKKRKRRSTRDATFMGIMRMTLLRRLREQLPVPVVETRGYITKATRENLLVLPKSHTNDALAIAHGPQGFRAEYLPNIRQADRLYTIRPVRHHNRQLHKATILKGGVRKANQAEKYICGFRLYDKVLYNGIECFVWGRRTSGSFLLRQLNGEKVKDSVSYKHLKLLERSQSYLVA

SEQ ID NO: 8472 - protein, 420 aa, unidentified
MQYVYVLNKHGEPLMPCSPGKARLLLKQQKAHVIKRTPFTIKLLYGSTGYKQPITLGVDAGSKHVGLSASTEKRELYREEFTPRNDVVDLLSTRKQNRRSRRNRKTRYRPPRFDNRVHSKHKGWLAPSVEVKIQEHITVIKRICRILPITLVRVETAEFDTQRLKAMLAGKPIPVGTDYQLGEMYDKYNVRQYVLKRDNYTCQCCGAHTTAKKAVKLHVHHLESRKMGGNAPGNLITLCITCHDALHKGKVSLDNKKRGKPMRDAAFMGIMRRTLMSRLREELPITVQGTYGYITKMQREQNDIKKSHVNDARCISKHPLAEPCSVCYRTKAIRHHNRQTHKANFSKGGIRKRSQMPYVVEGYRLWDKVLYKGQECFVSGRRTSGSFTLKKLDGTRISKGVTFKKLRLLEPATNYLIERM

SEQ ID NO: 8473 - protein, 250 aa, unidentified
KGEMYGHYNVRQYVLWRDGYTCQCCGAHATKKKEVRLHVHHLESRKVGGDAPDNQVTLCESCHEKLHKGLIAEKDFKKRKRRSTRDATFMGIMRKTLMQRLCSELPIPVVKTRGYITKATREKLLVLPKSHTNDALAIAQGKRGFNVGYLPEIAQIDKIYTIRPVRHHNRQLHKATILKGGIRKSNQTEKYVFGYRLFDKVQFNGQDCFIWGRRTTGIFTIKTINGKMIKDGISFKKLKPVEKSTSYLIA

SEQ ID NO: 8474 - protein, 415 aa, unidentified
MVYVVANDGQPLMPTERHGKVCRMLRSGMAKVIKKCPFTIQLQYESERNVQPVSLGVDAGSKHIGISATTKAKVLYESDVELRDDIVKLLATRRQLRRSRRSRKTRYRPARFDNRKRKEGWLAPSIRQKIGSHLTVVANVCKILPINQIIVETASFDIQKIKNPEIQGIEYQQGEQMDFWNVREYVFFRDGHTCQCCKGRSKDKILNVHHIESRKTGGNAPNNLITLCETCHKGYHNGTVILPKNIKRGMQFKDAAFMGIMRWAFYNALKEQYEPAVPVSMTYGYLTKNTRIEHGLLKEHYIDARCISGNPDAVSDGTYYYQKKVRCHNRQIHKQTILKGGIRKSNQAEYLVKGYRLFDKVRYQGREYFIFGRRKTGFFDIRTLSGEKVNKGSISVKKLTFADTRKNYLTERRTA

SEQ ID NO: 8475 - protein, 417 aa, unidentified
MPCSPAKARLLLKEKKAIVKRRTPFTIQLTIATGEAKQPVALGVDSGYKHIGLSATTEKAELYASEVELRQDITDLLSARLALRRSRRSRKTRYRAPRFDNRVASKREGWLAPSVENRIAAHMSRVEAVMRVLPVTAITVETAAFDTQLLKNPDIAGEAYQQGEQLGFWNVREYVLFRDGHVCQHCRGKSKDPILNVHHIESRRTGGDAPNNLITLCETCHKAFHRGEIKLKVKRGKSFKAETFMGIMRWTLFERLKKAHPELRVRNTYGYLTKHKRISHGIAKSHCADAYCIADNLGAKRLEGFFFQKQTRKHNRQIHKLSILKGGLRKKNQAPYEVKGFRLFDKVICKGEEAFIFGRRTSGSFDVRRLDGTRISAGINYKKLRLLEPRTTYLAEFRKEAAHPPLHECRGFRAEFL

SEQ ID NO: 8476 - protein, 420 aa, unidentified; identical to SEQ ID NO: 2681

SEQ ID NO: 8477 - protein, 482 aa, unidentified
LVWNVQAPWDVHPSPTLCGLCLKVLRGRNGDADKKPIPTLTKDENRPSGRTTGLRAEQAEPAGIRKGDTLKVFVLNMRGKPLMPCSPAKARHMLKAGKAVVVRRTPFTIKLTIATGETKQDVTLGVDAGARHVGISATTEKEEVFASEVALRQDITGLLADRLAFRRARRNRKTRYRAPRFNNRVRSKHKGWLAPSVENRIQAHMSRIEAVCRLLPVTKIVIETASFDIQKIRNPEVEGTGYQQGDQLGFWNVREYVLFRDGHICQHCRGRSKDPILNVHHLESRKTGGDAPNNLITLCETCHKAYHAGKIKLKVKRGQSFRAEAFMGIMRWTLLDRVRKTHPKLPVENTYGYLTKHKRIALGLPKTHCADAFCIAGNLKALRRGDFLFQQQTRKHNRQIHKCSILKGGVRTLNQAPFLVKGFRLFDKVRIGGQIGFVFGRRVRGTFNIRRLDKTVIGTDINCKKLSLLETRKTFLTELRKE

SEQ ID NO: 8478 - protein, 470 aa, Sulfobacillus sp.; identical to SEQ ID NO: 2748

SEQ ID NO: 8479 - protein, 465 aa, unidentified; identical to SEQ ID NO: 3070

SEQ ID NO: 8480 - protein, 529 aa, unidentified
LEVAAADKPRVGTKRAATGELTLTLCCTTWSRGAAPQGARHQALKGNAPDVFRRHNKELGLAVCVLDRSGKALMPCSEKRARLLLARGRARVHRVVPFIIRLVDRRAHASRFQPLRIKVDPGSRTTGLALVRDTQLVDATSGEIQRGAAVLNLFELVHRGRQISEALSARRAMRRRRRGNLRYRAPRFLNRTRPAGWLAPSLEHRVATTMAWVNRLMDWTPVAALSSELVRFDMQALENPEIASVEYQQGTLAGYEVREYLLAKWGRRCAYCDQEHVPLQIEHILARASGGTNRISNLTLACACCNAKKAARPIEAFLARDPKRLAVILAQAKRPLKDAAAVNATRWALANALRATGLPVELASGGCTQFNRKQLGLPKTHALDAVCVGKVASVSVWYKPTLAAKCTGRGSYQRTRLDRYGFPRGYLTRSRRVHGFQTGDLVRAEVPTGKKAGRHTGRVAVRATGSFNIQVAGNVVQGIAHRHCRLIQRSDGYGYSRIALLKGDASDGTASLSALSLPAVNDGVSRAAG

SEQ ID NO: 8481 - protein, 372 aa, unidentified
MMGNYHVRICRRVGAGDSPLDSIGIALVNNRDEVIWGMELHHRGQQIKDSLETRKAVRRGRRARHTRYRQTRFLNRTRPEGWLNAPSLRHRVLTIETWVKRLMKFAPIVTLTQELVKFDLQAMQNPEIFGTEYQQGTLHGYECREYLLEKWNRQCAYCGIKDVPLEVEHIQPKSKGGSDRISNLCLACHKCNQNKGNKDVKEFLKGKPEVLSRILKQAKSPLKDAAAVNSTRWALLKVLGRFGLKVYANSGARTKFNRIKLGLPKAHWIDAACVDFVEKLIILTTKILTVKSTGKGTRRLCRINKFGFPCSNPRTSYEHGWNTGDVATGKGVTGRVVVQSKTRLEIRIDGKRIGAQLSDFKKLHCKDGYSYA

SEQ ID NO: 8482 - protein, 418 aa, unidentified
MVYVLSKTGQPLMPTENHAKVRVLLKQQKAKIVHGCPFTIQLLYDSTDYTQPVSLGIDAGSRHIGVSATTETKVLYEADVTLRNDIVDLLSTRREARRTRRSRKTRYRKPRFNNRTRKDGWLAPSVRQKVDTHLTTVRKVTEILPVNSITVETASFDIQKIKNPDIAGTGYQQGEQLDFWNVREYVLFRDGHKIQCCKGKSKDPVLNVHHIESRKTGGNAPNNLITLCETCHKGYHNGTVSLPKNIRRGMKFNDAAFMGIMRWAFFNRVKETYEPLGIMVKMTYGYITKNTRIEHDLPKDHFIDARCISGHPDATSDGTVFYQKKVRCHNRQIHKQKILKGGIRKRNQAPYLVKGFRLFEKVKYHGKQYFIFGRRSSGFFDIRTLDGTKVNKGSVSCKKIRSLDMPRSYLTEERKAIV

SEQ ID NO: 8483 - protein, 416 aa, unidentified
MVYVLDKNGQPLMPTDRHRKVRLMLQSGQAKVIKRCPFTIQLNYDSGHQTQEISLGIDAGSKHIGVSATTKIKVLYEADVELRNDIVNLLSSRREFRRGRRNRKTRYRQAKFNNRRRGNGWLAPSIRQKIGTHLTVVENICKILPISRIMVETASFDIQKIKNPDIQGAEYQQGDQLGFWNVREYVLFRDGHICQCCKGKSKDKILNVHHIESRKTGGNAPNNLITLCETCHTGYHKGTVQLPKAIKRGMRFKDAAFMGIMRWAFYEALKQQYEPVGTPVHNTYGYITKHTRIAYNLPKEHYVDARCISGNPEASSNGEYYYQKKVRCHNRQIHKLTVLKGGIRKQNQATYLVKGYRLFDKVSYQGKGYFVFGRRQSGFFDIRTLSGEKVNKGSLSCKKLKFIATRTYYLTERRAV

SEQ ID NO: 8484 - protein, 440 aa, Clostridium sp.
VPLMVYVLNKEGKPLMPTNRYAKIRVLLKSKKAVVVNSKPFTIKLLYNTEDFVQPITLGIDSGYLNIGLSAITKEKELISAEVKLLKGMSERLKEKAMHRRQRRSRLRYRKPRFDNRKRSKDWLAPSIQHKYDSHIRFIDKLKKLLPITNIIIEVANFDTHKLKDPSIEGADYQNGEQKDFFNLREYILHRDGHKCQNPNCKNKNAESILQVHHIGFWKQDRSDRPGNLITLCNKCHTPKNHKKNGFLYGWQPKVKSFKEATFMSMIRWRLVNTLDCNHTYGYITKSNRIALKLEKTHYNDAFCIAGGSSQSRVNPLIFEQIKRNSRSLEKFYDAKVIDIRTNTKVSGLELFNGRRTRNKNLNSENLRKYRGVKVSKGQRRIRTKRYFYQPGDLVKYEDKVYIVKGTQNKGKYIALKELKKVPKVELLTPYKFRKGLVCV

SEQ ID NO: 8485 - protein, 431 aa, unidentified; identical to SEQ ID NO: 7729

SEQ ID NO: 8486 - protein, 423 aa, unidentified
MSNYVFLIDSNQTPLNPVHPKQARKLLDAGTASVFRRYPFTLILKRVIDNPNVYPLTLKIDPGSKFTGIALVTNQGNVIWGMELQHRGQQIKNALLARKAVRRGRRNRNTRYRLARFLNRKRPNGWLAPSLKHRILTTQTWVKRIQKFASIGSIVQELVKFDTQVIQNPEISGIEYQQGTLKGYECRQYLLEKWNRQCAYCGVQDVRLEIEHIQPKSKGGSDRISNLCLACHKCNQRKGNKDIKDFLKGKSELLNRVLKQAKTPLKDAASVNSTRWALFNTLKSFGLPLSTGTGGQTKFNRMQFGLPKAHWIDAACVGSVQTIKLITTRILKVKARGFGGRQRCQTDKFGYPQKHRPLRPILGFSTGDIVRADVPKGKYAGTFTARVCPMSHGYGEFVIDNKRRSIKLEYLTPVHQKDGYDYP

SEQ ID NO: 8487 - protein, 410 aa, Aneurinibacillus sp.
  source 1..410: note = isolate UBA3580
MTKEFAFVLDEKGKQLSPTSVNNAWYLIRKKRAKLIQKYPMVIQLNKTVDNEDIDESTFHCGIDDGSKHVGIAIVQECKTKNKVVFKGQIEQRQDVKHLMDIRRGYRRYRRSHKGYRPARFDNRRNSKRIERIAPSIKQKRDAVLRVINKLKQWIRISKITLEDVMIDIRVLTEGKKLYSWQYQQSNRLDENLRKAVLLRDDFTCMECDKTNCVLEVHHIVPRRLKGADSINNLITLCSKCHDKTEGVEEQFIERYQSMMKGKNVRTDYAQHVMQGKNYLRQEVSKIAELELTTGGDTANKRIDWGIEKSHSNDAIIITGLKVDDVNVKEWLIRPMRRKSKTKAEEVNGFKHRDLIEYVKRNGEKYIGWITAMYPEKKQCNITTVDGKVLKRYGLKNCRLLWRFNKIYWL

SEQ ID NO: 8488 - protein, 480 aa, unidentified; identical to SEQ ID NO: 2726

SEQ ID NO: 8489 - protein, 362 aa, unidentified
LKGLSRTCGSLRFKEKTLKVFVINKRGKPLMPCKPAKARHLLRDGKARVVRRTPFTIQLTIATGENVQPIHLGVDAGSKHIGLSATTEKEELFSSEVELRKDITDLLSSRREMRRARRNRKTRYRAPRFDNRVHAKNKGWLAPTLENKISAHLSRIKAIRAILPVSRITIEVASFDIQKIKNPEIEGEQYQQGEQLGFWNVREYVLFRDGRKCCHCHGKSKDPILNVHHIESRKTGGDAPNNLITLCETCHKAYHAGKIQLTAKRGEKFTDATHMGIMRWELFKRAKEANLGIPVKATFGYITKVRRIQFGIAKTHCADAFCIAGNLNAKRLGEYLYQKQTRKHNRQIHKMAILKGGYRKRI

SEQ ID NO: 8490 - protein, 346 aa, unidentified; identical to SEQ ID NO: 4983

SEQ ID NO: 8491 - protein, 472 aa, unidentified
VVGNRLLSIKPLINIGKGVIYSSICTDLSLQTYQKRKEVPCMVYVLDINGQPLMPTTRHGKVRRLLNSHLAKVVKRCPFTIQLLYQSTKEIQPVSLGVDAGSKHIGMAATTEKKVVYQEELSPRNDVVKLLSARRTLRRTRRNRKTRYRKPRFNNRVHSKHKGWLAPSVEVKIQEHITAIKRICQILPISDIHVETAEFDLQRLKAMEEGRPLPVGTDYQLGEQYDFYNTRQYVLHRDEYTCQCCGTHDNNVKLHVHHIESRQTGGDAPNNLIILCEHCHKALHEGKLELPKGKKRGKSYRDATFMGVMRKTLLERLKKEIDVPVEGTYGYITKYWRERAGLEKSHINDAICISKHPYARPLETYYLTKAVRHHNRQIHKTKFSKGGIRKRNQAPYLVKGFRLFDKVLYQGKSYFIFGRRITGYFDIRTLDGTKVNKGSTSYKKLRIQDTAEAYLTEVRAIPHMNEFTCVLA

SEQ ID NO: 8492 - protein, 421 aa, unidentified
MQYVYVLNKHGKPLMPCSPGKARLLLKEGKARVVKRTPFVIKLLHGSAGYKQPVALGVDAGSRHVGLSACTEGRELYKEELSPRNDVVELLSVRRQYRRSCRNRKTRYRAPRFNNRVHSKHKGWLAPSVEVKIQEHITVIKRVCRILPIVLVRVETAEFDTQRLKAMLEGKPLPVGSDYQLGEMYDEYNVRQYVLKRDNYTCQCCGAHPAEKKPVRLHVHHIESRHVGGNAPNNLITLCAVCHKALHEGKITLGNGKKRGKPLRDAAFMGIMRNTLLARLKDELNIPVKQTYGYITKLLREENHVEKSHTNDARCIAKAPNAKPCDTMFHTRALRHHNRQIHKAKIIKGGTRKKNQAPYLVKGFRLWDKVRYNGEECFITGRRTSGYFAIKKYDGTVISNSVSYKKLTLLEAATNYITERS

SEQ ID NO: 8493 - protein, 464 aa, unidentified; identical to SEQ ID NO: 6574

SEQ ID NO: 8494 - protein, 413 aa, unidentified; identical to SEQ ID NO: 5215

SEQ ID NO: 8495 - protein, 414 aa, unidentified; identical to SEQ ID NO: 7784

SEQ ID NO: 8496 - protein, 535 aa, unidentified; identical to SEQ ID NO: 6116

SEQ ID NO: 8497 - protein, 428 aa, Sutterella sp.; identical to SEQ ID NO: 5624

SEQ ID NO: 8498 - protein, 442 aa, unidentified; identical to SEQ ID NO: 2903

SEQ ID NO: 8499 - protein, 490 aa, unidentified
MNYVYVLDKKGKPLMPTTRYGKVRRMLKSGQAKPVQNLPFTIQLTYIPKTTVCQPVIVGFDPGRTNIGISAVREDGTCLNLTHCETRNREIPKLMQKRKEHRQTSRRGERLVRKRLAKRHGTVSSKPLERILPSCEKPLKVKDIINTESRFNNRLRSEGWLTPTATQLLRTHVNLLKRMCQILPATDVVMEVNRFAFMQLDQPNVKKCGIDFQHGPLFGTDGIKEAVSIQQDGRCLLCEKRTIEHYHHIVPRAYRGSDTAENIAGLCAGCHKLVHTSREASNKLKHKKDGINKKYGGISVLNQVIPFLFMEFEQMFPGHTYATNGWNTKQFREKYRLAKDHSVDAYCIAASILPEPKVELPEDTHEIVQYRRHDRARIKRQTERTYCLGKKGVCKNRHKRFEQKTDSLEEYVEKYPNFLSNLTVKKSQRSYNDLKRVLPGAVILYQGKRYILSGRSSGGKQYRMLGYGNQNFTASKCTIVQQNTGLVYVS

SEQ ID NO: 8500 - protein, 414 aa, unidentified
MPCSPAKARLLLKEKKAIVKRRTPFTIQLTIATGESKQPVTLGVDAGYKHVGLSASTEKAELYASEVELRQDVSDLLSARRALRQSRRNRKTRYRAPRFNNRLRTKRKGWLAPSVENRINAHLSRIEAVLRLLPVTKISVETASFDMQLLKNPDIAGKEYPEGEQLGFWNVREYVLFRDRHVCQHCYGRSKDPVLNVHHLESRRTGGDSPGNLITLCETCHKALHRGDITLKAKRGKSFRAEAFMGIMRWEVHNRLRALHPGIEVSNTYGYRTKHARIANGIAKSHCADAFCIAGNLGAERLCEFFFQKQTRRNHRQIHKLSILKGGIRKRNQAPFEVKGFRLFDKVACQGEEGFIFGRRSSGFFDVRKLDGTRISAGISCKKLHLLEKRRTYLTEIRKEEALPPLPEGRGLRA

SEQ ID NO: 8501 - protein, 414 aa, unidentified
MVYVINKQGQALMPTERFGKVRRLLKNSLAHVVCRIPFTIQLDYDTTDYTQPVSLGVDAGSKHIGISATTSEKEMYAADVELRNDIVDKLSTRREQRRTRRSRLRYRKARFNNRVYSKRKGWLAPSVENKIQTHLTVVEKIHKFLPITNIVVETASFDIQKINNPSISGSEYQQGEQLDFFNVREYVLFRDNHICQHCKGKSKDKVLNVHHIESRKTGGDSPNNLITLCETCHKAYHRGEFKLNIKRGKSFRDAVFMGIMRWGFYDRLKNIYPNVSMTFGYITKNARITNNLPKEHYVDARCISGNPTAKPLGYYFYQKKVRCQNRQIHKANFLKGGRKKLNQAPFLVKGFRLFDLVEYQKELYYIFGRRSNGSFDIRKLDGTKVNKGSINCKYLRLISTRKSILTEKRTQVNL

SEQ ID NO: 8502 - protein, 545 aa, Actinomadura sp.
VLLQRAALESGLADTPRIGNETGLRPPARLGGGTGAGHVRGETTGTSPGPGGVTPDLRGGERRREAHHVFVLDKDGAPLQPCHPARARRLLASGRAVVARHTPFVIRLKDRTAAASEVEGVEVGIDPGSRHTGIAVFTARKGERRGRYAIQLDHRGARIRKKLGQRAAYRRRRRSANLRYRAPRFLNRVRPDGWLAPSLKHRVDTTTSWVERLARWAPVEAVHVELAAFDTHALSAGRSLEGVEYQHGTLYGYQVREYLLEKWGRACAYCGAVNVPLTVDHIHPRSKGGADRVCNLALACVPCNQSKSDRPIELFLAHRPATVVRVLAQAKAPLRDAAAINSTRLGLRHALDRRFPGRVVVGSGGRTRWNRTRSGLPKSHTLDALCVGETGAVTAYPATVLVVACTGRGGHSRTRTDRYGFPRLRLPRSKTVRGFQTGDLVKAVVPGGKRAGTHLGRVAVRATGSFNITTRHGTVNGVGHRYARLLQRADGYGYNTRPEIAARVHGPDAGRQVPALKAGTSSLQCLAGDPIPPTPHGGGFLEGSP

SEQ ID NO: 8503 - protein, 324 aa, Nostoc sp.
MSKVFLIDSEKRPLNPIHPAQARQLLRNKKAAIYRQFPFTLILRKSSAEVSVSSLRLKLDPGARVTGLALVNDATGEVVFAAELKHRGFAIRDALTSRRQLRRSRRARKTRYRKPRFLNRTRPQGWLAPSLQSRVENIKTWVDRLRRFAPITAISQELVRFDMQLMRDPNIQGKEYQQGTLQGFETREYLLEKWNRECAYCGVKDVPFQVEHIQPKSNGGSNSITNLTLSCGRCNIKKGTKDIKDFLKKDPARLEKILKQAKRPLADAAAVNTTRFALLEVLKGTGLSVETGSGGLTKFNRSQQNLEKSHWIDAAKQWVFQLQF

SEQ ID NO: 8504 - protein, 512 aa, unidentified
MSTVYVLNKDGKPLMPTTRGGHVRYLLKEKKARVVTSKPFTIQLLYETDDVVQPLYLGIDPGRTNIGVAVVKTDGTAVFTAHLETRNKEIPKLMQGRKKARRARRTNGRRCRRQRRAKANGTISKKCVKQTTAQNGSVSKRAKKIGVIKRHLPGCEKKVLCIGIKNKEAKFSNRTRPEGWLTPTANQLLQTHINLIKKIRKFLPVNDVVLEINKFAFMQLDNPNIQKWQYQQGPLYQKASLEEAVSEMQEHHCLFCKKPIAHYHHVVPQSENGSDTIGNIVGLCTKHHDLVHKDTAWQKKLAKKKTGLNKKYGALSILNQIIPALTKELSSLFPKHFFATNGKSTHDYRAAHDVSKDHWLDAYCIACSILPNDTCDKNINGRVPYKLKQFRRHDRRALHKENMSRVYTLDGKKVATNRHKAIKQTTDSLEEFRQRQPNDVCKLKVKEHHPEYRNPERNFPGCVFLVGKHTHVVQGTSGSHNSKADGYYDTNGNSYSSGKCKFVAKNKGIVFA

SEQ ID NO: 8505 - protein, 416 aa, unidentified; identical to SEQ ID NO: 4039

SEQ ID NO: 8506 - protein, 418 aa, unidentified; identical to SEQ ID NO: 6784

SEQ ID NO: 8507 - protein, 424 aa, Caldicoprobacter sp.; identical to SEQ ID NO: 7521

SEQ ID NO: 8508 - protein, 472 aa, Cupriavidus sp.
MVVLVLDKQGRPLMPCSEKRARLLLARGRARVHRVVPFVIRIVDRRQADSRLQALRVKLDPGSKVTGIALVRDLPSGVGEAGDCAPGAAVLSLIELVHRGRRISEALTARRAFRRRRRGANLRYRAPRSQNRTRAARWLPPSLQHRVDTTLTWVARLRRWAPVSALSCELVRFDPQALEQPEIAGVEYQQGTLFGYELREYLLVKWGRRCAYCDQENLPLQVEHIQARAKGGSDRVANLTLACGPCNQAKGAQPIGRFLARQPARLARILAQAKRPLKDAAAVNATRWALVDALTGTGLPVELSSGGRTKFNRTRLGIPKTHALDAVCVGQMSHAQAWHRPTLTITCTGRGCYQRTRLDRYGFPRGYLMRGKSVYGFRTGDTVWAKIPTGKKAGEYVGRVAVRASGSFNIRAQSGLVQGIGHRHCRLVQRADGYGYQFQPTDSITQEGAGSGRASHAALSLAGRKARVSRPA

SEQ ID NO: 8509 - protein, 410 aa, unidentified
IEICEDVGYNYIGISVKSQSHEYVSAQYDTLQDEKDCHDSCRKMRRTRRNRLRYRKPRFDNRKHDKGWLAPSLEHKKELNVNVIKMYCEVMPITHATVEVGSFDTMLVKAIEEGKATPESTDYQKGPRYNLASLREAVFYRDNYTCQVCGRKANEGAILHVHHMFYWKGRHGNSLNELVTVCEKCHTPANHQKGGKLYGFGENIKFANLSGAAFMNTVRWQIVNELYAAFGKPFVTFTYGAMTKEKRIALHLDKSHSNDAYAMGNFHPVDRCAFEHYEKVKRNNRILEKFHDSRYIDIRTGKEAKGKELFNGRISRSHKKDSENLHKYRGKRIRKGYRALRRKKVALNSGDLVSLNGETLIVHGTHTNKKGNVRVEFKVAALNGKKSASLKKLKIVKTSTPMHSAWAKVS

SEQ ID NO: 8510 - protein, 450 aa, unidentified; identical to SEQ ID NO: 2935

SEQ ID NO: 8511 - protein, 560 aa, unidentified
MANDYVFVVDRKGNPLMPTKRRGRVRHLLKEGKAVVIKTHPFTVKIKYDVGHYTQPMYEGIDSGRQNIGNAVSRENGENVLLEDVRTNNKSIKKNLMKRKVHRQERRRNNRHSRQRKAIHDGTEIKNGDDDKWHTDKDCKSVKVSYPAADNAVTHKVIRGKEGKFANRKRPDGWITPSARQIVQLTLNMVKETCSIMPIRRISFERVAFDFQKLANQNIHAWEYGKGPLYGFKTYKDCIYAEQKGKCPFCGKPITQYHHIIPRSAGGIDNVKNIIGLCDEHHTMVHNDAAFAETLSDAKAGVEQEYHAGLLNSAVPALIEALSVYCKEKSIELLITDGRTTRETRVKYGFDDKKDHCIDAYAISLADRNVKNISFAGRIIMKRRYKKKSKNIISARNQRIYVLDGQVIACNRHKAENQKENSLEEFLTQYRETHTEKKVQQMMHHIRILPAVRSYTFHKDGLKAICHPGDIVEYKKLNKTSGRMKRNIFVCTSVNFDGKDKYGNYCAAENHIGYDNGKGNGNRKAKFCTVLDSGCLQCTGIKRTDDYIAQLKADPSKKKG

SEQ ID NO: 8512 - protein, 415 aa, unidentified; identical to SEQ ID NO: 3582

SEQ ID NO: 8513 - protein, 293 aa, unidentified
MPDKVYVISRLGHPLMPCSPAKARHLLDDKKAKVVKRMPFTIRLLYGSTKYIQPIILGVDAGSKTIGLSASTAKGEVFAAEVMPRNDVVENLSTRREFRRARRNRTTRYRKPRSDNRVRSNHERWLAPSVKVKIQEHITSIKRVCTILPISKVVIETAEFDLQLLKAIQEGKPIPEGEDYQKGEMYGSYNVCQYVLWRDNYTCICCGVRGTPKNPVRLHVHHFESRKYGGNAPDNHGTLCDDCHKKFHLGIIADVKLKTRRRQSTRDAAFMGIMRKTLSALRLCVWLFDNRYI

SEQ ID NO: 8514 - protein, 413 aa, unidentified; identical to SEQ ID NO: 3295

SEQ ID NO: 8515 - protein, 403 aa, unidentified; identical to SEQ ID NO: 3354
  VARIANT 17: note = X can be any naturally occurring amino acid

SEQ ID NO: 8516 - protein, 512 aa, unidentified
MSTVYVLNKDGKPLMPTTRCGHVRHLLKEQKARVVTSKPFTIQLLYETNDVVQPLYLGIDPGRTNIGVAAVKTDGTAVFTAHLETRNKEIPKLMQGRKKARRARRTNGRRCRRQRRAKANGTISKKCVKQTTAQNGSVSKRAKEIGVIKRHLPGCEKELLCIGIKNKEAKFSNRTRPEGWLTPTANQLLQTHINLVKKIQKFLPISDVVLEINKFAFMQLDNPNIQKWQYQQGPLYQKASLEEAVSEMQEHHCLFCKKPIAHYHHVVPQSENGSNTIGNIVGLCTKHHDLVHKDATWQKKLAKKKTGLNKKYGALSVLNQIIPALTKELSSLFPKHFFATNGKSTYDYRAAHGVSKDHWLDAYCIACSVLANDVCDSNINSHVPYELKQFRRHDRRALHKENMSRVYTLNGKSVATNRHKAIKQTTDSLEEFRQRQPNDVYKLKVKEHHPEYRNPKRNFPGCVFLVGKHTHVVQGTSGSHNSKADGYYDTNGNSYSSGKCKFVAKNKGIVFA

SEQ ID NO: 8517 - protein, 413 aa, unidentified; identical to SEQ ID NO: 2815

SEQ ID NO: 8518 - protein, 414 aa, unidentified; identical to SEQ ID NO: 2588

SEQ ID NO: 8519 - protein, 420 aa, unidentified
MQYVYVLNKHGEPLMPCSPGKARLLLKQQKARAVKRTPFTIKLLHGSAGYKQPITLGVDAGSKHVGLSASTEKRELYSEEFTPRNDVVELLSTRRQNRRSRRNRKTRYRAPRFNNRVHSKHKGWFAPSVEVKIQEHITVIKRICRILPITLVRVETAEFDTQRLKAMLAGKPLPVGTDYQLGEMYDEYNVRQYVLKRDNYTCQCCGAHTTAKKAVKLHVHHLKSRKVGGNAPSNLITLCVTCHNNLHKGKITLDGKKRGKTLRDAAFMGIMRNTLLTRLRNELNIPVQNTYGYITKLLREQNDIKKSHVNDARCISKHPLAEPCSVYYRTKAIRHHNRQIHKAKILKGGIRKANQAPYIVKGFRLWDKVLYNGQECFISGRRSLGYFALRKLDGTAITNSISFRKLRLLELATNYLIERM

SEQ ID NO: 8520 - protein, 424 aa, unidentified
  REGION 1..424: note = Ga0315295_10019812
LRVYVKNQRSQPLMPTTPQKARLLLKQGMAKVVKRTPFTIQLLQATGETRQEVTLGVDAGSKVIGISATTVKEEVFAAEVQLRNNIVDLLATRLQNRRTRRNRLRYRPARFSNRVSTKKEGWLAPSIQNKVQTHLKLMDRVQQLLPISKIIVEVASFDIQKIKNPNIQGKEYQEGDQLGFWNVREYVLFRDGHQCQGKKGCKGKILNVHHIESRKTGGDSPDNLITLCEECHQAFHEGKLKLNLKRGQSFRDAAFMGIMRWAFYNKLKELHPQVQLTYGYITKNTRITNQLPKEHRIDALCITGNPMVKQCDDWYCIKQVRKHNRQIHKANILKGGKKKLNQAPYLVKGFRLFDKVRFENQQYFIFGRRSSGFFDIRDLDGNKVNKGSISCEKLELLEKGRSLLWERRKQDFGVSEHSSTSLKA

SEQ ID NO: 8521 - protein, 415 aa, Bacillus sp.; identical to SEQ ID NO: 5517

SEQ ID NO: 8522 - protein, 470 aa, unidentified; identical to SEQ ID NO: 2925

SEQ ID NO: 8523 - protein, 279 aa, unidentified; identical to SEQ ID NO: 5082

SEQ ID NO: 8524 - protein, 418 aa, unidentified
MVYVINKEGQALMPTERFGKVRRLLKNGLAHVVCRIPFTIRLDYETTHFVQPISLGVDAGSKHIGISATTSEKELYAADVELRNDIVEKLSTRREQRRTRRNRLCYRKARFTNRLSSKRKGWLAPSVENKIQTHLTVVEKIHKFLPITKIVVETASFDIQKIKNPSISSEEYQRGEQLDFFNVREYVLFRDNHTCQHCKGKSKDPILNVHHIESRKIGGNSPSNLITLCESCHKAYHSGKIDLKVKRGASFRDAAFMGIARWTTYERLKNIYPNVSITFGYITKNTRITNGLPKEHYVDARCISGNPKSKPLGFYFYQKKVRCQNRQIHKVNFLKGGRKKLNQAPFLVKGYRLFDLVEYQKNLYYIFGRRNSGFFDIRKLDGTKVNKGSISCKQIRLVDIRRSILTERRNSCSIPPTN

SEQ ID NO: 8525 - protein, 413 aa, unidentified; identical to SEQ ID NO: 2636

SEQ ID NO: 8526 - protein, 420 aa, unidentified; identical to SEQ ID NO: 6582

SEQ ID NO: 8527 - protein, 414 aa, unidentified
MPCSPAKARLLLKEKKAAVVRRTPFTIQLTIATGESKQSVSLGVDAGYKHVGLSASTEKAELYASEVELRQDISDLLSARRALRQSRRNRKTRYRAPRFDNRIRTKRKGWLAPSVENRINAHLSRIETILRLLPVTKITVETASFDMQLLKNPDISGKEYQEGDQLGFWNVREYVLFRDGHVCQHCHGRSEDPVLNVHHLESRRTGGDSPSNLITLCETCHKALHRGEITLKAKRGQSFRAEAFMGIMRREVLNRLKASHPELEVHNTYGYRTKHARIANGIDKSHCTDAFCIAGNLGAKRLGEFLFQKQTRRNNRQIHKLSILKGGLRKRNQAPFEIKGFRLFDKVACKGEESFIFGRRSSGYFDVRKLDGTRISAGISYKKLRLLEKRRTYLTEIRKEEALPPLPEGRGLRA

SEQ ID NO: 8528 - protein, 442 aa, unidentified; identical to SEQ ID NO: 2637

SEQ ID NO: 8529 - protein, 413 aa, unidentified; identical to SEQ ID NO: 2858

SEQ ID NO: 8530 - protein, 383 aa, unidentified
LDYATGETKQECTVGIDTGSKNIGIAVRSENKVLFKGEVELRQDVKSNLDTRRIYRRSRRNRKTRYRKPRFLNRKRPDTWLPPSLENRIRHTFRWIDAFCLLVPSPSLHIEVGKFDTAKMIDPKIQGVDYQHGQTYGYYDVRYFVFARDHYTCQVCGKSRDKILRTHHIRYRSNGGTDRADNLITVCTDCHTGQNHQKGGILYRWQEENKKVRSYKEPPFMNILRQRIFQRYPYAHITYGSETTQRRKELCLGKTHYNDAIAISGIQTITEDPKEWLLIRQSRKKKRSLHEANPRKGRKKPNRTQERSSKNTPSYRNFYLNDKVSVLGRSGYISGFTSGGCYVKDTDGQYITLPGKTYKQVGIANVHRICHNNNWQYITKRAL

SEQ ID NO: 8531 - protein, 413 aa, unidentified; identical to SEQ ID NO: 3476

SEQ ID NO: 8532 - protein, 470 aa, unidentified; identical to SEQ ID NO: 2825

SEQ ID NO: 8533 - protein, 456 aa, unidentified
LGIDPGRTNIGVAVVKADGAAVFTAHLETRNKEVPKLMKKRKESRCARRTNGRRCRRQRRAKTNGTISKKCVKQTTAQNGSVSKRAKEIGVIKRHLPGCEKDVLCIGIKNKEAKFTNRARPEGWLTPTANQLLQTHINLVKKIQKFLPISDVVLEVNKFAFMQLDNPNIQKWQYQQGPLYQKGSLENAVSEMQEHHCLFCEKPIEHYHHVVPKSENGSNTIANIVGLCTEHHNLVHKDATWQKKLVKEKVGLVKKYSALSVLNQIIPALTKEMNSLFPKHFFVTNGKSTYDYRTAHGVSKDHWLDAYCIACSVLPNDVCDSNINSHVPYELKQFRRHDRRVLHKANMSRVYTLNGKTVATNRHKAIKQTTDSLEEFRQSHPGDVCKLKVKEHHPAYRNLNRNYPGSVFLVDGQVHVMQGVSGSHNGKADGYYNTNGNAYPYYKCKFVVKNEGIVFA

SEQ ID NO: 8534 - protein, 557 aa, Blautia sp.; identical to SEQ ID NO: 7395

SEQ ID NO: 8535 - protein, 434 aa, Lactobacillus sp.
MQNRVFVINRQGEPLMPCTQRKCRKLLQSGKAKVIRKEPFTIQLLFGSTGYKQPVSIGVDSGQHHIGLAVTSQDKVLFQGEVSLRQDVKKLLDTRRSYRRGRRDRNTRYRPPRFLNRAKPVGWLPPSVASKIQHNINWIQRLQAVLPKAELHIEVGKFDMAKMVQPGITGLGYQQGDLYGYETTKQYVLDRDNYTCRICHGKTKDPKLKIHHIIYRSTGGTNQVSNLLTVCATCHTQANHQPGGKLYALQAKRFQSHHSLKGATFMNILRRRLFTAFPEAKFQYGAQTTLNRAKLELPKAHYNDAVTISGIQRISQQPTAVVMFRQFRKKKRSLHEATARKGRKTPNTTSKRNAKNTKAINGFHLNDYVQLPNGLRGNISGFSGKTACYVKAGDDHYLTINPKYKQVNLSKLKVIRHQNNWNVAEINTSDYMMA

SEQ ID NO: 8536 - protein, 431 aa, unidentified; identical to SEQ ID NO: 7173

SEQ ID NO: 8537 - protein, 424 aa, unidentified
MVYVLSKDGKPLMPCSNVIARLLLKQGKAKVRKRQPFTVKLNYETANYTQNLTLGVDTGSGTFGTAVTRDNGEIVYLSEVTVRNDITDKMTQRASYRRSRRFRKTRYRKARFLNRKNSIKEGRFSPTMRSKLHSHVKEIEWIRSILPVTAMVFEAGQFDTHLMKNPALADPKIRPWGYQKGPNYGYANTKAMVLNRDGYTCQYCHGKRKSSRLEVHHIQYRHMGGSDDSDNLITLCRSCHKDVHDGKIKLSNIGKKKGTLKYATQMNSIRKQLFLSYPEAIETYGYVTKENAQLLGIEKRHGLDACVIATQGQPFTVKSLLYRKKCIPKGDFQQTKGVRSEQPVTTGKIGGFRKFDKVRYLGKEYFIKGRMASGYAILMDFEGKKADFSYMPRGQKTPKLSRMKRLEARNSWMVTAEADIQNTA

SEQ ID NO: 8538 - protein, 424 aa, unidentified; identical to SEQ ID NO: 5018

SEQ ID NO: 8539 - protein, 329 aa, Nostoc sp.
MCKVFVIDNEKRSLNPIHPAQARQLLKRGKAAVFRRFPFTIVVKESYTDATVSPLRLKFDPGAKYTGIALVNDVNGEVVFAAELKHRGFAIRDALTSRRQLRRSRRSRKTRYRQPRFFNRTRPQGWLAPSLQSRVENIKTWVNRLRKVAPITAISQELVKFDTQLIRHPDIQGKEYQQGTLAGFETRQYFLEKWNRECAYCGIKDVPLQIEHIHPKSKGGSNSITNLTLSCEKCNLKKGTQDIKNFLKKDKSRLEKILALTKKSLADAAAVNTTRFALLEVLKSTGLPVEIGSGGLTKFNRTQQGLNKSHWLDACCVGASTPILKIKGY

SEQ ID NO: 8540 - protein, 413 aa, unidentified; identical to SEQ ID NO: 2636

SEQ ID NO: 8541 - protein, 493 aa, Erysipelotrichaceae sp.
MSMTKLDRELHDADFIYIISADGYPLMPTRRRGHVKRLLNHGKARIVLHVPFTVQLKYKSPEKTQPVYAGIDPGRTNIGVSAVTEDGECIYRAHVSSRNRDVPKKMKKRRECRRASRRGERLRRKRRAKRNGTVTSFPNGRMLPGYEKPVMVKDIINETVRFIYRKRPDGWLTSTARQLVQTHESIVRLVSSILPVTEWTLEVNKFSFMQMDSGRCYGADFRNGRMKGYEGSHEYVYARQGGVCPFCGKPIEHYHHMIPRSMGGSDLPENLIGLCRDCHEEIHLGRLSTKTEGIMKKYGALSVLNQAIPFIVRRLADKYGEEHVHFCTGKDTHAMRTAMHMPKDHDTDAVCIACTGMNVIPSASLPKKFEVMQFRRHDRALIKSQRERTYMLDGETVCKNRHRRFEQKCDSLDEFRKEHPKLVSELNVSKSVRYYNNPDRLMPGAVFLFGGERHVLQSQLTGGKYYRAVGCGKKSFPSAKCTVIRCNSGLVYI

SEQ ID NO: 8542 - protein, 431 aa, unidentified
MPNKVYVINKHGRPLMPCSPAKARHLLDAGKAKVKKRTPFTIQLVYGSSGYTQEVILGVDAGSKTIGMSASTTKEELLSAEVKPRNDVVDLLSTRREFRRARRNRKTRYRKPRFDNRVRSKHKGWLAPSVEVKIQEHITSIKRVCRILPVSKVVIETAEFDLQLLKAIADGKPVPQGEDYQKGEMYGHYNVRQYVLWRDDYTCQCCGAHATKKKEVRLHVHHLESRKVGGDAPDNQVTLCESCHEKLHKGLIAEKDFKKRKRKSTRDATFMGIMRKTLMQRLCSELPIPVVETRGYITKATREKLLVLPKSHTNDALAIAQGKRGFNVGYLPEIAQIDKICTIRPVRHHNRQLHKATILKGGIRKSNQTEKYVFGYRLFDKVQFNGQDCFIWGRRTTGIFTIKTINGKMIKDGISFKKLKLVEKSTSYLIA

SEQ ID NO: 8543 - protein, 433 aa, unidentified
LITGKHMSSARYWHEEKFSGRKVSEMTDYAFVLDANGKQLAPTKEQKAWFLIRRKRATLVSKYPLVIQLKKKIPDKEICKDEIRCGIDDGGLHVGVALVQKCQTRNKVVFKGTIEQRNDVKHLMDVRRGYRSYHRYHKRYRPARFNNRDSSKREGRIAPSILQKRQATIRVINQLNKWINITNYWLEDVAIDIRALTDGYKPYRWQYQKSNRLDENIRKAVILRDGCRCMECGKSNCRLEIHHIKPRRLKGSSTLGNLITLCTKCHQKTEGIEELYMDRYFALLNSSDNRNLDYAQHVMIGKKWLREQLSNLGMLYLTNGGDTANKRIDWDITKSHSNDAICITDLRPDTCEIKEWVIKPMRRQSKAKTDNVLGIKHRDLVEYTFRNGETHRGYVTALYPEQNAINFQSPAKHCKKVNAGKCKVLWKYSKIYW

SEQ ID NO: 8544 - protein, 415 aa, unidentified; identical to SEQ ID NO: 6534

SEQ ID NO: 8545 - protein, 422 aa, Petrotoga sp.; identical to SEQ ID NO: 5403

SEQ ID NO: 8546 - protein, 442 aa, unidentified
MSTSVFVLDKKHRPLMPCRPARARRLLRAGRARVVKRFPFVIRLVDRTVEQSEVQPVLIKLDPGSRETGAAVVRDDEKKRHHALAFFVIKHRGGAIRDALKARSAFRRRRRSQNFRCRSPRFLNRVKPKGWLPPSLRHRVETTLSFVRRMCRYLPVSGIATELVKFDSQKLQNPEVSGVKYQQGTLFEYEVREYLLEKFGRKCVYCGAEGVPLNIDHVVPRAKGGSNRVSNLVLACVSCNQKKGARSLEDFLKGKPEVLARVRRELKTPLRDAAAVNATRWVLFNELKATGLPVETGSGALTKFNRHAFGVEKEHWLDALCVGRLNGVVTRKGLNVLEIRCMGRGSRQRTRLTKYGFPRGYLMRQKCVHGFATGDMVEANVPKGKKAGLWRGRVAVRVSGSFNIQTPKGVIQGVGWKHCRLISHNDGYGYAWLGHAPHSSPA

SEQ ID NO: 8547 - protein, 477 aa, Blautia sp.; identical to SEQ ID NO: 2707

SEQ ID NO: 8548 - protein, 425 aa, Aphanothece sp.; identical to SEQ ID NO: 6227

SEQ ID NO: 8549 - protein, 491 aa, unidentified
MPTKRKRHILKLLNTGKARIAEKVPFTIQLKYENIPVLQPVTLAEDPGRTNIGVAVLSPLGNLMFAAVIETRNKEIKKLMADRKAHRQASRRGERRARQRLAKKYGTIIKAGMAMRKLPQYAADKFVACKFIRNTEARFCNRKRRTDWLTPTVNHLVQTHLNVIKKISRYLPVTDIAIEVNRFAFMQMENPNASGVDFQNGPLKGFNDVKAAIREQQHGKCLMCKNDIEHFHHMVPRSKGGSDTIQNQVGLCPKCHAKVHTDTSFRKKLGDKKSGLLKKYGALSALNQAIPFICKGLLEEYGEKHVRFCTGKETSLIRTSLGYEKTNENQMHEVDAYCIGLAMLGVKNIKFQQFDNTYKIKQFRRQNRSIIHHQTERSYYLGKQKIATNRKPRFEQTGDAISDWYEKQLKTCENGEAGKLLSALKVKKSSRFYNSKGRLMPGTIFFYNGQRHVISGQLTGGRYLRAYGDTKTNYPISKCKILKHNEGLVFI

SEQ ID NO: 8550 - protein, 477 aa, unidentified; identical to SEQ ID NO: 2707

SEQ ID NO: 8551 - protein, 442 aa, Lactobacillus sp.; identical to SEQ ID NO: 4549

SEQ ID NO: 8552 - protein, 420 aa, unidentified; identical to SEQ ID NO: 6507

SEQ ID NO: 8553 - protein, 413 aa, unidentified
MTSYAFVLDANGKQLAPAKEQKAWFLIRKKRAALVSKYPMVIQLKKEIPENEICKDEIRCGIDDGGLHVGIALVQKCKTKNKVVFKGTIEQRNDVKHLMEVRRSYRHYHRYHKRYRPARFDNRKSSKRKKRIAPSILQKRQAIIRVIHWLNKWINITNYWLEDVSIDIRALTDGYKPYRWQYQKSNRLDENIRKAAILRDGGKCMECGKLNCRLEVHHIKPRRRNGSDTLDNLITLCKSCHQKTEGQEELYMDRYFSLLKSSDHKNLNYAQHVMIGKKWLRKQLSSLGVLYLTNGGDTANKRIDWNIEKSHANDAVCITNLQPDTYDMKEWTMKPMRRKSKAKTDNVLGIRHRDLVEYTLKNGETHRGYVTALYPEQKAINFQSPTKHCKKVNARKCKLLWKYSKIYWFENAS

SEQ ID NO: 8554 - protein, 429 aa, Salipiger sp.; identical to SEQ ID NO: 3575

SEQ ID NO: 8555 - protein, 420 aa, unidentified
MQYVYVLSKHGEPMMPCSPGKARLLLKQQKACVVRRTPFTIKLLYGSAGYKQPITLGVDAGSKHVGLSASTEKRELYSEEFTPRSDVVELLSTRRQGRRSRRNRKTRYRAPRFDNRVHSKHKGWLAPSVEVKIQEHITIIKRICKILPISLVRVETAEFDTQRLKAMLAGKPLPVGTDYQLGEMYDEYNVRQYVLKRDNYTCQCCGAHTTAKKLVKLHVHHLESRKTGGNAPSNLVTLCTTCHKNLHKGKVTLDGKERGKPFRDAAFMGIMRKTLMVRLKEELPIPVQGTYGYITKMRREQNDIEKSHTNDARCISKHPLAEPCSVCYRTKAIRHHNRQTHKANFSKKGIRKRSQMPYLVEGYRLWDKVLYKEQECFVSGRRSSGSFTLKKLDGTSVSKGVTFKKLRLLEPATNYLIERM

SEQ ID NO: 8556 - protein, 465 aa, unidentified
MSTCVCVLSNNGERLMPTIRLGKVRHLLKDGKAKIIKHHPFTIQLLYDSKTNTQPIEICEDVGYNYIGISMKSEFHEYVSVQYDTLQDEKDCHDGCRRVRRSRRNRLRYRQARFDNRKRDDGWLAPSFEHKKELNVNVIKMYCKVMPITHAIVEVGSFNTMLVKAIEEGKATPESADYQKGPRYKLATLREAVFYRDNYTCQVCGRKANEGAILHVHHMFYWKGRHGNSLSELITVCEKCHTPANHQKGGKLYGFGEDIKFANLSGAAFMNTVRWQIVNVLYAAFGKPFVTFTYGAMTKEKRIALHLEKSHNNDAYAMGSFHPVNRCAFEHYEKVKRNNRILEKFYDSQYIDTRTGELTNGKSLFNGRISRSHKKDSENLHKYRGKRICKGHRALRRKKVALNPGDLVSLNGEILVVHGTHTKKNGSVNVEFKTPSRGGKKSASLKKLKIVKTSNLMHSAWTKVS

SEQ ID NO: 8557 - protein, 359 aa, unidentified
STEKAELYASEVELRQDITDLLSARRALRQSRRNRKTRYRAPRFDNRIRTKRKGWLAPSVENRINAHLSRIETVIRLLPVTKISVETTSFDMQLLKNSDIAGKEYQESEQLGFWNVREYVLFRDGHVCQHCHGRSKDPVLNVHHLESRRTGGDSPGNLITLCETCHKELHRGEITLKAKRGQSFRAETFMGIMRWEVLDRLKASHPKLEVQNTYGYRTKHARIVNGIAKSHCADAFCIAGNLGAERLGEFLFQKQTRRNNRQIHKLSILKGGIRKRNQVPFEVKGFRLFDKVACKGEEGFIFGRRSSGYFDVRKLDGTRISAGISYKKLRLLEKRQTYLTEIRKEEALPPLPEGRGLRA

SEQ ID NO: 8558 - protein, 406 aa, unidentified; identical to SEQ ID NO: 3567

SEQ ID NO: 8559 - protein, 421 aa, Sutterella sp.
LRVFVINQRGKPLMPCSPAKARVLLREKKVRVKRRTPFTIQLTTATGEARQDVSLGVDAGYRHVGLSASTEKAELYASEAVLRDDITDLLSARLALRRARRNRKTRYRAPRFSNRVHSKNKGWLAPSVEHKIASHLKLVENVCRLLPVTNITVETASFDMQAIKNPDIKGTEYQQGEQLGFWNVREYVLWRDGHQCQHCRGKSGDPILNVHHLESRRTGGDAPNNLVTLCETCHKAYHAGRIDLKLKRGRSMRAEAFMGIMRWTFFYRLKEIHADKTVENTYGYLTKHTRITHGIEKSHCADAYCIAGNLSAERLPEYLYQKQVRKHNRQIHKLTIGRGGIRKRQQTPFEVKGFRLFDKVRLGGEEGYIFGRRSSGYFDVRRLDGQKLSAGVSFKKLHLLEKRKTYLTVLLPRLKTKVSAP

SEQ ID NO: 8560 - protein, 420 aa, unidentified
MQYVYVLSKHGEPMMPCSPGKARLLLKQQKACVVRRTPFTIKLLYGSAGYKQPITLGVDAGSKHVGLSASTEKRELYREEFAPRNDVVELLSTRRQNRRSRRNRKTRYRAPRFDNRVHSKHKGWLAPSVEVKIQEHITIIKRICKILPISLVRVETAEFDTQRLKAMLAGKPLPVGTDYQLGEMYDEYNVRQYVLKRDNYTCQCCGAHTTAKKLVKLHVHHLESRKTGGNAPSNLITLCTTCHKNLHKGKVTLDGKERGKPLRDAAFMGIMRKTLMARLKKELPIPVQGTYGYITKMRREQNDIKKSHTNDARCISKHPLAEPCSVCYRTKAIRHHNRQTHKANFSKKGIRKRSQMPYLVEGYRLWDKVLYKEQECFVSGRRSSGSFTLKKLDGTSVSKGVTFKKLRLLEPATNYLIERM

SEQ ID NO: 8561 - protein, 431 aa, Escherichia coli; identical to SEQ ID NO: 3801

SEQ ID NO: 8562 - protein, 465 aa, unidentified; identical to SEQ ID NO: 3603

SEQ ID NO: 8563 - protein, 442 aa, unidentified; identical to SEQ ID NO: 7529

SEQ ID NO: 8564 - protein, 441 aa, Acidithiobacillus sp.; identical to SEQ ID NO: 5206

SEQ ID NO: 8565 - protein, 414 aa, unidentified
MPCSPAKARLLLKEKKAIVKRRTPFTIQLTIATGETKQPVGLGVDAGYKHVGLSASTDKAELYASQVELRQDITDLLSARRALRRARRNRKTRYRAPRFNNRIRTKRKGWLAPSVENRINAHLSRIEAVLRLLPVTKITVETASFDMLLLKNPDIAGKEYQEGEQLGFWNVREYVLFRDGHVCQHCYGRSKDPVLNVHHLESRRTGGDSPGNLITLCETCHEALHRGEIALKTKRGHSFRAEAFMGMMRWEVLNRLKASHSELEVNNTYGYRTKHARIVNGIDKSHCADAFCIAGNLGAERLCEFFFQKQTRRNNRQIHKLSILKGGIRKRNQAPFEIKGFRLFDKVACKGEESFIFGRRSSGYFDVRKLDGTRISAGISYKKPRLLEKRRTYLTEIRKEEALPPLPEGRGLRA

SEQ ID NO: 8566 - protein, 424 aa, unidentified; identical to SEQ ID NO: 3232

SEQ ID NO: 8567 - protein, 408 aa, unidentified
  VARIANT 375..393: note = X can be any naturally occurring amino acid
  source 1..408: note = Lachnospiraceae bacterium UBA2815
VDHRGCGVIRKYENPQVSATAENVSFFDSGRKEASAVMQSVAVLSRTGRKLMPTNAYRARKLLKSGRAGIECYKPVFTIRLTDREEGAVQPVEYTCDTGYQHVGISIKSEKHEFVHNQYDMLKDETERHNDCRKYRRVRRNRKRYRKPRFDSRSKKNKDIAPSLRHRMGNQIRLFESFCRVLPITTATFEMGKFDTQFLQAIAEEEPLPKGRDYQHGSKYLYQTERMAVFGRDHYTCQICGRSVRDGAILHTHHIGFWMSPPYRSGRISNLLTVCEKCHTAWNHKPGGRLWGIKPKLTNLTAATYMSTVRWAMYRRLVKTHPDVDIHIQYGAKTGITRQERHIAKTHANDAYCIGQFHPLHRCKEVLFAKRRRNXXXXXXXXXXXXXXXXXXXKEVRCTAVMRQNQPQ

SEQ ID NO: 8568 - protein, 451 aa, unidentified
MPVAVISKTGERLMPTSEHRARKLLKSGKAIKYSYHPFTIQLAERESGDVQPIELCMDTGYIHIGISVKSEKHEYLAEQIDTLTDEKARHDACRMYRRQRRSRKRYRQPRFNNRKRNDRWIAPSLEHKKSIHIQAILRICKVMPVTDITLEMGNFDTQVLKAREEGKSLPQGVDYQHGERYGITTLREAVFSRDGYTCQCCGRTIKDGAILHVHHIVYRSQGGTNRMSNLITVCDKCHTPANHKQGGKLYNWKPKIASFKGATYMTTIRWKLYNEVKALCPDIDIHITYGAETKERRRALDIDKSHVNDAFVIGQFHSKHRSEPICYKKKRRNNRCLEKFYDAKYIDSRDGKKRSGQELFNGRISRNHKKDSENLHQYRLQKVTPGRRAIRRQHYPIQPHDIIVYNGNKIEVLGCQHKGTRVVFSKTKKSVQISKIKLFKYAGGYSKSVFN

SEQ ID NO: 8569 - protein, 512 aa, unidentified
MSTVYVLNKDGKPLMPTTRGGHVRHLLKEQKARVVRTKPFTIQLLYETDDVVQPLYLGIDPGRTNIGIAVVKTDGAAVFTAHLETRNKEIPKLMKKRKDSRRARRTNGRRCRRQRRAKANGTISKKCVKQTTAQNGSVSKRAKEIGVIKRHLPGCEKEVLCIGIKNKEAKFNNRTRPEGWLTPTANQLLQTHINLVKKIQKFLPISDVVLEVNKFAFMQLDNPNIQKWQYQQGPLYQKANLEEAVSEMQEHHCLFCKKPIDHYHHVVPQHKNGSNTISNIVGLCTKHHDLVHKEAVWQEKLAKKKTGLNKKYGALSALNQIIPALTKELSSLFPKHFFATNGKSTYDYRTAHGVSKDHWLYAYCIACSVLANDVCDSNINSHVPHELKQFRRHDRRALHKENMSRVYTLNGKKIATNRHKATEQTADSLEEFRQNHPDDVCKLKVKEHHPEYRNPKRNFPGCVFLVGKQAHVMQGISGSHNGKADGYYDTNGNSYPSSKCKFVAKNEGIVFA

SEQ ID NO: 8570 - protein, 310 aa, unidentified
TKRKGWLAPSVENRINAHLSRIEAVLRLLPITKITVETASFDMQRLKNPDISGKEYQEGEQLGFWNVREYVLFRDGHVCRHCHGRSKDPVLNVHHLESRRTGSDSPDNLITLCETCHKALHRGEITLKAKRGQSFRAQAFMGIMRREVLNRLKASYPELKVHETYGYLTKHARIANGIVKSHGADAFCIAGNLGAERLGEFFFQKQTRRNNRQIHKLSILKGGIRKRNQAPFEAKGFRLFDKVACQGEEGFIFGRRSSGSFDVRKLDGTRISAGISCKKLRLLEKRRTYLTEIRKEEALPPLPEGRGLRA

SEQ ID NO: 8571 - protein, 421 aa, unidentified; identical to SEQ ID NO: 3082

SEQ ID NO: 8572 - protein, 469 aa, unidentified
MNERKLNKVFAEIKEKANMDYAITNPDEYGDCNACVNSELASEFGVDSKGIYAKHWLKGMNAGGPLMPTDRHGKVKRLLKSKMAKVVKRTPFTIQLLYKSNKYTQPLTLGVDAGSKHIGLSVNTESKEVYAGQIEPRQDVSKKLEERRQYRRSRRNRLRHRKARFNNRTATKHKGWIAPSVECKIQSHINVIEKLHQILPITKIIVEVAEFDTQKINNPKIQGKEYQEGPLLNNNLRQYVFARDGYTCQWCKGKSGSRVLHTHHWNFWRGDHTDKPDSLITLCDICNDSKNHKKGQFLFGWEPKITNNLKDAAFMNISRWMLYNRLKEIYPNVELTYGYITKTIRYDNKIEKSHINDALCIANHPNAVQTDNYYLLKKNRVHNRQIHKANKLKGDRLKLNQAPHLVKGYRLNDIVLYNGQTYAITGRRKTGYFQLKNYKTGEKLPSVGYKKLKLFEKAKYYTTERITRS

SEQ ID NO: 8573 - protein, 420 aa, Pseudoalteromonas sp.
MLAYVLNKHGKPLMPCKAAKARKLLKAGEAKVVKRTPFTIKLLHGSSGHTQHVVAGMDTGSKHVGCAAIANGKVIYQSEVALRTDVSKKMQQRAMYRRTRRNRKLRYRPARWLNRASMRKEGRLAPSLKSKLDSHLREKKQVEAILPISHWKVETASFDIHKITNPIVTSAGYQQGALLGYYNVKAYVLQRDNYKCQSGRKTKHNAKLHVHHKVFRSQGGTDALSNLIALCETCHNDLHVGKFELKVKRSKTKHATEIGILKAQLKQCWDFEETFGYVTKFKREQVLGLPKTHYYDAVSICCEDGELVQQGKHVLRKRHVASGDYQQTKGGRSEKRIPVGKLFGLKKHDFVQTPQGTGFVKGKRSSGYFALETILGDKVHASANIKKNTVRISARTTTLTQLMEAAIPLCTKVPSILAVN

SEQ ID NO: 8574 - protein, 425 aa, unidentified
MDGDPLDPTHPAKARILLKNKKAKVVRRLPFTIKLTYEIKNPKTQKYTLGVDTGFSKLGAAVINEKDEVVYLSEVTLRNDIKKIMKNRSETRRARRNRNTRYRKPRWLNRKNSIKEDRYSPTMISKFNSHMKEIKFIKSILPISTINLELAKFDNHALSNPLVKNNKWIYQKGLKFGFANTKAFVLNRDKYTCQHCKTKQGTLEVHHIIFRSNGGSDEPDNLITLCRQCHRDLHLEKISLKNTKGLKRKNKQAAATQMNNLRSMIIKKFNLHFNLNFTETYGFITKEVRQYLNLPKEHYFDGVAICYCDKVNKSKVFFKTNLVNLKRCISKGSYKRQKFTRGKMINLPKGKMQGFKRYDTVEYFGKRYFIMSRMSSGFAKLADINLNIIDFSFLGKGRKTPKLKNLKRISSRKSWITDQKIIQNI

SEQ ID NO: 8575 - protein, 485 aa, unidentified
LVAVLDRKKRPLAPCSEKRARQLLERGRAVVYRIYPVFTIRLKDRLLEECGTPPVRLKVDPGAKTSGFSLLREDSAERATVVHQSHLVHREDVKDRVDTRRACRRGRRNRHTWYREPRFNNRPRVKCRVCGRNARKGKDTCREHAGVPRDLYPKEVWLPPSLKARLDELLSWVRRYCRIFPVSSISVEWAKFDTQKLQNPEISGVEYQHGTLFGYEVKEYLLEKWGRKCAYCGAENVPLEVEHVVPRNPKRGPKGTDRISNLTLSCKECNDDKGNKQPEEWLEELKKSGKAIDRVRAENLPKVLAQLEEPLKEAAFMNAVRYALVNELKKLGFPLELGTAAQTKKNRLRLGLPKLHCYDAACVGESTPATINGLDSPIAVIRAVGRGTRRMCNTDAYGFPVGHRGRKKLHYGFMTNDLVAADVPSGKYAGRYVGFVAVRASGYFDIKDVSGHRLAQGVSWKHCWLIQRFDGYTYGREVPAHSFPQ

SEQ ID NO: 8576 - protein, 406 aa, unidentified; identical to SEQ ID NO: 6079

SEQ ID NO: 8577 - protein, 413 aa, unidentified; identical to SEQ ID NO: 3220

SEQ ID NO: 8578 - protein, 424 aa, unidentified
MVYVLSKEGTPLMPTNRHGRVRHLLDAGEAKAVKRCPFTIQLLYQSTTYTQEITLGVDAGSKTIGLSASTEKKELYASETRLRMDITDLLSVRRQFRRTRRNRKTRYRKARFNNRVHAKHKGWLAPGIEAKIGTHFRAVRDVCRILPVTEIIVETASFNLQKIKALEKGEPVPEGTDYQKGDQLGFWNVREYVLWRDGYKCRCCNGKSKDQVLNVHHIESRKTGGDAPNNLATLCGYCHKQYHKGTILLPKSVRRGNSFRDAAFMGIMRRTFYNRLKEQYPRVAMTYGYITKNTRIRNSLPKTHYADARCIAGHPQAEPLEVYYFQKKVRCHNRQIHKSNILKGGKKKRNQAEYLVKGYRLYDRVRYQNREYYVFGRRASGFFDIRTLGGNKGNKGSVSCKKLRFLEPRKTMLIERRMQEREAV

SEQ ID NO: 8579 - protein, 442 aa, unidentified; identical to SEQ ID NO: 8056

SEQ ID NO: 8580 - protein, 396 aa, unidentified; identical to SEQ ID NO: 4508

SEQ ID NO: 8581 - protein, 408 aa, unidentified
VKTYPFTIRLVDRLLENSAVQPVAVKVDPGSEQSGMAVVRDDGKAHHHALFFINLVHRGKVIRDRLTGRRAFRHRRRSANLRYRAPRFLNRKRRKGWLPPSLQHRVDTTMSWVKKLRKLVPVTALWVENVKFDTQKLQNPEVSGVEYQQGTLFGFEVREYLLEKFGRRCVYCGAENTPLNIDHVVPRAKGGSDRVSNLVLACTDCNQKKGAQPLEAFLKDKPQQFERIRRQLKAPLRDAAAVNATRWALFNALKQTGLPVATGTGAQTKFNRKAFGIPKEHWLDALCVGRINGADHPEGMGVLQVRCTGRGSYQRTRLNKYGFPRGHLMRQKRVHGFATGDMVKAVVPSGKKAGIHQGRVAVRVTGSFAIQKADGKVDGIHWRHCRLISHNDGYGYAWLRPAPHSSLV

SEQ ID NO: 8582 - protein, 456 aa, Halomonas sp.
MAVFVLDKQKRPLMPCSEKRARLLLARGRAVVHKRYPFTIRLKDRVGGSTQPLSLGVDPGSKTTGLALMRETDSEQRHVLCLFELIHRGFQIKKALQQRAAFRRRRRSANLRYRAPRFNNRIKPKGWLAPSLQHRVDTVMAWVNRLSRLAPVTAISQELVRFDTQKLNNPEINGVEYQQGTLLGYEVREYLLEKWGRECAYCGTADTPLEIEHVVPRSCGGSNRVSNLTLSCHPCNQSKDALSLVDFFATDKGLKKRLKANGHTANARLERVQRQLKQPLRDASAVNATRWALFNALKATSLPVAVGTGGRTKYNRQRLGIPKTHALDAACVGAFDALHAWQVPTLTIKAMGRGSYQRTRLTKHGFPRGYLMRQKQVHGFQTGDMVRAMVPTGKKAGTHTGRVAVRKTGSFNIQTEQGAVQGISHKYCTLIQRSDGYGYHFTPFTHLTGGAGQAVA

SEQ ID NO: 8583 - protein, 425 aa, unidentified; identical to SEQ ID NO: 2429

SEQ ID NO: 8584 - protein, 450 aa, unidentified; identical to SEQ ID NO: 2935

SEQ ID NO: 8585 - protein, 413 aa, unidentified; identical to SEQ ID NO: 2636

SEQ ID NO: 8586 - protein, 433 aa, Clostridium sp.; identical to SEQ ID NO: 7140

SEQ ID NO: 8587 - protein, 411 aa, unidentified
MVYVQDIDGKPMMPTTRHGKVRRLLKDSKAVVVNTCPFTIKLMYKTSDYKQEIVLGVDAGTKHVGLSATTKSKELYSGEVILRNDIVELLSTRRESRRTRRNRLRYRKPRFNNRIKSKRLGWVAPSVRHRIDAHIRIINNVCSILPVSRVIVEVAQFDTQKIKNPEISGKEYQEGDQLGFWNVREYVLARDGHKCQHCKGKSKDPILNIHHIESRKTGGDSPSNLITLCETCHKEFHKGNIKLKVKRGKSLRDAAVMGIMKWRLYDKLKSLYPNVRMTFGYITKHDRINHGIEKSHVSDAFVISRNFDSERLGYYYKLKLVRRHNRQIHKMKIPKGGKKRMNQSPFKVFGFKLFDKVMFQGEERFIYARRLSGQFKIKDIDGNNERNISYKKLRYVSHGLISIKTNLFLSQ

SEQ ID NO: 8588 - protein, 448 aa, unidentified
MVAVLSKTGIRLMPTSSYRARKLLAKKKAVICGYCPFTIRLTERETGDVQPVELAVDTGYFHVGNSLKTAKHELAAVEIRTLMDEKQRYDDRRRYRRMRRSRLRYRAQRFDNRRRLEGWLAPSIQGRMEQNLAFLRRVLSVVPVTRIVMEMGQFDTQVLKAVEEGRPIPEGTDYQQGERYGIATLREAVFTRDNYTCQCCEKTVHDGVILHVHHIVYRSQGGTNRMGNLITVCEKCHTPKNHKPGGKLYKWKPTVKSFKGATFMTAVRWIMYRSVKESLPNVDVRITYGAKTKLQRRTLDITKSHVNDAYVMGDFHPKHRARPVILQKRRRNNQILEKFYDAKYIDTRDGSKKTGQQLFNGRTNRNHNTDTGNLRLYRGMKLSKGKRAIRTTRYRIQPHDILVYQGQEIEASGCHCKGTRIMTTAKKSLPIGKVRVRRYSGGYYAVAE

SEQ ID NO: 8589 - protein, 442 aa, unidentified; identical to SEQ ID NO: 2903

SEQ ID NO: 8590 - protein, 430 aa, unidentified
MPKVYVLNRHGRPLMPCTPAKARHLLDAGKTKVRHRTPFTIQLLYGSTGYTQEVILGVDAGSKTIGLSAATETEELFSAEVKPRNDVVELMSARRQFRRARRNRTTRYRKPRFDNRVRSKHKGWLAPSVEVKIQEHMTAIRRACAILPVSKVVVETAEFDLQLLKAVAEGKPVPQGEDYQKGEMYGHYNVRQYVLWRDSYTCRICGVHGSVRKGVPLHVHHLESRRVGGDAPDNLVTLCTACHDKLHKGIIMAADIKKRKRRSTRDATFMGIMRMTLLRRLREQLPVPVVETRGYITKATRENLLVLPKSHTNDALAIAHGPQGFRAEYLPNIRQADRLYTIRPVRHHNRQLHKATILKGGVRKANQAEKYICGFRLYDKVLYNGIECFVWGRRTSGSFLLRQLNGEKVKDGVSYKHLKLLERSQSYLVA

SEQ ID NO: 8591 - protein, 419 aa, unidentified
MVYVISQDGKPLMPCSNPIARLLLKQGKAKAKCREPFTIKLIYETTDYTQDLTLGIDTGSGTIGTAVSKNNGDIVYMSEVVVRNDITDKMAQRAKYRRNRRNRKTRYRKARWLNRSNSIKKDRFSPTMQSKLHSHVREIEYIQSILPITEMVFETGQFDMHLMKNPSLANPKVRHWGYHKGTNYGFENTKAMVLNRDNYTCQCCKGKHKDSKLEVHHVIFRSQGGSNEESNLITLCHTCHKNLHSGKVNLKLKGKMKGNLKYATQMNSICKQLFRLYPNAIETFGYVTKANRLHLGVDKEHYYDACIIATQGNAFNIKSNLYKKKCVSDGDFQKTKGIRSEQSIVTDKIWGFRKFDKVCYFGNDYFIKGRMSTGYAILMDIDGNKIDFSTMPRGYKTPKLSNCKRITARSTVMMQVEVV

SEQ ID NO: 8592 - protein, 512 aa, unidentified
MSTVYVLNKDGKPLMPTTRCGHVRHLLKEQKARVVTSKPFTIQLLYEADDVVQSLYLGIDPGRTNIGVAVVKADGTAVFTAHLETRNKEIPKLMKKRKESRRARRTNGRRCRRQRRAKANGTISKKCVKHDTAQNGSVSKRAKEIGVIKRHLPGCEKDVLCIGIKNKEAKFSNRTRPEGWLTPTANQLLQTHINLVKKIQKFLPISDVVLEINKFAFMRLDNPNVQKWQYQQGPLYQKANLEETVSEMQEHHCLFCKKKIDHYHHVVPQHKNGSNTIDNIVGLCTQHHDLVHKDATWQKRLAKKKTGLNKKYGALSVLNQIIPALTKELSSLFLKHFFVTNGKSTYDYRAAHGVSKDHWLDAYCIACSVLPNDTCDKTINSRVPYELKQFRRHDRRALNNENMSRVYTFNGKMVATNRHKATEQTTDSLEEFRQRQPNDVCNLKVKEHHPTYRNMNRNYPGSVFLVGNQVHVMQGIASSKDGEATTYKDTNANSIAAGKCKFVAKNSGILFV

SEQ ID NO: 8593 - protein, 427 aa, Enterococcus sp.; identical to SEQ ID NO: 5630

SEQ ID NO: 8594 - protein, 589 aa, Streptomyces sp.
VTRVHREREGRSLAPSALGRSSDQPKSSRSKDQGGVPMTTLPAGEQTHQAVLPQQPALESVGADTPGSRYETAHGHLVAVRGAVGKHGRGETDGLGTCTRRRHVENAATAAEEAETGSGDAPAHEHVYTGGVGAGRVFVLSKEGHPLMPCHPARARELLGKGRAVVARYVPFTIRLKDRTLADSEVDGVQLRIDPGSKGTGLHLTDEKKEINEQGVTGTVRRGLISFELQHRGDQIRGRMQQRAGYRRRRRSANCRYRAPRSDNRTRLGSWLPPSLRHRVDTVFSQAARLCRYAPVAEIHVESGGFDTHSMSTGRPLRGAGYTQGALAGTDARAYLHARWNSSCSYCGITGVPLNIEHVRPRSRGGSSRISNLVLACVPCNMRKGTLPVEVFLAASPDRLAKILQQGETPLHDAAAMNATRWPLREALSSLGRPVFGWPGGLTKRNRAAMGLDKSHTLDALSVGHLAHESGDAIVRFPSQVLVVKATGRGSYARTTPDRFGFPRLRRARTKQHFGYVTGDLVRTTVPTGKWAGTWTGRICVRARGQHSLSTSKGRINVSHRHLRLLQRGDGYDYSTRPEPPPSISRKTG

SEQ ID NO: 8595 - protein, 417 aa, unidentified
MRGRPLMPCSQRKARLLLRENKAKIYKYHPFTIQLTYTTGETKQDCHIGIDTGSKYIGAAVRSEDKVFWKGEIELRQDIRSNLDTKRIYRRSRRNRKTRYRKPRFLNRKRRDEWLPPSLQSRINHTFHWIDTLSSLVPNPILHIEVGKFDVAKMINPEIHGVDYQHGQTYGFFDGRYFVFARDNYTCQCCGKSKNKILNTHHIIYRSNGGTNRVDNLITVCTDCLTSQNHRKGGIFYQWQEQHKKVKQYKEPPFMNTLRKRIFVAYPDAEITYGSETTPKRKAMKLDKTHYNDAIVISGINEIKENPEEWLLIKQFRKKKRSLHEATARKGRKKPNRNQTRNSKNTPYYKGFYLNDKVSVFGKSGYITGFTSNAAYIKDENNDYITLPNKTYKQVSINKMKLECHNNNWQYIIKNAV

SEQ ID NO: 8596 - protein, 447 aa, Marinobacter sp.
MSVFVLDKRKHPLMPCTERRARLLLSRRRAVVVRAYPFTIRLKNRTGDVTQPLRIKIDPGSKATGIAVVRENGQKQHVLALMELVHRGRQISKSLDQRRAFRRRRRNQLRYRAPRFLNRTKPKGWLAPSLQHRVDITRSLVNRLRSLVPVVSISQELVRFDTQKMETPEVSGVEYQQGTLLGYEIREYLLEKWGRECAYCADTDTPLQIEHIDPKANGGSNRISNLTLACRPCNQEKDRKSLVSFFATSKRLKNHQARLDRILKQCKKPLRDASAVNSTRWALYQALKQTGLPVEVGTGGRTKFNRCRLRIPKTHALDAACVGEVEIVEGWDVPTLAIKATGRGSYKRTRLTKHGFPRGYLMRQKQVQGFQTGDMVRAVVPAGTKAGTWQGRVAVRKTGSFNIQTSSGAIQGISHRHCVLTQRADGYGYHIQPNQRKEEGDRENESR

SEQ ID NO: 8597 - protein, 414 aa, unidentified
MSEYIYVIGVDGDPQMPTKRKRHVEKLLQAGRARVFRQIPFTIQLTYENKPVLQPITIAEDPGRSNIGMAVVSLSGELLSAAVVQTRNKEIVKLMEKRKQHRRASRNGERKARQRLAKKCHTMIKAGSLMRKLPMYGKDKRVQCNVIRNTEARFCNRKREDGWLTPSAEHLVQTHINLIHKMQKFLPITDVAFEINRFAFLSLEDPSISGVDFQNGPLKGYDDLNAAIEDLQDGHCLMCNSPIEHRHHIVPRSMQGSNTIGNIAGLCCKCHERVHKDARFEDRLKKKKAGLNKRYAAVSALNQAIPFICKRLEQEFGKEHVHYCSGRDTSMVRRSFGYHKTKEEQLHEVDAWCIAVLSLRQIPEKAPEFDHVHELLQFRRQDRSRIKSQTSRAYYHEGKKIAKNRKKAEGQRED

SEQ ID NO: 8598 - protein, 428 aa, unidentified
  REGION 1..428: note = Ga0307928_10027261
MSVFVYVLNMRGQPLMPCKPRKARILLKEGKAKVKKRTPFTIQLKIPTGENKQKLNLGIDPGSKKVGTAVRRSGTKEIVYASEVTLRDNITKKLKQRSNYRRTRRNRKTRYRQPRFLNRTRSEGWLPPSVVSKINSIKKELDYILSILPITRITFEYSKFDIHRLTNKFVKGFWYQKGDMYGYESTKAYVLERDNYKCQACKGKKKDKRLEIHHVIYRRNGGTNKPSNLLTLCSTCHDLVHAEKLILTNAQLKNCKNTVDATQVSIISKRIWKYLQTLKPKYILAKTYGYSTKVKRRLLKIRKSHTLDAVAISYGRNKHYRKGLRKPRIKSNFYHKICAAKGDYQQTKGKHSEKKIPTGKIQGFRKFDLVRYLGKIYSIKGRRSTGYAELMDQTVKNIRLRPIPKFGNLTRLQSRTSWIIFPNTVQNI

SEQ ID NO: 8599 - protein, 447 aa, Halolactibacillus sp.
LRVFVKSMRGFNLDPCKNQKARQLLKEKKAKIISYKPFTIQMLIATGETTHESHVGIDLGAKYTGVAITQEDRVLAKGDIECRQDIKALLETKKIYRRSRRSRKTRYRKCKCKHKTTRVYSNKKGKWVKKKTSFTSPRPKSWLPPSLESRTQNLFFWIDTFTSLLPKVKLHIEVGKFDVQKMKSPDIQGKAYQEGDTFGYHDVRYFVFARDHYTCQVCKKKGNILNTHHIIYRSHGGSDAPSNLISVCTDCHTSDNHKRGRILWHWMEKRKKVPTYKEPPFMNALRIRTFRRYPDARIIYGSETTPRRKELHLEKTHYNDAIAISGIQHIKENPHTIFYIKQFRKKKRSLHEATARKGRKNKNLTQKRNKKNTKEMKGIHLNDTVRIFGKIGFVSGFTTTGIYIKDIHNAYITKPGKTYKQVGFKDVTVENHNNNWQFISHLAPDGA

SEQ ID NO: 8600 - protein, 413 aa, unidentified; identical to SEQ ID NO: 3924

SEQ ID NO: 8601 - protein, 427 aa, unidentified; identical to SEQ ID NO: 7268

SEQ ID NO: 8602 - protein, 512 aa, unidentified; identical to SEQ ID NO: 6787

SEQ ID NO: 8603 - protein, 420 aa, unidentified
MQYVYVLNKHGEPLMPCSPRKARLLLKQKKACVVKRTPFTIKLLYGSTGYKQPITLGVDAGSKHIGISATTEKHELYREEATPRNDVVDLLSARRAFRRSRRNRKTRYRAPRFDNRVHSKHEGWLAPSVEVKIREHITLIKRVCRILPITLVRVETAEFDTQRLKAMLEGKPLPVDTDYQLGEMYDEYNVRQYVLKRDNYTCQCCGAHPTKTKAVKLHVHHIETRRTGGNAPNNLITLCTVCHKALHAGKVTLDGKKRGKPLKDAAFMGVMRKTLMERLRKELKIPVQGTYGYITKYIREKNGIPKSHTNDARCISKNPLAIPCDTCYYTKAVRHHNRQLHKATILKGGIRKANQAPYIVKGYRLWDKVSYNGTECFITGRRTSGYFALKKLDGTVVSNSISYKKLRLLEVATNYITERK

SEQ ID NO: 8604 - protein, 624 aa, Streptomyces sp.; identical to SEQ ID NO: 4253

SEQ ID NO: 8605 - protein, 431 aa, unidentified
MPNKVYVINKHGRPLMPCSPAKARHLLDAGKAKVKKRTPFTIQLVYGSSGYTQEVILGVDDGSKTIGISASTKKEEVFAADVTPRNDVVNLLSARREFRRARRNRKTRYRKSRFDNRVRSKRKGWLAPSVEVKIQEHITSIKMVCRILPVSKVVIETAEFDLQLLKAIEEGKPVPQGEDYQQGEMYGHYNVRQYVLWRDNYTCQCCGAHATKKKEVRLHVHHLESRKVGGDAPDNQVTLCESCHEKLHKGLITEGDFKKRKRRSTRDATFMGIMRKTLMQRLCSELPIPVVETRGYITKATREKLLVLPKSHTNDALAIAQGKQGFNVGYLPEILQIDKIYTIRPVRHHNRQLHKAAILKGGIRKSNQAGKYVFGYRLFDKVQFNGQDCFVWRRRTTGIFTIKTINGKMIKDGISFKKLKLAEKSTSYLIA

SEQ ID NO: 8606 - protein, 447 aa, unidentified; identical to SEQ ID NO: 5316

SEQ ID NO: 8607 - protein, 465 aa, unidentified
MSTCVCVLSNSGKRLMPTFRLGKVRHLLKDGKAKIVKHHPFTIQLLYDGKTNTQPIEICEDVGYNYIGISVKSQSHEYVSAQYDTLQDEKACHDSCRKLRRSRRNRLRYRKPRFDNRKRGEGWLAPSLRHKKELNVNVVKMYCAVMPITHATVEVGSFDTMLVKAIQEGKAIPEGADYQKGPRYNLATLREAVFYRDNYTCQVCGRKVADGAILHMHHMFYWKGRHGDSLNELLTVCEKCHTPANHQKGGKLYGFGENVKFADLSGAAFMNTVRWQIVNELYAAFGKPFVTITYGAMTKEKRIALRLEKSHNNDAYAMGEFHPNCRCTFEHYEKVRRNNRILEKFYDSRYIDIRTGEIATGKELFNGRINRNHKKDSENLHRYRGKRTYAGHRALLRKKVNLNPGDLVSLNGEVLVVHSTHTNKKGAVNVEFKTPGKSGQKSASLKKLKIVKAADSMHSAWEKIS

SEQ ID NO: 8608 - protein, 420 aa, unidentified
MQYVYVLNKHGEPLMPCSPGKARLLLKQQKACVVKRTPFTIKLLYGSAGYKQPITLGVDAGSKHVGLSASTEKRELYSEEFTPRSDVVELLSTRRQNRRSRRNRKTRYRAPRFDNRVHSKHKGWLAPSVEVKIQEHITIIKRICKILPISLVRVETAEFDTQRLKAMLAGKPLPIGTDYQLGEMYDEYNVRQYVLKRDHYTCQCCGAHNTAEKVVKLHVHHFESRKVGGNTPSNLVTLCTTCHKNLHKGKATLDGKERGKPLRDAAFMGIMRKTLMARLKEELPIPVQGTYGYITKMSREQNDIKKSHVNDARCISKHPLAEPCSVCYRTKAIRHHNRQTHKANFSKKGIRKRSQMPYLVEGFRLWDKVLYKGQECFVSGRRSSGSFALKKLDGTSISKGVTFKKLRLLEPATNYLIERM

SEQ ID NO: 8609 - protein, 426 aa, Lactobacillus sp.; identical to SEQ ID NO: 3294

SEQ ID NO: 8610 - protein, 431 aa, unidentified
MPNKVYVINKHGRPLMPCSPAKARHLLDAGKAKVKKRTPFTIQLVYGSSGYTQEVILGVDAGSKTIGVSASTKKEELFAANVIPRNDVVDLLSTRRESRRARRNRKTRYRKPRFDNRVRSKHKGWLAPSEEVKIQEHITAIRRVCGILPVSKVVVETAEFDLQLLKAIADGKPVPQGEDYQKGEMYGHYNVRQYVLWRDDYTCQCCGTHATKKKEVRLHVHHLESRKTGGDAPGNLVTLCDSCHEKLHKGLITEDDFKKRKRRSTRDATFMGIMRKTLMQRLCSELPIPVVETRGYITKATREKLLVLPKSHTNDALAIAQGKRGFNVGYLPGIIQTDKIYTIRPVRHHNRQLHKAAILKGGIRKSNQAGKYVFGYRLFDKVQFNEQDCFIWGRRTTGIFTIKTINGKMIKDGISFKKLKLVEKSTSYLIA

SEQ ID NO: 8611 - protein, 456 aa, unidentified; identical to SEQ ID NO: 7423

SEQ ID NO: 8612 - protein, 512 aa, unidentified; identical to SEQ ID NO: 4049

SEQ ID NO: 8613 - protein, 456 aa, unidentified
MNTCVCVLSNNGERLMPTFRLGKVRRLLKDGKAKIVKHHPFTIQLLYDSKTNKQPIEICEDVGYNYIGISVKSESHEYVSAQYDTLRDEKEHHDDCRKMRRARRNRLRYRKPRFDNRKRSEGWLAPSLEHKKQLNISLVERYVSVIPITHATVEVGSFDTMLLQAIQKGETKPEGADYQEGPRYNLATLREAVFYRDNYTCQVCGRKITDGAILHMHHMFYWKGRHGYKLDELVTACEKCHTPANHQKGGKLFGFGEDKEFADLSGAAFMNAVRWQIVNALHTTYSKEFVTITYGAMTKEKRIALQLEKSHNNDAYAMGDFHPVHRCGFRHYQKRRRNNRVLEKFYDATYIDARTGNKAKGKELFNGRISRNHKKDSENLHKYRSEKVSKGRRSIRKRRYAIQPYDTVRLKGKTYITSGCHNKGTRLLIPVNGKSKSVTISKVQVVCHAGPWIQII

SEQ ID NO: 8614 - protein, 423 aa, Deinococcus sp.; identical to SEQ ID NO: 5121

SEQ ID NO: 8615 - protein, 442 aa, unidentified; identical to SEQ ID NO: 2637

SEQ ID NO: 8616 - protein, 417 aa, unidentified
MPCSPAKARLLLKERKAIVKRRTPFTIQLTIATGEARQPVALGVDSGYKHIGLSATTEKAELYASEVELRQDITDLLSARLALRRSRRSRKTRYRAPRFDNRVASKRKGWLAPSVENRIAAHMSRVEAVMRVLPVTAITVETAAFDTQLLKNPDIAGAAYQQGEQLGFWNVREYVLFRDGHVCQHCRGKSKDPILNVHHIESRRTGGDAPNNLITLCETCHKAFHRGEIKLKVRRGKSFKAETFMGIMRWTLFERLKKAHPELRVRNTYGYLTKHKRISYGIAKSHCADAYCIADNLGAKRLEGFFFQKQTRKHNRQIHKLSILKGGLRKKNQAPYEVKGFRLFDKVICKGEEAFIFGRRTSGSFDVRRLDGTRISAGINYKKLRLLEPRTTYLTEFRKEAALPPLHKCRGFRAEFL

SEQ ID NO: 8617 - protein, 249 aa, unidentified
LPVGTDYQLGEMYDEYNVRQYVLKRDNYTCQCCGAHPTEKKPIRLHVHHIESRHVGGNAPNNLITLCVACHKALHEGKITLDKGKKRGKPLRDAAFMGIMRNTLLARLKDELNIPVKQTYGYITKLLREKNKIPKSHVNDARCIAKAPNAKPCDTMLYTRALRHHNRQIHKAKILKGGIRKKNQAPYLVKGFRLWDKVRYNGEECFITGRRSSGYFALKKYDGTVISNSASYKKLMLLEAATNYITERS

SEQ ID NO: 8618 - protein, 490 aa, unidentified
MYVVYVLDRQGKPLMPTKRFGHVRRMLKTNKAKAISTKPFVIQLQYESTDFVQPLYGGTDPGRTNIGEAVLNNKGEVVYAAYVITRNKEIPKLMADRATHRRASRRGERLRRKRRAKANGTMTCFPEGRKLSGYKDGVLELKGIINTESRFNNRKRPARWLTPTARQCIQTHLNMVQNICKILPVTDWTLEYNRFAFMRLEDDSVRGWDFQNGRLKGYASKEDYIYALQGGVCICCGASIEHYHHIKPRHKGGSDTPENLVGLCSVCHTEIHTGKRSLDKIGKYKEYAGTSIVNIAIPFIWDGIVKMFGDKAHICEGQETAELRKANSIPKEHFADAVCIAGIGSGIIPQYDDNQPFELRQFRCHDRSSINAQVERTYLDGKTVVAKNRKPRFEQKGDALSDLQSKMTKEHGELAARRVVSKFVVKKSYRRYNAYERIKPSAVFVFNNKKYLLSGQLTNGRYYRAFGEGTKNFPSRNCELVSFGCSLTYM

SEQ ID NO: 8619 - protein, 430 aa, unidentified
MPKVYVLNRHGRPLMPCTPAKARHLLDAGKAKVRHRTPFTIQLLYGSTGYTQEVILGVDAGSKTIGLSAATETEELFSAEVKPRNDVVELMSARRQFRRARRNRTTRYRKPRFDNRVRSKHKGWLAPSVEVKIQEHMTAIRRACAILPVSKVVVETAEFDLQLLKAVAEGKPVPQGEDYQKGEMYGHYNVRQYVLWRDSYTCRICGAHGSVRKGVPLHVHHLESRRVGGDAPDNLVTLCTACHDKLHKGIIMVADIKKRKRRSTRDTTFMGIMRMTLLRRLWEQLPVPVVETRGYITKATRENLLVLPKSHTNDALAIAHGPQGFRAEYLPNIRQADRLYTIRPVRHHNRQLHKATILKGGVRKANQAEKYICGFRLYDKVLYNGIECFVWGRRTSGSFLLRQLNGEKVKDGVSYKHLKLLERSQSYLVA

SEQ ID NO: 8620 - protein, 476 aa, Ferroplasma sp.
MEKNMKEKQKLDWRNTYTPTDAPQVRGNCDHALNREETLSVHGLKTPSNNPDVDIQSGMAGQDLRVPVINMRDEPLMPTTPEKARKLLKEKKAKVAFSNPFTIQLLYATGETKQPVTLGIDAGYKHIGFSALTEKRELISGEAVIRTDIPKLNEEKAMYRRKKRNKLWYRKPRFMNRGNNKEGWFAPSIEHKLETHIRLIEKLKRILPVSNTVIEVASFDTQKMKNPEISGIEYQQGELQGYEIREYLLEKFHHICVYCGKTGVPLEIEHLTPRSRGGPDTVNNLAISCHECNQKKNNLTAEEFGYPEVRKRALITMRDAAFMNTVRWKLTQLAGAGYTFGYITKKNRISLGLDKSHANDAFVIAGGTNQARTSPFTITQRRRNNRSIQTNRKGFRPSIRRKRYAFQPGDIVVYDHERFSVVGMHNYGKSIVIKGGGKKMDINTKKVKLVKYGKGLQFAPQFLPTLSDGVSLGGVR

SEQ ID NO: 8621 - protein, 425 aa, Tolypothrix sp.
MQNYVFVIDQNKQPLNPIPAARARELLTKQKAAVYRMYPFVLILKHAVDNPNPKPLTIKLDPGSRFTGITILDENKVIWAAELEHRGWQIKNSLLSRRSLRKCRRSRKTRYRQPRFDNRKRPEGWLPPSLMHRVLTVETWVKRLCLYSPITQIAMELVKFDTQKMQNPEIDGVEYQQGERAGYEVREYLLEKWGRKCAYCDKEDVALQIEHIHPRSKGGSNRVSNLTLSCERCNIKKGTKFIDEFLHKDASRLEKIKRQAKQPLKDAAAVNSTRWTLFRTLKNILPTTTGTGGQTKYNRTRFELAKHHWVDAACVGEVENLNLLTQQPLKIKCTGWGTRQMCGTDKYGFATRHRERKQIHFGFKTGDIIKAVVTSGKKVGIYIGRVLCRKTGSFDIATKSGRVAGVSHRFCISIHKKDGYSYGFG

SEQ ID NO: 8622 - protein, 518 aa, unidentified
MANLKLIDELLEKTEYIYVLGIDGKPQMPTNRKVRVRSLFKSGMAKIVDTVPFTMQLLYENKPVLQPITIAEDPGRTNIGAAVLTQLGDLVFSAVVETRNKSIKKLMSDRKAHRQASRHGERKARQRLAKKYKSMIKAGMIMRKLPQYAADKFVTCKVIKNTEARFCNRKRMPDWLTPTVNHLVQTHINLIKKVEKYLPITDVAIEVNRFAFMQMENPDASGVDFQNGPLKGFDDVKAAIREQQHGKCLMCKNDIEHFHHIIPRSKGGSNTIQNQVGLCKKCHAKVHTDAEFQAKLKDKKEGLIKKYGALSALNQAVPFICKELLKIYGAEHVHFCTGKDTSLIRSSLGYDKTKDNQMHEVDAYCICLAAIGADKTKRPDFNNVFKIKQFRRQDRSIINYQRERTYYLDGKKIATNRKPRFEQKGDALSDWYSEQVKLKGKKYADKLTGRITVKKSTRGYNSKDRVMPGTIFYYGGKRLVLSGQTTRGKYYKAYGDPKTNYPAAKCQIYKHNKGFVFI

SEQ ID NO: 8623 - protein, 434 aa, Anabaena sp.
MSKVFVLDTKKRPLDPINPAQARQLLRNKKAAIFRQFPFTIILKKSCPDSPVSSLRLKIDPGAKFTGMALVNDSTGEVVFAAELKHRGFAIRDALTSRRPRRQLRGSRRARKTRYRQPRFLNRNLPEGWLAPSLQSRVENIKTWVERLRKLAPIEDISQELVRFDMQLMANPDIQGKEYQQGTLAGYESREYLLEKWGRQCAYCGVKDVPFQVEHIHPRAKGGSNSITNLTLSCEKCNTKKGTKDIKDFLKKDPLKLEKILKQAKRPLADAAAVNATRLVLLFVFKATGLPVETGSGGLTKFNRSQQNLEKTHWIDAACVGQSTPILNIKGVKPLLITANGHGTRQSCRTDKYGFPSRYVPRFKFVNGFQTGDIVKAVVTKGKKIGAYIGRVAVRTSGSFNISTISGLIQGISYKYCKSIHKKDGYEYGKSKIC

SEQ ID NO: 8624 - protein, 553 aa, Streptomyces sp.; identical to SEQ ID NO: 4116

SEQ ID NO: 8625 - protein, 509 aa, unidentified
VPDCHVPAERKQMKVYVIGWNGLGLAPTTPRKARLLLSSGRAEVAFRQPFTIRLNYKTGCAHPDKMSLGIDTGSQHIGASVISLAEEIVISKEEYALRSTMEKRSLLETRKTLRRGRRFRNIRYRHPKFRPGTKRTYLDVPIKRNGHLTHWKEESNDFDSSRPEGWLPPSMQSKLDHHVRIISRYRNALPPDTTIRIEVGRFDVQHMENSQIRGEMYQHGARYESENLKAYIFSRDHYTCQCCQKKAGTRRDDGTTVRLIVHHIDFRSKGASDNPKRLITVCDKCHTGAAHKPGGVLYDWMTKGKTVARGYRDTAVMNILRRRLWKAFPDAEFTYGNITAADRKTLGLGKAHCNDATAIAAHGLEKIRDIPDTTYYRQIRKQKRSLHESTPRKGRKEPNRSAKRNAKNTCRSGNLYLNDKVRIAGQNGWICGFSGTSSVYVKNMEDEYIRMPGKTHKLIPAKGLTARTHCNNWAVYNTKTILYEGHTEALLDLTRLAGLKPGGALIEIL

SEQ ID NO: 8626 - protein, 429 aa, Leptolyngbya sp.; identical to SEQ ID NO: 8055

SEQ ID NO: 8627 - protein, 456 aa, unidentified
MAVFVLDKKKQPLMPCSEKRARLLLQRGRAVVHKRYPFTIRLKDRVGGKTQPLRLGIDPGSKTTGLALMRETEGEQRHVLCLFELIHRGFQIKKALQQRAAFRRRRRSANLRYRAPRFNNRTKPKGWLAPSLQHRVDTVTAWVKRLSRLAPVTAISQELVRFDTQKLENPEISGVEYQQGTLLGYEVREYLLEKWERECAYCGTGDTPLEIEHVVPRSRGGSNRVSNLTLSCHPCNAEKDSQTLTDFFATNKGLKKRLKANGLSADAQLERVQRQLKQPMRDASAVNATRWALFSALKTTDLPVAVSSGGRTKYNRQRLNIPKTHALDAACVGAFGKLYDWTVPTLTIKAMGRGSYQRTRLTKHGFPRGYLMRQKQVHGFQTGDMVRAIVPTGKKAGTYTGRVAIRKTGSFNIQAEYGAVQGISHKYCTLIQRGDGYGYHFTPFTHLTGGAGQAVA

SEQ ID NO: 8628 - protein, 414 aa, unidentified
MPCSPAKARLLLKEKKAIVKRRTPFTIQLTIATGETKQPVSLGVDAGYKHVGLSASTEKAELYASEVELRQDITDLLSARRALRQSRRNCKTRYRAPRFDNRIRTKRKGWLAPSVENRINAHLSRIEAVLRLLPVTTITVETASFDMQLLKNPEISGKEYQEGEQLGFWNVREYVLSRDGHVCQHCHGRSKDPVLNVHHLESRRTGGDSPGNLITLCETCHKELHRGEITLKAKRGQSFRAETFMGIMRWEVLDRLKASHPKLEVQNTYGYRTKHARIVNGIAKSHCADAFCIAGNLGAERLGEFFFQKQTRRNNRQIHKLSVLKHGLRKRNQAPFEIKGFRLFDKVACKGEEGFIFGRRSSGYFDVRKLDGTHISAGISYKKLRLLEKRQTYITEIRKEEALPPLSEGRGLRA

SEQ ID NO: 8629 - protein, 513 aa, unidentified
LKKEAAGHQQGKDCRPVRYGPPYRAGMPDGRRKPERKHMVAVVTSTGKPLMPTSAYRARKLLKKGRAVIFKYRPYFTIQLVDRADGEVQEVEYKSDTGSVHVGISVCTEKKELLSEQRDLLENEPEHHNDRKKNRRTRRNRKRYRKPRFDNRKKKPQVGHEKWLPPTLLHKMEVQVRLYREFCRVVPVTSACFEMGKFDTQALKAVLKGDPVPEGEGYQKGERYGTDTLRAAVFLRDGHTCRFCGRSVKDGAVLHVHHVGYWKGDRTNRPANLASACEQCHTPANHGKNGLLYGKEPDFKTLKDASYMTSVRWIMLDEIKKAAPGVRVSVTYGVTTKKKRQELRLPKSHVNDAFSMASFHPKKRADTEYWKKIPRHDRVLQKFYDAVYLDTRDGSKKKGSEMSNGRISRNHKKDNENLHQYRGHKVLKGHDSIRRGASSLKPGSIVMYKGEKMTVHGTHTRYVTDKEGKTVKKVNVQFTCPASDGRKSASMNKCTPVSRVYNTGWKRYWPDKK

SEQ ID NO: 8630 - protein, 419 aa, unidentified
MVYVISQDGKPLMPCSDPIARLLLKQGKAKVKKRDPFTIKLTYETTNYTQGLTLGVDTGSGTIGTAVSKDNGDIVYMSEVVVRNDITDKMTQRAKYRRNRRNRKTRYRKARWLNRASSIKKDRFSPTMQSKLHSHVREIEYIQSILPITEMVFETGQFDMQLMKNPSLANPKVRPWGYQKGANYGFENTKAMVLNRDNYTCQCCKGKHKDSKLEVHHIVFRSQGGSDEESNLLTLCHTCHKDLHSGKINPKLSGKLKGNLKYATQMNSIRKQLFRFYPNAIETFGYVTKANRLHLGVDKEHYYDACTIATQGNAFNVKSNLYKKKCVSDGDFQKTKGIRSEQPIVTDKICGFRKFDKVRYFGNDYFIKGRMSTGYAILMDIDGNKIDFSTMPRGYKTPKLSNCKRITARSTVMTQVKVV

SEQ ID NO: 8631 - protein, 443 aa, unidentified
LTKDENRPSGRTTGLRAEQAEPAGIRKGDTLKVFVLNMRGKPLMPCSPAKARHMLKAGKAFVVRRTPFTIKLTIATGETKQDVTLGVDAGARHVGISATTEKEEVFASEVALRQDITGLLADRLAFRRARRNRKTRYRAPRFNNRVRSKHKGWLAPSVENRIQAHISRIEAVCRLLPVTKIVIETASFDIQKIRNPEVEGTGYQQGDQLGFWNVREYVLFRDGHICQHCRGRSKDPILNVHHLESRKTGGDAPNNLITLCETCHKAYHAGKIKLKVKRGHSFRAEAFMGIMRWTLLNRMRKAHPSLPVENTYGYLTKHKRIALGLPKTHCADAFCIAGNLKALRRGDFLFQQQTRKHNRQIHKCSILKGGVRKLNQAPFLVKGFRLFDKVRIGGQIGFVFGRRVRGTFNIRRLDKTVIGTDINCKKLSLLETRKTFLTELRKE

SEQ ID NO: 8632 - protein, 428 aa, unidentified; identical to SEQ ID NO: 7923

SEQ ID NO: 8633 - protein, 557 aa, unidentified; identical to SEQ ID NO: 6919

SEQ ID NO: 8634 - protein, 529 aa, Burkholderia sp.; identical to SEQ ID NO: 4276

SEQ ID NO: 8635 - protein, 237 aa, unidentified
MYDEYNVRQYVLKRDNYTCQCCGAHTTAKKTVKLHVHHLESRKVGGNAPSNLITLCTTCHNNLHKGKITLDGKKRGKTLRDAAFMGIMRNTLLTRLRNELNIPVQNTYGYITKLLREQNDIKKSHVNDARCISKHPLAKPCSVCYRTKAIRHHNRQIHKAKILKGGIRKANQAPYIVKGFRLWDKVLYNEQECFISGRRSSGYFALRKFDGTTITNSISFKKLRLLEPATNYLIERK

SEQ ID NO: 8636 - protein, 460 aa, unidentified
MVAVVDLFGKPLMPTNEYRARKLLKQKKAKIFGYRPFTIQLTERKSAEIQPIELCMDTGYIHIGISAKSERHEYLGMQIDTLTDEKLKRDDKRQYRRQRRNRKRYRAPRFDNRRRKEGWIAPSLEHKKEIHIDAIQRICKVMPITDITLEIGNFDTHVLKAVEEGKPLPQGSDYQHGERYGIATLREAVFLRDGYKCQCCEKSVKDGAILHVHHIKYRSQGGTNRMSNLITVCDKCHTQKNHKPGGKLWNWKPKLAEFKGASYMTSIRWTLYNEVTALLPNSSVHITYGAKTKESRRKLDIKKSHVNDAYVMGLFCPKHRTKPVYFKKKRRNNRVLEKFYDAKYIDSRDGKKQSGQELFNGRINRNHRKDSENLHLYRKQKVTKGKRSIRNKHYPIQPHDILLYQKKKYENAGCHNNGSRVILLPEKKSVALKQLTIYQYAGGYYRVPYESNKKEERTGS

SEQ ID NO: 8637 - protein, 469 aa, Burkholderia sp.; identical to SEQ ID NO: 4167

SEQ ID NO: 8638 - protein, 431 aa, Phormidium sp.
MSNFVFVLDTNKRQLDPVHPGKARRLLSTGNAAVFRRYPFTIILKQAYPEIPVQDLELKLDPGSQVTGIAVVQGTKVIFGAELEHRGQQIKDALLSRRQLRRSRRNRKTRYRQARFLNRTRPKGWLPPSLQHRVDTTMTWVNRFRRLAPIARIAQELVRFDLQLIQNPEISGIEYQQGELQGYEVREYLLEKWNRKCAYCGAKNVALEVEHIHPKSKGGTDRVSNLTLACHSCNQSKSNRDIRDFLSSKPDVLNRILNQAKSPLKDAAAVNSTRWALFNALKQTGLPVATGTGGQTKFNRTRLDLPKTHWLDAASVGKIDSLKVLTTKPLLIAAKGHGTRQMCGTDKFGFPKRHRSRVQIHKGFQTGDIITATVTKGKKIGSYVGRVLCRTSGSFDVTTQSGRVSGISHRYCQPIHKRDGYAYAFAHTIGD

SEQ ID NO: 8639 - protein, 416 aa, unidentified; identical to SEQ ID NO: 6135

SEQ ID NO: 8640 - protein, 414 aa, unidentified
MVYVINKQGQALMPTERFGKVRRLLKNSLAHVVCRIPFTIQLDYDTTDYTQPVSLGVDAGSKHIGISATTSEKELYAADVELRNDIVDKLSTRRELRRTRRSRLRYRKARFNNRVSSKRKGWLAPSVENKIQTHLTVVEKIHKFLPITNIVVETAAFDIQKINNPSISGSGYQQGEQLDFFNVREYVLFRDNHTCQHCKGKSKDKVLNVHHIESRKTGGDSPKNLITLCETCHKAYHRGDFELNVKRGKSFRDSAFMGIMRWSFYDRLKNIYPSVSMTFGYITKNARITNNLPKDHYVDARCISGNPVAKPLGYYFYQKKVRCQNRQIHKSNFLKGGRKKLNQAPFLVKGFRLFDLVEYKNDLYYIFGRRSSGSFDIRKLDGTKVNKGSINCKYLRLIDKRRSILTEKRMQVNL

SEQ ID NO: 8641 - protein, 466 aa, unidentified
LSIKPLINIGEGVIYSSICTGLSLQTYQKRKEVPCMVYVLDINGQPLMPTTRHGKVRRLLNSHLAKVVKRCPFTIQLLYQSTKEIQPVSLGVDAGSKHIGMAATTEKKVVYQEELSPRNDVVKLLSARRTLRRTRRNRKTRYRKPRFNNRVHSKHKGWLAPSVEVKIQEHITAIKRICQILPISEIHVEISEFDLQRLKAMEEGRTLPVGTDYQLGEQYDFYNTRQYVLHRDGYTCQCCGTHDNNIKLHVHHIESRQTGGNAPSNLITLCEHCHKALHKGKFELPKGKKRGKTYRDATFMGIMRKTLLERLKKEIDVPVAGTYGYITKYWRERAGLEKSHINDAICISKYPYAKPLDTYYLTKVVRNHNRQIHKSNFSKGGIRKRNQAPYLIKGFRLFDKVLYQGKEYFIFGRRATGYFDIRTLDGTKVNKGSISYKKLRIQDTAKAYLKEARAIPHMNKFTCVLA

SEQ ID NO: 8642 - protein, 456 aa, unidentified
MSTCVCVLSNSGERLMPTFRLGKVRHLLKDGKAKIVKHHPFTIQLLYDSKTNTQPIETCEDVGYNYIGISVKSESHEYVSAQYDTLQDEKEHHDDCRKYRRTRRNRLRYRKSRFDNRKRDKGWLAPSLEHKKQLNISLIERYVSVIPITHVTVEVGSFDTMLVKAIQEGKVIPEGADYQKGPRYNLATLREAVFYRDNYVCKVCGRKATEGAILHMHHMFYWKGRHGYQLDELVTVCEKCHTPANHQKGGKLYGFGKDKKFANLSGAAFMNAVRWQIVNALYATYGKEFVTITYGAMTKEKRIALQLEKTHNNDAYAMGDYHPARRCKFRHYQKRRRNNRVLEKFYDATYVDTRTGNKAKGKELFNGRISRNHKKDCENLHKYRSKKVSKGRRSIRRQHYAIQPYDTVRLEGKTYITSGCHNKGTRLLIPVNGKSKSVAISKFQVVCHAGAWIQII

SEQ ID NO: 8643 - protein, 431 aa, Ktedonobacter sp.
MSYVFVIDQEKRPLDPVHPGRARKLLSSGKAAVYRRFPFVLILKHPVSEAHPQPLRLKIDPGSKTTGLAVLNDTSGQVLWAAELVHRGEEVHQALQKRAGVRRGRRSRHTRYRAARFSNRRRKRGWLAPSLCSRMQNVQTWTRRLMRWCPLGAISYEAVRFDTQAIQNPEIKGVAYQHGTLAGLEVKEYLLLKWRHKCVYCQKGDIPLEVEHIVPKRRGGSDRITNLTLACEACNQQKGSQTAQAFGFPHLQAQALQPLKDAAAVNSTRWALYERLKATGLPIEVSTGGQTKWNRKQRGIPKSHWLDAVCVGPSTPERVQWQHVIPLLITARGRQCRQLCNVDGWGFPRSRPKGPSKVFGFQTGDMVQAVVTRGKRMGTYVGRVAIKTDGYFKIIGAHGMVEGIHARYCSPLHRVDGYEYQKGSAALPPQM

SEQ ID NO: 8644 - protein, 430 aa, unidentified; identical to SEQ ID NO: 4817

SEQ ID NO: 8645 - protein, 512 aa, unidentified; identical to SEQ ID NO: 4446

SEQ ID NO: 8646 - protein, 414 aa, unidentified; identical to SEQ ID NO: 4015

SEQ ID NO: 8647 - protein, 414 aa, unidentified; identical to SEQ ID NO: 6490

SEQ ID NO: 8648 - protein, 449 aa, Anoxybacillus sp.; identical to SEQ ID NO: 3571

SEQ ID NO: 8649 - protein, 512 aa, unidentified; identical to SEQ ID NO: 4031

SEQ ID NO: 8650 - protein, 423 aa, unidentified; identical to SEQ ID NO: 3951

SEQ ID NO: 8651 - protein, 394 aa, Psychromonas sp.
MRVFVINKHGESLMPCRPRKAKILIREGKATVIKRNPFTIQLKFGSAGYKQPLTLGVDTGHGEVGISVLSDTKEVFSAIATMRNDISDKMTTRKMYRRQKRNKLRYRAPRFLNRAASTRKGRLAPSVQWKVDAHVRLINQCRSLMPVTKTVLETGTFDMVKMNNPNISNEQYQQGVQYGFENVKAYVLARDNYKCQSGKKGCCDKLEVHHVIYRSQSGSDAPSNLKTLCSKHHKALHDNKWSLTSTKQKSLKPATTMNIIRAQLLSIFPDAIETFGYVTKANRYHHNIEKSHSNDAFVIAGGSNQERSTERKITFKRKNNRALQKNRNGFAPSIRKQRYTIQPQDIIEWNGIKCIAKGIQNKGAYLAFMHGTKRLVKNIKTIRLVFQNKGIVYA

SEQ ID NO: 8652 - protein, 454 aa, unidentified
MRINSVSPARQTSKTLPRQTSHESRRDATMSNYVFVIDTNHRQLNPSTPGVARSLLNARKAAIYRRYPFTIILKKEVTGLVEPCQLKIDPGSRATGLAILQGNRVLWGAELTHRGQSIKNSLESRRSLRRGRRGRKTRYRQPRFLNRTRPKGWLAPSLMHRILTTMTWVNRLIKLCPIQSIAQELVRFDTQVIQNPEISGTQYQQGTLYQYETREYLLEKWGRQCVYCGQEDTPLEVEHIVSRSKGGSNRVSNLTIACVPCNQKKSNRSIEDFLSGKPDLLKRIKAQAKAPLKDAAAVNATRWKLFNALKEMGLPVSVGTGGQTKFNRKQQDLPKAHWIDAAATGKDIPELEFCTSQPLLIQCSGHGTRQMCGTDKYGFPIRYRSKKRIHYGFQTGDIVKAVVTQGKKIGSYMGRVLCRKSGNFDISTKDGRVTGISHKYCTHIHKKDGYNYAF

SEQ ID NO: 8653 - protein, 427 aa, unidentified; identical to SEQ ID NO: 4007

SEQ ID NO: 8654 - protein, 427 aa, Oscillochloris sp.; identical to SEQ ID NO: 5291

SEQ ID NO: 8655 - protein, 442 aa, unidentified; identical to SEQ ID NO: 2903

SEQ ID NO: 8656 - protein, 512 aa, unidentified; identical to SEQ ID NO: 3720

SEQ ID NO: 8657 - protein, 408 aa, unidentified
MVYVQDINGKPMMPTTRHGKVRRLLKDKKAVVVNLCPFTIKLMYVTSDYKQEIVLGVDAGTKHVGLSATTKSKELYSSEVILRNDIVDLLSTRRELRRTRRNRLRYRKPRFDNRIKSRRPGWVAPSVKYKIDAHIRVIDNVCSILPISRIVIEVAQFDTQKIKNHDISGKEYQKGDQLGFWNIREYVLCRDGHKCQYCKGKSKDHVLNVHHIESRKTGGNSPSNLITLCETCHKEYHKGNIDLKIRRGKSLRDAAVMGIMKWKLHEELRSKYNRVSMTFGYVTKYNRINHDIEKYHVSDAFVISKNFNAIRLGYYYKVRLVRRHNRQIHKQKIQKGGIKRLNQSPYEVFGFRLFDRVMFENSYYFIFARRKTGSFNIRGIDGENCRDITYKKLKLSRCKRFMIQKETN

SEQ ID NO: 8658 - protein, 431 aa, Citrobacter sp.; identical to SEQ ID NO: 2435

SEQ ID NO: 8659 - protein, 470 aa, unidentified
MSVFVVGLNGCRLMPTSERKARLLLKQGKAFVEQKVPFTIRLNYKTGSTTQLGYLGIDTGSQHIGVSVVREDGTVLHKEEIGLRDSMSKRKLLEAKASLRRGRRYRKTRYRHPKWRPKTKRVYCEVPDRKGRHWQKKKITFTSKRPKGWLPPSLQSKTDHHIRWIKKLQDLLPEGYRLSIELGRFDPARMKNPEIHGDLYQKGPQYDYENVRAYVLDRDRYTCQICKKKGGKLHVHHILYRSHGATDDPQYMDTVCSDCHSAQNHLPGGILYQWMQEQKRFSRGLRDATFMNILRKRLIRAFPEAVFTYGNVTKVDREKLKLPKSHGNDATAIALVKTGITAVKDKESVICIQQVRRKKRSLHEETPRKGRKEPNRTAARNNKNTKAVTVTKRQNKKKVSMTGCLFDRVELNGKKGWISGFTGKSCYVKDADDQYLSTSPKYKQVSLSKLRILHHCGNWIIGAKKTLGKG

SEQ ID NO: 8660 - protein, 415 aa, Bacillus sp.; identical to SEQ ID NO: 2431

SEQ ID NO: 8661 - protein, 418 aa, unidentified
MFVYVLDKNGQPLMPTRRFGKVRRLLRDKKAKVVKHCPFTIKLLYEPETKIVQDIVLGVDTGSKYVGVACVGNDKVLYQAQVELRDDIKKKMDSRRMCRRNRRFRKTRYRKCRFLNRRNSIRKDRYCPTLVSKFYGHVREVEFCKKILPIKDTVLETGKFDTQLMEKPWLQEHKWAYQKGVNYGYVNAREHALVRDKYTCQCCGKRNCRVEAHHIVFRSKGGSNDLENYVTLCEDCHKAVHSGEIDLKLKGKRRGTLRYATQMSIIRNMLLKKYSDAIETFGFVTKENRENLGLKKDHYLDACVIASGGVKFEQSDVLYRKRCVSRQDRQLCKGIRGEKRMPTGKVFGFKKFDKVKYLGKECFIKGRRRNGAFVLMTIDGNPIDFRNMGGKQNPHYKSIDRLNTRKSVLCVSRSVEWR

SEQ ID NO: 8662 - protein, 420 aa, unidentified
MVYVLNKNNKSVMPCSERKARLLLKQGRAVIYRKDVFTIKLINGSYGYKQHITMGIDCGSKHIGISATTNKKELFSANAELRNDIVKLLSDRRMLRRSRRFRKTRYRKHRFNNRIVKNGWIAPSIKQKIQSHFNLVGFLHKLLPITNIVVETASFDIQKINNPSISGVEYQQGEQLDFFNVREYVLFRDNHICQHCKGKSKDKVLNVHHIESRKTGGDSPNNLITLCETCHKAYHRGEFELNVKRGKSFRDAAFMGIMRWSFYEKLKNIYPSVSMTFGYITKYKRIKLGLDKEHYNDAYCICGNLAAKMLSTHHFIRFIPRHSRVLHMQKFSKGGVRRSASASYWLNGGKPSKSGAMFTMFDKVKFNSVVCFISGSSNGFASLRDINWNKVHGCKTTVTVNKLALVSRRRGSMLFGELCG

SEQ ID NO: 8663 - protein, 414 aa, unidentified; identical to SEQ ID NO: 4347

SEQ ID NO: 8664 - protein, 465 aa, unidentified
MSTCVCVLSNSGERLMPTFRLGKVRHLLKDGKAKIVKHHPFTIQLLYDSKTNTQPIEICEDVGYNYIGISVKSQSHEYVSAQYDTLQDEKACHDSCRKLRRTRRNRLRYRKPRFDNRKRGEGWLAPSLRHKKELNVNVVKMYCAVMPITHATVEVGSFDTMLVKAIQEGKAIPEGADYQKGPRYNLATLREAVFYRDNYTCQVCGRKVADGAILHMHHMFYWKGRHGDSLNELLTVCEKCHTPANHQKGGKLYGFGENVKFADLSGAAFMNTVRWQIVNELYAAFGKDFVTVTHGAMTKEKRIALRLEKSHNNDAYAMGEFHPNCRCTFEHYEKVRRNNRILEKFYDSRYIDIRTGEIATGKELFNGRINRNHKKDSENLHRYRGKRTYAGHRALLRKKVNLNPGDLVSLNGEVLVVHSTHTNKKGAVNVEFKTPGKSGQKSASLKKLKIVKAADSMHSAWEKIS

SEQ ID NO: 8665 - protein, 465 aa, unidentified
MSTCVCVLSNSGERLMPTIRLGKVRRLLKDGKAKIIKHHPFTIQLLYDSKANTQPIEICEDVGYNYIGISVKSQSHEYVSAQYDTLQDEKACHDSCRKLRRTRRNRLRYRKPRFDNRKRGEGWLAPSLEHKKQLNIRLIERYVSVIPITHATVEVGSFDTMLVKAIEEGKATPESADYQKGPRYNLATLREAVFYRDNYICKVCGRKATEGAILHMHHMFYWKGRHGNSLSELITVCEKCHTPANHQKSGKLYGFGENVKFADLSGAAFMNTVRWQIVNELYAAFGKDFVTVTYGAMTKEKRIALHLEKSHNNDAYAMGSFHPVNRCAFEHYEKVKRNNRILEKFYDSQYIDIRTGEIATGKELFNGRISRSHKKDSENLHKYRGKRICKGHRALRRKKVALNPGDLVSLNGEILVVHGTHTKKNGSVNVEFKTPSRGGKKSASLKKLKIVKTSNLMHSAWTKVA

SEQ ID NO: 8666 - protein, 416 aa, unidentified
MLVYVLNKHGKPLMPCKPSKARKLLKQGKAKITQREPFTIQLIYGSSGYKQPIALGIDAGNKFIGVSATTETQELFSAEVELRNDIVQLLSERRQYRRSRRYRKTRYRKPRFLNRVRSKNKGWLAPSIENKIQTHLKIVEKVHKILPITKIITEVASFDIQKIKNPNIEGVEYQQGEQLGFWNVREYVLWRDNHTCQICKGKSKDNRLNVHHIESRQTGGNAPNNLITLCETCHNKYHKGELKVKLKRGQSFKDAAFMGIMRWTFYNKLKNIYPNVELTYGYITKNTRITHKLPKSHRIDALCISGNPKAKQLDYWYYIKQVRKHNRQIHKAKILKGGIRKLNQAPYLVKGFRLFDKVKYKGQECFIFGRRSSGYFDLRKLDGTVIHRSASYKDLKLLSKRKTLLWERREGVSSPT

SEQ ID NO: 8667 - protein, 512 aa, unidentified
MSTVYVLNKDGKPLMPTTRGGHVRHLLKEQKARVVRAKPFTIQLLYETNDVVQPLYLGIDPGRTNIGVAVVKANGTAVFTAHLETRNKEIPKLMQDRKKTRRARRTNGRRCRRQRRAKANGTISKKCVKQTTAQNGSVSKRAKDIGVIKRRLPGCEKDVLCIGIKNKETKFTNRTRPEGWLTPTANQLLQTHINLVKKIQKFLPISDVVLEVNKFAFMRLDNPNIQKWQYQQGPLYKKESLESAVSEIQEHHCLFCKKPIDHYHHVVPQHKNGSNTIGNIVGLCAKHHDLVHKDSAWEKKLAKKSTGLYKKYGALGVLNQIIPTLTNELSSLFPKHSFVTNGKSTYDYRAAHGVSKDHWLDAYCIACSVLPSNVCDSNINNHMPYELKQFRRHDRRVLNNENMNRVYTLNNKAVAINRHKAKDQKTVSLEEFRKEHPDDVCKLKVKEHHPTYRNMNRNFPGSVFLVGKQIHVMQGIASSKDGKATKYNDTSATAIAAGKCKFVAKNSGILFV

SEQ ID NO: 8668 - protein, 407 aa, unidentified
  REGION 1..407: note = Ga0307928_10000810
MYVYVVNKSGTPLMPCKPAKAKHLLKADRAKVLRRTPFTIKLLWDCEESVQEVVAGMDTGTKTIGCAATANGKVIYQSEISVRQDVSRKMMRRRMYRTARRGRKLRYRKPRWQNRASMRRKDRLAPSIKSKVDSHLKEKKFVESILPVSKWIVELASFDIHKISNPNVFGLDYQNGALKGFYNVKAYVLHRDNYQCQKCRTKKGKLHVHHIIFKSNGGTDTPSNLITLCIDCHDKLHKGEFEIRGVRSKTKHATEIGIVKSQLKKQFGKFEETFGYETKFKREQILQLLKTHYNDAVAICSEGEIPIFLDFILIKKCVPKGVYKQTRGRRSEQKVQTGKVFGFKRFDKVRYQENIYFIQGRSGAYAVLSDVLGNNVGFLNPKCPKFEKMERLSSRKSWIMQEVVVDA

SEQ ID NO: 8669 - protein, 455 aa, Halomonas sp.
MAVFVLDKQKRPLMPCSEKRARLLLARGRAVVHKRYPFTIRLKERVAGDTQPLRLGIDPGSKTSGLALVREDAEDRHILCLFDLVHRGFQIKKALVQRASFRRRRRSANLRYRAPRFDNRTRPNGWLAPSLKHRVDTVTAWVNRLTRLAPITAISQELVRFDTQKLENPEISGVEHQQGSLLGYEVREYLLEKWGRECAYCGDQDTPLEVEHVVPRAHGGSHRVSNLTLACHACNQGKGNGTLDAFFTTDKGLKKRLKANSLSADARLARVQRELKRPLRDASAVNATRWALFNALKATGLPVTAGSGGRTRYNRQRLGIPKTHALDAACVGPFGRLHGENCPTQVIKGTGRGSYQRTRLTRHGFPHGYLMRQKQVRGFQTGDMVRAIITTGKKAGTHTGRVAVRKTGSFNIQTEQGVVQGISHKHCLLIQRGDGYGYHLTSSIQPKGGAGQAVV

SEQ ID NO: 8670 - protein, 413 aa, unidentified; identical to SEQ ID NO: 2636

SEQ ID NO: 8671 - protein, 415 aa, unidentified; identical to SEQ ID NO: 6534

SEQ ID NO: 8672 - protein, 419 aa, Bacillus sp.; identical to SEQ ID NO: 2411

SEQ ID NO: 8673 - protein, 420 aa, unidentified; identical to SEQ ID NO: 5953

SEQ ID NO: 8674 - protein, 516 aa, Desulfotignum sp.; identical to SEQ ID NO: 7317

SEQ ID NO: 8675 - protein, 431 aa, unidentified; identical to SEQ ID NO: 3801

SEQ ID NO: 8676 - protein, 451 aa, unidentified; identical to SEQ ID NO: 5875

SEQ ID NO: 8677 - protein, 513 aa, unidentified; identical to SEQ ID NO: 5221

SEQ ID NO: 8678 - protein, 470 aa, unidentified; identical to SEQ ID NO: 2825

SEQ ID NO: 8679 - protein, 423 aa, unidentified; identical to SEQ ID NO: 3576

SEQ ID NO: 8680 - protein, 472 aa, unidentified
MNTCVCVLSNNGERLMPTFRLGKVRRLLKDGKAKIVKHHPFTIQLLYDSKTNKQPIEICEDVGYNYIGISVKSESHEYVSAQYDTLQDEKEHHDDCRKMRRARRNRLRYRKPRFDNRKRGEGWLAPSLRHKKELNVNVVKMYCAVMPITYATVEVGSFDTMLVKAIQEGKVIPEGADYQKGPRYNLATLREAVFYRDNYVCKVCGRKATEGAILHMHHMFYWKGRHGNSLNELLTVCEKCHTPANHQKSGKLYGFGEDVKFADLSGAAFMNTVRWQIVNELYAAFGKPFVTITYGAMTKEKRIALQLEKSHNNDAYAMGEFHPNHRCAFEHYEKVRRNNRILEKFYDSQYIAIRTGEIATGKELFNGRINRNHKKDSENLHKYRGKRTYAGHRALLRKKVNLNPGDLVSLNGEPLVVLGTHTRKNGAVNVEFETPSKSGRKSASLKKLKIVKAADSIHPAWEKVSQIIQRKE

SEQ ID NO: 8681 - protein, 275 aa, unidentified
ILPISLVRVETAEFDTQRLKAMLAGKPLPVGTDYQLGEMYDEYNVRQYVLKRDHYTCQCCGAHNTAKKVVKLHVHHLESRKTGGNAPSNLITLCTTCHKNLHKGKVTLDGKERGKPLRDAAFMGIMRKTLMARLKEELPIPVQGTYGYITKMRREQNDIKKSHTNDARCISKHPLAEPCSVCYRTKAIRHHNRQTHKANFSKKGIRKRSQMPYLVEGFRLWDKVLYKGQECFVSGRRSSGSFALRKLDGTSISKGVTFKKLRLLEPATNYLIERM

SEQ ID NO: 8682 - protein, 442 aa, Lactobacillus sp.; identical to SEQ ID NO: 7095

SEQ ID NO: 8683 - protein, 384 aa, unidentified
SQSHEYVSAQYDTLQDEKEHHDDCRKMRRARRNRLRYRKPRFDNRKRSEGWLAPSLEHKKQLNIRLVEQYVSVIPITHATVEVGSFDTMLLQAIQKGESKPEGVDYQKGPRYNLATLREAVFYRDNYTCQVCGRKIADGAILHMHHMFYWKGRHGYQLDELVTACEKCHTPANHQKGGKLFGFGEDKEFANLSGAAFMNAVRWQIVDALHATYGKEFVTITYGAMTKEKRIILGIEKTHNNDAYAMGNCHPAHRCEFGHYQKRCRNNRVLEKFYDATYIDTRTGNKAKGKELFNGRISRNHKKDSEDLHKYRCKKVSKGRRSIRRQRYAIQPYDTVRLESKTYITSGCHNKGTRLLIPANGKSKSVAISKVQVVCHAGAWIQII

SEQ ID NO: 8684 - protein, 429 aa, Salipiger sp.; identical to SEQ ID NO: 7587

SEQ ID NO: 8685 - protein, 419 aa, Moorena sp.
MQNYVFVIDTNKQPLNPISPKKARRLLDKGKAAVFRMYPFTIILKTAIANPTISPCQIKIDPGSKVTGFALVQDDQVIWGMELEHRGGLIKKKLESRSAVRRGRRNRNTRYRKPRFLNRKRPEGWIAPSLEHRVLTIETWVKRLIKFCPINEIWVERVKFDTQKMQNHEINGIEYQQGDLAGYEVREYLLEKWGRECAYCGKQNIPLQIEHIHPKSKGGSDRVNNLCLACEKCNQRKGNRPIEEFLKKKPGLLQKIKNKAKQPLSDAAAVNTTRNRIVKVLKEVKPVVTGTGAQTKYNRTKLGLSKQHWIDAACVGDIKTLVLRTSQPLLVTCKGQGGRQKAALNKYGYPIRHNPLKPIKGWSSGDIAKNLLTGEFGRVNPRSKSNSFNYTAPGKKAISLHLKNLLRVHRKDGYSYGFC

SEQ ID NO: 8686 - protein, 364 aa, unidentified
ISLGIDAGSKHIGVSATTKTRVLYEADVELRNDIVDLLSSRRELRRGRRNRKTRYRPARFDNRRREDGWLAPSIRQKIGTHLTVVENICKILPISRITVETASFDIQKIKNPDIQGAEYQQGDQLGFWNNREYVLFRDNHTCQCCKGKSKDKILNVHHIESRKTGGNAPNNLITLCEICHTGYHKGAIQLPKTVKRGMRFKDAAFMGIMRWAFYEALKQQYEPVGTPVHNTYGYITKHTRIAYNLPKEHYVDARCISGNPEASSNGEYYYQKKVRCHNRQIHKLTVLKGGIRKQNQATYLVKGYRLFDKVSYQGKGYFVFGRRQSGFFDIRTLSGEKVNKGSLSCKKLKFIATRTYYLTERRAV

SEQ ID NO: 8687 - protein, 408 aa, unidentified
MVYVQDIDGKSMMPTTRHGKVRQLLKDKKAVVINTCPFTIKLMYKTSDYKQEIVLGVDAGTKHVGLSATTKSKELYSSEVILRSDIVDLLSTRRELRRTRRNRLRYRKHRFDNRIKSKRTGWVAPSVRHRIDAHIRVIDNVCSILPISRIIVEVAQFDTQKIKNPDISGNEYQEGDQLGFWNVREYVLARDGHKCQHCKGKSKDPILNVHHIESRKTGGDSPSNLITLCETCHKEYHKGKIDLMVKRGKSLRDAAVMGIMKWKLYEELRSRYDNVSMTFGYITKYNRIKYGIEKSHISDAFIISKNFNALRLEYHYKVRLIRRHNRQIHKQKVLKGGVKKPNQSSFEVFGFRLFDRVMFEGNCYFIFGRRKSGSFNIRDIDGGNQRDITYKKLKLLRCKRFMIQKETN

SEQ ID NO: 8688 - protein, 422 aa, unidentified
MPCKPSKARKLLKQGKAKVVKKEPFTIQLLYGSSGYKQKCIIGIDTGSKNIGIAVTTEDGRVIYKAQVELRQDIKENIETRRRLRRARRNRKTRYRKLRFNNRKKPKGWLPPSIRARIEVHYNLIKRLAQIIPVSEIKVEVAKFDVQAILNPNIHGKEYQKGRMHGFDSVKEYVKTRDGFACHYARLRPDIPCSGKLTVDHIIPRSGGGTDNPTNLVCCCEAHNIAKRNMSYKQFTGKQPPKIEDFRSTVFMNVLRDYLVPKLEEIAPVEYTFGLYTRRTRREWGFEKSHINDAIAIAGIKPRWQDNTWYYIRQVRKKKRSLHEEIPRKGRTKPNREAKRNNKNIKEIVAKNGKWCLWDKVKVITTGQIGFVSGFTGKWVYVQDIHGNYLQLSDKYKQINPNQLVLICRNNNYITQQFISIL

SEQ ID NO: 8689 - protein, 327 aa, unidentified
LRVFVLNKRGKPLMPCSPAKARLLLKEKKAIVKRRTPFTIQLTIATGESKQPVSLGVDAGYKHVGLSASTEKAELYASEVELRQDVSDLLSARRALRQSRRNRKTRYRAPRFDNRIRTKRKGWLAPSVENRINAHLSRIEAVLRLLPVTKITVETASFDMQLLKNPDISGKEYQEGEQLGFWNIREYVLCRDGHVCQHCYGRSKDPVLNVHHLESRRTGGDSPGNLITLCETCHKALHRGEITLKAKRGQSFRAEAFMGIMRWEVLNRLKASHPELEVNNTYGYRTKHARIANDIAKSHCADAFCIAGNLGAERLGEFFFQKQTRRN

SEQ ID NO: 8690 - protein, 430 aa, unidentified
MQIQANYVFLLNHDRTFLNMVHPARARELLTKQKAAVYRSYPFAIVLKQQILNPTLKPYRLKIDPGSKWTGFAIQCGEDIVFGMELKHRGLQISADLKQRASVRGSRRSRNLRYRAKRFNRKQPTGWLAPSLRHRVQTVETWIKRFMRYSPITEIEIEQVRFDTQLMQNPEISGVQYQAGELAGYEVKQYLLEKWEQKCSYCGATDTPLEVEHIQAKSKGGSNRVSNLALSCVPCNQKKGNRDIQDFLSGKPDLLQRILAQAKQPLKDAAAVNSTRFAIVRMAKELCDTVKCWTGGRTKFNRTQQGLEKSHSIDAACVGKSGRSIQLRTTQPLIVTCFGHGTRQEIRVNKHGFPAVKNTRVRYKHVKTGDTVKFTLDTDRKNSRAGTYTARVKTPTAKGFEVLINQFRIGVSTIKNVKFIHRQDGYSYRF

SEQ ID NO: 8691 - protein, 442 aa, unidentified; identical to SEQ ID NO: 5088

SEQ ID NO: 8692 - protein, 427 aa, Parasutterella sp.; identical to SEQ ID NO: 4733

SEQ ID NO: 8693 - protein, 426 aa, unidentified
MLVYVLKQNGQPFMPTERFGKVRRLLKEKKAKVVRREPFTIKLLYEPDTDVVQACYCGVDTGSKHIGVAVVGNDRVLYQSQIELRTDIKKKMDRRRGFRRLRRSRTTRYRKARFLNRRNSIKKDRLPPSVKHKVQAHIDEIEFCKKILPVSDENLILEVSQFDIALMKNPSLTSEEVKKWGYQQGFDYGYSSRREAIRHRDNYTCQCCGKKNCRLEVHHIKFRRDGGTDDEDNLITLCKECHDGVHAGTIELNKKPKKSKNLKYATHMSIIRSQLLKKYPDAIEIFGFVTAENRNHLKLKKDHYIDACVIASGGLEFEHSNIILYKRRVSKGDYQLCKGIRGEQIIPTGKICGFRKFDKVVYLRKEYFIKGRMSSGFAVLMGIDGNKVDFSYMSKGLKTPKLLNCKRVSSRSSCLCITQKIVLNIV

SEQ ID NO: 8694 - protein, 413 aa, unidentified
LKVFVLNMRGKPLMPCSPAKARHMLKAGKAVVVRRTPFTIKLTIATGETKQDVTLGVDAGARHVGISATTEKEEVFASEVALRQDITGLLADRLAFRRARRNRKTRYRAPRFNNRVRSKHKGWLAPSVENRIQAHMSRIEAVCRLLPVTKIVIETASFDIQKIRNPEVEGTGYQQGDQLGFWNVREYVLFRDGHICQHCRGRSKDPILNVHHLESRKTGGDAPNNLITLCETCHKAYHAGKIKLKVKRGQSFRAEAFMGIMRWTLLDRVRKTHPELPVENTYGYLTKHKRIALGLPKTHCADAFCIAGNLKALRRGDFLFQQQTRKHNRQIHRCSILKGGVRKLNQAPFLVKGFRLFDKVRIGGQIGFVFGRRVRGTFNIRRLDKTVIGTDINCKKLSLLETRKTFLTELRKE

SEQ ID NO: 8695 - protein, 413 aa, unidentified; identical to SEQ ID NO: 2636

SEQ ID NO: 8696 - protein, 436 aa, unidentified
MTRTLTKQTTQACVLDQHGKPLMPTTRLGKIYRLLKTQKAHIVSYEPFTIQLDYEPDTHIIQPMTLGVDSGAIHSGYSVTNEHREYYSAEVISRDDISKRLSDRRMYRQNRRSRKTRYRKPRFKNRKNKKKGWLPPSLEQKVAVQLNEINHLHRYFPIKTIIVEVAEFDIQKIKNPDISGIEYQQGTLYGYNIRNYLLEKHNRKCFYCGKTVSDFEVEHMLPKSRGGSNRIDNLTLSCHDCNQKKDTLTAEEFIKQTLPAKKAAAKLKQLPNEKRLFEYMAYMNATRWALYNAINEKYANVKMTYGYITKYNRIQAGLPKAHHIDAKCITGFATVPSIDQTVVKVKMRRHNRQLHRSTFSKGHIRKTACLPTITFGFQLYDLVMFDDHFYYIKSRRSSGSFALTSVEGLKDENRNYKKLTLLAHTNAYLTNRYVNA

SEQ ID NO: 8697 - protein, 470 aa, unidentified; identical to SEQ ID NO: 2925

SEQ ID NO: 8698 - protein, 438 aa, Petrotoga sp.
MEKESVQRVFVLDKNKQPLMPCHPARARELLKKGKAAVFRYHPFTIILKDREGGDTQPIQVKIDPGSKITGVTLVGDFKNGKKVIWGAEIHHRGQSIKKALDTRRGVRRSRRNRKIRYRIARFDNRKRSKGWLPPSLISRVENILTWIKRIRRFSPITGISLELVRFDTQKLQDPEINGIEYQRGTLYGYEIKEYLLEKWGRKCVYCGKENVPLEIEHIVPKSKGGSDRISNLTLACHECNQKKGNQSIEEFLTNNPERLKQIKSESKRPLKDTAALNATRWYIFNQLRGNSLTAGKEELPIEVGTGGRTKYNRETQNYPKKHWIDAACVGESGQNVQIEPDMQVLEIKAMGHGMRRMCFVDKYGFPKKYRPKERTYMGYKTGDIVLAVIPKGKNMGIHIGRIAIRHRPSFLLNGVGDVHPKYLTLLQKNDGYGYQIS

SEQ ID NO: 8699 - protein, 414 aa, unidentified
MPCSPAKARLLLKEKKAIVKRRTPFTIQLTIATGEAKQPVSLGIDAGYKHVGLSASTEKAELYASEVELRQDITDRLSARRALRQSRRNRKTRYRAPRFDNRISTKRKGWLAPSVENRINAHLSRIEAVLRLLPVTKITVETASFDLQLLKNPDISGKEYQEGEQLGFWNIREYVLCRDGHVCQHCYGRSKDPVLNVHHLESRRTGGDSPGNLITLCETCHKALHRGEITLKPKRGQSFRAEAFMGIMRWEVLGRLKASHPELEVNNTYGYRTKHARIANDIAKSHCADAFCIAGNLGAERLGEFFFQKQTRRNNRQIHKLSILKGGIRKRNQAPYEIKGFRLFDKVACQGEEGFIFGRRSSGFFDVRKVDGTRISAGISYKKLHLLEKRRTYLTEIRKEEVLPPLPEGRGLRA

SEQ ID NO: 8700 - protein, 443 aa, unidentified
MRVFVLDKNRKPLDPTHPAKARRLLKLGRAKVLRRYPFSIIIKDLEVENCSTHDHQLKIDPGAKTTGLAIIQGNRVIWGAELTHRGEHIREALASRRQLRRSRRNRKTRYRKPRFLNRTRPKGWLPPSLMSRVHNVLTWVKKLIKFCPVTGISQELVRFDTQKMLNPEISGIEYQQGTLYGYELREYLLEKWDRTCAYCGVKNTRLEVEHIKPRSKGGSSRVSNLAIACRDCNQAKGNQEIEQFLSKKPSILKRILSQAKKPLADAAAVNATRWKLHNKLKLIGLPIEVGSGGLTKYNRCRQNLPKTHWLDAANVGKVDTLYIEDYQPLLITAKGHGTRQICRTDKFGFPRLHCSPKKIHKGFQTGDIVRAVVTKGKKIGTYMGRIATRKTGSFDIATAKGKVSGISYKYCQAIHRKDGYSYQFPGTTYVGKGNDSRRFCNQR

SEQ ID NO: 8701 - protein, 466 aa, unidentified; identical to SEQ ID NO: 6823

SEQ ID NO: 8702 - protein, 411 aa, Bacillus sp.; identical to SEQ ID NO: 3701

SEQ ID NO: 8703 - protein, 339 aa, unidentified
LLSARRALRQSRRNRKTRYRAPRFNDRLRTKRKGWLAPSVENRINAHLSRIETIIRLLPVTKITVETTSFDMQLLKNSDIAGKKYQEGEQLGFWNVREYVLFRDGHVCQHCHGRSKDPVLNVHHLESRRTGGDSPGNLITLCETCHKALHRGEITLKAKRGQSFRAETFMGIMRWEVLDRLKASHPKLEVQNTYGYRTKHARISNGIAKSHCADAFCIAGNLGAERLGEFFFQKQTRRNNRQIHKLSILKHGLRKRNQVPFEVKGFRLFDKVACKGEEGFIFGRRSSGYFDVRKLDGTRISAGISYKKLRLLEKRQTYLTEIRKEEALPPLPEGRGLRA

SEQ ID NO: 8704 - protein, 416 aa, unidentified; identical to SEQ ID NO: 7261

SEQ ID NO: 8705 - protein, 442 aa, unidentified; identical to SEQ ID NO: 3234

SEQ ID NO: 8706 - protein, 428 aa, unidentified
LMVCVLDRKKRPLMPCTPKRARILLARGRAVVHRVQPFVIRLKDRRVEDSVLQPIALKIDPGSKTTGMALARVEATEEGEVHRALFLCEVQHRGQRVHDHKVTQANARRRRRSANLRHRAPRFDNRALPQGWLPPSILSRVGNVVTWTDRLIRWSPVTRLEVERVRFDTQLLQNPEIDGVQYQHGELAGWEVRAYLLIKYEYRCAYCGKTNLPFEIDHIRPRSRGGSNRVSNLVLACHACNQAKGSQTASEFGHPEVEARAKAPFKDAAAVNASRYKLVEALRVFGLPLGIWTGGRTRWNRARFGVEKSHALDAMCVGELAGVQVRTPNTLTIMATGRGRHCRTNFTKYGFPSSYLTRKKQVRGFKTGDRVRAVVPASFKTAGTHVGRVQVRKSGSFDIETREREVDGVHAKYCSLVQRADGYDYAIS

SEQ ID NO: 8707 - protein, 456 aa, unidentified; identical to SEQ ID NO: 4017

SEQ ID NO: 8708 - protein, 593 aa, Streptomyces sp.
LRSGSVPSCAHRRREVTRFPAARPSSDQPQSSRSQDQGGAPMTTFPAGEQTHQAVLPQQPALESVRADTPGSRDETAHGHPAPARGTGREHGRGETDRAGTKARRRHAERAAMVAQAAENGSGDAPTHPPEYAGGSGDSRVFVLSKDGHPLMPCHPARARELLRKGRAVVVRQTPFAIRLKDRTRAQSTVDGLQLRIDPGSKGTGLALTDEKWETGADSRVVTVRRGVFSMELQHRGDQIHHSMGQRAGYRHRRRSANCRYRAPQSNNRVVAKGWLPPSLRHRVDTTFSQVNRLCRYAPITEIHLERTAFDTHSMSAGRRLHGAEPTQGPLAGSTARTYLHARWKSACAYCDATGVPLNIDHVRPRSQGGSNRITNLVLACLPCNKAKDNRSVESFLAHRPDRLAKILGQLKEPLRDAAAMNSTQARLMEALETLGRPVHAWPGRLTMANRLTTGLSKTHTLDALSVGHLDHESGDAIVRFPEQVLITKATGRGSYARTTPDRYGFPRLRRSRTKQHFGYVTGDLVRAIVPSGKWTGAWSGRISVRARGQHSLATPQGRLNVSHWNLRLLQRGDGYGYSTQREASPQAPLKNS

SEQ ID NO: 8709 - protein, 447 aa, unidentified
MRVLVLDQHKQPLMPCQPARARQLLRDGKAAVYRRYPFTILLKDRAGGEVQPVSLKVDPGSKTTGIALVAHYQRGAVCILALHIEHRGHAIKESLDSRRAIRRSRRNRKTRYRKARFMNRAKPKGWLPPTLMSRVHNVETWTRRLVSWVPISRADVETVRFDTQLMENPDIQGVEYQRGSLMDWELREYLLARHQHQCAYCNGLSKDPILEREHIHPRSLGGSNRLANQVISCRSCNHHKGNHLPEVWMQKCSQKKDRLNQQRATSMQAILKGRRPSMRDAAAVNATRYATGRVIKQHIPDTEFWSGGRTKKNRSDQGYRKDHWIDAACVGSSGSQVTLETQRCLVVSAKGHGSRQQCSMNRYGFPRTTAKGPRSVQGFKTGDIVRAIVPKGRKQGTHTGRIAVRSSGSFNITCDGQRVQGISYRYCTRLHRQDGYGYYYEPKEKAA

SEQ ID NO: 8710 - protein, 292 aa, unidentified
MQSKLHSHVREIEYIQSILPVTEMVFETGQFDMQLMKNPSLANPKVRPWGYQKGANYGFENTKAMVLNRDNYTCQCCKGKHKDSKLEVHHIVFRSQGGSDEESNLLTLCHTCHKDLHSGKINPKLSGKLKGNLKYATQMNSIRKQLFRFYPNAIETFGYVTKANRLHLGVDKEHYYDACTIATQGNAFNVKSNLYKKKCVSDGDFQKTKGIRSEQPIVTDKICGFRKFDKVRYFGNDYFIKGRMSTGYAILMDIDGNKIDFSTMPRGYKTPKLSNCKRITARSTVMTQVKVV

SEQ ID NO: 8711 - protein, 423 aa, unidentified; identical to SEQ ID NO: 3951

SEQ ID NO: 8712 - protein, 422 aa, unidentified; identical to SEQ ID NO: 5333

SEQ ID NO: 8713 - protein, 531 aa, unidentified; identical to SEQ ID NO: 4901

SEQ ID NO: 8714 - protein, 421 aa, Clostridium sp.; identical to SEQ ID NO: 8171

SEQ ID NO: 8715 - protein, 442 aa, unidentified; identical to SEQ ID NO: 2903

SEQ ID NO: 8716 - protein, 431 aa, unidentified; identical to SEQ ID NO: 3235

SEQ ID NO: 8717 - protein, 419 aa, unidentified; identical to SEQ ID NO: 4209

SEQ ID NO: 8718 - protein, 455 aa, unidentified
MVITLDKHKKPLGFTTEKRARKLMEAKRAVIYRYFPTVIILMDTDVRNIINLPTYRIKIDPGSVYTGIAIICNETNKVMFSIQIEHRAKTITELLQTRKASRRNRRNRETHYRHSKWGNGNGNDRPSKEGNLPPSIKSIGDNIINTVKKLRGFINITECSFEAVRFDSQLMDDPDISGREYQQGTLFGYELREYLLEHYRHTCQYCGGASGDSVLEWEHKIPKSRGGTDSIKNATLSCFTCNRDKGSMTPGEWLEYLKSEESGRLAEIRIRHLENMDTVYGSNRYSAWTNTLRKKTEKELFDIFGEVECSSGGKTKYNREKILKLPKDHHIDALAVGSVPPDGYIDCTNGYILHIKAMGRGTRLRGLINECGIINVKWTDRRKRFNGLQTGDIVRVYIPNGKYSGTYTGRVMIRKSGSHDIRTLDGKLVTGTKLSVYRVLQHADGYSYKQERIIV

SEQ ID NO: 8719 - protein, 476 aa, unidentified
LEVVGTEGVSHPGLPGKYKHKGGQLMSVAVISKTGERLMPTSEYRARKLLKSGKAIKHSYHPFTIQLTERKTGNIQPIELCMDTGYIHIGISVKSEKHEYLAEQIDTLTDERSRHDACRMYRRQRRNRKRYRQPRFNNRKKDKGWIAPSLEHKKNIHIQAISRINNVMPLTDITMEMGNFDTQVLKAKEEGNPLPQDADYQHGERYGIATLREAVFTRDDYKCQCCGRTIKDGAILHVHHIKYRSQGGTNSISNLATVCDKCHTPKNHKPEGKLYNWKPKLPSFKGATFMTTIRWQLYNEVKTLFPDIDIHITYGAATKERRRELDIDKSHVNDAFVMGQFHPKHRIKAVLYKKKRRNNRCLEKFYDAKYIDSRDGKKRSGQELFNGRINRNHKKDSENLHQYRLQKVTAGKRTVRKQHYKIQPHDIVIYENRKRETTGCHCSGTRVMLLPDKKSVSIKKIKIYRYAGGYFKSTFN

SEQ ID NO: 8720 - protein, 426 aa, unidentified
MNGREEHFTPQGGLTATMFVYVRNQDGYPLMPCTPAKARKLLQAGKAKVVSRCPFTIQLSWQCEGYVQEVRAGLDKGISVTGMACVGRGQALFSAELHHRKDVKEKMTERRDHRKSRRARKWYRPARFDNRASSKRCGRLSPSIRTNVEEVIRVVRQIPLPISFLVIEDIQVDVARLNNPELKGSEYQDPTRLDENLRIACLMRDGYQCQQCGKLHCRLEVHHITYREYGGKDTLANLLTLCETCHHKLHEGKITLKVTGVSGHLDQIAQRTMQGKSYLYATLGAQLPFCTLFGYQTAAYRKARGLSKTHIIDALCLATYHTGELVPEPESNIYSIRFRPRQTRKQFHSLPQKGKGRVRYQVYEELKGFRKGDIVLFKKTWVKQVNAIYAEGRLAFRRVKGEPANARPEDCRLLEREQTILWEKVL

SEQ ID NO: 8721 - protein, 431 aa, unidentified
MPNKVYVINKHGRPLMPCSPAKARHLLDEGKAKVKKRTPFTIQLVYGSSGYTQEVILGVDAGSKTIGMSASTTKEELLSAEVKPRNDVVDLLSTRREFRRARRNRKTRYRKPRFDNRVRSKHKGWLAPSVEVKIQEHITAIRRVCGILPVSKVVVETAEFDLQLLKAIADGKPVPQGEDYQQGEMYGHYNVRQYVLWRDGYTCQCCGAHATKKKEVRLHVHHLESRKVGGDAPDNQVTLCESCHEKLHKGLIAEKDFKKRKRKSTRDATFMGIMRKTLMQRLCSELPIPVIETRGYITKATREKLLVLPKSHTNDALAIAQGKQGFNVGYLPGIVQINKIYTIRPVRHHNRQLHKATILKGGIRKSNQTEKYVFGYRLFDKVQFNGQDCFIWGRRTTGIFTIKTINGKMIKDGISFKKLKLAEKSTSYLIA

SEQ ID NO: 8722 - protein, 465 aa, unidentified
MNTCVCVLGNNGERLMPTFRLGKVRRLLKDGKAKIVKHHPFTIQLLYDSKTNTQPIEICEDVGYNYIGISVKSKSHEYVSAQYDTLQDEKEHHDDCRMHRRTRRNRLRYRKPRFDNRKRGEGWLAPSLIHKKELNVNVVKMYCAVMSITHATVEVGSFDTMLVKAIQEGKVIPEGADYQKGPRYNLATLREAVFYRDNYVCKICGRKATEGAILHMHHMFYWKGRHGNSLDELLTVCEKCHTPANHQKGGKLYGFGEDVKFADLSGAAFMNTVRWQIVNELYVAFGKPFVTITYGAMTKEKRIALQLEKSHNNDAYAMGEFHPNLRCMFEHYEKARRNNRILEKFYDSRYIDIRTGEIATGKELFNGRINRNHKKDSENLHKYRGKRTYAGHRALLRKKVNLNPGDLVSLNGENLIVHSTHTKKNGAVNVEFETPAKSGQKSASLKKLKIVKAANSIHPAWKKIS

SEQ ID NO: 8723 - protein, 424 aa, Microcoleus sp.
MSNFVFVLDTQKRPLNPIHPGMARKLLTNRKAAVLKRYPFTLILKVEVTAIHKPITLKIDPGSKTTGFALVQGEKVIFGAELTHRGQAIKANLESRRSLRRVRRNRHTRYRPARFLNRTRPKGWLAPSLQHRVETTLTWVTRLMKLAPIASIVQELVRFDLQQLGNPEISGFEYQQGVLCGYEVREYLLNKWDRKCAYCGVINTPLQVEHIHPKAKGGSNRISNLCLACEKCNIKKGTQNIEQFLSKKPEALKRVLSQAKRPLKDATAVNSTRWALFNRLRMTTGLPVSTGSGGLTKFNRTRLNLAKTHWLDAACVGKVESLEILTSKPLLIKATGHGTRQICRTDKFGFPCRYVPRLKFVKGFQTGDIVKAIVTSGKKVGKYVGRVAVRTSGSFNISASELVSGVSHKYCSIIHRKDGYSYAA

SEQ ID NO: 8724 - protein, 411 aa, unidentified; identical to SEQ ID NO: 3762

SEQ ID NO: 8725 - protein, 554 aa, Streptomyces sp.
MTTFPVGEQTHLAVLPQQPALESVGADTPGSRDETAHGHPAAVRGTGREHGRGETGGLGTGVRRRHAKNVAPAAKAAENRSGDAPPHDQSYAGGVGAGRVFVISRDGHPLMPCHPARARELLGKGRAVVARQVPFVIRLKDRTLAESEVDGLCLRIDPGSKGTGLALTDEKQETDAQGGSFTGRRGLVSVELRHRGEQIRLCMRQRAGYRRRRRSANRRYRAPRPDNRSRPAGWLPPSLRHRVDTTYAVASRLCRYAPVNEIHVESVAFDVHAMSVGRPLADVEYQRGTLAGIEARSYLRSRWENACAYCDAADVPLNIEHLTPRSRGGSDRISNLVLACVPCNRAKGSMPVEGFLADRPDRLAKILRQARTPLDDAAAMNATRWQLLERVRVLGRPVNPCSGAQTHWNRDAMGLGKTHTVDALCVGAMDHERGDAIVRLPDRVLVVRATGRGSYARTTPDRFGFPRLRRSRVKRHFGFATGDLVRAVVPLGKWAGVWTGRVSVRATGRHSLTATEGRIDVSHRNLRLLQRADGYGYAFRPEGARQHLGKPVEP

SEQ ID NO: 8726 - protein, 420 aa, Moorena sp.
MQNYVFVIDANKQLLNPIYPKKARRLLDKGKAAVFRMYPFTIILKTAIESPTISPCQIKIDPGSKVTGFALVQNGQVIWGMELEHRGGLIKKKLESRRAVRRGRRNRNTRYRKSRFLNRKRPEGWLPPSIEHRVLTTQTWVKRLIKFCPVNEIWVERVKFDTQKMQNPEISGVEYQQGELAGYEVREYLLEKWGRECTYCGKQNVPLQIEHIHPKSKGGSERVSNLCLACEKCNQRKGNKPVEDFLKKKPNLLQKIKTKAKQPLKDAAVVNATRNKLVKVLREVKSVTTGTGAQTKYNRTKLGLPLQHWIDAACVGGIETLVLKTSQPLLVTCFGQGGRQKAALNKYGYPIRHNPLKPIKGWCSGDIAKNLLTGEFGRVNPRSKSNSFNYTVSGKKAISLHVKNLCRVHRKDGYTYGFCQ

SEQ ID NO: 8727 - protein, 423 aa, unidentified
MQYVYVHNKQGEPLMPCSPGKARVLLKQQKACVVKRTPFTIKLLYGSAGYKQPITLGVDAGSKHVGLSVSTEKRELYSEKFTPRNDVVELLSTRRQNRRSRRNRKTRYRAPRFNNRVHSKHKGWFAPSVEVKIQEHITVIKRICRILPVTLVRIETAEFDTQRLKAMLAGKPLPVGTDYQLGEMYDEYNVRQYVLKRDNYTCQCCGAHTTAKKAVKLHVHHLESRKIGGNAPSNLITLCTACHDNLHKGNITLDGQKRGKTLRDAAFMGIMRSTLLERLRNELHIPLQNTYGYITKLLREQNDIKKSHINDARCISKHPLAEPCSVRYHAKAIRHHNRQIHKAKILKGGIRKANQAPYIVKGFRLWDKVLYNGQECFISGRRSSGYFALRKLDGTTVTNSISFKKLRLLEPATNYLIERNCSD

SEQ ID NO: 8728 - protein, 512 aa, unidentified; identical to SEQ ID NO: 8121

SEQ ID NO: 8729 - protein, 555 aa, Streptomyces sp.; identical to SEQ ID NO: 3041

SEQ ID NO: 8730 - protein, 470 aa, unidentified; identical to SEQ ID NO: 2925

SEQ ID NO: 8731 - protein, 479 aa, unidentified
MPTTRCGHIRGLLNAGKARVVEREPFTIQLKYETPDVTQPLYLGIDPGRTNVGSAVVREDGECVFTAQLTTRNKDVPKLMKARKQFRMAHRRLKRRCKRQRRAKAAETLSQKGEFQRLLPGYEESILCKGIRNKEARFNNRQRPAGWLTPTANHLLLTHLNMVKKLQKLLPITDVVLEVNRFAFMAMENPSIRRWQYQQGPLYGKGSVEDAVYAQQDGHCLFCGKPIAHYHHVVPQHKNGSETLENRVGLCNEHHDLVHKDRAWDAKMKETKAGLNKKYHALSVLNQIIPALTEQLTAMFPQHAFVTTGKDTADFREDYGIAKEHHLDAYCIACSVLAEPTKVAAPTGKPHRLMQFRRHDRQVCHKENIKRVYLSEGKAVATNRHKAIEQKDDSLEEFRKTHTQQEVSALTVKDHQPVYKDMRRFMPGGVFLFNGKVHTLQRSHGRYKGMPFYYIDTDGSKNHAKGCIFLQQNCGLRWV

SEQ ID NO: 8732 - protein, 415 aa, unidentified; identical to SEQ ID NO: 2764

SEQ ID NO: 8733 - protein, 413 aa, unidentified; identical to SEQ ID NO: 2636

SEQ ID NO: 8734 - protein, 437 aa, Clostridium sp.
MVYVLNKEGKPLMPTNRYAKIRVLLKSKKAVVVNSKPFTIKLLYDTENFTQSITLGIDSGYLNIGFCAITKEKELISGEVKLLKGMSERLREKAMYRRQRRSRLRYRKPRFDNRKCSKEWLAPSIQHKYDSHIRFIDKLKKLLPITNIIIEVANFDTHKLKNPSIEGAAYQNGEQKDFFNLREYILHRDGHKCQNPNCKNKSAEPILQVHHIGFWKQDRSDRPGNLITLCNKCHTPKNHKEKSFLYGWKPKVRSFKEATFMSMIRWRLVNTLNCKYTYGYITKSNRIILKLEKTHYNDAFCIAGGSNQNRVKPLIFEQIKRNSRSLEKFYDAKVIDIRTNTKVSGVELFNGRRTRNKSLNSENLRKYRGAKISKGQRRIRTKRYFYQPGDLVKYEDKVYTVKGTQNKGKYIALKELKKVPKVELLTPYKFRKGLVCV

SEQ ID NO: 8735 - protein, 420 aa, unidentified; identical to SEQ ID NO: 6212

SEQ ID NO: 8736 - protein, 515 aa, Diaphorobacter sp.
MLPQFLALEVAIADTLRVSTKRIAADWLKPITCCATWSRGEARKSPLPPQGEIRSNPMRVFVLAQRGQPLMPCHPARARQLLRQGKAVVHRTMPLVIRLKDRLEGDTQPVRLKLDPGSKGTGLALVREQPSGTLAVLHLFELAHRGRQISEALTARRQMRRRRRGNLRHRAPRFMNRGNKSKGWLAPSLRHRVDTTLAWVTRLQRWTPLTAVSSELVRFDMQALQNPEISGIEYQQGTLAGYELREYLLEKWGRQCAYCGAQDTPLQIEHIRPRANGGSNRVSNLTLACQCCNQKKAALPVEVFLAHRPDALRRILAQARRPLKDAAAVNATRWALANALKGTGLPLELSSGGRTKFNRARLGVPKTHALDAACVGEFSALTGWNQPTLHLQCTGRGSYQRTRLDKFGFPRGYLMRQKQVKGFQTGDLVKAQVPAGKKAGAHRGRVAIRATGSFNIQTGTGVVQGISHRHCRLIQRADGYGYFYQPQIANTDENQGRALHAALSLPALKGGVSRA

SEQ ID NO: 8737 - protein, 460 aa, unidentified; identical to SEQ ID NO: 8636

SEQ ID NO: 8738 - protein, 434 aa, Mitsuokella sp.; identical to SEQ ID NO: 2893

SEQ ID NO: 8739 - protein, 414 aa, unidentified; identical to SEQ ID NO: 2588

SEQ ID NO: 8740 - protein, 422 aa, unidentified; identical to SEQ ID NO: 4124

SEQ ID NO: 8741 - protein, 406 aa, unidentified
MVYVQDIYGRPLMPTTRHGKVRRLLKSKKATVVNLCPFTIRLLYDTTGYKQEITLGVDTGTKHVGLSATTKSKELYASEVILRSDVVDLLSTRRELRKIRRYRLRYRKPRFMNRIKSKKRGWIAPSIRQKIDSHIRIIGFVYSILPVSKLIIEVAQFDTQKIKNPEISGKEYQEGEQLGFWNVREYVLARDEHKCQHCKGKSKDPVLNVHHIESRKTGGDSPSNLITLCKTCHKEFHKGNIKLKVNRGESLRDAAVMSIMKWELYDELKSLYPNVKMTFGYITKYNRINHGIEKSHVSDAFVISRNFDSERLGYYYKRKLVRRHNRQIYKMKAPKGGNKRMNQSPFKVFGFRLFDKVMFQGKERFIYARRLRGIFNIRDINGENKKDISYKKLEYVSHGLISIVAG

SEQ ID NO: 8742 - protein, 456 aa, unidentified; identical to SEQ ID NO: 7423

SEQ ID NO: 8743 - protein, 462 aa, unidentified
MSVLVIGRNGRALMPTNPRKARLLLKKKTASVVCRHPFTIQLLYKTGCATQEGCIGIDTGSQHIGVGITCGDRVILKDEHALRSSMEKRSLLATRAVMRRGRRYRKVRYRKPKWRHHTKRMYFEKANRRGQHWRKVKTTTQSPRLKGWLPPSLQSKCDHHFRIIDRYLKYLPDPITRNLVIEAGRFDMARMNDPTIHGEMYQRGPMYDAENLRAYIFARDNYQCACCKAKAGTTRKADGTTVKLVAHHILFRSRGATDNPKYIISVCDHCHTTKAHQPGGILYSWMENKKKVARGLRDATFMNILRKRLFARYPQAAFTYGNITAADRKQLRLPKSHANDAVAISLFGKEASTVKNICQTMHYKQIRKSKRSLHEAIPRKGRKNPNTKAVRNKKNTTQANGFKLWDSVLADGKKLFICSFTGTSAYLIDKNGCYISQPGKTYKQWPLSKLKRLHPNGNWLMA

SEQ ID NO: 8744 - protein, 512 aa, unidentified; identical to SEQ ID NO: 4350

SEQ ID NO: 8745 - protein, 442 aa, unidentified; identical to SEQ ID NO: 2834

SEQ ID NO: 8746 - protein, 298 aa, unidentified; identical to SEQ ID NO: 3213

SEQ ID NO: 8747 - protein, 460 aa, unidentified; identical to SEQ ID NO: 7734

SEQ ID NO: 8748 - protein, 319 aa, unidentified
LKVFVLNMRGQPLMPCSPAKARHLLKAGKAVVKRRTPFTIQLRIATGETKQNVTLGVDAGAKHVGLSATTEKEEVFASEVELRQDITGLLAARLSLRRDRRHRKTRYRAPRFLNRVRSKHKGWLAPSVENRIQAHMSRIDAVCRLLPVTKIVIETASFDIQKIKDPSVEGTDYQQGDQLGFWNVREYVLFRDGHVCQHCHGRSKDKILNVHHLESRQTGGDAPNNLITLCETCHKAYHAGKIKLKVKRGQSFRAEAFMGIMRWTLLDRMRKAHSGLPVENTYGYLTKNTRITLGLPKTHCVDAYCIAGNLKAVRRGVCL

SEQ ID NO: 8749 - protein, 453 aa, Anaerotruncus sp.
MSVAVLSSTGQKLMPTSNYRARKLLKSGRAAIECYRPIFTIRLTDREEGKTQPIEYACDTGYQHVGVSIKSEKHEFVHAQYDMLSNETERHNDRRKYRRTRRNRKRYRKPRFDNRSRKNQEMAPSLRHRKENQINLFESFCKVMPITSATFEMGKFDTQLLQAIADGKPLPEGKDYQQGSKYLFQTEREAVFSRDHYTCQVCGKSVKDGVILHTHHIGFWKEYRSNRISNLLTVCEHCHTAKNHKPGGALWGLEPQSTNLAAATYMSTVRWAIYRELVLKHQEIDIHNQYGAKTSVTRKSLHLAKTHANDAYCIGSLHPRHRTAELIYQKKRRNNRILAKFYDAKYIDIRDGAKKSGAVLSCGRTNRRESRRSDKNQRIYRGNKCSSGRTSVRKKRYSYQPGDAILFRSQRFTVNGAHCNGTRVILNTGKSVKMADLTCIKMEGGWCFLPAQA

SEQ ID NO: 8750 - protein, 409 aa, Arthrospira sp.
LTPCKPGMARSLLKAGKASVFRRYPFTIILNKEVDANPEPLELKLDPGSKVTGIALKQGNHIIFAAELQHRGQQIKEALLSRRQLRRSRRNRKTRYRPARFLNRTRPEGWLAPSWQHRVDTLMTWVHRFRRLAPVGRITQELVRFDLQLMENPEISGVEYQQGELQGYEIREYLLFKWGRTCAYCGAQNVPLEVEHIQPRSKGGSDRVSNLTMACHSCNQAKGNGDIRDFLSGQPDVLSRLLRQAKSPLKDAAAVNSTRWALFKALKATGLPVTTGTGGQTKFNRLRLNLPKAHWLDAACVGPVESLEVLTSKPLLILAKGHGTRQMCGTNKYGFPNRHRSRRQIHKGFQTGDMVTVLVTAGKKIGSYLGRVLCRASGSFDITTASVRVAGISHKYCQPIHRKDGYAYA

SEQ ID NO: 8751 - protein, 414 aa, unidentified
MPCSPAKARHLLKEKKAIVVRRTPFTIQLTIATGETKQPVSLGVDAGYKHVGLSASTEKAELYASEVELRQDVSDLLSARRALRQSRRNRKTRYRAPRFDNRIRTKRKGWLAPSVENRINAHLSRIEAVLRLLPVTRITVETASFDLQLLKNPDISGKEYQEGEQLGFWNVREYVLFRDGHVCQYCHGRSKDPVLNVHHLESRRTGGDSPGNLITLCETCHKALHHGEITLKTKRGQSFRAEAFMGIMRWEVLNRLKVSHPELEVNNTYGYRTKHVRIANGIAKSHCADAFCIAGNLGAKRLGEFFFQKQTRRNNRQIHKLSILKHGLRKRNQAPFEIKGFRLFDKVVCKGEEGFIFGRRSSGFFDVRKLDGTRISAGISYKKLHLLEKRRTYLTEIRKEEALPPLPEGRDLRA

SEQ ID NO: 8752 - protein, 442 aa, unidentified
MVTVQQSTHHLPFGRVFIRRNLFMVYVISQDGKPLMPCSDPIARLLLKQGKAKVKKREPFTIKLTYETTNHTQGLTLGVDTGSGTIGTAVSKDNGDIVYMSEVVVRNDITDKMTQRAKYRRNRRNRKTRYRKARWLNRASSIKKDRFSPTMQSKLHSHVREIEYIQSILPVTEMVFETGQFDMHLMKNPNLANPKIKHWGYQKGTNYGFENTKAMVLNRDNYTCQCCKGKHKDSKLEVHHIVFRSQGGSDEESNLITLCHTCHKDLHSGKINLKLSGKVKGNLKYATQMNSIRRQLFRLYPNAIETFGYVTKANRLHLGVGKEHYYDACTIATQGYAFNVKSNLYKKKCVSDGDFQKTKGIRSEQPVVTDKICGFRKFDKVRYFGNDYFIKGRMSTGYAILMDIDGNKIDFGTMPRGYKTPKLSNCKRITARSTVMTQVKVV

SEQ ID NO: 8753 - protein, 493 aa, unidentified; identical to SEQ ID NO: 2644

SEQ ID NO: 8754 - protein, 425 aa, unidentified
MFVYVISKDGQPLMPTSRFGKVRRLLKNKKAKVIRSCPFTIKLLYEPESLVVQEVVLGQDTGSKHVGTACIADDKVLYQSEVTLRDDIKKKMDRRRALRRNRRQRKTRYRKPRFLNRANSIKKDRLPPSTKSKVQSHIDEIEFCKKILPVSKIVLEVSQFDIHLMKNPSLIFEKVRHWGYQKGFDYGYSSRREAVLNRDNYTCQCCGKKHVRLEIHHIIFRCMGGTDDERNLITLCEKCHKLIHDGVLILTKKPRKLNLKYATQMSIIRSQLLKIYPDAIETFGFVTKENRNNLNLPKGHYIDACVIASAGKKFKQLNWLFKKRRVAKQNRQLCKGVRGERKIPTGKIFGFKRFDLVEYLKELCFIKARRNSGCFTLMDINNNTIDFRDRGGKKEPSYKHLERVNARKSVLCIRKRIGGKCSFIY

SEQ ID NO: 8755 - protein, 501 aa, unidentified; identical to SEQ ID NO: 7018

SEQ ID NO: 8756 - protein, 512 aa, unidentified
MPTVYVLNKDGKPLMPTTRCMHVRHLLKNGKARVVKSKPFTIQLLYETDDVVQPLYLGIDPGRTNIGVAVVKTDGAAVFTAHLETRNKEVPKLMKKRKESRCARRTNGRRCRRQRRAKTNGTISKKCVKQTTAQNGSVSKRAKEIGVIKRHLPGCEKDVLCIGIKNKEAKFTNRARPEGWLTPTANQLLQTHINLVKKIQKFLPISDVVLEVNKFAFMQLDNPNIQKWQYQQGPLYQKGSLENAVSEMQEHHCLFCEKPIEHYHHVVPKSENGSNTIANIVGLCTEHHNLVHKDATWQKKLAKEKVGLVKKYGALSVLNQIIPALTKEMNSLFPKHFFVTNGKSTYDYRTAHGVSKDHWLDAYCIACSVLPNDVCDSNINSHVPYELKQFRRHDRRVLHKANMSRVYTLNGKTVATNRHKAIKQATDSLEEFRQSHPGDVCKLKVKEHHPAYRNLNRNYPGSVFLVDGQVHVMQGVSGSHNGKADGYYNTNGNAYPYYKCKFVVKNEGIVFA

SEQ ID NO: 8757 - protein, 431 aa, unidentified
MPDKVYVISRLGHPLMPCSPANARHLLDDKKAKVVKRMPFTIRLLYGSTKYIQPIILGVDAGSKTIGLSASTAKEEVFAAEVMPRNDVVENLSTRREFRRARRNRTTRYRKPRSDNRVRSNHERWLAPSVKVKIQEHITSIKRVYTILPISKVVIETAEFDLQLLKAIQEGKPIPEGEDYQKGEMYGSYNVCQYVLWRDNYTCICCGVRGTPKNPVRLHVHHFESRKYGGNAPDNHGTLCDDCHKKFHLGIITDVKLKTRRRQSTRDAAFMGIMRKTLMWRLRTELFIPVAETKGYITKATREKLLVLPKSHTRDALAIAQGRHGFGIKEYAYVEPANHIYTVRAVRHHNRQLHKASILKGGIRKRNQASKYVFGFRLYDKVLYQGKACFVWGRRTSGTFLLRTIDGIKVKDGVSYRNLTLLERSSNYLIA

SEQ ID NO: 8758 - protein, 439 aa, unidentified; identical to SEQ ID NO: 8107

SEQ ID NO: 8759 - protein, 422 aa, unidentified; identical to SEQ ID NO: 3922

SEQ ID NO: 8760 - protein, 447 aa, Marinobacter sp.; identical to SEQ ID NO: 8596

SEQ ID NO: 8761 - protein, 507 aa, Anaerostipes sp.; identical to SEQ ID NO: 2841

SEQ ID NO: 8762 - protein, 443 aa, Anoxybacillus sp.
MVEENITCFMQRKGEYPMVFVLDTNKCPLAPCHEAVARKLLKQGKAAIYKRYPFTIILKEIVDNFRPKTPYRLKIDHGSKHTGLAILRGQEVVWLGQLDHRTDIKERMDKRRAFRRARRNRKTRYRKPRFLNRRRKDGWLPPSLESRVQNIQTWVNRLKKLCPIGYISYENTKFDTQLMRNPEISGIEYQQGTLQGYEVREYLLEKFGRKCCYCGKENVPLEVEHIIPKSRGGTDRIDNLCLACRDCNQRKGSQTAEEFGYPHIQKMVKKTLKDASVVNATRWKVYEVLKQSGCEVECGTGARTKMNRIRLDLPKTHYFDACCVGESTPLQLHFKTKEALFIKAKGRGSRSRTNLDKYGFPRGFLARQKFFFGFQTGDMVKAVIPRGKYQGVWFGEVSCRKTGSFDIKGKDGKRIAQGINYRYVQVIQRFDGYTYRREGMNIA

SEQ ID NO: 8763 - protein, 427 aa, Nostoc sp.; identical to SEQ ID NO: 2670

SEQ ID NO: 8764 - protein, 493 aa, unidentified; identical to SEQ ID NO: 2644

SEQ ID NO: 8765 - protein, 442 aa, unidentified; identical to SEQ ID NO: 3161

SEQ ID NO: 8766 - protein, 420 aa, unidentified
MQYAYVLNKRGEPLMPCSPGKARILLKQQKACVVKRTPFTIKLLHGSAGYKQPITLGVDAGSKHVGLSASTEKRELYSEEFTPRNDVVELLSTRRQNRRSRRNRKTRYRAPRFNNRVHSKHKGWLAPSVEVKIQEHITVIKRICRILPITLVRVETAEFDTQRLKAMLAGKPLPVGTDYQLGEMYDEYNVRQYVLKRDNYTCQCCGAHITAKKTVKLHVHHLESRKVGGNAPSNLITLCTTCHNNLHKGKITLDGKKRGKTLRDAAFMGIMRNALLTRLRNELNIPVQNTYGYITKLLREQNDIKKSHVNDARCISKHPLAKPCSVCYRTKAIRHHNRQIHKAKILKGGIRKANQAPYIVKGFRLWDKVLYNEQECFISGRRSSGYFALRKFDGTTITNSISFKKLRLLEPATNYLIERK

SEQ ID NO: 8767 - protein, 396 aa, unidentified; identical to SEQ ID NO: 4508

SEQ ID NO: 8768 - protein, 504 aa, Eubacterium hallii; identical to SEQ ID NO: 3854

SEQ ID NO: 8769 - protein, 420 aa, unidentified
MQYVYVLSKHGEPLMPCSPGKARLLLKEKKARVVRRTPFTIKLLYGSAGYKQPITLGVDAGSKHVGLSASTEKRELYREEFTPRNDVVKLLSKRKQYRRSRRNRKTRYRAPRFNNRVHSKHKGWLAPSVEVKIQEHITVIKRICRIIPISLVRVETAEFDTQRLKAMLEGKSLPVGTDYQLGEMYDEYNVRQYVLKRDNYTCQCCGAHTTKKKTVKLHVHHLEGRQVGGNAPNNLITLCVDCHKALHAGKVKLDGKKRGKSFKDAAFMGIMRKTLMARLRDELPIPVQGTYGYITKMRREQNDIKKSHVNDARCISKHPLAEPCSVCYRTKAIRHHNRQTHKANFSKGGTRQRSQMPYVVEGYRLWDKVLYKGQECFVSGRRASGSFTLKKLDGTCISKGVTFKKLRLLEPATNYLIERM

SEQ ID NO: 8770 - protein, 512 aa, unidentified
MSTVYVLNKDGKPLMPTTRGGHVRHLLKEQKARVVRAKPFTIQLLYETNDVVQPLYLGIDPGRTNIGVAVVKANGTAVFTAHLETRNKEVPKLMQDRKKARRARRTNGRRCRRQRRAKANGTISKKCVKQDTAQSKNPSKRAKEIGIIKRRLPGYKKDVLCIGIKNKEAKYTNRTRPEGWLTPTANQLLQTHINLVRKIQKFLPISDVVLEVNKFAFMRLDNPDIQKWQYQQGPLYQKGSLENAVSEMQEHHCLFCDKPIDHYHHVVPQSENGSNTIANIVGLCAEHHNLVHKDAAWQKKLAEEKVGLNKKYGALSVLNQIIPALTNKLSVLFPKHFFVTAGKSTHDYRATHGVSKDHWLDAYCIACSVLPSDVCDSNINNHMPYELKQFRRHARRALNNENMNRVYTLNDKAVAINRHKATEQEAASLEEFRKEHPNDVCKLKVKEHHPTYRNMNRNYPGSIFLVGKHVHIMQGIAGSKDGKATTYKDTNANSIAAGKCKFVAKNSGILFV

SEQ ID NO: 8771 - protein, 414 aa, unidentified; identical to SEQ ID NO: 5235

SEQ ID NO: 8772 - protein, 422 aa, unidentified
MVYVINKQGQALMPTERFGKVRRLLKNSLAHVVCRIPFTIQLDYDTTDYTQPVSLGIDAGSKHIGISATTSEKELYAADVELRNDIVDKLSTRRELRRTRRSRLRYRKARFNNRVSSKRKGWLAPSVENKIQTHLTVVEKIHKFLPITNIVVETASFDIQKIKNPSISGVEYQQGEQLDFFNVREYVLFRDNHTCQHCKGKSKDKVLNVHHIESRKTGGDSPNNLITLCETCHKAYHRGEFELNVKRGKSFRDSAFMGIMRWKLYDRLKNIYPNVSMTFGYITKNTRITNNLPKEHYVDARCISGNPVAKPLGYYFYQKKVRCQNRQIHKANFLKGGRKKLNQAPFLVKGFRLFDLVEYQKELYYIFGRRSNGSFDIRKLDGTKVNKGSINCKYLRLIDKRKSILRIKREFPCLQAGDDSVF

SEQ ID NO: 8773 - protein, 408 aa, unidentified; identical to SEQ ID NO: 6591

SEQ ID NO: 8774 - protein, 408 aa, unidentified; identical to SEQ ID NO: 6147

SEQ ID NO: 8775 - protein, 414 aa, unidentified
MTNYVFVIDANGKQLAPTKEQKAWYLIRKKGATLVNKYPMVIQLNKVIKDNNICKDEIRCGIDDGGLHVGIALIQRCQTKNKVLFKGTIEQRNDVKHLMQVRKKYRQYHRYHKRYRPARFNNRSSSKRQSRIAPSIFQKRQAIIRVINQLNKWINIKNYWLEDVSIDIRALTDGYKPYSWQYQKSNRLDENIRKAIILRDGCKCMECGKANCRLEVHHIKPRRLNGSNTIDNLITLCKKCHQKTEGKEELFMNKYFSLLGKSKDNKNLNYASHVMIGKNWLREQLSNLGELYLTNGGDTANKRIDWNIEKTHSNDAICITELKPDTTDIKDWIIKAMRRQSKAKTDNVLGIKHRDLVEYKYKNGEIHRGYVTALYPEIKALNFQSPTKHCKKVNARKCKLLWKYNKIYWLDNVN

SEQ ID NO: 8776 - protein, 534 aa, unidentified
MPNKVYVINKHGRPLMPCSPAKARHLLDDGKAKVKKRTPFTIQLVYGSSGYTQEVILGVDAGSKTIGMSVSTTKEELLSAEVKPRNDVVDLQSTRREFRRARRNRKTRYRKPRFDNRVRSKRKGWLAPSVEVKIQEHITAIRRVCGILPVSKVVVETAEFDLQLLKAIEEGKPVPQGEDYQKGEMYGHYNVRQYVLWRDNYTCQCCGAHATKKKEVRLHVHHLESRKVGGDAPDNQVTLCESCHEKLHKGLITEGDFKKRKRRSTRDATFMGIMRKTLMQRLCSELPIPVVETRGYITKATREKLLVLPKSHTNDAQAIAQGKQGFNVGYLPGILQIDKIYTIRPVRHHNRQLHKARDPPADGGEALGRAYAEDAGRDRVRRADRRTKERRAGDDQRGRRFAGEAVNGFQFEDLMPHGFDDFPAAHGSTERHKGGTEALDPEGDGYRFDFVENEEGKGDHPHRFLGIVHTVAGRHERRREHLKPREGRIELVPRALCAQEHDEEHDQQPHTESSQRGEDQRQQYFGQDGAPVEG

SEQ ID NO: 8777 - protein, 334 aa, unidentified
MVYVLANDGQPLMPTERHGKVCRMLKSGIAKVVKKCPFTIQLQYESERNVQPVALGIDAGSKHVGVSATTKAKVLYESDVELRDDIVKLLATRRQLRRRRRSRKTRYRPARFDNRRRKEGWLTPSIRQKIESHLTVVANVCKILPVSQIIVETASFDIQKIKNPDIQGIEYQQGEQMDFWNIREYVLFRDGHTCQCCKGKSKDKVLNVHHIESRKTGGNAPNNLITLCETCHKGYHNGTVTLPKNIKRGMKFKDAAFMGIMRWTFYNTLKEQYEPDIPVSMTYGYLTKNTRIEHGLPKEHYIDARCISGNPDAVSDGTYYYQKKVRCHNRQIHK

SEQ ID NO: 8778 - protein, 424 aa, Scytonema sp.; identical to SEQ ID NO: 6716

SEQ ID NO: 8779 - protein, 430 aa, unidentified
MPKVYVLNRHGRPLMPCTPAKARHLLDAGKAKVRHRTPFTIQLLYGSTGYTQEVILGVDAGSKTIGLSAATETEELFSAEVKPRNDVVELMSARRQFRRARRNRTTRYRKPRFDNRVRSKHKGWLAPSVEVKIQEHMTAIRRACAILPVSKVVVETAEFDLQLLKAVAEGKPVPQGEDYQKGEMYGHYNVRQYVLWRDSYTCCICGVHGSVRKGVPLHVHHLESRRVGGDAPDNLVTLCTACHDKLHKGIIMAADIKKLKRRSTRDATFMGIMRMTLLRRLREQLPVPVVETRGYITKATRENLLVLPKSHANDALAIAHGPQGFRAEHLPNIRQADRLYTIRPVRHHNRQLHKATILKGGVRKTNQAEKYICGFRLYDKVLYNGIECFVWGRRTSGSFLLRQLNGEKVKDGVSYKHLKLLERSQSYLVA

SEQ ID NO: 8780 - protein, 418 aa, unidentified
MVYVINKDGQALMPTERFGKVRRLLKNGLAHVVCRIPFTIRLDYETTHFVQPISLGVDAGSKHIGISATTSKKELYAADVELRNDIVDKLSTRREQRRTRRSRLRYRKARFNNRVSSKHKGWLAPSVENKIQTHLTVVEKIHKFLPITKIIVETASFDIQKIKNPSISSKEYQQGEQLGFFNVREYVLFRDNHTCQHCKGKSKDHILNVHHIESRKTGGNSPSNLITLCESCHKAYHNGKIDIKIKRGASFRDATFMGIARWTTYERLKNIYPNVSMTFGYITKNTRITNGLPKEHYVDARCISGNPKSKPLGYYFYQKKVRCQNRQIHKANFLKGGRKKLNQSPFLVKGYRLFDLVEYQKKLYYIFGRRDSGFFDIRRLDGTKVNKGSISCKRIRLVDIRRNIITERRNSCSIPPTN

SEQ ID NO: 8781 - protein, 414 aa, unidentified
MVYVINKQGQALMPTERFGKVRRLLKNSLAHVVCRIPFTIQLDYDTTDYTQPVSLGVDAGSKHIGISATTSEKEMYAADVELRNDIVDKLSTRREQRRTRRSRLRYRKARFNNRVSSKRKGWLAPSVENKIQTHLTVVEKIHKFLPITNIVVETASFDIQKINNPSISGSEYQQGEQLDFFNVREYVLFRDNHICQHCKGKSKDKVLNVHHIESRKTGGDSPNNLITLCETCHKAYHRGEFKLNIKRGKSFRDAVFMGIMRWGFYDRLKNIYPNVSMTFGYITKNARITNNLPKEHYVDARCISGNPTAKPLGYYFYQKKVRCQNRQIHKANFLKGGRKKLNQAPFLVKGFRLFDLVEYQKELYYIFGRRDSGFFDIRKLDGTKVNKGSINCKYLRLVDKRKSILIEKRTQVNL

SEQ ID NO: 8782 - protein, 493 aa, unidentified
MAVVYVISASGKPLMPTTRCGHIRGLLNAGKARVVEREPFTIQLKYETPDVTQPLYLGIDPGRTNVGSAVVREDGECVFTAQLTTRNKDVPKLMKARKQFRMAHRRLKRRCKRQRRAKAAETLSQKGEFQRLLPGYEESILCKGIRNKEARFNNRQRPAGWLTPTANHLLLTHLNMVKKLQKLLPITDVVLEVNRFAFMAMENPSIRRWQYQQGPLYGKGSVEDAVYAQQDGHCLFCGKPIAHYHHVVPQHKNGSETLENRVGLCNEHHDLVHKDRAWDAKMKETKAGLNKKYHALSVLNQIIPALTEQLTAMFPQHAFVTTGKDTADFREDYGIAKEHHLDAYCIACSVLAEPTKVAAPTGKPHRLMQFRRHDRQVCHKENIKRVYLSEGKAVATNRHKAIEQKDDSLEEFRKTHTQQEVSALTVKDHQPVYKDMRRFMPGGVFLFNGKVHTLQRSHGRYKGMPFYYIDTDGSKNHAKGCIFLQQNCGLRWV

SEQ ID NO: 8783 - protein, 427 aa, Enterococcus sp.; identical to SEQ ID NO: 5630

SEQ ID NO: 8784 - protein, 431 aa, unidentified; identical to SEQ ID NO: 3235

SEQ ID NO: 8785 - protein, 441 aa, Sulfobacillus sp.; identical to SEQ ID NO: 4231

SEQ ID NO: 8786 - protein, 512 aa, unidentified; identical to SEQ ID NO: 4031

SEQ ID NO: 8787 - protein, 455 aa, unidentified
VSFTVRYVLACRFKHIKKRKEVPYMVYVLDIDGQPLMPTTRHGKVRRLLNSHLAKVVKRCPFTIQLLYQSTKETQPVSLGVDAGSKHIGMAATTEKKVVYQEELSPRNDVVKLLSARRTLRRTRRNRKTRYRKPRFNNRVHSKHKGWLAPSVEVKIQEHITATKRICQILPIFDIHVETAEFDLQRLKAMEEGRLLPAGTDYQLGEQYDFYNTRQYVLHRDEYTCQCCGTHDNNVKLHVHHVESRQTGGEAPNNLITLCEHCHKSIHAGKMMLPKGKKRGKSYRDAAFMGIMRNTLLERLRKEVNVLVTMTYGYITKYWREKAGLEKSHINDAICISKHPYARPLETYYLTKAVRHHNRQIHKTKFSKGGIRKRNQAPYLVKGFRLFDKVLYQGESYFIFGRRITGYFDIRTLDGTKVNKGSTSYKKLRIQDTAEAYLTEVRAIPHMNEFTCVLA

SEQ ID NO: 8788 - protein, 582 aa, unidentified
MYLDGVFGHLKDAGTCRYSSSLQHRRVYAKSRKTIPGQCLGLQPMRKNRFFVGRYCPTLIRRQHLANLKLIDTLLEKTEYIYVLGADGKPQMPTNRKVRVRSLFKSGLAKIVDTVPFTIRLLYENNAVLQPITLAEDPGRTNIGVAVLTQFGDLVFSAVVETRNKDIKKLMSDRKAHRQASRRGERKARQRLAKKHGSMIKSGMIMRKLPRYAADKFVTCKFIKNTEARFCNRKRIPDWLTPTVNHLVETHINIIRKISKYIPVTDIAVEVNRFAFMQMENPETTGIDFQNGPLKGFNDVKAALRVQQHGKCLMCKNDISDFHHIVPRSKGGSDNIQNQVGLCPKCHKKAHTNENFKQKLADKKVGLLKKYGALSALNQAVPFICKSLLEIYGKDHVYFCTGKDTSLIRTGLGYEKTKDNQIHEVDAYCIGLAAVGADIVKLPKFENIYKIKQFRRQDRSIINYQRERTYYLDGKKIATNRKPRFEQKKDAFSDWYSKRVKSDGKEQADKLTGRVTVKKSIRGYNSKNRLMSGTIFYYNGKRLVLTGQLTGGKYYRAYGDSKTNYPAAKCQVYKQNEGLVFV

SEQ ID NO: 8789 - protein, 414 aa, unidentified; identical to SEQ ID NO: 2588

SEQ ID NO: 8790 - protein, 470 aa, unidentified
MEACSVRDKSNWLIRRHRNMQQLLVELKNTPGDAPQVPCSVSGALNREETLSVPRKVLANNNSDEDQHSGKSGQWLNVPVINMRGKPLMPAKPGKARRLLKQGKAIVVQRAPFTIQLCYLTGNYTQDIKLGIDAGYKTIGFSAVTEKKELISGELTLRKRISRLLEQKKHYRRARRNKLWYRKPRFNNRSKPKGWFAPSIQHKLETHLRLIEKLKKILPVTKVTVEVAGFDTHKMQNPEIKGVEYQQGTLFGYEVREYLLEKWARKCAYCGKSNTPLEIEHIIPKIRGGTDRVSNLTLACHKCNQKKGNQTAAEFGHPEIQKKANQTLKATAFMNIVRWRLVNTLKCDWTYGYITKHARIKLDMEKSHANDAFVIAGGTTQSRSKPYKLTQTRRNNRSLQLNRKGFKPSIRRQRYKLQPNDLVKYIKSLCKVKGVHSYGKSVILKDKIGKSFDINVKNVELVKYGKGIQF

SEQ ID NO: 8791 - protein, 409 aa, unidentified
MVYVQDIDGNPLMPTTRHGKVRRLLKSYMAVVVNLCPFTIRLKYTTTDYKQEVVLGVDAGTKHVGFSATTKSKELYASEVTLRSDIVDLLSTRRESRRTRRNRLRYRKPKFDNRISSKKEDWIAPSIRQRIDSHLKQISDIHKILPVSKIIIEVAQFDTQKIKNPDIKGEEYQQGEQLGFWNVREYVLFRDNHKCQHCKGKSKDPILNVHHLESRKTGGNSPSNLITLCEACHKDYHNGKFELKIKKSKSLRDAAVMGIMKWRLYEELKSSYKDVKMTFGYITKHNRIQQNIQKSHTSDAFVISKNFEAERLGFSYNIKLTRRHNRQIHKMKILKGGAKKLNQCPFEVFGFRLFDKVKFNNQYYFIYGRRKSGYFSIRDFDGKNNKEISYKKLKLCRVKRSPVCIKENE

SEQ ID NO: 8792 - protein, 470 aa, unidentified; identical to SEQ ID NO: 7775

SEQ ID NO: 8793 - protein, 424 aa, unidentified
MSNFVFVLDTTKKPLNPVHPAQARRLLKQGKAAVFRRYPFTIILFEEITETPKNITLKLDPGSQTTGIALVQNNQVIWGAELQHRGQQIQDALTSRRQLRRGRRGRKTRYRQPRFLNRKRSEGWLPPSLQHRVDTTLTWVKRLTRYCPINSLAVELVKFDLQKQENPEISGVEYRQGTLYGWEVREYLLAKFNRTCQYCGATDRPFEIDHIHPRSKGGSDRVSKLTLACHNCNQSKGNQDIKDFLKEKPNLVNHILRQAKTSLKDAAGVNSTRLKLFLSLRELGLPIETGSGGLTKFNRKRLKVPKTHWQDASCLGKIPDDLIFKTNQPLLIQATGHGKRQRCRPNKFGFPISHASRAKLFQGFQTGDLVSALIPKGKFAGLYVGRIAIRFRPSFVLQLPEKKFDVHPKYLTIMHKNDGYNYAF

SEQ ID NO: 8794 - protein, 470 aa, Ruminococcus sp.; identical to SEQ ID NO: 2433

SEQ ID NO: 8795 - protein, 431 aa, unidentified; identical to SEQ ID NO: 4463

SEQ ID NO: 8796 - protein, 470 aa, Blautia sp.; identical to SEQ ID NO: 2925

SEQ ID NO: 8797 - protein, 512 aa, unidentified
MSTVYVLNKDGKPLMPTARCGHVRHLLKEQKARVVTSKPFTIQLLYETDDVVQPLYLGIDPGRTNIGVAVVKADGTAVFTAHLETRNKEIPKLMKKRKDSRRARRTNGRRCRRQRRAKANGTISKKCVKQTTAQNGSVSKRAKEIGVIKRHLPGCEKDVLCIGIKNKEAKFSNRTKSEGWLTPTANQLLQTHINLVKKIRKFLPISDVVLEINKFAFMQLDNPNVQKWQYQQGPLYQKANLEEAVSEMQEHHCLFCKKPIAHYHHVVPQSENGSNTIGNIVGLCTKHHDLVHKDTAWQKKLAKKKTGLNKKYGALSVLNQIIPALTKELGSLFPKHFFATNGKSTYDYRAAHGVRKDHWLDAYCIACSVLPNDVCDKNINSRVLYELKQFRRHDRRALNNENMSRVYTLNENVVATNRHKATKQTTDSLEEFRQNHPDDACKLKVKEHHPTYRNMSRNYPGSVFLVGNQVHVMQGVAGSKDGKATTYKDTNANSIAAGKCKFVAKNSGILFV

SEQ ID NO: 8798 - protein, 427 aa, Scytonema sp.
MCKVFVLDTDFIPLLPIHSAQARQLLRNKKAAVYRRFPFTIILKESRPDSPVSSLRLKIDPGAKFTGIALINETTGEVVFAAELKHRGFAIREALTSRRQLRRGRRARKTRYRAPRFLNRTRPKGWLAPSLQSRVENIETWVNKLCRFAPIKAISQELVRFDMQLMRNPDIKGEEYQQGTLAGYETREYLLEKWGRQCAYCGVKDVPFQVEHIHPRAKGGSNSITNLTLSCDKCNTKKGTKDIKEFLKKDPAKLSKILAQAKRPLADAAAVNTTRWALFRILKETGLPVETGSGGLTKFNRSQQKLEKTHWLDAACVGKSTPKLIIKGAKPLLITANGHGARQSCRTDKFGFPHRHVPREKIHFNFQTGDIVKAVVTTGKKVGNYIGKVAIRSSGSFNISAKNGLVQGISHKFCKRIHAKDGYSYAQ

SEQ ID NO: 8799 - protein, 380 aa, unidentified
  source 1..380: note = Clostridiaceae bacterium UBA4052
LVYILSKNGNPLMPTSRHGKVKHLLKDGMAKVVRRTPFTIQLLYDSPEYTQPITLGVDAGSKVVGLSATTEKKELFVSEITLRDDIPELLSTRRQNRRTRRNHLRYRMARFLNRTASKKEGWLAPSIKHKVDSHLKVIGNVHRILPISRIVIETASFDIQKIRNPEISGREYQQGEQLGFWNTREYVLWRDKHECQHCHGKSKDRILNVHHKESRKTGGDSPGNLVTLCETCQKSHHEGRIKLKLTPNKSYRHASFMGIMRWYVYNSLQELYPEVSMTYGYITKNNRIRNNIEKTHSADAYCISGNMNAIRIDEIYNQVFKRKHNRQIHKANFLKGGKKKQNQSAYEVKGFRLFDHVRYRDEECFIFGRRTSGYFDLRKL

SEQ ID NO: 8800 - protein, 451 aa, unidentified; identical to SEQ ID NO: 5203

SEQ ID NO: 8801 - protein, 453 aa, Lactobacillus sp.; identical to SEQ ID NO: 7420

SEQ ID NO: 8802 - protein, 418 aa, unidentified
MVYVLSQHGQPLMPTENHAKVRALLKHGKAKVIQRCPFTIQLLYESTTHTQKINLGIDAGSKTIGVSATTDSKVLYESEVVLRNDIVELLSGRRALRRSRRNRKTRYRKPRFDNRRRPDGWLAPSIRQKIKTHVTVVENVMKILPVTKIIVETASFDIQKIKNPEIEGAEYQYGEQLDFWNVREYVLFRDGHTCQCCKGKSKDNILNVHHIESRKTGGNAPNNLITLCETCHKAYHKGVITLPKEIHRGMRFRDAAFMGIMRWAFYDRLKELYTPFGVEVINTYGYITKNTRIEHGLPKEHYVDARCISGNPAAKPLGHYYFQKKVRCHNRQIHKNTILKGGIRKRNQAAYLVNGYRLFDKVKYQNQEYFIFGRRSSGFFDIRTLDGTKVNKGSISCKKLQLVEKSKHYLTEQRKVTA

SEQ ID NO: 8803 - protein, 412 aa, unidentified; identical to SEQ ID NO: 3155

SEQ ID NO: 8804 - protein, 442 aa, unidentified; identical to SEQ ID NO: 2903

SEQ ID NO: 8805 - protein, 413 aa, unidentified; identical to SEQ ID NO: 2636

SEQ ID NO: 8806 - protein, 442 aa, unidentified; identical to SEQ ID NO: 2903

SEQ ID NO: 8807 - protein, 501 aa, unidentified; identical to SEQ ID NO: 7018

SEQ ID NO: 8808 - protein, 431 aa, unidentified; identical to SEQ ID NO: 4804

SEQ ID NO: 8809 - protein, 430 aa, unidentified; identical to SEQ ID NO: 3252

SEQ ID NO: 8810 - protein, 470 aa, Anaerostipes sp.; identical to SEQ ID NO: 2825

SEQ ID NO: 8811 - protein, 413 aa, unidentified; identical to SEQ ID NO: 2636

SEQ ID NO: 8812 - protein, 410 aa, Rhodococcus sp.; identical to SEQ ID NO: 8146

SEQ ID NO: 8813 - protein, 421 aa, unidentified
MRGQPLMPCSPAKARHLLMDKKAVVKRRTPFTLQLTIATGETKQDVTLGVDAGAKHIGLSASTEKEEVFASEVELRQDITGLLAARLAFRRARRHRKTRYRAPRFLNRVHSKHMGWLAPSVENRIQAHMSRIDAICGLLPVTKIVIETASFDIQKIKNPDVEGTDYQQGDQLGFWNVREYVLFRDGHVCQHCRGRSKDKVLNVHHLESRQTGGDAPNNLITLCETCHKAYHAGKIKLKVKRGQSFRAEAFMGIMRWTMLDRVRKAHPDLPVENTYGYLTKNTRITLGLPKTHCIDAYCIAGNLNARRRGVYLYERQMRKHNRQIHKCKVLSKTLKDGTKVGYRKLNQTPYLVKNFRLFDKVRCFGQTGFIFGRRTSGHFDVRTLNRTRLSDCVNSKKLTLLEKRRTFLTELRKEDGASSPV

SEQ ID NO: 8814 - protein, 424 aa, unidentified; identical to SEQ ID NO: 3351

SEQ ID NO: 8815 - protein, 476 aa, unidentified
LAASGTEGVSHPGLPGKYKHKGGQLMSVAVISKTGERLMPTSEYRARKLLKSGKAIKHSYHPFTIQLTERETGDIQPIELCMDTGYIHIGISVKSEKHEYLAEQIDTLTDERGRHDACRMYRRQRRSRKRYRQARFNNRKRDHGWIAPSLEHKKKIHIQAISRINNVIPITDITLEMGNFDTQVLKANEEGKPLPQGADYQHGERYSIATLREAVFSRDSYKCQCCGRTIKDGAILHIHHIKYRSQGGTNSMSNLATVCDKCHTPKNHKPGGKLYNWKPKLSSFKGATFMTAIRWQLYNEVKALFPDIDIHITYGAATKERRRKLDIDKSHVNDAFVMGQFHPKHRIKAILCKKKRRNNRCLEKFYDAKYIDSRDGKKRSGQELFNGRINRNHKKNSENLHQYRLQKVTAGKRTVRKQHYSVQPHDIIIYESRKRETTGCHCNGARVMLLPDKKSVSIKKIKIYRYASGYFKSTFN

SEQ ID NO: 8816 - protein, 481 aa, unidentified
THSAAVVAQAANKVTKAALSNTSANTPAIISAVVKRNLNVGLWFVVVLALLSIFGGVYIIKNIKAPKKARRTRRTNGRRCRRQRRAKANGTISKKCVKQDTAQNGSVSKRAKKIGVIKRHLPGCEKEVLCIGIKNKEAKFSNRVRPEGWLTPTANQLLQTHINLIKKIRKFLPISNVVLEINKFAFMRLDNPNIQKWQYRQGPLYQKASLEEAVSEMQEHHCLFCKKPIAHYHHVVPQSENGSNTIGNIVGLCTKHHDLVHKDTTWQKKLAKKKTGLNKKYGALSVLNQIIPALTKELSSLFPKHFFATNGKSTYDYRAAHSVSKDHWLDAYCIACSVLANDVCDSNINSRVPYELKQFRRHDRRALNNENMSRVYTLNGKVVATNRHKATKQTTDSLEEFRQNHSDDVCKLKVKEHHPTYRNMNRNYPGSVFLIGKQVHVMQGIAGSKNGEATTYKDTNANSIAAGKCKFVAKNSGILFV

SEQ ID NO: 8817 - protein, 420 aa, unidentified; identical to SEQ ID NO: 3247

SEQ ID NO: 8818 - protein, 431 aa, unidentified; identical to SEQ ID NO: 2604

SEQ ID NO: 8819 - protein, 432 aa, unidentified
MLTGLLAEQVDPAGIRKGDTLKVFVLNMRGKPLMPCSPAKARHMLKAGKAVVARRTPFTIKLTIATGETKQDVTLGVDAGAKHVGISATTEKEEVFASEVELRQDITGLLADRLAFRRSRRNRKTRYRAPRFNNRVRSKHKGWLAPSVENRIQAHISRIEAICRVLPITKIVIETASFDIQKIKNPEVEGTDYQQGDQLGFWNVREYVLFRDGHVCQHCRGRSKDPILNVHHLESRKTGGDAPNNLITLCETCHKAYHAGKIKLKTRRGTSFRAEAFMGIMRRTLLDRVRKAHPELSVENTYGYLTKHKRIALGLPKTHCADAFCIAGNLNALRRRDFLYQRQTRKHNRQIHKCSILKGGVRKLHQAPFLVKGFRLFDKVKCTGRIGIIFGRRSTGSFDVRTLDGTRLSAGISSKKLTLLEKRTTFLTQLRK

SEQ ID NO: 8820 - protein, 422 aa, unidentified; identical to SEQ ID NO: 5333

SEQ ID NO: 8821 - protein, 417 aa, unidentified
MPCSPAKARLLLKERKAIVKRRTPFTIQLTIATGEAKQPVTLGVDSGYKHIGLSATTEKAELYASEVELRQDITGLLSARLALRRSRRSRKTRYRAPRFDNRVASKREGWLAPSVENRIAAHMSRVEAVMQVLPVTAITVETAAFDTQLLKNPDITGAAFQQGEQLGFWNVREYVLFRDGHVCQHCRGKSKDPILNVHHIESRRTGGDAPNNLITLCETCHKAFHRGKIKLKVRRGKSFKAETFMGIMRWTLFERLKKAHPELNVRNTYGYLTKHKRISYGIAKSHCADAYCIADNLGAKRLEGFFFQKQTRKHNRQIHKLSILKGGLKKKNQAPYEVKGFRLFDKVICKGEEAFIFGRRTSGSFDVRRLDGTRISAGINYKKLRLLEPRTTYLTEFRKEAALPPLHECRGFRAEFL

SEQ ID NO: 8822 - protein, 442 aa, unidentified; identical to SEQ ID NO: 2637

SEQ ID NO: 8823 - protein, 428 aa, unidentified
MQRVFVLDHNKQPLMPCHPARARKLLKKGKAAVYRRYPFTIIMTHRVGGDLQPIEVKFDPGSRTTGIALVGHFNRGLEVIWAGNLNHRGIQIKSHLESRRAIRRSRRNRKTRYRQARFLNRMRPAGWLPPSLRSRVDNVKNGMLKLSSLTPVSQIAVETVKFDMQKIQNPEISGLEYQHGELAGYEVREYLLEKWGRKCAYCGAQNVPLEIEHIRASSKGGSNRVSNLTLACNKCNQKKGNQDIKEFLKSQPDRLRKIQSQALKPLKDAAAVNATRYAISNVLKSFGLPIVFSTGGRTKFNRLKLGYQKDHWIDAACVGESGSQIVIPKTITPLTITAKGRGSRQKCSMNKYGFPRTGPKKAKRVKGFQTGDIVKAVVTKGKKIGTYFGRVAVRASGSFDIGSGEERVGSISYKYCCLLQRSDGYEYT

SEQ ID NO: 8824 - protein, 413 aa, unidentified; identical to SEQ ID NO: 2636

SEQ ID NO: 8825 - protein, 426 aa, Parasutterella sp.; identical to SEQ ID NO: 3045

SEQ ID NO: 8826 - protein, 514 aa, unidentified; identical to SEQ ID NO: 7895

SEQ ID NO: 8827 - protein, 390 aa, Desulfobacter sp.
LKENVLDVASNPLRIKIDPGSRETGIAVINDDSGEIVFAMELKHRGQQIKNNLESRRAIRRSRRNRKTRYRKPRFDNRTRAEGWLPPSLKSRVHNIETWVNRLCRFCNIQAISMELVRFDMQKIQNPEISGVAYQQGELMGYEVREYLLEKWDRTCAYYCGKTDIPLEIEHIVPKSKGGSNRVSNLTLACTACNRKKGNKSLEQFLSRKPRLLKRIQKQSKVPLKDAGAVNATRWDLFRTLKKTGLPVETGSGGLTKFNRTTRGLHKTHWLDAACVGESTPEKIFQIDKAVLIVKANGHGSRQMCRVNKFGFPRTTAKSTEKKVKGFQTGDIVKAVVTSGKKVGTYIGRVAVRKSGSFNIKTVDKTVQGISWKYCSLLHASDGYSYNTTC

SEQ ID NO: 8828 - protein, 582 aa, unidentified; identical to SEQ ID NO: 7020

SEQ ID NO: 8829 - protein, 424 aa, unidentified; identical to SEQ ID NO: 8578

SEQ ID NO: 8830 - protein, 420 aa, unidentified; identical to SEQ ID NO: 7011

SEQ ID NO: 8831 - protein, 431 aa, unidentified
MPNKVYVINKHGRPLMPCSPAKARHLLDAGKAKVKKRTPFTIQLVYGSSGYTQEVILGVDAGSKTIGMSASTKKEEVFAADVTPRNDVVDLMSTRREFRRARRNRKIRYRKPRFDNRVRSKHKGWLAPSVEVKIQEHITSIKRVCRILPVSKVVIETAEFDLQLLKAIADGKPVPQGEDYQKGEMYGHYNVRQYVLWRDGYTCQCCGAHATKKKEVRLHVHHLESRKVGGDAPDNQVTLCESCHEKLHKGLIAEKDFKKRKRKSTRDATFMGIMRKTLMQRLCSELPIHVVETRGYITKATREKLLVLPKSHINDALAIAQGKHGFNVGYLPGILQIDMIYTIRPVRHHNRQLHKATILKGGIRKSNQTEKYVFGYCLFDKVQFNGQDCFIWGRRTTGIFTIKTINGKMIKDGISFKKLKLVEKSTSYLIA

SEQ ID NO: 8832 - protein, 414 aa, unidentified
MPCSPAKARLLLKEKKAIVKRRTPFTIQLTIATGESKQPVTLGVDAGYKHVGLSASTEKAELYASEVELRQDITDQLSARLALRRSRRNRKTRYRAPRFDNRIRTKRKGWLAPSVENRINAHLSRIEAVLRLLPVTKISVETASFDMQLLKNPDIAGKEYQEGEQLGFWNVREYVLFRDRHVCQHCYGRSKDPVLNVHHLESRRTGGDSPGNLITLCETCHKALHRGDITLKAKRGKSFRAEAFMGIMRWEVHNRLRALHPGIEVSNTYGYRTKHARIANGIAKSHCADAFCIAGNLGAERLCEFFFQKQTRRNNRQIHKLSILKGGIRKRNQAPFEVKGFRLFDKVACQGEEGFIFGRRSSGFFDVRKLDGTRISAGISCKKLHLLEKRRTYLTEIRKEEALPPLPEGRGLRA

SEQ ID NO: 8833 - protein, 465 aa, unidentified; identical to SEQ ID NO: 3070

SEQ ID NO: 8834 - protein, 512 aa, unidentified; identical to SEQ ID NO: 4031

SEQ ID NO: 8835 - protein, 373 aa, Moorena sp.; identical to SEQ ID NO: 3006

SEQ ID NO: 8836 - protein, 431 aa, unidentified
MPDKVYVISRLGHPLMPCSPAKARHLLDDGKAKVVKRTPFTIKLLYGSTEYTQAVILGVDAGSKTIGLSASTTKEELFAAEVMPRNDVVENLSTRREFRHARRNRTTRYRKPRFNNRVHSKNNGWLAPSVEVKIQEHITSIKRVCAILPISKIVVETAEFDLQLLKAVQDGKPVPEGEDYQKGEMYGSYDVRQYVLWRDNYTCTCCGVKGTDKRPVKLHVHHFESRKHGGNAPDNYGTLCEDCHKKLHLGIITDISLKTRKRPSTRDAAFMGIMRKTLMQRLITGLSIPVAETKGYITKAAREEILKLPKTHTNDALAIAQGRHGFGIREQAYVKPTNRIYTVRPVRHHNRQLHKATMLKGGIRKLNQASKYIFGFRLYDKVLYQGGECFVWGRRRSGSFLLRTIDGTKVKDGVGYRNLTLLERSTNYLIA

SEQ ID NO: 8837 - protein, 512 aa, unidentified
MSTIYVLNKDGKPLMPTTRGGHVRHLLKEQKARVVQSNPFTIQLLYETNDVVQPLYLGIDPGRTNIGVAVVKADGTAVFAAHLETRNKKIPKLMQDRKKARRARRTNGRRCRRQRRAKANGTISKKCVKQDTAQSKNPSKRAKKIGVIKRHLPGCKKDVLCVGIKNKEAKYTNRARLEGWLTPTANQLLQTHINLVKKIQKFLPISDVVLEVNKFAFMRLDNPNIQKWQYQRGPLYQKGSLENAVSEMQEHHCLFCEKPIEHYHHVVPKSENGSNTIANIVGLCAEHHNLVHKDVAWQEKLVEEKTGLNKKYGALSVLNQIIPALTKELSFLFPKHSFMTNGKSTHDYRAAHGISKDHWLDAYCIACSVLPIDVCDSTINNCVPYELKQFRRHDRRALNNENMNRVYTLNDKVVATNRHKATEQEAASLEEFRKEHPNDVCKLKVKEHHPTYRNMNRNYPGSVFLVGKQIHVMQGIASSKDGKATKYNDTRATTIAAGKCKFVAKNSGILFV

SEQ ID NO: 8838 - protein, 431 aa, unidentified
MPDKVYVISRLGHPLMPCSPAKARHLLDDGKAKVVKRTPFTIKLLYGSTEYTQPVILGVDAGSKTIGLSASTTKEELFAAEVMPRNDVVENLSTRREFRRARRNRTTRYRKPRFNNRVHSKNNGWLAPSVEVKIQEHITSIKRLCAILPISKIVVETAEFDLQLLKAVQDGKPVPEGEDYQKGEMYGSYDVRQYVLWRDNYTCTCCGVKGTDKKPVKLHVHHFESRKHGGNAPDNYGTLCEDCHKKLHLGIITDISLKTRKRPPTRDAAFMGIMRKTLMQRLITGLSIPVAETKGYITKAAREEILKLPKTHTNDALAIAQGRHGFGIREQAYVKPTNRIYTVRPVRHHNRQLHKATMLKGGIRKLNQASKYIFGFWLYDKVLYQGGECFVWGRRRSGSFLLRTIDGTKVKDGVGYRNLTLLERSTNYLIA

SEQ ID NO: 8839 - protein, 428 aa, unidentified; identical to SEQ ID NO: 4440

SEQ ID NO: 8840 - protein, 420 aa, unidentified
MQYVYVLNKHGEPLMPCSPGKARILLKQQKACVVKRTPFTIKLLYGSAGYKQPITLGVDAGSKHVGLSASTEKRELYSEEFTPRNDVVELLSTRRQNRRSRRNRKTRYRAPRFNNRIHSKHKGWLAPSVEVKIQEHITVIKRICRILPITLVRVETAEFDTQRLKAMLAGKPLPVGTDYQLGEMYDEYNVRQYVLKRDHYTCQCCGAHNTAEKVVKLHVHHLESRKTGGNAPSNLVTLCTTCHKNLHKGKVTLDGKERDKPLRDAAFMGIMRKTLMARLKEELPIPVQGTYGYITKMRREQNDIKKSHTNDARCISKHPLAEPCSVCYRTKAIRHHNRQTHKANFSKKCIRKRSQMPYLVEGFRLWDKVLYKGQECFVSGRRSSGSFALKKLDGTSISKGVTFKKLRLLEPATNYLIERM

SEQ ID NO: 8841 - protein, 414 aa, unidentified
MPCSPAKARLLLKEKKAIVKRRTPFTIQLTIATGETKQPVGLGVDAGYKHVGLSASTDKAELYASQVELRQDITDLLSARRALRRARRNRKTRYRAPRFNNRIRTKRKGWLAPSVENRINAHLSRIEAVLRLLPVTKITVETASFDMLLLKNPDIAGKEYQEGEQLGFWNVREYVLFRDGHVCQHCYGRSKDPVLNVHHLESRRTGGDSPGNLITLCETCHEALHRGEIALKTKRGHSFRAEAFMGMMRWEVLNRLKASHSELEVNNTYGYRTKHARIVNGIDKSHCADAFCIAGNLGAERLCEFFFQKQTRRNNRQIHKLSILKGGIRKRNQTPFEIKGFRLFDKVACKGEESFIFGRRSSGYFDVRKLDGTRISAGISYKKLRLLEKRRTYLTEIRKEEALPPLPEGRGLRA

SEQ ID NO: 8842 - protein, 413 aa, unidentified; identical to SEQ ID NO: 2636

SEQ ID NO: 8843 - protein, 414 aa, unidentified
MIYVLNYDGQSLMPTDRCGRSRHLLKERKAKVVKRCPFTIQLLYQNTNYTQPISLGVDAGSKYIGMSATTETKEVYASEIELRNDIVKLLSDRRALRRGRRSRKTRYRKPRFQNRKRGEKWLVPSIQHKIQTHLDATEAVCKILPITRITVETASFDIQKIKDPEIKGTGYQQGDQLGFWNVREYVFFRDGHTCQCCKGRSKDKILNVHHIESRKTGGNAPNNLITLCETCHKGYHNGTVKLPKRIHRGMSFKDAAFMGIMRWTFYNELKTIYPDVHMTYGYITKNTRIEHRLPKEHYIDARCISGNPTAAPLGVVYYQKKVRRHNRQIHKLKILKGGIRKQNQADYLVKGFRLFDKVKYQRKEYFTFGRRSSGFFDIRTLDGTKINKGSLSYKKIQFLEAPRGYLIEQRKEMA

SEQ ID NO: 8844 - protein, 420 aa, unidentified
MQYVYVLNKHGEPLMPCSSGKARLLLKQQKACVVKRTPFTIKLLFGSTGYKQPITLGVDAGSKHVGLSASTEKRELYCEEFTPRNDVVDLLSTRKQNRRSRRNRKTRYRAPRFDNRVHSKRKGWLAPSVEVKIQEHITVIKRIRRILPITLVRVETAEFDTQRLKAMLEGKPLPVGTDYQLGEMYDEYNVRQYVLKRDHYTCQCCGAHTTTKKTVKLHVHHLESRKVGGNAPSNLITLCTTCHDALHKGKVSLDGKERGKPLRDAAFMGIMRKTLMARLRDELSIPVQGTYGYITKMRREQNDIKKSHVNDARCISKHPLAEPCSVCYRTKAIRHHNRQTHKANFSKGSIRKRSQMPYVVEGYRLWDKVLYKGQECFVSGRRASGSFTLKKLDGTRISKGVTFKKLRLLEPATNYLIERM

SEQ ID NO: 8845 - protein, 461 aa, Parasutterella sp.; identical to SEQ ID NO: 3646

SEQ ID NO: 8846 - protein, 413 aa, Blautia sp.; identical to SEQ ID NO: 2636

SEQ ID NO: 8847 - protein, 425 aa, unidentified
MENTLKVFVLNMRGQPLMPCSPPKARKLLRAGKAVPVRRTPFVIQLTVPTGETKQPITLGVDAGYKHVGLSATTAKEELLASEVELRQDVTGLLSNRLALRRARRNRKTRYRAPRFDNRVRSKHKGWLAPSVENRIQAHISRIEAVCRVLPITKIVIETASFDIQKIKNPEVEGTDYQQGEQLGFWNVREYVLFRDGHVCQACKGRSKDLILNVHHIESRKTGGDAPGNLITLCEACHKAYHAGKLKQFSPRRGASFRAETFMGIMRWTVLNRLRERHPELPVTNTYGYLTKHKRIVAGLPKTHCADAFCIAGVLDAKRRGEYLFQKQTRRHNRQIHKLTILKGGVRKRHQAPYLVHGFRLFDKVLCKGEVGFIFGRRSSGAFDVRRLNGTKISAGISYKKLSLLEKRKMFLTELRKEGRDSSRV

SEQ ID NO: 8848 - protein, 306 aa, unidentified
LAPSVEVKIQEHITSIKRVCRILPVSKVVIETAEFDLQLLKAIEEGKPVPQGEDYQQGEMYGHYNVRQYVLWRDGYTCQCCGAHATKKKEVRLHVHHLESRKVDGDAPDNQVTLCESCHEKLHKGLIAEKDFKKRKRKSTRDATFMGIMRKTLMQRLCSELPIPVIETRGYITKATREKLLVLPKSHTNDALAIAQGKQGFNVGYLPGIVQINKIYTIRPVRHHNRQLHKATILKGGIRKSNQTEKYVFGYCLFDKVQFNGQDCFIWGRRTTGIFTIKTINGKMIKDGISFKKLKLVEKSTSYLIA

SEQ ID NO: 8849 - protein, 424 aa, unidentified; identical to SEQ ID NO: 3351

SEQ ID NO: 8850 - protein, 439 aa, unidentified
MVYVLSIDTAPLMPTNNAKAKVLLKTNKAKVKQVKPFTIQLTYKTDTEYTQDVTLGVDSGYLNIGFSAVTEQKELISGEVKLLQNMKERITDRAMYRRNRRQRLRYRKPRFDNRKIEKEWLAPSIQHKLDSHIRFIEKIKSILPITKIILEVANFDIQKIKNPDIQGPEYQQGKQLGFWNLREYILHRDNHTCQNPDCKNKSENPILETHHIIFRSNGGTNTPSNLITLCSKCHTCANHKKGKFLDLWQTTKPKIRSFKDSTFMSMVRWRLKDMIDCEITYGYITKNNRIELGLEKTHYNDAFCIAEGTTQLRSNPIVYTQVKRNNRSLEKYYDAQYIDTRTNQKASASELNCGRRTRNKNENRENLKIFRGTKLSKGQRRIRKQRYFYQPNDLVKYNDKVYTVKGSQNYGRYVALKEIKKVPKIDLLIPYRFRKGFVC

SEQ ID NO: 8851 - protein, 470 aa, unidentified
MSVFVVGLNGCRLMPTSERKARLLLKQGKAFVEQKVPFTIRLNYKTGSTTQLGYLGIDTGSQHIGVSVVREDGIVLHKEEIGLRDSMSKRKLLEAKASLRRGRRYRKTRYRHPKWRPKTKRVYCEVPDRKGRHWQKKKITFTSKRPKGWLPPSLQSKTDHHIRWIKKLQDLLPEGYRLSIELGRFDPARMKNPEIHGDLYQKGPQYDYENVRAYVLDRDRYTCQICKKKGGKLHVHHILYRSHGATDDPQYMVTVCSDCHSAQNHLPGGILYQWMQEQKRFSRGLRDATFMNILRKRLIRAFPEAVFTYGNVTKVDREKLKLPKSHGNDATAIALVKTGITAVKDKESVICIQQVRRKKRSLHEETPRKGRKEPNRTAARNNKNTKAVTVTKRQNKKKVSMTGCLFDRVELNGKKGWISGFTGKSCYVKDADDQYLSTSPKYKQVSLSKLRILHHCGNWIIGAKKTLGNG

SEQ ID NO: 8852 - protein, 456 aa, Halomonas sp.
MAVFVLDKKKQPLMPCSEKRARLLLARGRAVVHKRYPFTIRLKNRVGGEAQPLRLGIDPGSKTTGLALMRETEGELRHVLCLFELIHRGYQIKKALQQRAAFRRRRRSANLRYRAPRFNNRIKPKGWLAPSLQHRVDTVMAWVNRLSKSAPITGISQELVRFDTQKLESPEISGVEYQQGTLLGYEVREYLLEKWGRECAYCGTADTPLEIEHMVPRSRGGSNRVSNLTLSCHPCNAEKDSQTLTDFFATNKGLKKRLKANGLSADAQLERVQRQLKQPMRDASAVNATRWALFSALKTTDLPVAVSSGGRTKYNRQRLNIPKTHALDAACVGAFGKLYDWTEPTLTIKAMGRGSYQRTRLTKHGFPRGYLMRQKQVHGFQTGDMVRAIVPTGKKAGTHTGRVAIRKTGSFNIQAEHGAVQGISHKYCTLIQRSDGYGYYVTLFSNLTGEAGRAVA

SEQ ID NO: 8853 - protein, 465 aa, unidentified; identical to SEQ ID NO: 6381

SEQ ID NO: 8854 - protein, 427 aa, Sharpea sp.
MVYVLNQHGQPLMPTENHAKVRILLKSKKARVVKRCPFTIQLLYKSTEYTQNISLGVDAGSRHVGLSATTKDKVLFESDVELRNGIVGLLSARRQNRRARRSRKTRYREPRFDNRRRKDGWLAPSVQNKVDTHLTAIRRVHEILPVSRIIVEVASFDIQKIKNSDISGTEYQQGEQMGFWNVREYVLFRDGHECQCCHGKSKDRILNVHHIESRKTGGDAPNNLITLCETCHTGYHRGTVKLPKSIHRGMRFRDAVFMGIMRWAFYGRLKEIYPDVHLTYGYITKNTRIRHGLPKDHCIDARCISGHPDAVSYGTVYYQKKARCHNRMIHKNGILKGGIRKRNQAPYEVMGFRLFDKVKWKGRECFIFGRRSTGRMDLRLLDGAKVNASVGYKNLHLLEMRKNMLVEERRKAVPPTGKPVGFPARHL

SEQ ID NO: 8855 - protein, 311 aa, unidentified
MSVAVMSKTGMRLMPTSEYRARKLLKSKKATVYRYNPFTIQLTERETGDVQTVELCMDTGYLHIGTSVKSEKHEYLGVQIDTLTDEKQKHDACRMYRRQRRSRKRYRQSRFNNRKRSDGWIAPSLEHKKDIHIQTISRICNAMPITNITLEMGNFDTQVLKALEENRPLPQGTDYQHGERYGIATLREAVFARDKYTCQCCRKTIADGAILHVHHIIYRSRGGTNRMSNLATVCDRCHTPANHKPGGRLYNWKPKIASFKGATFMTAVRWKMYNEVKSKFSDINIHITYGAETKEQRRLLISPNRTSMMLL

SEQ ID NO: 8856 - protein, 431 aa, unidentified
MPDKVYVISRLGHPLMPCSPANARHLLDDKKAKVVKRMPFTIRLLYGSTKYIQPIILGVDAGSKTIGLSASTAKEEVFAAEVMPRNDVVENLSTRREFRRARRNRTTRYRKPRSDNRVRSNHERWLAPSVKVKIQEHITSIKRVCTILPISKVVIETAEFDLQLLKAIQEGKPIPEGEDYQKGEMYGSYNVCQYVLWRDNYTCICCGVRGTPKNPVRLHVHHFESRKYGGNAPDNHGTLCDDCHKKFHLGIITDVKLKTRRRQSTRDAAFMGIMRKTLMWRLRTELFIPVAETKGYITKATREKLLVLPKSHTRDALAIAQGRHGFGIKEYAYVEPANHIYTVRPVRHHNRQLHKASILKGGIRKRNQASKYVFGFRLYDKVLYQGKACFVWGRRTSGTFLLRTIDGIKVKDGVSYRNLTLLERSSNYLIA

SEQ ID NO: 8857 - protein, 442 aa, unidentified; identical to SEQ ID NO: 4522

SEQ ID NO: 8858 - protein, 457 aa, unidentified
MDAVAVISASGKPLMPTNPVRARKLIKKGKAVIYKYRPLFTIRLTERTDGDIQTIEYCCDTGYQHIGLSIKSRKHEYVNEQRDLLPNETERHNGSRKYRKARRRRKLRHRACRRDNRHDNQICKDGYAPSIRNKRDQHISLYRSYTEILPVGRAVFEMGQFDTQVLKAIEKGEPLPQGKDYQHGERYGYATLREAVFARDSYTCICCGKNAFKDKRILCIHHLGFRIGDRTNRLANLATVCTKCHTPKNHQPKGKLYNLKPELKDFKGATFMTMVRWDMLDKLKAVSKGIRVDVTYGAVTKEARRDLKIKKSHANDAYCMGSFHPSHRTDLKRYEKCRRNNRVLSKFYDATYIDIRDGKKKKANALGCNRTKRRESRRSEKNERIYRGKKVSKGRIVLRTKRAVIRPGDIVYVGKKKYIVASSKNLGKQLKLADGSLLTTSKVTKIIHCGGWKTVTL

SEQ ID NO: 8859 - protein, 465 aa, unidentified
MNTCVCVLSNNGERLMPTFRLGKVRHLLKDGKAKIVKHHPFTIQLLYNSKTNIQPIEICEDVGYNYIGISVKSESYEYVSAQYDTLQDEKEHHDDCRKMRRARRNRLRYRKPRFDNRKRSEGWLAPSLEHKKQLNISLVERYVSVIPITHATVEVGSFDTMLLQAIQKGEAKPEGADYQEGPRYNLATLREAVFYRDNYACQVCGRKITDGAILHMHHMFYWKGRHGYKLDELVTACEKCHTPANHQKGGKLFGFGEDKEFADLSGAAFMNAVRWQIVNALHTTYSKEFVTITYGAMTKEKRIALQLEKSHNNDAYAMGEFHPSRRCAFEHYEKVRRNNRILEKFYDSRYIDIRTGKETAGKELFNGRISRNHKKDSENLHKYRGKRVYKGHRALMRKKINLNPGDVVSLNGETLVVHGTHTDKKGAVNVEFKAPAKNGQKSASLKKLKIVKTANSMHSAWEKVS

SEQ ID NO: 8860 - protein, 448 aa, unidentified; identical to SEQ ID NO: 8365

SEQ ID NO: 8861 - protein, 546 aa, Streptomyces sp.
LIANVLRHTRQEVTRSPTHGDTPGSRDETAHGHPATARGTGGTHGRGETGGPSARVRRRHAEVTAPAVAEAANGDGDVPTGCDTYAGGTGAARVFVLSKDGKPLMPCHPARARELLGKGRAVVARQAPFAIRLKDRTHSESDVDGVQLRVDPGSKGTGFALTDEKMETDSCGRNVVVRRGLVTVELRHRGDQIQRSMQQRAGYRHRRRSANCRYRPRRSQNRARAQGWLPPSLQHRVDTTASLVTRMCRYAPVSEIHLEHVAFDTHSMSAGRALRGADHQHGSLVGTHARAYLRTKWGSACAYCGATDVPLNIDHLQPRSRGGSDRISNLVLACVPCNQAKGSRPVAVFLAHEPERLAKVLKQVRVPLRDAAAMNTTRWGLLGALTALGLPVRCWSGSLTRQNRTATGLPKTHSLDALCVGALGREARNAIVRVPGHLLVLNAVGRGSYARTTPDRFGFPRLRRARGKQHFGFISGDLAQATVPSGKWAGTWVGHIAVRARGQHSLATPVGRINVSHRNLRLLQRGDGYSYARRDVIVEDPCEKSA

SEQ ID NO: 8862 - protein, 451 aa, Marinobacter sp.
LENDMAVFVLDRQKNPLMPCSEKRARLLLTRKRAVVVRAYPFTIRLKDRAGGVVQKVILKIDPGSKETGLAVSRVSAQGEYVLCLIELIHRGRQIRKALDQRRGFRSRRRGQLRYRAPRFNNRTKPKGWLAPSLQHRVDTTTSVIKRLRALVPVTSVSQELVRFDLQQMENPEISGVEYQQGTLLGYEVREYLLEKWGRECAYCGETDTPLEIEHIVPKSNGGSNRISNLAIACHDCNKEKDTQTLAVFFQTSKRLKDKQPRLSQVLIQCKRPLRDAAAVNSTRWALFQSLKNTELPVDVGTGGQTKFNRQRLGIPKTHALDAACVGVVEHVFDWEKPTLRIKATGRGSYKRTRLTKHGFPRGYLMREKSVYGFQTGDMIRAIVPTGKKEGIWLGRVAIRKTGSFNIQTSSGAVQGISHRHCQLMQRADGYGYHLQPTPQKGGGKQESLSC

SEQ ID NO: 8863 - protein, 415 aa, unidentified
MVYVLDKNGQPLMPTDRHRKVRLMLQSGQAKVIKRCPFTIQLTYNTGHQAQEISLGIDAGSKHIGVSATTKTRVLYEADVELRNDIVDLLSSRRELRRGRRNRKTRYRPARFDNRRREDGWLAPSIRQKIGTHLTVVENICKILPISRITVETASFDIQKIKNPDIQGAEYQQGDQLGFWNNREYVLFRDNHTCQCCKGKSKDKILNVHHIESRKTGGNAPNNLITLCEICHTGYHKGAIQLPKTVKRGMRFKDAAFMGIMRWAFYEALKQQYEPVALVHNTYGYITKHTRIEHNLPKEHYVDARCISGNPDAFPSGEYYYQKKVRCHNRQIHKLTILKGGIRKQNQATYLVKGYRLFDKVSYQRKEYFVFGRRKSGFFDIRTLSGKQVNKGSLSCKKLKFIATRMYYLIERRAV

SEQ ID NO: 8864 - protein, 423 aa, unidentified; identical to SEQ ID NO: 3951

SEQ ID NO: 8865 - protein, 456 aa, unidentified
MSTCVCVLSNSGERLMPTFRLGKVRRLLKDGKAKIVKHHPFTIQLLYDSKTNTQPIEICEDVGYNYIGISVKSKSHEYVSAQYDTLQDEKEHHDDCRKMRRTRRNRLRYRKPRFDNRKCDKGWLAPSLEHKKQLNISLIERYVSVIPITHATVEVGSFDTMLLQAIQKGKAKPESADYQKGPHYNLATLREAVFYRDNYTCQICKRKIADGAILHMHHMFYWKGRHGYQLDELATVCEKCHTPANHQKGGKLFSFGEGKEFADLSGAAFMNAVRWQIVDALYTTYDKEFVTITYGAMTKEKRIALQLEKTHNNDAYAMGDYHPACRCKFRHYQKRRRNNRVLEKFYDATYIDARTGNKAKGKELFNGRINRNHKKDSENLHKYRSKKVSKGRRSIRRRRYAIQSYDTVRLEGKTYITSGCHNKGTRLLIPVNGKSKSVAISKVQVVCHAGAWIQII

SEQ ID NO: 8866 - protein, 420 aa, unidentified
MQYVYVLSKHGEPMMPCSPGKARLLLKRQKACVVRRTPFTIKLLYGSAGYKQPITLGVDAGSKHVGLSASTEKRELYREEFTPRNDVVELLSTRRQNRRSRRNRKTRYRAPRFDNRVHSKHKGWLAPSVEVKIQEHITIIKRICKILPISLVRVETAEFDTQRLKAMLAGKPLPVGTDYQLGEMYDEYNVRQYVLKRDNYTCQCCGAHTTAKKLVKLHVHHLESRKTGGNAPSNLVTLCTTCHKNLHKGRVTLDGKERGKPLRDAAFMGIMRKTLMARLKEELPIPVQGTYGYITKMRREQNDIKKSHTNDARCISKHPLAEPCSVCYRTKAIRHHNRQTHKANFSKKGIRKRSQMPYLVEGYRLWDKVLYKEQECFVSGRRSSGSFTLKKLDGTSVSKGVTFKKLRLLEPATNYLIERM

SEQ ID NO: 8867 - protein, 479 aa, Acidithiobacillus sp.
MFVFVMDQYGRPGHPTRRMDWVRKQLKRKRAKLVGGGISGKPAVLVLREQSFNRNETVNRQFFVTLDTGFRNIGYAVTEWLVNGTLRVLLKGTLAARTPEIRGLMDERAMYRRTRRYNRRVNVKKKGQSPKHRPPRYESRGKRDSVTLKHGLETHRNLYARLARLVPLPNHQVTQGFESVFFDLRALAHGKPRTGSGYQVSPLGKGTGEKTHRFVVRRDGGCVICGSRDRLQDHHLRKRSKQGSDRASNRVTLCEDCHADVHAGLIALPITDGTQWRDASAVNAVCGKLRKQSMVLNIVPVPVVQSVAARRRLGLEKTHALDAVSVAAAMTGAGRVDQQDAVNLDLTQYRRHRRAHIHAQRDRRYYLPGVSAPVAHNRRKRCDQGDVDSLAEFRKKRPADVGRLTVRKSVRLYTPNRAKAPAVGGDVWTWRGKSFVVQGIKNRGRYLHSAELQPLVEKTYVPVSQAKRYLRNTGMVPCR

SEQ ID NO: 8868 - protein, 470 aa, unidentified
MSVFVVGLNGCRLMPVSERKARLLLKGGKASVYRKVPFTIKLNYKTGSTVQPGYLGIDTGSQHIGVSVVRKDGTVLHKEEIGLRDSMSKRKLLESRASSRRGRRYRKTRYRHPKWKPKTKRIYNEKADRKGRHWKKQKNTFTSKRQAGWLPPSLQSKTDHHIQWIRKLLDLLPEGYRLSIELGRFDPARMKDPEIHGELYQKGPQYDYENVRAYVLARDGYTCRVCKKKGGKLHVHHILYRSRGASDNPKYMAAVCSKCHTTENHLPGGILYQWMQDQKKFTRGLRDATFMNILKKRLRKAFPDAVFTYGNITKADREKLELPKSHGNDATAIALVKTEVKSVKDEEPVIHIQQVRRKKRSLHEETPRKGRKEPNRTASRSDKNTKSVTVTKGSGEKKASMTACLFDRVELDGKKGWITGFTGTSCYVKDKEDNYICTSPKYKQVSISRLRILHHCGNWAIGAEKPLGKG

SEQ ID NO: 8869 - protein, 411 aa, unidentified
LRVFVLNKRGKPLMPCSPAKARLLLKEKKAIVKRRTPFTIQLTIATGETKQPVGLGVDAGYKHVGLSASTDKAELYASQVELRQDITDLLSARRALRRARRNRKTRYRAPRFNNRIRTKRKGWLAPSVENRINAHLSRIEAVLRLLPVTKITVETASFDMLLLKNPDIAGKEYQEGEQLGFWNVREYVLFRDGHVCQHCYGRSKDPVLNVHHLESRRTGGDSPGNLITLCETCHEALHRGEIALKTKRGHSFRAEAFMGMMRWEVLNRLKASHSELEVNNTYGYRTKHARIVNGIDKSHCADAFCIAGNLGAERLCEFFFQKQTRRNNRQIHKLSILKGGIRKRNQAPFEIKGFRLFDKVACKGEESFIFGRRSSGYFDVRKLDGTRISAGISCKKLRLLEKRRTYLTEIR

SEQ ID NO: 8870 - protein, 325 aa, unidentified
MDSRRMYRRSRRNRKTRYRKCRFLNRGNSVKVGRYCPTIVSKCYGHEREIAFCKKILPIKDLIFETGKFDTQLMEKPWLQEHKWAYQKGVNYGYANAREHALVRDNYTCQCCGKKNCRVEVHHIVFRRNGGSDSLENLITLCGDCHKSVHLGEIDLKLKGKRRGTLRYTTQMSTIRCMLLRKYPDVIETFGFVTKANRENLGLKKDHYIDACVIASGGLEFEQLGVLYQKKCVPTQSRVLTKGARDEKKIPTGKVHGFKRYDKVKYLGKTCFVKGRRVRGGFVLMDITGDTLDFRNIGGKQNPSYKYIKRISARRGILCITSAMY

SEQ ID NO: 8871 - protein, 465 aa, unidentified; identical to SEQ ID NO: 4641

SEQ ID NO: 8872 - protein, 431 aa, unidentified
MDAWDIIVILNKRGKPLMPCSPAKARLLLKEKKAIVARRTPFTIQLTIATGEAKQPVSLGVDAGYKHVGLSASTEKAELYASEVELRQDVSDLLSARRALRQSRRSRNTRYRAPRFDNRIRTKRKGWLAPTVENRINVHLSRIETVLRLLPVTKITVETASFDTQLLKNPDIAGKEYQEGEQLGFWNVREYVLFRDGHVCQHCHGRSKDPVLNVHHLESRRTGGDSPGNLITLCETCHKALHRGEIKLKAKRGRSFRAETFMGIMRWGVLNRLKASHPKLEVHNTYGYRTKHARIANGIAKSHCADAFCIAGNFGAKRLGEFFFQKQTRRNNRQIHKLSILKGGIRKRNQAPFEVNGFRLFDKVACQGEEGFIFGRRSSGFFDVRKLDGTRISAGISYKKLHLLEKRRTYLTEIRKEEALLALPEGRSLRA

SEQ ID NO: 8873 - protein, 456 aa, unidentified
MNTCVCVLSNNGERLMPTFRLGKVRRLLKDGKAKIVKHHPFTIQLLYDSKTNKQPIEICEDVGYNYIGISVKSESHEYVSAQYDTLQDEKEHHDDCRKMRRARRNRLRYRKPRFDNRKRSEGWLAPSLKHKKELNVNIVKMYCAVMPITHATVEVGSFDTMLVKAIQEGKAIPEGADYQKGPRYNLATLREAVFYRDNYVCKVCGRKATEGAILHMHHMFYWKGRHGYKLDELVTACEKCHTPANHQKGGKLFGFGEDKEFADLSGAAFMNAVRWQIVNALHTTYSKEFVTITYGAMTKEKRIALQLEKSHNNDAYAMGDFHPVHRCGFRHYQKRRRNNRVLEKFYDATYIDTRTGNKAKGKELFNGRISRNHKKDSENLHKYRSKKVSKGRRSIRRRRYAIQPYDTVRLEGKTYITSGCHNKGTRLLIPVNGKSKSVAISKVQVVCHAGAWIQII

SEQ ID NO: 8874 - protein, 428 aa, Moorena sp.
MQNYVLVIDTDKQPLNPISPKKARRLLDKGKAAVFRMYPFTIILKAAIANPTISPCQIKIDPGSKVTGFALVQDDQVIWGMELEHRGGLIKKKLESRSGVRGGRRNRNTRYRKPRFLNRKRPEGWIPPSLEHRVLTIETWVRRLTKFCPVNEIWIEIVKFDTQKMQDPEINGVEYQQGELAGYEVREYLLEKWGRECAYCGKQNIPLQIEHIHPKSKGGSDSAKPTLRERVSNLCLACEKCNQRKGNRPIEEFLKKKPGLLQKIKNKALSPLRDAAAVNTTRNKVVKVLNEIKPVVTGTGAQTKYNRTKLGLPKQHWIDAACVGDVEALVLRTYQPLVVTCKGQGGRQKAALNKYGYPIRHNPLKPIKGWSSGDIAKNLLTGEFGRVNPRSKSNSFNYTVPGKKAISLHVKNLLRVHRKDGYTYGFCR

SEQ ID NO: 8875 - protein, 332 aa, unidentified
LRVFLEQTRKTADAGYKHVGLSASTEKAELYASQVELRQDITDLLSARRALRRARRNRKTRYRAPRFDNRIRTKCEGWLAPSVENRINAYLSRIEAVLRLLPITKITVETASFDTQLLKSPDIAGEEYQKGEQLGFWNVREYVLFRDGHVCQHCHGRSKDPVLNVHHLESRRTGGDSPDNLLTLCETCHKALHRGEITLKTKRGQSFRAQAFMGIMRWVVLDRLKASHPKLEVQNTYGYRTKHARISNGIAKSHCADAFCIAGNLGAERLGELFFQKQTRRNNRQIHKLSILKCGIRKRNQAPFEAKGFRLFDKVARKGEEGFIFGRRSSKT

SEQ ID NO: 8876 - protein, 414 aa, unidentified
MLVFVLNQHSKPLMPCKPSKAKKLLKASKAKVVNRTPFTISLLFGSSGYKQPITAGMDTGSQKIGVAAIANGQVIYQSEIEIRQDISKKMQQRQMYRRTRRGRKTRYRPARWLNRASMRQNGRLAPSVQSKVHSHLREKRFVESLLPVTAWHVETAHFDIHKIVNPDVSGKAYQEGEQKGFYNVKAYVLHRDGYKCKSGQKGNHSKKLHVHHIQFKSNGGTDIPSNLITLCETCHDALHLGEFELKTRKTKTKHATEMGIIKSQLIKSDWDFAETFGYETKFKREQVLQLPKTHYNDAIAISCEEGELVKPLGQVLYKKHIAKGDYQQTTGKRSEKTIPTGKLFGLKKFDLVSTSFGIGFIKGKRSSGYFALMDIFNNTVTASVNVKKYCQRLTARTGTLIQEVAIPPLSPIGT

SEQ ID NO: 8877 - protein, 512 aa, unidentified
MSTVYVLNKDGKPLMPTTRGGHVRHLLKEQKARVVRTKPFTIQLLYETDDVVQPLYLGIDPGRTNIGVAVVKTDGTAVFTAHLETRNKEIPKLMQGRKKARRTRRTNGRRCRRQRRAKANGTISKKCVKQTTAQNGSVSKCAKEIGVIKRHLPGCEKDVLCVGIKNKEAKFSNRTRQEGWLTPTANQLLQTHINLIKKIRKFLPISNVVLEINKFAFMRLDNPNIQKWQYRQGPLYQKASLEEAVSEMQEHHCLFCKKPIAHYHHVVPQSENGSNTIGNIVGLCTKHHDLVHKDTTWQKKLAKKKTGLNKKYGALSVLNQIIPALTKELSSLFPKHFFATNGKSTYDYRAAHSVSKDHWLDAYCIACSVLANDVCDSNINSRVPYELKQFRRHDRRALNNENMSRVYTLNGKVVATNRHKATKQTTDSLEEFRQNHSDDVCKLKVKEHHPTYRNMNRNYPGSVFLIGKQVHVMQGIAGSKNGEATTYKDTNANSIAAGKCKFVAKNSGILFV

SEQ ID NO: 8878 - protein, 442 aa, unidentified; identical to SEQ ID NO: 3333

SEQ ID NO: 8879 - protein, 424 aa, Enterococcus sp.
MRVFVRNMQGKPLMPCSNRKARLLLKEGKAKIYQYNPFTIQLCYASREYVQECHIGIDTGTKHIGMAVTSEDKVLFKGEIELRQDVKSNLDTRRSYRRDRRNRKTRYRKARFLNRKKKESWLPPSIENRINHTFKWINKLVALLPNPKLHIEVGKFDVAKMINPNVQGVDYQHGQTYGFYNVRYFVFARDNYTCQCCKKSKNKILQTHHIVYRSNGGSNRADNLITVCTDCHTYENHQKGGILYQWQENRKKTKQYKEPPFMNVLRKRIFTQYPNAIITYGSETTPKRKELGLEKTHYNDAIVISGITKIKENPNEWLLIKQFRKKKRSLHEATARKGRKEPNRLQKRNAKNTPYYKGFYLNDKVRVFNQVGHITGFTSGGAYIKNSENEYITLPNKSYKQIGISNIRLLHHNNNWQYIHKHIA

SEQ ID NO: 8880 - protein, 449 aa, Allochromatium sp.
MAVFVLDKQKKPLMPCTEKRARLLLERGRAVVVRLAPFTIRLKDRIGGALQPLRLKLDPGSRVTGLALVRESETCDPDTGAIDRLEHGLWFGELAHRGQIIREALTLRRHFRRARRSRKTRYRAPRFLNRPRRAGWLPPSLQHRLDTTVNWVQRLRRLAPITALSQELVRFDTQAMQNPEISGVEYQQGELAGYEVREYLLEKWRRTCAYCGATHVPLEIEHIVPRAKGGSDRVSNLTLACRPCNQRKGNRSIEDFLQRQPARLHQIQAQAKAPLQDAAAVNATRWALFAALTATGLPVETASGGRTKYNRTRLDIPKTHALDALCVGAVDQVRDWNRPVLAIRATGRGAYRRTRTFNNGFPRGYLMRHKRIHGFQTGDWVRAEVPTGKKAGVHVGRVAVRQTGSFNIQTQAGTVQGISYRHCRLLQRADGYGYSFKLKPEMEAARRAA

SEQ ID NO: 8881 - protein, 432 aa, unidentified; identical to SEQ ID NO: 4691

SEQ ID NO: 8882 - protein, 502 aa, unidentified
MAIIYVQDCHGKPLAPTTRGGHVRRLLDSKQARVVCSNPFTIRLVYEVDPCTQRFILGIDPGRTNIGVAVVAADGDCVFSAKAETNNKDVPKRMKERKSQRKASRQGERKRRQRRARINGTCFDERKRILPGCKEPITNHYITNTEARFMNRARPKGWLTPTANQLLQSTISLVRKGCKLLPITDVVLELNKFAFMAMDNPGIQRWEYQKGPLYGYGSVEAAVYAQQDGHCIFCEQAIANYHHVIPVSKGGSDTLENRAGLCGCHHDLVHKEQSWADKLAELKAGMNKHYAALSVLNQIILRLADELGKMFPGHAFATNGWSTKQFRDAHGIPKDHNTDADCIACSILENPTIKLPEKVYELRKFRRHDRAQISRMEDRNYYLPGADPKTGKPKKVLAAKNRHKRTEQKTDSLEEFRAAHPNDVGRLMVARGGPKHKDPNRVLPGAIFQVETSSGNVEQLVLQGSHGRDKNGQPLYLEFVGQGNFRPNRCKYVARGRGWQFV

SEQ ID NO: 8883 - protein, 414 aa, Parasutterella sp.
MPCSPAKARLLLKEKKAIVVRRTPFTIQLTIATGEAKQPVSLGVDAGYKHVGLSASTEKAELYASEIELRQDITDLLSARRELRRARRNRKTRYRAPRFDNRIHTKRKGWLAPSVENRINAHLSRIEAVLRLLPVTKITVETASFDMQLLKNPDISGKEYQEGEQLGFWNVREYVLFRDGHVCQHCHGRSKDPVLNVHHLESRRTGGDSPGNLITLCETCHKALHRGEITLKAKRGQSFRAEAFMGIMRWEVLNRLKASHPELEVNNTYGYRTKHARISNGIAKSHCADAFCIAGYLGAKRLGKFFFQKQTRRNNRQIHKLSILKHGLRKRNQAPFEIKGFRLFDKVASKGEEGFIFGRRSSGYFDVRKLDGTRISAGISYKKLHLLEKRQTYITEIRKEKALPPLPEGRGLRA

SEQ ID NO: 8884 - protein, 379 aa, unidentified
VNESNNIQKLSEYGMIAPDGTWYPCEFGELRYRKPRFDNRKRDEGWLAPSLEHKKQLNISLIERYVSVIPITHATVEVGSFDTMLLQSIQKGEAKPEGADYQKGPRYNLATLREAVFYRDNYTCQVCKRKITDGAILHMHHMFYWKGRHGYQLDELVTACEKCYTPANHQKGGKLFGFGKDKKFANLTGAAFMNAIRWQIVNALYATFGKEFVTITYGAMTKEKRIALQLEKSHNNDAYAMGKLHPSRRCTFVHYEKIKRNNRVLEKFYDATYIDARTGNKAKGKELFNGRISRDHKKDSENLHKYRNKKVSRGRRSIRRQRYAIQPYDTVRLEGKTYITSGCHNKGTRLLIPVNGKSKSVAISKVQVVCHAGAWIQII

SEQ ID NO: 8885 - protein, 502 aa, unidentified; identical to SEQ ID NO: 2616

SEQ ID NO: 8886 - protein, 413 aa, unidentified; identical to SEQ ID NO: 3476

SEQ ID NO: 8887 - protein, 406 aa, unidentified; identical to SEQ ID NO: 2752

SEQ ID NO: 8888 - protein, 439 aa, Bacillus sp.
MMAYVISLSGKPLDPTHPAKARKLVRKGKANVLQVNPFTIQLTYETTEYTQDITLGIDSGYQHIGFSAVSEKKELISGELHLLQGMTNRIEERRSYRRTRRRRLRYRQPRFDNRKRIEGWLAPSIQHKLDSHIRFIKKMKTLLPIKNVIIEVANFDIQKIKNPDISGVDYQQGEQMGFWNVREYVLHRDHHKCQNPNCKNKAKEPILQVHHIVYRDNGGSDAPSNLITLCTKCHTSANHKKGKFLYEWQINKPKLNRFKDSTFMSMVRWRLAAIEGTKTTYGYITKNSRIQFNLEKTHYNDAYVIAGGSTQLRCEPIHYQQVRRNNRSLEKFFDAKYIDVRTGGKSTGKELDSGRRTRNKNENSENSRVYRREKISNGQRRIRTQRYFYQPNDLVRFEGQICRVVGTMNKGKSVKLDIGKSPNPAKLTPYKFAKGMVAI

SEQ ID NO: 8889 - protein, 433 aa, Scytonema sp.
MSKVFVLNTDKRPLDPVHPAQARQLLRNKKAAVFKQFPFTIILKESCPDTAVQPLRIKIDPGAKATGLAIVNDSTGEVIFAAELQHRGFAIRESLTSRRQLRRSRRNRKTRYRQARFHNRKRPNGWLPPSLMSRVYNIETWTKRLCKLAAITAISQELVRFDTQLMQNPDIKGKEYQQGTLAGYETREYLLEKLARKCAYCDKQDVPLQIEHIHPRAKGGSNRISNLTLSCEKCNIKKGTKALKDFLDKEPERLKKIEAQIKKPLADTAAVNATRFKLLEVLKCTELPVETGSGGLTKFNRTKLALPKTHYFDAVCVGESTPDKLIIKGVKPLIIKATGHGSRQMAVTDKLGFPKSHKTRSKFHFGFRTGDIVKANVLKGKNAGIHLGRVSTRKTGQFDIHTGTKKVQIINQKYCKILHRHDGYLYSLSSIVH

SEQ ID NO: 8890 - protein, 429 aa, Lyngbya sp.; identical to SEQ ID NO: 3068

SEQ ID NO: 8891 - protein, 418 aa, unidentified
MVYVINKQGQALMPTERFGKVRRLLKNGLAHVMYRIPFTIQLDYDTTNFIQPISLGIDAGSKHIGISATTSEKELYAADVELRNDIVEKLSTRREQRRTRRNRLRYRRARFNNRVSSKRKGWLAPSIENKIQTHLTVVEKIHKFLPITNIIVETAAFDIQKIKNPSISGKEYQQGEQLNFFNVREYVLHRDGHQCQHCKGKSKDPILNVHHIESRKVGGNSSQNLITLCESCHKAYHKGEIELEVKRGTSFRDSAFMSTMRWSFYKKLKNIYPNVSMTFGYITKHTRITNGLSKSHYVDARCISGNPTAKPLEYYFYQKKVRCQNRQIHKANFLKGGRKKLNQAPYLVKGYRLFDLVEYQKDLYYIFGRRGSGFFDIRKLDGTKVNKGSLSCKQMRLIDIRKTIIIEKRMQGAISPIN

SEQ ID NO: 8892 - protein, 420 aa, unidentified; identical to SEQ ID NO: 4588

SEQ ID NO: 8893 - protein, 424 aa, Petrotoga sp.
MLVYILNKYGKPLMPCKPSKARKLLKDGKAKVVRKEPFTIQLLYGSSGYKQPITLGIDAGSKTVGLSATTENKELFAAEVEIRDDIPKLISQKRQYRRDRRFRKTRYRKPRFLNRVHSKNKGWLAPSVEHKIKSHIKLIDLVHSILPITKIVVEVASFDIQKIKNPNIEGKQYQQGEQLDFWNVREYVLWRDNYTCQHCKGKSKDKRLNVHHIESRQIGGNAPSNLITLCETCHKDYHDGKIKLDFKRGQKFKGATSMNIMRWTLYNRLKDLYSNVHLTYGYITKNTRIQNSLTKTHIIDALCISGHPQAKQLEYYYHIKEVRRHNRQIHKANILKGGTRKLNQAPYLVHGFRLFDKIKYNGIECFIFGRRSTGYFDIRKLDGTVIHRSAKSKDLILVSKTKTLLWERRENSAFLSSLKRASAS

SEQ ID NO: 8894 - protein, 414 aa, unidentified; identical to SEQ ID NO: 2588

SEQ ID NO: 8895 - protein, 397 aa, Desulfurobacterium sp.
MLKTKQMKVFVVDAEVKPLLPTTPARARILLKKGKAKVYRMISFTIQLNRTVDNAAGEFTAAVDDGAKWIGIAVKGKNEVVFTANVRLRQDVSRKVKERAMYRRTRRSRLRHRPIRFLNRKRAKDWLPPSIRYRKEVVLRVLNDLQKFLNITKVVIEQVKFDVSSLIAGRKLTGTEYQQKRYEGKSFREKVLKRDNYTCQICEKKENLEAHHIIPRSKGGTNFVENGITLCKDCHRAVHEGRIRITANVLSLKAPSIVQQGKLWLYRKLKELFEKVEITFGYLTRKKREELGLPKDHYADACAMLNCNKILSPVYFIIPRRRRPEINNPTKKHDEYRGFRHFDLVVAYHRTKRKVVGCVRSLKKSGLAIRTKFSDNFVAGYTKSKLLWRPRRLVYVL

SEQ ID NO: 8896 - protein, 496 aa, Streptomyces sp.; identical to SEQ ID NO: 4777

SEQ ID NO: 8897 - protein, 495 aa, unidentified
MSTTLARGESGGSMAGEVIHQRRHKVMAYVAVLSASGKSLMPTTAYKARKLLKSGRAKIYSYRPLFTIQMQDREEGTTQPIEMKVDTGAQYIGVSVCSEKHEYWNRRYDMLPNEKEMHDEARKNRRNRRQKLRYRAPRFDNRTHGHNRKEDKWFTPSLKHRENIHIQLAAKICAVVPVTDAYFEMGQFDIQVLKAYEAGKPIPVGDDYQKDERYGYATLREAIFARDNYTCQVCGAKLDDKHHPILRMHHIGYWKHDHSNRMGNLMTVCIKCHTAANHKPGGKLYGLEPELPTFKGAAFMNTVRWNMFTQLKKTLPNVKCHITYGAMTKLKRSELNTRKTHSNDAYCMGTLHPKWRTDFQHYQKVRRNNRVLSKFYDAQYIDTRDGEKMSGAQLSCGRTKRSESRHSIKNLRGYRGRRATSKGKKPKISKGHISTRRHKYAFNTGDIVIVQGKKLTVSGTQHYGEYVVFRDKTHVAAKAKEVTMYRHGDGWVRVV

SEQ ID NO: 8898 - protein, 397 aa, unidentified
MSTCVCVLSNSGERLMPTFRLGKVRRLLKDGKAKIVKHHPFTIQLLYDSKTNTQPIEICEDVGYNYIGISVKSQSHEYVSAQYDTLQDEKACHDSCRKLRRTRRNRLRYRKPRFDNRKRGEGWLAPSLKHKKELNVNVVKMYCAVMPITHATVEVGSFDTMLVKAIQEGKAIPEGADYQKGPRYNLATLREAVFYRDNYTCQVCGRKIADGAILHMHHMFYWKGRHGYQLDELVTACEKCHTPANHQKGGKLFGFGEDKEFANLSGAAFMNAVCWQIVDALHATYGKEFVTITYGAMTKEKRIILGIEKTHNNDAYAMGDYHPVHRCVFRHYQKRRRNNRVLEKFYDATYIDTRTGNKAKGKELFNGRISRNHKKNSEDLHKYRSKKVSKGRRSIRR

SEQ ID NO: 8899 - protein, 448 aa, Clostridium sp.
MVYVISINNKPLMPCTPAKARILLKQNKAIVKELKPFTIQLTYKTKTEYTQEITLGVDSGYNNVGFSAITNDKELLVGEIKLLQGMKERLSERAMYRKQRRSRLRYRKPRWNNRIKSKPKGWLAPSLQHKLDSHIKFINYLYSILPITKCIVEIANFDIQKIKNPDIQGEEYQQGEQLGFWNLREYILHRDNHKCQNPNCKNKSKNPILEVHHIKYKSLGGQDSPSNMITLCNKCHTSPNHKKGRFLYDWCQEDKKVRGFKDATFMSMIRWYLVNQLKEKYNNVSFTYGYITKNHRITNNIEKSHCNDAFCIAKGINQIRNNEVWNITQVRRNNRSLEKFYDAKYIDIRNGKKVSGSELNNGRRSRNKNYNTKNLHEYRGQKVSRGQRRIRKDKYFYQPNDLVKYEGRIYTVKGTQNKGKYVALKEVKKVPKVELLASYKFNNGFVWS

SEQ ID NO: 8900 - protein, 470 aa, unidentified; identical to SEQ ID NO: 2825

SEQ ID NO: 8901 - protein, 431 aa, unidentified
MPNKVYVINKHGRPLMPCSPAKARHLLDAGKAKVKKRTPFTIQLVYGSSGYTQEVILGVDAGSKTIGVSALTKKEELFAANVIPRNDVVDLLSTRREFRRARRNCKTRYCKPRFDNRVRSKHKGWLAPSVEVKIQGHITAIRRVCGILPVSKVVVETAEFDLQLLKAIEKGKPVPQGEDYQQGEMYGHYNVRQYVLWRDNYTCQCCGAHATKKKEVRLHVHHLESRKVGGDAPSNLITLCDSCHEKFHKGIITAANLKKRKRRSMRDATFMGIMRKTLIQRLRAELTIPVAETRGYITKTTREKLLVLPKSHTNDALAIALGKHGFNVGYLPEIAQIDKIYTIRPVRHHNRQLHKATILKGGIRKSNQTGKYVFGYRLFDKVQFNGQDCFIWGRRTTGIFTIKTINGKMIKDGISFKKLKPVEKSTSYLIA

SEQ ID NO: 8902 - protein, 420 aa, unidentified
MQYVYVLNRHGEPMMPCSPGKARLLLKQQKACVVKRTPFTIKLLYGSAGYKQPITLGVDAGSKHVGLSASTEKRELYSEEFTPRSDVVELLSTRRQNRRSRRNRKTRYRVPRFDNRVHSKHKGWLAPSVEVKIQEHITVIKHICKILPISLVRVETAEFDTQRLKAMLAGKPLPVGTDYQLGEMYDEYNVRQYVLKRDHYTCQCCGAHNTAKKVVKLHVHHLESRKTGGNAPSNLITLCTTCHENLHKRKVTLDGKERGKPLRDAAFMGIMRKTLMARLKEELPIPVQGTYGYITKMRREQNDIKKSHTNDARCISKHPLTEPCSVCYRTKAIRHHNRQTHKANFSKKGIRKRSQMPYLVEGFRLWDKVLYKGQECFVSGRRSSGSFALKKLDGTSISKGVTFKKLRLLEPATNYLIERM

SEQ ID NO: 8903 - protein, 431 aa, unidentified
MPNKVYVINKHGRPLMPCSPAKARHLLDAGKAKVKKRTPFTIQLVYGSSGYTQEVILGVDAGSKTIGMSVSTTKEELLSAEVKPRNDVVDLLSTRRESRRARRNRKTRYRKPRFDNRVRSKHKGWLAPSVEVKIQEHITAIRRVCGILPVSKVVVETAEFDLQLLKAIADGKPVPQGEDYQQGEMYGHYNVRQYVLWRDGYTCQCCGAHATKKKEVRLHVHHLESRKVGGDAPDNQVTLCESCHEKLHKGLIAEKDFKKRKRKSTRDATFMGIMRKTLMQRLCSELPIPVVETRGYITKATREKLLVLPKSHTNDALAIAQGKQGFNVGYLPGIVQINKIYTIRPVRHHNRQLHKATILKGGIRKSNQTEKYVFGYRLFDKVQFNGQDCFIWGRRTTGIFTIKTINGKMIKDGISFKKLKLVEKSTSYLIA

SEQ ID NO: 8904 - protein, 442 aa, unidentified; identical to SEQ ID NO: 3333

SEQ ID NO: 8905 - protein, 338 aa, unidentified
LKHKKELNVNVVKMYCTVMPITHATVEVGSFDTMLVKAIQEGKVIPEGADYQKGPRYNLATLREAVFYRDNYVCKICGRKATEGAILHMHHMFYWKGRHGNSLNELLTVCEKCHTPANHQKSGKLYGFGEKIKFADLSGAAFMNTVRWQIVNELYVAFGKPFVTITYGAMTKEKRIALQLEKSHNNDAYAMGEFHPNLRCMFEHYEKARRNNRILEKFYDSRYIDIRTGEIATGKELFNGRINRNHKKDSENLHKYRGKRTYAGHRALLRKKVNLNPGDLVSLNGENLIVHSTHTKKNGAVNVEFETPAKSGQKSASLKKLKIVKAANSIHPAWKKIS

SEQ ID NO: 8906 - protein, 512 aa, unidentified; identical to SEQ ID NO: 8756

SEQ ID NO: 8907 - protein, 408 aa, unidentified; identical to SEQ ID NO: 7674

SEQ ID NO: 8908 - protein, 428 aa, unidentified
MKGVMLMVYVLSLDGQPLMPIRRHGKVRRLLNSKKAKVVCKEPFTIQLLFDTEKNVSCLTLKVDTGSKYVGAGVTDDNACVYYVSEVEIRNDIHMKMERRAMYRRARRNRKLRYRKARWLNRHNSIKKDRFSPTITSKFNSHIREIEYVKSILPISELVLETGTFDPNLLNHKDEAFNRHWGYQKGPNYGFKNSQEACFNRDSYKCQCCKTKKGTLNAHHIIYRSNGGADTLDNLITLCKDCHKKLHGGELQEFESKLVGKKKGQLKHATQMNSIRIQLLKYYPNATETFGFITKANREWLGLEKTHWMDTVSMGLTTQPIFLVDRVYKNKHIAKWQYQLYQGQNSNKKLPRGKVCGFLNKDIVEYRNQLYLIKGLMSTGYCRLSNIDGIEQKFENPKTVKLNACKRVSARSTTRCISQKIVPNIAIA

SEQ ID NO: 8909 - protein, 417 aa, unidentified; identical to SEQ ID NO: 5520

SEQ ID NO: 8910 - protein, 470 aa, Anaerostipes sp.; identical to SEQ ID NO: 2949

SEQ ID NO: 8911 - protein, 512 aa, unidentified
MSTVYVLNKDGKPLMPTTRCGHVRRLLKEQKAQVVTSKPFTIQLLYETDDVVQPLYLGIDPGRTNIGVAVVKIDGTAVFTAHLETRNKEIPKLMKKRKDSRRARRTNGRRCRRQRRAKANGTISKKCVKQTTAQNGSVSKRAKKIGVIKRHLPGCEKEVLCIGIKNKEAKFSNRARPEGWLTPTANQLLQTHINLVKKIQKFLPISDVVLEINKFAFMRLDNPNVQKWQYQQGPLYQKASLEEAVSEMQEHHCLFCKNTIDHYHHVVPQHKNGSNTIGNIVGLCAKHHDLVHKDTSWQEKLAKKKTGLNKRYGALSVLNQIIPALTKELSSLFPKHFFATNGKSTYDYRAAHGVSKDHWLDAYCIAGSVLPNDACDNNINSHVPYELKQFRRHDRRALHKENMSRVYTLNGKSVATNRHKAIKQTTDSLEEFRQRQPNDVCKLKVKEHHPEYRNPKRNFPGCVFLVGKHTHVMQGTSGSHNGKADGYYDTNGNSYSSGKCKFVAKNKGIVFA

SEQ ID NO: 8912 - protein, 418 aa, unidentified; identical to SEQ ID NO: 4327

SEQ ID NO: 8913 - protein, 413 aa, unidentified; identical to SEQ ID NO: 2636

SEQ ID NO: 8914 - protein, 457 aa, unidentified; identical to SEQ ID NO: 3236

SEQ ID NO: 8915 - protein, 428 aa, unidentified
LEIILKVAVLSMRGQCLMPCSPRKARVLLREKKAVVKQKSPFTIQLTIPTGETKQEVTLGVDAGSKHIGISATTAKTELFASEVELRQDVTGLLADRRALRRSRRARKTRYRAPRFNNRVRSKHKGWLAPSIENRIQAHLSRIEAVLKLFPVTKIVIETASFDIQKIKNPAITGKGYQQGELLDFFNLREYILWRDNHTCQHCKGKSKDKVLQVHHLESRRTGGNATNNLITLCKTCHEKSHTGEITLNIKRGRSFKDAAFMNIMRPAFVARLRKAHPGMLIEETYGYITKYQRIKLKLPKTHCADAFCIAGNLHATRSDVYLYQKQTRKHNRQIHKVNAIKGGIRKLNQAPYIVKGFRLFDKVKCFGKKCYGKEGFIMGRRQDGGFDIRTIDGQHISKSVSPKKLKLIQKRKTFLTAIKKEGASSPV

SEQ ID NO: 8916 - protein, 470 aa, unidentified
MSVFVVGLNGCRLMPVSERKARLLLKGGKASVYRKVPFTIKLNYKTGSTVQPGYLGIDTGSQHIGVSVVQKDGTVLHKEEIGLRDSMSKRKLLESRASSRRGRRYRKTRYRHPKWKPKTKRTYNEKADRKGRHWKKQKNTFTSKRQAGWLPPSLQSKTDHHIQWIRKLLDLLPEGYRLSIELGRFDPARMKDPEIHGELYQKGPQYDYENVRAYVLARDGYTCRVCKKKGGKLHVHHILYRSRGASDNPKYMAAVCSKCHTTENHLPGGILYQWMQDQKKFTRGLRDATFMNILKKRLRKAFPDAVFTYGNITKADREKLELPKSHGNDATAIALVKTEVKSVKDEEPVIHIQQVRRKKRSLHEETPRKGRKEPNRTASRSDKNTKSVTVTKGSGEKKASMTACLFDRVELDGKKGWITGFTGTSCYVKDKEDSYICTSPKYKQVSISRLRILHHCGNWAIGAEKPLGKG

SEQ ID NO: 8917 - protein, 431 aa, unidentified; identical to SEQ ID NO: 5579

SEQ ID NO: 8918 - protein, 414 aa, unidentified
MPCSPAKARLLLKEKKAIVKRRTPFTIQLTIATGETKQPVSLGVDAGYKHVGLSASTEKAELYASEVELRQDITDLLSARRALRQSRRNRKTRYRAPRFDNRIRTKRKGWLAPSVENRIDAHLSRIEAVLRLLPVTKITVETASFDLQLLKNPDISGKEYQEGEQLGFWNIREYVLCRDGHVCQHCYGRSKDPVLNVHHLESRRTGGDSPGNLVTLCETCHKALHRGEITLKAKRGQSFRAEAFMGIMRWEVQNRLKASHPELEVNNTYGYRTKHARIANDIAKSHCADAFCIAGNLGAERLGEFFFQKQTRRNNRQIHKLSILKGGIRKRNQAPFEVNGFRLFDKVACKGEEGFIFGRRSSGFFDVRKLDGTCISAGISYKKLHLLEKRRTYLTEIRKEEALPPLPEGSGLRA

SEQ ID NO: 8919 - protein, 426 aa, unidentified
MVYVQNRLGQPLMPTKDHRKVRLLLDRGAAVVVKRTPFTIRLTTRSKTYVQPIILGVDAGSKTIGLSASTEAEELFAAEVTPRNDVVDNLSTRREFRRARRNRKTRYREPRFNNRVRSKHKGWLAPSVEVKIQEHITAVKRVCAVLPVGKVVVETAEFDLQLLKAVEAGLPVPRGEDYQKGEMLGHYNIRQYVLWRDGYTCRCCGTHGKGVKFHVHHLESRKTGGNAPDNLVTLCDGCHKKFHKGIITPDILKKRKCRSTRDAAFMGIMRKTLMERLRAELAIQVVETKGYITKYTRVELLKLDKTHTNDALAIAQGRRGFGVEELTTIPQSDYIYRIRPVRHHNRQLHKATILPGGIRKSNQAPRYVRGFRLFDKVSYLGEDCFIWGRRSSGSFLLKLLDGTKVKDGVGYKRISLLERSASYLIS

SEQ ID NO: 8920 - protein, 494 aa, unidentified
MDMVYVLNKDGKPLMATTRGGRVRYLLKEKKARVVSSTPFTIRLNYDTPDITQDLILGIDPGRTNIGVAVVKEDGQCVFSAHLETRNKEVPLLMKKRAAFRRNHRTLDRRRKRQRRAIAAGTTVESNTIERLLPGYEKPVVCHYIRNKEARFNNRSRPAGWLTPTANHLLQTHINLIAKIAKFLPITKVVVELNRFAFMAMDNPNIRRWEYQQGSLYGLGSVEDAVYAQQDGHCLFCKEPIDHYHHVVPRHKGGSETLANRCGLCERHHALVHKDKAWAGKLVTQKEGMNKKYHALSVLNQIIPSLMEYLGDEMLYDVYATDGRSTKGFRIAKNVPKEHYTDAYCIACSILDTNIKVSAPVEPFELKQFRRHDRQACHQQRVDRKYYLDGKQVATNRHKAIEQKSNSLEEFRETYGDAAVSQLTVKPHPPQYKDITRIMPGAVMNFCGAVGILLGSDGFHNGKPDYYKSTKEEKVRMRRCALLAQNAGMVFIPA

SEQ ID NO: 8921 - protein, 413 aa, unidentified; identical to SEQ ID NO: 4858

SEQ ID NO: 8922 - protein, 419 aa, unidentified
MVYVISQDGKPLMPCSDPIARLLLKQGKAKVKKRDPFTIKLTYETTNYTQGLTLGVDTGSGTIGTAVSKDNGDIVYMSEVVVRNDITDKMTQRAKYRRNRRNRKTRYRKARWLNRASSIKKDRFSPTMQSKLHSHVREIEYIQSILPITEMVFETGQFDMQLMKNPSLANPKVRPWGYQKGANYGFENTKAMVLNRDNYTCQCCKGKHKDSKLEVHHIVFRSQGGSDEESNLLTLCHTCHKDLHSGKINPKLSGKVKGNLKYATQMNSIRKQLFRFYPNAIETFGYVTKANRLHLGVDKEHYYDACTIATQGNAFNVKSNLYKKKCVSDGDFQKTKGIRSEQPIVTDKICGFRKFDKVRYFGNDYFIKGRMSTGYAILMDIDGNKIDFSTMPRGYKTPKLSNCKRITARSTVMTQVKVV

SEQ ID NO: 8923 - protein, 494 aa, unidentified; identical to SEQ ID NO: 5675

SEQ ID NO: 8924 - protein, 425 aa, unidentified
MENTLKVFVLNMRGQPLMPCSPPKARKLLRAGKAVPVRRTPFVIQLTVPTGETKQPISLGVDAGYKHVGLSATTAKEELLASEVELRQDVTGLLSDRLALRRSRRNHKTRYRAPRFDNRVRSKHKGWLAPSVENRIQAHISRIEAVCRVLPITKIVIETASFDIQKIKNPEIEGEGYQQGEQLGFWNVREYVLFRDGHVCQACKGRSKDLILNVHHIESRKTGGDAPGNLITLCETCHKAYHAGKLKQFSPRRGASFRAETFMGIMRWTVLNRLRERHPELPVTNTYGYLTKHKRIVAGLPKTHCADAFCIAGVLDAKRRGEYLFQKQTRRHNRQIHKLTILKGGVRKRHQAPYLVHGFRLFDKVLCKGEVGFIFGRRSSGAFDVRRLDGTKISAGISYKKLSLLEQRKMFLTELRKEGRDSSRV

SEQ ID NO: 8925 - protein, 407 aa, unidentified
HLLDDKKAKVVKRMPFTIRLLYGSTKYIQPIILGVDAGSKTIGLSASTAKEEVFAAEVMPRNDVVENLSTRREFRRARRNRTTRYRKPRSDNRVRSNHERWLAPSVKVKIQEHITSIKRVCTILPISKVVIETAEFDLQLLKAIQEGKPIPEGEDYQKGEMYGSYNVCQYVLWRDNYTCICCGVRGTPKNPVRLHVHHFESRKYGGNAPDNHGTLCDDCHKKFHLGIITDVKLKTRRRQSTRDAAFMGIMRKTLMWRLRTELFIPVAETKGYITKATREKLLVLPKSHTRDALAIAQGRHGFGIKEYAYVEPANHIYTVRPVRHHNRQLHKASILKGGIRKRNQASKYVFGFRLYDKVLYQGKACFVWGRRTSGTFLLRTIDGIKVKDGVSYRNLTLLERSSNYLIA

SEQ ID NO: 8926 - protein, 423 aa, Arthrospira sp.; identical to SEQ ID NO: 3143

SEQ ID NO: 8927 - protein, 442 aa, Blautia sp.
MVYVLNKEGQPLMPTNRHGKVRRLLKTKKAKVIKRCPFTIQLLYDTTNHTQNITLGVDAGSKHIGLSATTKNKVLFEADVELRNDISKLLEARYTFRRSRRNRKTRCRKKRFDNRVSSKHKGWLAPSIEHKIQSHFAMVEKVHRILPITKIVVETASFDTQLLKAQLEGKPIPEGTDYQNGELAGWNIREYIFHRDNYTCQWCRGKSKDPVLVTHHHAYWKGDHTNKPSSLITLCNTCNDSKYHKKEANRLWGWEPKITNSYKHAVFMGVTRWTFYNRLKEIYPNVSMTYGYITKNTRIENNLPKTHYVDARCISGHPEAKSNGEYFYYKKVRCHNRQLHKANTLKGGIRKRNQAEYTVKGFRLFDRVEYQNNEYFIFGRRTSGFFDIRTLDGQKVNKGSISFKKLKLKETNKTYLIERRMADTGVSLAPLTTEVTSLRQTG

SEQ ID NO: 8928 - protein, 491 aa, Pseudomonas sp.; identical to SEQ ID NO: 3597

SEQ ID NO: 8929 - protein, 413 aa, unidentified; identical to SEQ ID NO: 2636

SEQ ID NO: 8930 - protein, 415 aa, unidentified
MPCSPAKARHLLKAGKAVVKRRTPFTIQLRIATGETKQNVTLGVDAGAKHVGLSATTEKEEVFASEVELRQDITGLLAARLSLRRDRRHRKTRYRAPRFLNRVRSKHKGWLAPSVENRIQAHMSRIDAVCRLLPVTKIVIETASFDIQKIKDPSVEGTDYQQGDQLGFWNVREYVLFRDGHVCQHCHGRSKDKILNVHHLESRQTGGDAPNNLITLCETCHKAYHAGKIKLKVKRGQSFRAEAFMGIMRWTLLDRVRKAHPGLPVENTYGYLTKHTRITHGLPKTHCVDAYCIAGNLKAVRRGVYLHQRQMRKHNRQIHKFTVLSKRLEDGTKIGYRKLNQSPYLVHGFRLFDKVRCLGQIGFIFGRRSSGYFDVRRLDGVKLSPSISWRKLTLLEKRSTYLTELRKQDGASSPV

SEQ ID NO: 8931 - protein, 408 aa, unidentified
MPCSPRKARLLLKQKKAKVIKRTPFTIQLIYGSSGYKQAVSLGVDAGSRTIGLSATTVKKVLYEAEVELRNDITKLLADRRELRRSRRYRKTRYRKPRFDNRRRPEGWLAPSVRNKIEAHTKAVQMVCKMLPVTKITIEVASFDIQKLKNPEISGVEYQQGEQLGFWNVREYVLWRDGHQCQGRPGCRNKVLNVHHIESRKTGGDAPNNLITLCDQCHKDYHTGKLKLNLKRGQSFKDAAFMGIMRWMVYNRLKTIYPYVRLTYGYITKHTRIANGLEKNHRTDARCVSGNPQAQPDNTWYYFKQVRKQNRQLHKANPIKRGIWKANKAPKYLFGYQLFDKVLYEGQECFIFGRRASGYFDLRKLDGTRVSPSVSCKKLKLLERASIFLCERRNSDFLPGMNSGVSVA

SEQ ID NO: 8932 - protein, 428 aa, unidentified
LKVFVLNMRGQPLMPCSPAKARHLLKAEKAVVKRRTPFTIQLRIATGETKQNVTLGVDAGAKHVGLSATTEKEEVFASEVELRQDITGLLATRLSLRRDRRHRKTRYRAPRFLNRVRSKHKGWLAPSVENRIQAHMSRIDAVCRLLPVTKIVIETASFDIQKIKDPSVEGTDYQQGDQLGFWNVREYVLFRDGHVCQHCHGRSKDKILNVHHLESRQTGGDAPNNLITLCETCHKAYHAGKIKLKVKRGQSFRAEAFMGIMRWTLLDRVRKAHPGLPVENTYGYLTKHTRITHGLPKTHCVDAYCIAGNLKAVRRGVYLHQRQMRKHNRQIHKFTVLSKRLEDGTKIGYRKLNQSPYLVHGFRLFDKVRCLGQIGFIFGRRSSGYFDVRRLDGVKLSPSISWRKLTLLEKRSTYLTELRKQDGASSPV

SEQ ID NO: 8933 - protein, 423 aa, unidentified; identical to SEQ ID NO: 2741

SEQ ID NO: 8934 - protein, 420 aa, unidentified
MQYVYVLNRHGEPLMPCSPGKARLLLKQQKACVVKRTPFTIKLLYGSAGYKQPITLGVDAGSKHVGLSASTEKRELYREEFTPRNDVAELLSTRKQNRRSRRCRKTRYRAPRFDNRVHSKHKGWLAPSVEVKIQEHITIIKRICKILPISLVRVETAEFDTQRLKAMLAGKPLPVGTDYQLGEMYDEYNVRQYVLKRDHYTCQCCGAHNTAKKVVKLHVHHLESRKTGGNAPSNLITLCTTCHKNLHKGKVTLDGKERGKPLRDAAFMGIMRKTLMARLKEELPIPVQGTYGYITKMRREQNDIKKSHTNDARCISKHPLAEPCSVCYRTKAIRHHNRQTHKANFSKKGIRKRSQMPYLVEGFRLWDKVLYKGQECFVSGRRSSGSFALRKLDGTSISKGVTFKKLRLLEPATNYLIERM

SEQ ID NO: 8935 - protein, 456 aa, unidentified
MGTLHLLASWCPWRHSWQVSGFILAAILMGRRASWMPYVLNQHGHPLMPCSPAKARHLLKDGKAKLMKRAPFTIQLLYGSSGYRQDVTLGVDAGSKHIGLSAVAADGQEVFAAEVTPRNDIVGNLSTRREFRRARRNRKTRYRKPKFNNRVRSKHKGWLAPSVEVKIQEHITVICRVCRLLPVTKVVDETAEFDLQLLKTIADGKSVPQGEDYQKGEMLGSYNVRQYVLWRDGYTCQCCGKHGHGVKLHVHHKESRKTGGDAPDNQTTLCDSCHEKFHKGVITLDKLKKRGRQSTRDAAFMGIMRKTLMLRLRQQLDIPVCETRGYITKYTRGERLHLPKSHINDALAIAIGPNGAQSVARADQRYTIKPVRHHNRQLHKATTLKGGIRKSNQAPKYVKGFRLFDKVLFEGMECFIWGRRSSGSMLLRRLDGSKVKDGAGFRKLTLLERSSYYLVS

SEQ ID NO: 8936 - protein, 392 aa, Moorena sp.; identical to SEQ ID NO: 7999

SEQ ID NO: 8937 - protein, 416 aa, unidentified
MVYVLGQDGHPLMPTCRHGKVKRMLKSRMAKVVKKCPFTIQLQYESTTHTQKINLGIDAGSKTIGVSATTETKVLYESEVALRNDIVELISGRRALRSSRRNRKTRYRKPRFDNRKRPDGWLAPSVRQKIETHITVVENVMKILPVTKIIVETASFDIQKIKNPEIEGVGYQHGEQLDFWNVREYVLFRDGHTCQCCKGKSKDNILNVHHIESRKTGGNAPSNLITLCETCHKAYHKGIITLPKEIHRGMRFRDAAFMGIMRWAFYDRLKELYNLLGVEVINTYGYITKNTRITYDLPKEHYVDARCISGNPAAKPMDYYYLQKKVRCHNRQIHKCKINKGGTRKRNQAAYEVKGFRLYDQVLWKGQKCFIFGRRSTGRMDLRLLDGTHVNASVGYKNLKLLSMRKNYLIEQRKAG

SEQ ID NO: 8938 - protein, 426 aa, unidentified; identical to SEQ ID NO: 3294

SEQ ID NO: 8939 - protein, 403 aa, unidentified
MYRLITEAGIPLIPERLHDTKKRKEASRMSEYIYVIGVDGDPQMPTKRKRHVEQLLQTGRARIFRQIPFTIQLTYENKPVLQPVTIAEDPGRSNIGMAVVSLSGELLSAAVVQTRNKEIVKLMEKRKQHRRASRNGERKARQRLAKKCHTMIKTGFLMRKLPMYGKDKRVRCNVIKNTEAKFCNRKREDGWLTPSAEHLVRTHINLIHKMQKFLPITDVAIEINRFAFLSLEDPSISGVDFQNGPLKGYDDLNAAVEALQDGHCLMCNSPIEHRHHIVPRSMQGSNTIGNIAGLCCKCHERVHKDSAFEDSLKKKKAGLNKRYAAVSALNQAIPFICKRLEQEFGKEHVHYCSGRDTSMVRRSLGYHKTKEEQLHEVDAWCIAVLSLQQIPEKAPSFDHVHEI

SEQ ID NO: 8940 - protein, 431 aa, unidentified
MPNKVYVINKHGRPLMPCSPAKARHLLDEGKAKVKKRTPFTIQLVYGSSGYTQEVILGVDAGSKTIGMSVSTTKEELLSAEVKPRNDVVDLLSTRREFRRAQRNRKTRYRKPRFDNRVRSKHKGWLAPSVEVKIQEHITAIRRVCGILPVSKVVIETAEFDLQLLKAIADGKPVPQGEDYQQGEMYGHYNVRQYVLWRDGYTCQCCGAHATKKKEVRLHVHHLESRKVDGDAPDNQVTLCESCHEKLHKGLIAEKDFKKRKRKSTRDATFMGIMRKTLMQRLCSELPIPVIETRGYITKATREKLLVLPKSHTNDALAIAQGKQGFNVGYLPEIAQIDKIYTIRPVRHHNRQLYKATILKGGIRKSNQTKKYVFGYRLFDKVQFNEQDCFIWGRRTTGIFTIKTINGKMIKDGISFKKLKLAEKSTSYLIA

SEQ ID NO: 8941 - protein, 464 aa, unidentified; identical to SEQ ID NO: 6330

SEQ ID NO: 8942 - protein, 442 aa, unidentified; identical to SEQ ID NO: 5957

SEQ ID NO: 8943 - protein, 470 aa, unidentified
MSVFVVGLNGCRLMPTSERKARLLLKQGKAFVEQKVPFTIRLNYKTGSTTQLGYLGIDTGSQHIGVSVVREDGTVLHKEEIGLRDSMSKRKLLEAKASLRRGRRYRKTRYRHPKWRPKTKRVYCEVPDRKGRHWQKKKITFTSKRPKGWLPPSLQSKTDHHIRWIKKLQDLLPEGYRLSIELGRFDPARMKNPEIHGDLYQKGPQYDYENVRAYVLDRDRYTCQICKKKGGKLHVHHILYRSHGATYDPQYMVTVCSDCHSAQNHLPGGILYQWMQEQKRFSRGLRDATFMNILRKRLIRAFPEAVFTYGNVTKVDREKLKLPKSHGNDATAIALVKTGITAVKDKESVICIQQVRRKKRSLHEETPRKGRKEPNRTAARNNKNTKAVTVTKRQNKKKVSMTGCLFDRVELNGKKGWISGFTGKSCYVKDADDQYLSTSPKYKQVSLSKLRILHHCGNWIIGAKKTLGKG

SEQ ID NO: 8944 - protein, 415 aa, unidentified
MVYVISKENKPLMPCSNAIARLLLKQGKAKVKSKQLFTIKLLYETTNYTQDLTLGVDTGSGTIGTAVSTNNSKIVYASEVVIRNDITDKMTQRAKYRRNRRNRKTRYRKARFLNRKNSIRADRFNPTMVSKLYSHVKEIEYIKSILPIKTLVLEIGQFDPHLMQNPELKYKPWGYQKGKNYGFANTKEMVLNRDNYTCQYCKGKRKNSKLEVHHIIYRSNHGSDDENNLITLCQTCHKLLHNGEIKLNLKGKSKGTLKYATQMNSIRKQLLRIYPEAIETFGFVTKDNRLNINVDKHHYLDACVIATGGKEFQICCNIYKKRCISKGDFQQTKGVRSEQKLNTKKICGFRKFDKVKYFGKEYFIKGRMSTGYAVLMDIEGKKIDFSDMPKGYKSVKLNNCKRISARKSQLITLYS

SEQ ID NO: 8945 - protein, 425 aa, unidentified
MPTHNGAKVRVLLKQKRAKVVSKCPFTIKLLYESTSFTQPLTLGVDTGSKYVGSAVINDTTSEIIYEAQTELRGDIKSKMDRRRQFRRARRNKLRYRPARFNNRKSSKRENRYSPTLMSKFQGHVREIKFVMSILPIKDVVLEVGEFDPQLLQDPTLAFHKWDYQRGELYQQENFKQAAKARDDYKCQCCGKKNCRLEVHQLLPRSRGGSDKLVNLITLCSDCHHLAHSSEEQLLSFQKKFGKKARGTLKYATQMNVLRHMLQKEYPDFELTYGFVTKEMRRVFCLEKSHMIDACCIASRGVIFKNENFNEYKKKCVPKGNYPRTGVHGCKFVILPKGKIAGFKRYDKVLYNNKEYFIVGRVSIGYIYLIDIDNNRVQTKITKRSTGEKHMSKAKIKVSLAKKVASAKSCVCTRIFQIERTTHIV

SEQ ID NO: 8946 - protein, 465 aa, unidentified; identical to SEQ ID NO: 8068

SEQ ID NO: 8947 - protein, 438 aa, unidentified
MFFLAAPKRKEASMRMLNVFVLNRHGRPLMPCTPAKARRLLKAGKAKVKKITPFTIQLLYGSTGYTQEVILGVDAGSKTIGISCGTKDKELFSGEVIPRNDVVEKLSTRREFRHARRNRKTRYRQPRFNNRVKSKHKGWLAPSVEVKIQEHITVIKRICNLLPVSKVIVEGAEFDLQFIKAVEEGKPVPQGEDYQKGEMLGHYNVRQFVLWRDGYKCYNCGAHKDVDLRAHHLESRKIGGDAPNNLITLCKKCHDLFHKGAIQLEPHRGTSYRDTTFMGIMRKTLFSRLRAELNILVYETRGYITKYTREYQMHLPKSHVNDALAICHGPHGFNDGEKAIVERAPHVYLIKPVRHHNRQLHKATILKGGIRKSNQSPKYVKGFRLFDKVRYDGQDCFVWGRRTTGSFLLRKLTGEKVKDGVGYKHLKLLERSQSYLIA

SEQ ID NO: 8948 - protein, 512 aa, unidentified; identical to SEQ ID NO: 4031

SEQ ID NO: 8949 - protein, 524 aa, unidentified
MEILRIDWKDICPTGQSGLPQKELFMRPVYVLDMNGKPLMPTCRFGKVRRMLKSGEAKVVDTLPFTIQLDRPTKTHVVQSVTLGCDPGRTNIGLAAVRSDGTDLYRSHCETRNKEIVDLMDTRRAARRASRRGERLTRKRLAAKHETATTFPDGRKLPGYEKPIMLKDIINTEARFNNRVRPAGWLTPTATQLLRTHLNLIKRISRILPVSDIALEINKFAFMQLDEPDKNKWNIDFQHGPLYGTGGLKAVVRQLQNDTCLLCQENVIEHFHHLIPRSKRGDNTINNIAGLCQRCHEAVHKSADTAEKLSTLKKGQTKRYGGTSVLNQIIPKLVEELGKTYHEHLHLTYGWQTKEFRTKHKLEKTHDTDAYCIAAGTMQTVKPNIRTDVYEIKQFRRHNRANIHHQTERTYKLNGQTVARNRRKRTDQKTDSLAEWFENTVKQYGQQKAEHLRAGLKVRKSTRYYNSKDRVMPGAVFQYEGNRYVVTGQLSGGQYYRAYGKGNHNFPVKKIRIISLNRGLVYVA

SEQ ID NO: 8950 - protein, 427 aa, Parasutterella sp.; identical to SEQ ID NO: 3787

SEQ ID NO: 8951 - protein, 449 aa, Allochromatium sp.; identical to SEQ ID NO: 5642

SEQ ID NO: 8952 - protein, 424 aa, Enterococcus sp.; identical to SEQ ID NO: 8320

SEQ ID NO: 8953 - protein, 428 aa, unidentified
MQYAYVLNKRGEPLMPCSPGKARILLKQQKACVVKRTPFTIKLLHGSAGYKQPITLGVDAGSKHVGLSASTEKRELYSEEFTPRNDVVELLSTRKQNRRSRRNRKTRYRAPRFNNRVHSKHKGWLAPSVEVKIQEHITVIKRICRILPVTLVRVETAEFDTQRLKAMLAGKPLPVGTDYQLGEMYDEYNVRQYVLKRDNYTCQCCGAHTTAKKTVKLHVHHLESRKVGGNAPSNLITLCTTCHNNLHKGKITLDGKKRGKTLRDAAFMGIMRKTLLARLHEELPIPVQGSYGYITKMRREQNDIKKSHVNDARCISKHQLAEPCSVCYRTKAIRHHNRQTHKANFSKDGIRKRSQMPYVVDGYRLWDKVLYEGQECFVSGRRASGSFTLKKLDGTRISKGVTFKKLRLLEPATNYLIERIRTGNSSHD

SEQ ID NO: 8954 - protein, 456 aa, unidentified
MSTCVCVLSNSGERLMPTIRLGKVRRLLKDGKAKIVKHHPFTIQLLYDSKTNTQPIEICEDVGYNYIGISVKSQSHEYVSAQYDTLQDEKACHDSCRKLRRTRRNRLRYRKPRFDNRKRGEGWLAPSLRHKKELNVNVVKMYCAVMPITHATVEVGSFDTMLLQAIQKGESKPEGVDYQKGPRYNLATLREAVFYRDNYTCQVCGRKIADGAILHMHHMFYWKGRHGYQLDELVTACEKCHTPANHQKGGKLFGFGEDKEFANLSGAAFMNAVRWQIVNALYATYGKEFVTITYGAMTKEKRIILGIEKTHSNDAYAMGDYHPAHRCVFRHYQKRRRNNRVLEKFYDATYIDARTGNKAKGKELFNGRINRNHKKDSENFHKYRSKKVSKGRRSIRRQRYAIQPYDTVRLEGKTYITSGCHNKGTRLLIPVNGKSKSVAISKVQVVCHAGAWIQII

SEQ ID NO: 8955 - protein, 536 aa, unidentified; identical to SEQ ID NO: 4526

SEQ ID NO: 8956 - protein, 472 aa, unidentified
VVGNNLLSIKPLINIGEGVIYSSICTGLSLQTYQKRKEVPYMVYVLDIDGQPLMPTTRHGKVRRLLNNHLAKVVKRCPFTIQLLYQSTKETQPVSLGVDAGSKHIGMAATTEKKVVYQEELSPRNDVVKLLSARRALRSSRRSRKTRYRKPRFNNRVHSKHKGWLAPSVEVKIQEHITAIKRICQILPISDIHVETAEFDLQRLKAMEEGRPLPVGTDYQLGEQYDFYNTRQYVLHRDGYTCQCCGTHDNNIKLHVHHIESRQTGGDAPNNLIILCEHCHKALHEGKLELPKGKKRGKSYRDVTFMGVMRKTLLERLKKEIDVPVEGTYGYITKYWRERAGLEKSHIHDAVCISKYPYAKPLDIYYLTKTVRHHNRQIHKSNFSKGGIRKRNQAPYLVKGFRLFDKVLYQGKEYFIFGRRATGYFDIRTLDGTKVNKGSISYKKLRIQDTAKAYLKEARAIPHMNKFTCVLA

SEQ ID NO: 8957 - protein, 420 aa, unidentified; identical to SEQ ID NO: 6806

SEQ ID NO: 8958 - protein, 423 aa, unidentified; identical to SEQ ID NO: 5719

SEQ ID NO: 8959 - protein, 539 aa, Nocardiopsis sp.
MAEGRLYQHQPSPSKEVTLMATFRVGPKTHPGVLPQRQALESESADAPRIGHETGLRHRRQAVPGADHVRGETTSTSPGAGGVTSNPVGKQGREAHTKKTQAYVFVLDQNGVPLQPCHPARARKLLTKKRAVVARHTPFTIRLTDRTAAESEIDGVEIGIDPGSQHTGIAVFTARAGERRGRYALQLDHRGAQIKKKLGQRAGYRRRRRSANLRHRAPRFSNRARPRGWLAPSLRHRVETTTSWVDRLCRWAPVRGVHVERLAFDTHALSAGKPLEGVEYQQGTLAGFEVREYLLAKFDRACVYCGATNVPLNLDHVYPRSRGGSDRVSNLVLACVPCNQTKADRPVEEFLSGKPQTLARVLGQARTPLRDAAAAQSTRWALWRALDQRLPTHVGSGGRTKFNRTRNQLPKTHTLDALAVGKVEAITRIVARVMVAGCAGRGRYARTAPDRHGFPRLRAARQKQYFSFTTGDLVRAVVPSGKRAGTHTGRVLVRARGSFDITTGHGRQAGINHKHIRLLQRADGYAYTFRKEEGVSSRP

SEQ ID NO: 8960 - protein, 439 aa, unidentified
MVVVIDKHKRPCNTISAAYARILLFSKQAVIYKRFPFTIRLRNDNAVLKNRNYTIKIDPGSRTTGIAITDNQDSVVMLANLEHRGHIIKKNLDSRRAVRNSRRQRKTRYREARFDNRTRPKGWLAPSVKSRADNVINFVKKYKKFLNITKVMIERVSFDTAQMSSDEKLWGIDYQQGNLYNKNLKEFIFSKTKGRCSYCGGKATEIDHVIPRSNGGTNSTYNLVASCRSCNEKKSNLSLKEFGKLMNKDYSQLEPKKLPKDATIVQSARNYMVKEIAKLVPDTTTHDAWLTKYNRDQLGLPKQHYYDALSVGETPTKFNFLTDKILQISAKGRGSRQMCSMDKFGFPRTSAKASKSVKGFQTGDIVKAIVPFGSKAGEYLGKVAVRSSGSFNIQTKTKVIQGIGYRYCHIVQRSDGYSYDYKERDFLSDINNRASVAII

SEQ ID NO: 8961 - protein, 470 aa, unidentified; identical to SEQ ID NO: 2825

SEQ ID NO: 8962 - protein, 439 aa, Aeromonas sp.; identical to SEQ ID NO: 5240

SEQ ID NO: 8963 - protein, 442 aa, unidentified
MVTVQQSTHHLPFGRVFIRRNLFMVYVISQDGKPLMPCSDPIARLLLKQGKAKVKKREPFTIKLTYETTNYTQGLTLGVDTGSGTIGTAVSKDNGDIVYMSEVVVRNDITDKMTQRAKYRRNRRNRKTRYRKARWLNRASSIKKDRFSPTMQSKLHSHVREIEYIQSILPVTEMVFETGQFDMHLMKNPSLANPKVRPWGYQKGANYGFENTKAMVLNRDNYTCQCCKGKHKDSKLEVHHIVFRSQGGSDEESNLLTLCHTCHKDLHSGKINPKLSGKVKGNLKYATQMNSIRKQLFRFYPNAIETFGYVTKANRLHLGVDKEHYYDACTIATQGNAFNVKSNLYKKKCVSDGDFQKTKGIRSEQPIVTDKICGFRKFDKVRYFGNDYFIKGRMSTGYAILMDIDGNKIDFSTMPRGYKTPKLSNCKRITARSTVMTQVKVV

SEQ ID NO: 8964 - protein, 300 aa, unidentified; identical to SEQ ID NO: 6603

SEQ ID NO: 8965 - protein, 442 aa, unidentified; identical to SEQ ID NO: 2834

SEQ ID NO: 8966 - protein, 442 aa, unidentified; identical to SEQ ID NO: 8056

SEQ ID NO: 8967 - protein, 479 aa, Acidithiobacillus sp.; identical to SEQ ID NO: 8867

SEQ ID NO: 8968 - protein, 461 aa, unidentified; identical to SEQ ID NO: 4910

SEQ ID NO: 8969 - protein, 419 aa, unidentified; identical to SEQ ID NO: 5677

SEQ ID NO: 8970 - protein, 554 aa, Streptomyces sp.; identical to SEQ ID NO: 8725

SEQ ID NO: 8971 - protein, 406 aa, unidentified
MVYVQDINGKPLMPTTRHGKVRRLLKDKKAVVVNLCPFTIKLMYVTSDYKQEIVLGIDAGTKHVGLSATTKSKELYSSEVILRNDIVDLLSTRRELRRTRRNRLRYRKPRFDNRIKSRRPGWVAPSVRYKVDAHIRVIDNVCSILPISRIVVEVAQFDTQKIKNPEISGKEYQEGDQLGFWNVREYVLARDGHKCQYCKGKSKDHVLNVHHIESRKTGGNSPSNLITLCETCHKEYHKGNIDLKIKRGSSLRDAAVMGIMKWKLYEELRSRYNRVSMTFGYVTKYNRINHDIEKSHVSDAFVISKNFDAIRLGYYYKVRLVRRHNRQIHKQKIPKGGIKRLNQSPFEVFGFRLFDRVMFENNCYFIFARRKTGSFNIRDINGKNKRDITYKKLKLSRCKRFMIEKS

SEQ ID NO: 8972 - protein, 423 aa, unidentified; identical to SEQ ID NO: 4024
  source 1..423: note = Lachnospiraceae bacterium UBA7767

SEQ ID NO: 8973 - protein, 442 aa, unidentified; identical to SEQ ID NO: 3161

SEQ ID NO: 8974 - protein, 416 aa, unidentified
MTNCENYAFVLDAEGKQLSPTKEKKAWYLIRKKRAILVSKYPMVIQLNKIVSNDNICKDEIRCGIDDGGLHVGIALVQKCQTKNKTLFKGTIEQRNDVKHLMKVRWDYRRYRRYHKRYRPKRINNRSSSKRTDRIAPSILQKRQATLRVITQLNKWINITSYWLEDVAIDVRVLTDGFSSYGWQYQKSNRLDENIRKAVILRDGCRCMECGQSNCRLEVHHIKPRRLNGANTLGNLITLCESCHQKTEGKEEQYMQHYFNILESSDNKNLNYASYVMIGKTWLRKQLSQLGVLNLTTGGNTANKRIDWNIEKSHSNDAVCITDLQPDSCNVKDWIIKPMRRQSKAKTDNVLGIKHRDLVSYVYKNGELHIGYVTALYPELNALNFQSPTKHCKKVNVRKCRVLWKYNKIYWLDSVS

SEQ ID NO: 8975 - protein, 414 aa, unidentified; identical to SEQ ID NO: 2588

SEQ ID NO: 8976 - protein, 413 aa, unidentified; identical to SEQ ID NO: 2636

SEQ ID NO: 8977 - protein, 413 aa, unidentified
MTSYSFVLDADGKPLSPTKEVKAWYMIRVGKATLVSKYPMMIQLKRSIPEDEICKDEIRCGIDDGGLHVGIALVQKCKTKNKVLFKGTIEQRNDVKHLMEVRRGYRRYHRQHKRYRKARFDNRSSSRREERIAPSILQKRQTITRVIHHLNKWINITTYWLEDVAIDIRTLTDGYKPYRWQYQKSDRLDENIRKAVILRDGCKCVECSKTNTVLEVHHIKPRRLTGSNTLGNLITLCSRCHQKTEGNEEQYMQHYFDMLNSSDNKNLNYASYVMIGKSWLRERLSELGILHLTTGGNTANKRIDWGIKKSHSNDAICITDLSPDTADVLEYTIKPMRRQSKAKTDNVLGIKHRDLVEYTFKNGETHRGYVTALYPEQTALNFQSPTKHCKKVNAKKCRLLWKYNKIYWLQNIV

SEQ ID NO: 8978 - protein, 412 aa, unidentified
MTNVKEYAFVLDAEGKQLSPMRIEKAWYKIRHNQAKLVNKYPMVVQLYKVVPEDEICKDEVRCGIDDGGLHVGIALVQRCQTKNKVLLKGTIEQRNDVKKKIEQRKMYRKHRRYYKKYREERFNNRVSSKRKGRIAPSILQKRQATMRVINQLNKWINISGYWLEDVAIDIRAMTDGYKPYAWQYQKSNRLDENIRKAVILRDGCKCMECGKSNCRLEVHHIKPRRNNGSNTMSNMITLCSKCHNKTEGKEGQFMDRYFSMINGSDNKHLNYASHVMIGKTWLREQLSNLAPLHLTTGGDTANKRIDWSIEKSHSNDAICITGLTPDIVDVKDWVLKPIRRKCKGKTGSVNGFRYRDYVQYTYRNGKTYKGYVTALYPKKNALNFKSQTKSCDGVRTNKCKLLWRFNKIYWL

SEQ ID NO: 8979 - protein, 424 aa, unidentified; identical to SEQ ID NO: 5075

SEQ ID NO: 8980 - protein, 428 aa, unidentified
MVYVLNRQGKPIMPCKEAKARKLLKQNKAKIAKHEPFTIQLLFDCENQIQDINLGIDAGSKHIGISATTEKQVLYEADVELRNDIVDKLSSRHEVRRTRRNRLRYRPARFDNRVKSKHKGWLAPSIEQKINTHIQVIKHLYEILPITNLIVETAQFDVQKINNPEISEKEYQRGEQLGFWNVREYVLHRDNHECQCCHGKSKDVILNVHHIESRKTGGDAPNNLITLCETCHKAYHKGEIKLNFKRGKSYRDAAFMGIMRKTLFNRLCVVYSNVYETYGYITKNTRIENNLPKAHYIDARCISGNPKANPLDYYIYQKCVRKQNRQIHKNNFLKGGRKKNNQLIGSIFGFELFDTVKYQNKQYFVFGKRKSGYLNIRNLDGEKVNNGSISYKKLKRIKHNSTKLTERRRQFLRAPKGDAVSLPNILWQ

SEQ ID NO: 8981 - protein, 512 aa, unidentified; identical to SEQ ID NO: 7502

SEQ ID NO: 8982 - protein, 411 aa, Sulfobacillus sp.; identical to SEQ ID NO: 7761

SEQ ID NO: 8983 - protein, 450 aa, unidentified; identical to SEQ ID NO: 4205

SEQ ID NO: 8984 - protein, 424 aa, unidentified; identical to SEQ ID NO: 3351

SEQ ID NO: 8985 - protein, 430 aa, Microvirga sp.; identical to SEQ ID NO: 7723

SEQ ID NO: 8986 - protein, 442 aa, unidentified; identical to SEQ ID NO: 8268

SEQ ID NO: 8987 - protein, 443 aa, Anoxybacillus sp.
MVEENMTCFMQRKGENPMVFVLDTNKRPLAPCHEAVARKLLKQGKAAIYKRYPFTIILKEIVDNFRPKTPYRLKIDYGSKHTGLAIVRGQEVVWLGQLDHRTDIKERLDKRRAFRRARRKRKTRYRKPRFLNRRRKDGWLPPSLESRVQNIQTWVERLRKICPIEHISYENAKFDTQLMRNPEINGVEYQQGTLQGYEVREYLLEKFGRKCCYCGKEGVPLEIEHIIPKSRGGTDRVDNLCLACHDCNQRKGSKTAEEFGYPHIQEMVKKTLKDASVVNATRWKVYEVLKQSGCEVECGTGARTKMNRIRLGLPKIHYFDACCVGESTPLQLHFKTKEALFIKAKGRGSRSRTNLDKYGFPRGFLARQKFFFGFQTGDMVKAVIPRGKYQGVWFGEVSCRKTGSFDIKGKDGKRIAQGINYRYVQVIQRFDGYTYRREGMNIA

SEQ ID NO: 8988 - protein, 311 aa, Microcoleus sp.
MCKVFVLDSEKRPLDPIHSARARQLLRNKKAAIYRRFPFVIILKDSHPDSSVTTLRLKLDPGAQTTGIALVSDATGEVVFAAELKHRGFAIREALTSRRQLRRSRRTRKTRYRQPRFLNRKRSEGWLAPSLQSRVHNIKTWVKKLCKFALIAAISQELVRFDMQLMRNPDLQGKEYQQGLLAGYETREYLLEKWGRQCAYCGVKNVPFQVEHIHPRAKGGTNSVTNLTLSCEKCNTKKGTKDIKEFLKKEPRLLSQILAQAKRPLADAAAVNTTRFALLFVLKATGLPVETGSGGLTKFNRNIKTYPKLTG

SEQ ID NO: 8989 - protein, 428 aa, Sutterella sp.; identical to SEQ ID NO: 3486

SEQ ID NO: 8990 - protein, 459 aa, unidentified
MQKLQAKLKNTPSDTSQVTCSGTSLLNRDQTSYPIIDAQCIEDVLACNDPDVNQSQNTGSLKDVFVFVISIDGKPLMPCKPAKCKRLLKSGRAKVITRFPFTIQLNFECENVTQEVNLGIDTGFGNIGFSATTEKNELICGTVILDGRTKERLEEKSMYRRGRRNRHHWYREPRFDNRSKPEGWLPPSVNRRYQTHLTLINKLKKILPVSNVTLEIAKFDIQKIENPSIEGVQYQQGDLYQYQNIRSYLMSREKGKCQFCGQDFKSQPSHIHHITPVSLGGNNRVSNLSILHKKCHDKLHKNHLEKQLKANSKGYKQSTFMSIIQKRFWKDIPDLKVTFGNITFVDRNKINLPKTHYNDAFVISGASNQPRTNPLEIKQVHRNNRVLQVNRKGFKPSIKREKSKVNPGDIFWVNKMRYVCKGMFNYGKQILFGTMKKKEYLSFAKVTNVFRFGSFVWNI

SEQ ID NO: 8991 - protein, 433 aa, Erysipelotrichaceae sp.
MYVYVINKHGQPVMPCRHRTARVLLQKHKATVVKQVPFTIRLLYGSSGYRQPISLGMDAGSKHIGIAATTEKKVLYAEELSPRNDVVKLLSVRRQNRKTRRNRKTRYRQARFDNRVHSKYKGWLAPSVEVKIQEHISAVLRIQKMLPLSEIHVETAEFDIQRLKAMEEGKPVPVGTDYQNGEMYDQYNVRQYVLFRDDYKCQCCGRHDDGVKLHVHHKESRQTGGDTPNNLITLCKDCHKALHAGTIQLPGDKSKRGKSYRDSAFMGIMRKAMVVQLRELIDIPVTETYGYITKCHRENAGLPKSHINDAIMISRNFETVSDDTYYISKAVRHHNRQLHKNTILKGGVRKRNQAPHVVKNFRLFDLVRYENGFYYVFGRRKSGFMDIRTLDGKKVNNGSVSYKRLKVISASKGMLVERKKAIPLADSSASFLA

SEQ ID NO: 8992 - protein, 468 aa, Petrotoga sp.; identical to SEQ ID NO: 3825

SEQ ID NO: 8993 - protein, 507 aa, unidentified
MSEYIYVLGMDRNPQMPTKRKRHVEKLLQTGRARIFRQVPFTIQLTYENEPVLQPVTIAEDPGRSNIGMAVVSLSGELLSAAVVQTRNKEIAKLMEKRKQHRRASRNGERKARQRLAKKCHTMFKAGFLMRKLPMYGKDKRVKCHVIRNTEARFCNRKRKDGWLTPSAEHLVRTHINLVHKMQKFLPITDVAVEINRFAFLSLEDPSVSGVDFQNGPLKGYDNLNAAVEDLQDGHCLMCKDPIEHRHHIVPRSIQGSNTIENIAGLCCKCHEKVHKNAAFEKRLKKKKAGLDKQYAAVSVLNQAIPFICKRLEQEFGKEHVHYCSGRETAMVRRSFGYHKTKEEPLHEVDAWCIAVLSLQQVPEKAPEFDHVHKIMQFRRQDRSRIKAQTSRTYYYEGKKVAKNRKKAEGQKEDSLQEWRECQITLYGEEQARKMTSQLKVRKSIRRYNRLDRLMPGAVFYYKGTRYVMRGQHGNGRYLQAVGMGNKDFPVKDCKIVIQNEGLVFLS

SEQ ID NO: 8994 - protein, 406 aa, unidentified; identical to SEQ ID NO: 7406

SEQ ID NO: 8995 - protein, 415 aa, unidentified; identical to SEQ ID NO: 2674

SEQ ID NO: 8996 - protein, 514 aa, unidentified
MSTIYVLNKDGKPLMPTTRCGRVRHLLKEQKARVVTSNPFTIQLLYETDDVVQPLYLGIDPGRTNIGVAVVKTDGTAVFTAHLETRNKEIPKLMQGRKKARRARRTNGRRCRRQRRAKANDTISKKCVKQDTAQSGSASKRAKKIGVIKRHLPGCEKGVLCIGIKNKEAKFSNRTRPEGWLTPTANQLLQTHINLVKKIRKFLPISDVVLEINKFAFMQLDNPNIQKWQYQQGPLYQKASLEEAVSEMQEHHCLFCKKPIAHYHHVVPQSENGSDTIGNIIGLCTKHHDLVHKDTAWQKKLAKKKTGLNKKYGALSVLNQIIPALTKGLGSRFQGHFYVTTGKSTYDYREVHGVSKDHWLDAYCIACSVLPNDVCDSDINNRVPYELKQFRRHDRRALHKANINRVYTLNGKSVATNRHKAIKQTTDSLEEFRQCQPDDVCKLKVKEHHPEYRNPERNFPGCVFLVGKHTHVMQGTSGSHNGQADGYYDTNGNSYSSGKCKFVAKNEGVVFTLN

SEQ ID NO: 8997 - protein, 311 aa, Methanosarcina sp.
MPTNPAKARILLKAGKAKMVSRIPFTIKLNYNSKGYTQPVVAGMDSGSKKIGCAAVGNGKILYQSETEIRQDVSGKMQQRAMYRRTRRSRNTRYRPARFDNRRNSQREGRIPPSIRSKLESHFREKKFVESILPVTEWKVELASFDTHKITNPDVSGIGYQNGDQKGFYNLKAYVLSRDNHTCQHCKSKSKDPKLHCHHIIFRSQNGTDTPENLITLCSTCHQKLHEGKIKLFGNVSKTKHATDVGIIKSQIKKSEWNFKETFGYETKYKREQILELPKTHYNDGVAICCDFDQKVTTNPTIYFKKTCFKG

SEQ ID NO: 8998 - protein, 535 aa, unidentified; identical to SEQ ID NO: 6116

SEQ ID NO: 8999 - protein, 406 aa, unidentified
MVYIKDIDGRPLMPTKRHGKVRWLLKENKAVVINLCPFTIQLTYKSTDHKQPVTLGIDAGAKHIGFSATAEKEELFACETTLRTDIVDLLSTRLQNRRTRRSRLRYRKPRFNNRGSSKKKGWVAPSVKQRIDSHLNEVNEIHKILPITKIVIEVAQFDTQKMKNHDISGSDYQNGEQLGFWNVREYVLFRDGHKCSHCKGKSKDPVLNVHHLESRKTGGDSPSNLVTLCESCHKAFHKGEIELKKKRGKSLRDAAVMGIMKWKLYEELKSRYDNVSMTFGYITKYNRIKYGIEKSHTSDAFVISRNLNAKRIERQYLKRLVRRHNRQIHKMKILKGGKKKNNQAPFEVFRFRLFDKVLYNNEICFIYGRRKSGNFNIRDFNGENPKDVSYKKLKLIRGKMHPIILK

SEQ ID NO: 9000 - protein, 428 aa, unidentified
MFAAVIETRNKEIKKLMADRKAHRQASRRGERRARQRLAKKYGTIIKAGMAMRKLPQYAADKFVACKFIRNTEARFCNRKRRPDWLTPTVNHLVQTHLNVIKKISRYLPVTDIAIEVNRFAFMQMENPNASGVDFQNGPLKGFNDVKAAIREQQHGKCLMCKNDIEHFHHMVPRNKGGSDTIQNQVGLCPKCHAKVHTDTSFRKKLGDKKSGLLKKYGALSALNQAIPFICKGLLEEYGEKHVRFCTGKETSLIRTSLGYEKTNENQMHEVDAYCIGLAMLGVKNIKFQQFDNTYKIKQFRRQNRSIIHHQTERSYYLGKQKIATNRKPRFEQTGDALSDWYEKQLKTCENGEAGKLLSALKVKKSSRFYNSKGRLMPGTIFFYNGQRHVISGQLTGGRYLRAYGDTKTNYPISKCKILKHNEGLVFI

SEQ ID NO: 9001 - protein, 431 aa, unidentified
MLVYVLKQNGQPFMPTERFGKVRRLLKEGKAKVVRREPFTIRLLYEPETDVIQECYCGVDTGSQHIGVAVVGNDKVLYQSQTELRNDIKRKMDARRVYRRNRKSRKTRYRKPRYLNRGNSTRSDRLPPSVRHKVQAHIGEIEFCKKILPIKDENIILEVSQFDTALMKNPSLMNEKIKHWGYQKGFNYGYSSRRKAVLHRDNYTCQCCGKKNCRLEAHHIKFRSNGGTDDEENLITLCKECHDGVHVGTVVLNKKPKKSRGLKHATHMSIIRTQLLKKYPEAIETFGFVTSENRNHLKLEKDHYIDACVIASGGLEFKELDVIYRKRRVSIQDRVLAKGVRGEQKLPTGKIFGFKKFDKVEYLGETCFIKGRRSSGAFVLMDIDNNSIDFRDRGGKQNPSYKCIERVNTRKSVLCIKERIEREVRFIPTLS

SEQ ID NO: 9002 - protein, 358 aa, unidentified
MLVASISATTSEKELYAADVELRNDIVEKLSTRREQRRTRRNRLRYRKARFNNRVSSKRKGWLAPSIENKIQTHLTVVEKIHKFLPITNIIVETAAFDIQKIKNPSISGKEYQQGEQLNFFNVREYVLHRDGHKCQHCKGKSKDPILNVHHIESRKVGGNSSQNLITLCKSCHKAYHEGKIELKVKRGTSFRDSAFMSTMRWSFYKKLKNIYLNVSMTFGYITKNTRITNGLPKNHYVDARCISGNPTAKPLEYYFYQKKVRCQNRQIHKANFLKGGRKKLNQAPYLVKGYRLFDLVEYQKDLYYIFGRRDSGFFDIRKLDGTKVNKGSLSCKQMRLIDIRKTIIIEKRMQGAIPPTN

SEQ ID NO: 9003 - protein, 417 aa, unidentified
MPCSPAKARLLLKEKKASVKRRTPFTIQLTIATGEAKQPVTLGVDSGYKHIGLSATTEKAELYASEVELRQDITDLLSARLALRCSRRSRKTRYRAPRFDNRVASKREGWLAPSVENRIAAHMSRVEAVMRVLPVTAITVETAAFDTQLLKNPDIAGAAYQQGEQLGFWNVREYVLFRDGHVCQHCRGKSKDPILNVHHIESRRTGGDAPNNLITLCETCHKAFHRGEIELKVRRGKSFKAETFMGIMRWTLFERLKKAHPELRVRNTYGYLTKHKRISHGIAKSHCADAYCIADNLGAKRLEGFFFQKQTRKHNRQIHKLSILKGGLRKKNQAPYEVKGFRLFDKVICKGEEAFIFGRRTSGSFDVRRLDGTRISAGINYKKLRLLEPRTTYLTEFRKEAALPHLHECRGFRAEFL

SEQ ID NO: 9004 - protein, 431 aa, unidentified; identical to SEQ ID NO: 4306

SEQ ID NO: 9005 - protein, 423 aa, Arthrospira sp.; identical to SEQ ID NO: 3301

SEQ ID NO: 9006 - protein, 424 aa, unidentified
MRVFVFNMRGRPLMPCSQRKARLLLRENKAMIYKYHPFTIQLTYTTGETKQDCHIGIDTGSKYIGAAVRSEDKVFWKGEIELRQDIRSNLDTKRIYRRSRRNRKTRYRKPRFLNRKRREEWLPPSLQSRINHTFHWIDTLSSLVPNPILHIEVGKFDVAKMINPEIHGVDYQHGQTYGFFDERYFVFARDNYTCQCCGKSKNKILNTHHIIYRSNGGTNRVDNLITVCTDCHTSQNHRKGGIFYQWQEQHKKVKQYKEPPFMNTLRKRIFVAYPDAEITYGSETTPKRKAMKLDKTHYNDAIVISGINEIKENPEEWLLIKQFRKKKRSLHEATARKGRKKPNRNQTRNSKNTPYYKGFYLNDKVSVFGKSGYITGFTSNAAYIKDENNDYITLPNKTYKQVSINKMKLECHNNNWQYIIKNAV

SEQ ID NO: 9007 - protein, 413 aa, unidentified
MTSYAFVLDANGKQLAPAKEQKAWFLIRKKRAALVSKYPMVIQLKKEIPENEICKDEIRCGIDDGGLHVGIALVQKCKTKNKVVFKGTIEQRNDVKHLMEVRRSYRHYHRYHKRYRPARFDNRKSSKRKKRIAPSILQKRQAIIRVIHWLNKWINITNYWLEDVSIDIRALTDGYKPYRWQYQKSNRLDENIRKAAILRDGGKCMECGKSNCRLEVHHIKPRRRNGSNTLDNLITLCESCHQKTEGQEELYMDRYFSLLKSSDNKNLNYAQHVMIGKMWLRKQLSGLGVLYLTSGGDTANKRIDWNIEKSHTNDAVCITDLQPDTCDIKEWAIKPMRRQSKAKTDHVLGIHHRDLVEYTFKNGETHRGYVTALYPDQKAINFQSQTKHCKKVNARKCKLLWNYSKIYWFENAS

SEQ ID NO: 9008 - protein, 494 aa, unidentified; identical to SEQ ID NO: 6841

SEQ ID NO: 9009 - protein, 431 aa, Klebsiella sp.; identical to SEQ ID NO: 2435

SEQ ID NO: 9010 - protein, 425 aa, Nostoc sp.
MQTNYVFLVDTNKQPLNPIHPARARELLNKNKAAIYRQFPFTLVLHKAIDNPVVRLLTLKLDPGSKTTGIALLDGENVIWAAELQHRGWSIKDALNSRRSLRRSRRSRKTRYRMARFDNRKRPEGWLPPSLMHRVLTVETWVKRLCRYAPIAQTVMELVKFDTQKMQNPEIDGIEYQQGQLAGYEVRQYLLEKWGRKCVYCDKEGVPLQIEHIHPKSKGGSNRVSNLALSCKRCNLKKGTQLVDEFLKKDAKRLEKIKQQAKKPLKDAAAVNATRWTLFHTLKGILPTTTGTGAQTKYNRTLFQLEKQHWIDAACIGDIKAIKLLTLQPLLIKANGWGTRQMAGTNKYGFPIRHRTRQSLHFGFQTGDIVKAVVLSGKKVGQYVGRVLCRARGSFDIVTKTGRVGDINHRFCKPIHKKDGYSYAF

SEQ ID NO: 9011 - protein, 459 aa, unidentified
MSNSICVISKNGERLMPTFRPGRVRHLLKDGKAKIVKHQPFTIQLLYDSNNYTQPIEICEDVGYNYIGISVKSTTHEYVSAQYDTLQDEKEHHDSCSKYRRTRRNKLRYRKARFNNRKRKEGWLAPSLEHKKQLNINLIEWYMSVIPITHTTVEVGSFDTMLLQAIQKGEAKPEGTDYQQGPRYNLATLREAVFYRDNYTCAVCGRSSMKDGAILHMHHMLYWKGRHGYQLDELVTVCEKCHTSPNHQKSGVLFGFGENKKFANLSGAAFMNAVRWQIVNALYATYGKDFVTVTYGAMTKERRILLGIEKTHNNDAYAMGDYHPAHRCEFKHYQKRRRNNRVLEKFYDATYIDARTGNKAKGKELFNGRINRNHKKDSENLHKYRARKTAKGRRSIRNKRYTIQSGDTILYAGKKHITSGCFNKGSWLRISVNGTVKSIAVSKVKLINHIGAWKEDTSI

SEQ ID NO: 9012 - protein, 323 aa, unidentified
TRYRAPRFDNRIRTKRKGWLAPSVENRINAHLSRIEAVLRLLPVTTITVETASFDMQLLKNPEISGKEYQEGEQLGFWNVREYVLSRDGHVCQHCHGRSKDPVLNVHHLESRRTGGDSPGNLITLCETCHKALHRGEITLKAKRGQSFRAEAFMGIMRWEVLNRLKASHPEQEVQNTYGYRTKHARIENGIAKSHCADAFCIAGNLGAERLGEFFFQKQTRRNNRQIHKLSVLKHGLRKRNQAPFEIKGFRLFDKVACKGEEGFIFGRRSSGYFDVRKLDGTHISAGISYKKLRLLEKRQTYITEIRKEEALPPLSEGRGLRA

SEQ ID NO: 9013 - protein, 512 aa, unidentified; identical to SEQ ID NO: 8121

SEQ ID NO: 9014 - protein, 435 aa, unidentified
LAKETLTDHLAEVYMNKVFVLNQFGKPLMPYHPAQARIMLKEKKAFVKRKTPFTIQLTIPVKEKLYPITLGVDAGYRHIGLSATTEKEELYASEIETRADVSALLSTRRQCRRGRRNRKTRYRAPRFNNRVHSKHKGWLAPSVENIIAAHISRIEDVLKLLPVTKIVIETASFDIQLIRNPEISGAQYQQGEQLGSWNTREYVLCRDGHTCQHCHGKSKDQILQVHHLESRRTGGDAPNNLITLCKTCHEALHRGKIELKAKRGRSFRAETFMNIMRWTVLERLKVAHKELEIQHTYGYITKHTRISLGLEKTHRADAFCIAGNLHAQRLDCCLYQKQIRRHNRQIHKMKILEGGIRKLNQAPYEVHGFRLYDKVLCNGEAGFIFGRRTSGYFDVRRLDGTRISASISFRKLRLIERRKTYLTEIRKEEGVSSPA

SEQ ID NO: 9015 - protein, 557 aa, unidentified
MIYNLGSTRERGFMKQKKQKVMVYILNKKGKPLMPTTRCGHVRKLLDSKKAVVVNSNPFTIRLKYDTPNGVQDVFAGIDSGRENIGSGASNEDGDCLYLGELRTSNKSIKMKMTERVGFRRERRKHDRQNKQRKARKDHTEIQNGNDDICRTTISCKSVQISYPVAEESVTHKIIRGKEGKFANRHRDEGWITPSARQLVQMHMNDLKSMCKILPISHVTLERVAFDFQKLENENIKAWEYGKGKLYGYDSPEEYIHDVQDGKCLVCGKPHIDYLHHIIPRSKGGSDKVSNIAGLCYDCHYGPIGVHNCQDTQDRLPELKNEVNKQYKVSLLNSVMTVLIEEMDKFCKANSIIFSICEGHDTAKVRDMYDLQKDHCFDGFAISLVGRNVESVDVIPDRIYQKQRYKKKSKNIIQKRNCREYYDGKKLVAVNRHKGTDQKADSLEEYMNTYAETHTADECKNQFESLTVKPARRTYTFHKEGRICPFHIGDKVRYEKKNKIKGNTKVDTFICEGIYFSKDENKAEVEHNKTKSKKMKFCRTIESGCIPYIDYRKLALI

SEQ ID NO: 9016 - protein, 475 aa, Ferroplasma sp.
MEKNMKERQKLDRRDTYTPADAPQVRGNCDHALNREETLSVHGLKTPSNTPDVDIQSGMTGQDLRVPVINMRNEPLMPTSPGKARRLLKHNRARVISSNPFTIQLLYATGETKQPVTLGIDAGYKHIGFSVVTEKRELISGEAVMRTDMPKLNVEKSMYRRGRRNRLWYRQPQFINRGNNSKGWFAPSIAHKLQTHIRLIEKLKKILPVSKVIIEVASFDQQKMKNPEISGIEYQQGELQGYEIREYLLEKFHRKCVYCRKTNVPMEIEHLTPRSRNGPDTVDNLAISCHECNQKKNNLTAEEFGYPEVRKRALKSLKDATFMNIVRWKLTQLTGSAYTFGYITKKNRISLGLDKSHANDAFVIAGGTTQARSTVFDVTQRRRNNRSLQINRKGFRPSIRRRRYPLQPGDVVEFGESRYGVVGVHSYGNYVIIMNGEKKMDVNIKKVKLVKYGKGLRFTTQFLPTLSHMVSLEGS

SEQ ID NO: 9017 - protein, 442 aa, unidentified; identical to SEQ ID NO: 2637

SEQ ID NO: 9018 - protein, 512 aa, unidentified; identical to SEQ ID NO: 3720

SEQ ID NO: 9019 - protein, 428 aa, unidentified
MSNFVFVLDKNKQPLDPTHPAKARKLLKVGRAKIYRQYPFTIIMQDLEVNNCVTHDHQLKIDPGSKTTGLAILQENRVLFGAELSHRGSQIREALTSRRQLRRGRRSRKTRYRQPRFLNRTRSKGWLPPSLQSRIDNIMTWINRLSKFCPITGISQELVKFDLQKLENPEISGKEYQQGDLQGYEIREYLLEKWGRQCAYCGIQNIPLEVEHIYPKSKGGSNRISNLTLACHDCNQKKGSQELKDFLSGKPDLLRRIQSQAKKPLADATAVNATRWKLYNCLKETGLDVETGSGGLTKFNRTRQNLPKTHWLDASCVGKSTLGNLKVLPSKPLIIKAKGHGRRQRCRTDRFGFPKSHAPSKKCFQGFQTGDTCRAIIPKGKFKGKFIGRIAIRFRPCFRISVKDKKPFDVHPKYLHTVQQADGYEYQA

SEQ ID NO: 9020 - protein, 442 aa, unidentified; identical to SEQ ID NO: 3218

SEQ ID NO: 9021 - protein, 426 aa, unidentified; identical to SEQ ID NO: 3614

SEQ ID NO: 9022 - protein, 403 aa, Halomonas sp.
PTLLAADPGSKETGLALMRLENNATEEKAPATRHVLCLFQLVHRGFQIRQALEQRAGFRRRRRSKNLRHRKPRFDNRTRKKGWLPPSLQHRVDTTMAWVDKLCRWAPVTHLSMELVRFDMQKMENPEISGVEYQQGTLLGYEVREYLLEKWGRECAYCGTGDTPLEIEHVVAKSRDGSSRVANLTIACHDCNQAKDSQWLADFFATNKGLKKRLKANGLSAEVRLECVQRQLKLPLRDATAVNATRWALFGAMKSTGLPVAVGSGGRAQYNRQRLGIPKTHALDAACVGKFDTLKGWRVPTLVIKAMGRGSYQRTRLDKYGFPRGYLMRQKQVQGFQTGDRVRAVVPSGKKAGTHTGRVAIRKTGSFNIQTEQGAVQGIFWRYCTLLQRGDGYGYHPLPTIQS

SEQ ID NO: 9023 - protein, 416 aa, unidentified
MVYVLSQNGQPLMPTENHAKVRVFLKQGKAKVVQRCPFTIQLLYESTTHTQKINLGIDAGSKTIGISATTDSKVLYEAEVVLRNDIVELLSGRRALRRSRRNRKTRYRKPRFDNRKKPDGWLAPSIRQKIETHVTVVENITKILPMTKIIVETASFDIQKIKNPEIEGAEYQHGEQLDFWNVREYVLFRDGHTCQCCKGKSKDNILNVHHIESRKTGGNAPNNLITMCETCHKAYHKGIITLPKEIHRGMRFRDAAFMGIMRWAFYDRLKELYNPLGVEVINTYGYITKNTRITYDLPKEHYVDARCISGNPAAKPMDYYYLQKKVRCHNRQIHKCKINKGGTRKRNQAAYEVKGFRLYDQVLWKGQKCFIFARRSTGRMDLRLLDGTHVNASVGYKNLKLLSMRKNYLIEQRKAG

SEQ ID NO: 9024 - protein, 518 aa, Anaerostipes sp.; identical to SEQ ID NO: 3878

SEQ ID NO: 9025 - protein, 428 aa, Oblitimonas sp.; identical to SEQ ID NO: 4442
  source 1..428: note = isolate UBA4037

SEQ ID NO: 9026 - protein, 426 aa, Scytonema sp.; identical to SEQ ID NO: 2715

SEQ ID NO: 9027 - protein, 480 aa, unidentified
LYTKPLDNIGEGSLPPSGEINLKGMTFMVYVKSIGGKALMPTSNAKARKLLKQKKAKVVSLRPFVVKLTYKTKTEYTQKLNLGVDSGYSNIGFSVIDAKQEYIAGEVKLLEGMKKRLLEKASYRRIRRSRLRYRKARWNNRVKSKKKGWLAPSLKHKLDTHIKFIDYLKNILPIGKITIEVANFDIQKMKDDLISGIDYQNGDMFGFWNVREFVLHRDGHKCQNPNCKHKDKKEQILKVHHIRYRSEGGSDRPENLITLCSKCHTPVNHRKGKFLYDWCVNGKKVRGFKEATFMSMIRWYLVNELKSKHNNVSITYGYITKNHRIQNGIEKSHLNDAFAIAKGTNQARTKDRFLVIQDRLKNRSLEKFYDSKIIDIRTEKKVSGGDLNCGRSTRNKNLNTENLRKYRGVKISKGQRRIRKQKYFYQPNDLVKYDGKVYTVKGTQNEGKYIALKEIKKVPKVELLIPYVFKKGLNWSYRLC

SEQ ID NO: 9028 - protein, 413 aa, unidentified; identical to SEQ ID NO: 3476

SEQ ID NO: 9029 - protein, 444 aa, unidentified
MLVYVISKDGQPLMPISRCGKVRRLLRDKKAKVVRRCPFAIKLLFEPENDFVGECYCGVDTGSKHVGIAVVSNDRVLYQSQIELRDDIKRKMEQRRMFRRNKRSRKTRYRKPRFLNRGNSTKSDRIPPSVKHKVQAHIDEIEFCKKILPISDIILEVSQFDTALMKNPSLINEKIKKWGYQQGFNYGYSSRRSAILNRDNYTCQCCGKKNCRLEVHHIRFRSNGGTDDEENLITLCEDCHKGVHAGTVVLNKKPKKSKNLKYATHMSIIRSQLLKKYPNAIETFGFVTSENRNHLGLEKIHYIDACVIASGGLPFELSDVLYQKRRVSKQDRQLCQGMHGERKIPTWKVLGFKKFDLVEYMGELCFVKGRRSSGSFVLMDINSRLIDFRDKGGKQNPSYKSLKRVSARRSILCISKRTERLDRLIESSVYERLGIAELIPRRVE

SEQ ID NO: 9030 - protein, 421 aa, unidentified; identical to SEQ ID NO: 4361

SEQ ID NO: 9031 - protein, 515 aa, Actinoplanes sp.
LHTRSKTHQPVLPQRAALESVSADKPTRVHETGRGHRDSVAVPGVRHGRGEPATPVAPGRRRHPDGQPSGGRGLATPPTHPVVLVLDKHGRPLQPCTPARARTLLGAGRAVVHRHTPFVVRLKDRTIEQSTIQGAEVGIDPGSKATGIAMFTAKEGNRAGLFAIEVRHRGGQIRDKLTARAGRRRGRRSRNLRYRAPRFTNRARPTGWLAPSLRHRVETTMSWVTRLLRWAPITRLHVERVAFDTQLLQDPNVSGVAYQSGELAGYEIREYLLEKWKRRCAYCQATNVPLNSDHIEPRSRGGSDRVSNLTLACIPCNQEKGSLPVEVFLTDRPAVLARIRRQAKAPLRDAAAATSTRWALWSALTGTGLPVRVATGGRTKWNRHRTGAPKTHTLDAMHVGELASMMRWPSTTMVATSAGRGSYSRARTDRYGFPRLRLPRTKRVHGFATGDLVRAVVPTGVKRGTHTGRVAVRSTGRFNIRTSAGLIQGIDHRHVRLLQRADGWAYTRRPEPARA

SEQ ID NO: 9032 - protein, 431 aa, unidentified
MPDKVYVISRLGHPLMPCSPAKARHLLDDGKAKVVKRTPFTIKLLYGSTEYTQPVILGVDAGSKTIGLSASTTKEELFAAEVMPRNDVVENLSTRREFRRARRNRTTRYRKPRFNNRVHSKNNGWLAPSVEVKIQEHITSIKRVCAILPISKIVVETAEFDLQLLKAVQDGKPVPEGEDYQKGEMYGSYDVRQYVLWRDNYTCTCCGVKGTDKKPVKLHVHHFESRKHGGNAPDNYGTLCEDCHKKLHLGIITDISLKTRKRPSTRDAAFMGIMRKTLMQRLITGLSIPVAETKGYITKAAREEILKLPKTHTNDALAIAQGRHGFGIREQAYVKPTNRIYTVRPVRHHNRQLHKATMLKGGIRKLNQASKYIFGFRLYDKVLYQGGEYFVWGRRRSGSFLLRTIDGTKVKDGVGYRNLTLLERSTNYLIA

SEQ ID NO: 9033 - protein, 406 aa, unidentified; identical to SEQ ID NO: 4271

SEQ ID NO: 9034 - protein, 456 aa, unidentified
LAAFVLDRNGKPLMPCTEKRARLLLVRRRARVHRVVPFTIRIIDRDIRTSDVQPLRIKLDPGSRVTGIALVRDFTFSDGLRGAAVLNLFDLIHRGAQISKMLTVRRAMRRARRYRKTRYRAARLNNRRRSAGWLAPSLRHRLETTIAWVHRLRRFAPVVAISTELVRFDMQAMENPDIRGVEYQQGTLAGYELREYLLEKWGRQCAYCDATGRPLQIDHIKARALGGSNRVSNLTLACKSCNQEKDSVPLTTFLRYDSRRAARILAHARAPLRDAAAVNMTRWALFGALKATGLQVEPSTGGRTKFNRAHLSVPKTHALDAACVGEVDMLRDWRRPTLAIRCTGRGAYRRTRLTASGFPRGYLMRQKRACGFQTGDLVRAKVPRGKKTGTYVGRVAIRASGSFNIQCAAQVIQGISHRYCTVMQRGDGYGYSFVAQFPKESENWGDATRRALSLPA

SEQ ID NO: 9035 - protein, 427 aa, Enterococcus sp.; identical to SEQ ID NO: 2410

SEQ ID NO: 9036 - protein, 477 aa, unidentified; identical to SEQ ID NO: 5307

SEQ ID NO: 9037 - protein, 429 aa, unidentified
MLVYVLKQNGQPFMPTARFGKIRRLLKAKKARVVRREPFTIKLLYEPETDVVQECYCGVDTGSRHIGVAVVSNDKVLYQSQTELRSDIKQKMDARKQARRFRRSRKTRYRKPRFLNRSNSTKGDRLPPSVKHKVQAHIDEIEFCKKILPVSDLIVEVSQFDTALMKDPRLISEKVKHWGYQQGFNYGYSSRREAILHRDNYTCQCCGKKNCRLEVHHVKFKSDGGTDDEENLLTLCEDCHKGVHAGTVVLNKKPKKSKNLKYATHMSIIRSYLLKKYPNAIETFGFVTSENRNHLKLEKDHYIDACVVASGGLEFKELDVIYKKRRVSVQDRVLTKGVRGEQKLPTGKIFGFKKFDKVEYLGKTCFIKGRRSSGSFVLMNIDNKSIDFRDRGGKQNPSYRSIERVNTRRSILCISERIKGKERLIPVLS

SEQ ID NO: 9038 - protein, 465 aa, unidentified
MSTCVCVLSNSGERLMPTFRLGKVRHLLKDGKAKIVKHHPFTIQLLYDSKTNTQPIEICEDVGYNYIGISVKSQSHEYVSAQYDTLQDEKACHDSCRKLRRTRRNRLRYRKPRFDNRKRGEGWLAPSLRHKKELNVNVVKMYCAVMPITHATVEVGSFDTMLVKAIQEGKAIPEGADYQKGPRYNLATLREAVFYRDNYTCQVCGRKVADGAILHMHHMFYWKGRHGDSLNELLTVCEKCHTPANHQKGGKLYGFGENVKFADLSGAAFMNTVRWQIVNELYAAFGKDFVTVTYGAMTKEKRIALRLEKSHNNDAYAMGEFHPNCRCTFEHYEKVRRNNRILEKFYDSRYIDIRTGEIATGKELFNGRINRNHKKDSENLHRYRGKRTYAGHRALLRKKVNLNPGDLVSLNGEVLVVHSTHTNKKGAVNVEFKTPGKSGQKSASLKKLKIVKTTDSMHSAWEKIS

SEQ ID NO: 9039 - protein, 328 aa, unidentified
RRNRKTRYRAPRFDNRIRTKRKGWLAPSVENRINAHLSRIEAVLRLLPITKITVETASFDMQRLKNPDISGKEYQEGEQLGFWNVREYVLFRDGHVCRHCHGRSKDPVLNVHHLESRRTGSDSPDNLITLCVTCHKALHRGEITLKAKRGQSFRAQAFMGIMRREVLNRLKASYPELKVHETYGYLTKHARIANGIVKSHGADAFCIAGNLGAERLGEFFFQKQTRRNNRQIHKLSILKGGIRKRNQAPFEAKGFRLFDKVACQREEGFIFGRRSSGSFDVRKLDGTRISVGISCKKLRLLEKRRTYLTEIRKEEALPPLPEGRGLRA

SEQ ID NO: 9040 - protein, 427 aa, unidentified
  source 1..427: note = uncultured cyanobacterium
MSKVFVIDTDKRPLDPIHSAQARQLLRNKKAAVFRQFPFTIILKESRPDSPVSPLRLKIDPGAKFTGIALVNDSTGEVIFAAELKHRGFAIRDALTSRRQLRRSRRAKKNRYRQPRFLNRTRPEGWLAPSLQSRVENIKTWVKKLRQFAPIGAISQELVRFDMQLMTNPDIQGREYQQGTLAGYETREYLLEKWGRQCVYCGVKDVPFQVEHIQPRAKGGSNSITNLALSCEKCNTKKGTKDIKDFLKKDPSKLEKILKQAKRPLADAAAVNTTRFALLEVLKATGLPVETGSGGLTKFNRSQQKLQKTHWIDAACVGQSTPILNIKGVKPLLITANGHGTRQSCRTDKHGFPNRHCSRTKFHFGFQTGDIVKSVVKTGKKIGEYIGRIATRATGSFNISTRNGLVQGISYKTCKTIHQKDGYGYSN

SEQ ID NO: 9041 - protein, 512 aa, unidentified; identical to SEQ ID NO: 4031

SEQ ID NO: 9042 - protein, 456 aa, unidentified
MSTCVCVLSNSGERLMPTFRLGKVRRLLKDGKAKIVKHHPFTIQLLYDSKTNTQPIEICEDVGYNYIGISVKSESHEYVSAQYDTLQDEKEHHDDCRKYRRTRRNRLRYRKPRFDNRKRSEGWLAPSLEHKKQLNIRLIERYVSVIPITHATVEVGSFDTMLLQAIQKGESKPEGVDYQKGPRYNLATLREAVFYRDNYTCQVCGRKIADGAILHMHHMFYWKGRHGYQLDELVTACEKCHTPANHQKGGKLFGFGEDKEFANLSGAAFMNAVRWQIVDALHATYGKEFVTITYGAMTKEKRIALQLEKTHSNDAYAMGDYHPVHRCVFRHYQKRRRNNRVLEKFYDATYIDTRTGNKAKGKELFNGRISRNHKKNSEDLHKYRSKKVSKGRRSIRRQRYAIQPYDTVRLESKTYITSGCHNKGTRLLIPANGKSKSVAISKVQVVCHAGAWIQII

SEQ ID NO: 9043 - protein, 430 aa, Thioploca sp.
MPCHPARARKLLKKRKAAVLRRYPFTIILKHRVGGDLQPVEIKFDPGSRTTGIALVGHFDRGSEVIWAGNLNHRGLQIKSNLDSRRSIRRSRRNRKTRYRPARFLNRRRPKGWLPPSLWSRVDNVKNLMLKLSRLAPITQIAVETVRFDTQQMQNPEISGVEYQQGELAGYELREYLLEKWGRQCAYCGAKNVPLEVEHIQARSQGGTDRVSNLTLACTSCNLQKGNKDIKEFLKHKPKRLKTIQTFAKAPLKDAAAMNATRNAIGNVLKGFGLPITISSGGRTKFNRTQQGYPKDHWIDAACVGESGNNVIIPKAITPLIITAKGRGSRQKCSMNQYGFPRTGPKKKKRVKGFQTGDIVKAIVTSGKKIGTYVGRVMVRKTGCFDIYTGFGRISSLSYRFCRLIQRTDGYEYSTDLCPIKKGSGKYFNS

SEQ ID NO: 9044 - protein, 456 aa, unidentified; identical to SEQ ID NO: 3956

SEQ ID NO: 9045 - protein, 341 aa, Pseudoalteromonas sp.; identical to SEQ ID NO: 6143

SEQ ID NO: 9046 - protein, 417 aa, unidentified
MPCSPAKARLLLKEKKAIVKRRTPFTIQLTIATGEAKQPVALGVDSGYKHIGLSATTEKAELYASEVELRQDITDLLSARLALRRSRRSRKTRYRAPRFDNRVASKRKGWLAPSVENRIAAHMSRVEAVMRVLPVTAITVETAAFDTQLLKNPDIAEAAYQQGEQLGFWNVREYVLFRDGHVCQHCRGKSKDPILNVHHIESRRTGGDAPNNLITLCETCHKAFHRGEIKLKVKRGKSFKAETFMGIMRWTLFERLKKAHPELRVRNTYGYLTKHKRISHGIAKSHCADAYCIADNLGAKRLEGFFFQKQTRKHNRQIHKLSILKGGLRKKNQAPYEVKGFRLFDKVICKGEEAFIFARRTSGSFDVRRLDGTRISAGINYKKLRLLEPRTTYLTEFRMEAALPPLHECRGFRAEFL

SEQ ID NO: 9047 - protein, 413 aa, unidentified; identical to SEQ ID NO: 2636

SEQ ID NO: 9048 - protein, 430 aa, unidentified; identical to SEQ ID NO: 4310

SEQ ID NO: 9049 - protein, 411 aa, unidentified; identical to SEQ ID NO: 2663

SEQ ID NO: 9050 - protein, 512 aa, unidentified
MSTIYVLNKDGKPLMPTTRGGHVRHLLKEQKARVVQSNPFTIQLLYETNDVVQPLYLGIDPGRTNIGVAVVKADGTAVFAAHLETRNKKIPKLMQDRKKARRARRTNGRRCRRQRRAKANGTISKKCVKQDTAQSKNPSKRAKEIGVIKRHLPGCKKDVLCVGIKNKEAKYTNRARLEGWLTPTANQLLQTHINLVKKIQKFLPISDAVLEVNKFAFMRLDNPNIQKWQYQQGPLYQKGSLENAVSEMQEHHCLFCEKPIEHYHHVVPKSENGSNTIANIVGLCAEHHNLVHKDVAWQEKLVEEKTGLNKKYGALSVLNQIIPALTKELSFLFPKHSFMTNGKSTHDYRAAHGISKDHWLDAYCIACSVLLIDVCDSTINNCVPYELKQFRRHDRRALNNENMNRVYTLNDKVVATNRHKATEQEAASLEEFRKEHPNDVCKLKVKEHHPTYRNMNRNYPGSVFLVGKQIHVMQGIASSKDGKATKYNDTRATTIAAGKCKFVAKNSGILFV

SEQ ID NO: 9051 - protein, 456 aa, Halomonas sp.; identical to SEQ ID NO: 5803

SEQ ID NO: 9052 - protein, 465 aa, unidentified
QPLSLISSQSQLHIPLLLLPPPLLLKEGKAIIYSHKPFAIQLTYDVTPHNQPIEICVDTGYKHIGVSVKSESREYASAQYDLLPNEKEKHDTQRKNRCNRRNRKRYRKSRFDNRRASKKSGWIAPSLKNKADRHVDIIKRIAAVVPIISITVEMGEFDTQVLKAVTEGKPVPEGKDYQQGARYGIETLRAAVFQRDGYKCLFCGRGIDDGVILHVHHAYFWRSQHGDSLNELASCCEKCHTSANHKPGGKLWGYDKYLPRYAGAAFMNTVRWYIYNQIKDQIQGADVHITYGTATKLARKEYGVDKSHANDAYAMGVFHPEARAKTEYFEKKRRNNRILEKFYDASYVDIRDGKTKKATALGCERTNRKEPRMSEKNLRGFRGKKRSRGRRTIRQQRYSIRSGDRLLVASQSRVSKGVQNKGAVVALLGKPGWKNTVAVKNVQVIYHTGGWEKVAAPKIKSKKKN

SEQ ID NO: 9053 - protein, 279 aa, unidentified
VVVETAEFDLHLLKAIADGKPVPQGEDYQKGEMYGHYNVRQYVLWRDNYTCQCCGTHPSKKKEVRLHVHHLESRKVGGDAPDNQVTLCESCHEKLHKGLIAEKDFKKRKRKSTRDATFMGIMRKTLMQRLCSELPIPVVKTRGYITKATREKLLVLPKSHTNDALAIAQGKRGFNVGYLPEIAQIDKIYTIRPVRHHNRQLHKATILKGGIRKSNQTEKYVFGYRLFDKVQFNGQDCFIWGRRTTGIFTIKTINGKMIKDGISFKKLKLVEKSTSYLIA

SEQ ID NO: 9054 - protein, 332 aa, Parasutterella sp.
  VARIANT 14: note = X can be any naturally occurring amino acid
MLSASPATSAPKGXPRFDNRIRTKRKGWLAPSVENRIDAHLSRIEAVLRLLPVTKITVETASFDLQLLKNPDISGKEYQEGEQLGFWNIREYVLCRDGHVCQHCYGRSKDPVLNVQHLKSRRMGGDSPGNLITLCETCHKALHRGEITLKVKRGQSFRAEAFMRIMRWEVLNRLKASHPELEVNNTYGYRTKHARIANDIANSHCADAFCIAGNLGAERLSEFFFQKQTRRNNRPIHKLSILKGGLRKRNQAPYEIKGFRLFDKVACQGEEGFIFGRRSSGYFDVRKLNGTHISAGISYKKLRLLEKRQTYLIEIRKEEALPPLPEGRGLRA

SEQ ID NO: 9055 - protein, 406 aa, unidentified; identical to SEQ ID NO: 6072

SEQ ID NO: 9056 - protein, 453 aa, unidentified; identical to SEQ ID NO: 7420

SEQ ID NO: 9057 - protein, 416 aa, unidentified
MVYVLDKNGQPLMPTDRHRKVRLMLQSGQAKVIKRCPFTIQLNYDSGHQTQEISLGIDAGSKHIGVSTTTKIKVLYEVDVELRNDIVDLLSSRRELRRGRRNRKIRYRQAKFNNRRRGNGWLAPSIRQKIGTHLTVVENICKMLPISRIMVETASFDIQKIKNPDIQGAEYQQGDQLGFWNIREYVLFRDNHTCQCCKGKSKDKILNVHHIGSRKTGGNAPNNLITLCETCHTGYHKGTVQLPKAIKRGMRFKDAAFMGIMRWAFYEALKQQYEPVGTPVHNTYGYITKHTRIAYNLPKEHYVDARCISGNPEASSNGEYYYQKKVRCHNRQIHKLTVLKGGIRKQNQATYLVKGYRLFDKVSYQGKGYFVFGRRQSGFFDIRTLSGEKVNKGSLSCKKLKFIATRTYYLTERRAV

SEQ ID NO: 9058 - protein, 427 aa, Enterococcus sp.; identical to SEQ ID NO: 5630

SEQ ID NO: 9059 - protein, 420 aa, Moorena sp.
MQNYVFVIDANFQPLNPIIPKKARRLLDKGKAAVFRMYPFTIILKTSINNPTISPCKIKIDPGSKVTGFALVQDGQVIWAMELEHRGGLIKKKLSSRSAVRRGRRNRNTRYRKPRFLNRKRPEGWLPPSLEHRILTTQTWVKRLIKFCPVNEIWVERVKFDAQKMQNPEISGIQYQQGELAGYEVREYLLEKWGRKCTYCGKKSVPLQIEHIYPKSKGGSERVSNLCLACEKCNQRKGNKPIEDFLKKKPSLLQKIKTKALSPLKDAAAVNTTRNKLVKVLQKTKPVVTGTGAQTKYNRTKLGFPKEHWIDAACVGNIEALTLKTFQPLLVTCKGQGGRQKAALNKYGYPIRHNPLKPIKGWCSGDIAKNLLTGEFGRVNPRSKSNSFNYTVSGKKAISLHVKNLCRVHRKDGYTYGFCQ

SEQ ID NO: 9060 - protein, 509 aa, unidentified
MPDTNYIYVLGADGKPQMPTKRKRHVKRLLNTGKARIACHVPYTIQLLYKNEPVLQPVMLAEDPGRTNIGLAVLSRKGELLLSAVVETRNREIVKLMADRKKARRASRNGERKARQRLAKRFGTMFEAGMLMRKLPMYAADKFVTCNYIKNTESRFCNRKRPDGWLTPTANQLLKTHINLIHKIQKYLPVMDVAIEVNRFAFMSLENPAISGVDFQNGPLKGFDSLHDAVNDLQHGKCLLCGGKIEHYHHIIPRSQRGSNTIGNIAGLCMECHGKVHKDIEYQKELKDLKKGLDKRYGALSALNQAMPFICKSLESEFGKAHVSYCTGRDTAKMRNSFGFQKTKKNQLHEVDAWCIGILAQNNAPDRLPDFEQTHYIRQFRRQDRSLIRCQTERTYKLDGKTVAKNRKKRTDQKDDSLEDWYNKQIALHGKREAECMLSRLTVKKSKRHYNDPIRILPGAVFIYNGKRYVLSGRLSNGKYFRAVGDSKTNYPVGKCRIVKQNEGLVFIY

SEQ ID NO: 9061 - protein, 421 aa, unidentified
MRGQPLMPCSPAKARHLLMDKKAVVKRRTPFTLQLTIATGETKQDVTLGVDAGAKHIGLSASTEKEEVFASEVELRQDITGLLAARLAFRRARRHRKTRYRAPRFLNRVHSKHRGWLAPSVENRIQAHMSRIDAICGLLPVTKIVIETASFDIQKIKNPDVEGTDYQQGDQLGFWNVREYVLFRDGHVCQHCRGRSKDKVLNVHHLESRQTGGDAPNNLITLCETCHKAYHAGKIKLKVKRGQSFRAEAFMGIMRWTMLDRVRKAHPDLPVENTYGYLTKNTRITLGLPKTHCIDAYCIAGNLNARRRGVYLYQRQMRKHNRQIHKCKVLSKTLKDGTKVGYRKLNQTPYLVKNFRLFDKVRCFGQTGFIFGRRTSGHFDVRTLNRTRLSDCVNSKKLTLLEKRRTFLTELRKEDGASSPV

SEQ ID NO: 9062 - protein, 519 aa, unidentified
VKAGLVDQPKFFENYVADRFKTHLGMLPQFRALEASEADKHWVRTKRSEAKCRSVQHWRGELLRPQGRSMSRASARRIVRFVFVLDKKHRPLMPCRPARARRLLRAGRARVVKRFPFVIRLVDRTVEQSEVQPVLIKLDPGSRETGAAVVRDDEKKRHHALAFFVIKHRGGAIRDALKARSAFRRRRRSQNFRCRSPRFLNRVKPKGWLPPSLRHRVETTLSFVRRMCRYLPVSGIATELVKFDSQKLQNPEVSGVKYQQGTLFEYEVREYLLEKFGRKCVYCGAEGVPLNIDHVVPRAKGGSNRVSNLVLACVSCNQKKGARSLEDFLKGKPEVLARVRRELKTPLRDAAAVNATRWVLFNELKATGLPVETGSGALTKLNRHAFGVEKEHWLDALCVGRLNGVVTRKGLNALEIRCMGRGSRQRTRLTKYGFPRGYLMRQKCVHGFATGDMVEANVPKGKKAGLWRGRVAVRVSGSFNIQTPKGVIQGVGWKHCRLISHNDGYGYAWLGHAPHSSPA

SEQ ID NO: 9063 - protein, 412 aa, Oribacterium sp.
MVYVLNKNGQPLMPTENYAKVRVLLKQGKARVIKKCPFTIQLMYCSTNHTQKITLGIDSGSRHIGISATIKDKVLFEANVELRNDIVDLISARRELRRSRRNRKTRYRKTRFDNRRRLDGWIAPSVKQKADSHVTMIAKVHKILPVTDIVVETASFDIQKIKNPDISGTGYQHGDQTDFWNVREYVLFRDGHICQCCKGRSKDKILNVHHIESRKAGGDAPNNLITLCETCHKGYHKGTVKLPKTIHRGMSFRDAAFMGIMRWAVYEKLKVIYPSVKNTYGYITKNIRIENGLPKDHHVDARCISGNPKAVGDGTVYYYKKVRCHNRQIHKCTINKGGIRKRNQAPYEVKGFRLYDKVLWKNQVCFIFGRRSTGRMDIRLLDGTHINASVGYKNLRLLDIRGNYLIEQKKTG

SEQ ID NO: 9064 - protein, 459 aa, unidentified
LAVFVLDKTGKALMPCTEKRARLLLARGRARVHRVMPFVIRLVDRTAAASNLQPLRIKLDPGSKTTGGALVRDTDVLDPSTGEMQRGAAVLNLFELVHRGRQISAALTARRAMRRRRRGNLRYRAPRFLNRTRTEGWLPPSLQHRVDTIMAWVRRISRWAPVAALSSELVRFDMQALDYPDIEGAEYQQGTLAGYEVREYLLEKWGRVCAYCDTTNMPLQAEHIVARARGGSNRISNLTLGCAPCNQKKAALPVEVFLAKDPKRLSAILAKAKRPLKDAAAVNATRWVLANALKTTGMPVELASGGQTKFNRTRFAVLKTHALDAVCVGAVAAVSGWRTPTLVVKCAGRGSYQRTRLDQYGFPRGHLTREKRVHGFQTGDLVRAEVPSGQKAGTHIGRVAVRATGYFNIQSAGEVVQGVAHRHCQLVQRSDGYGYSRQLYPKETQEKAVLRTARYPFPA

SEQ ID NO: 9065 - protein, 430 aa, unidentified
MPKVYVLNRHGRPLMPCTPAKARHLLDAGKAKVRHRTPFTIQLLYGSTGYAQEVILGVDAGSKTIGLSAATETEELFSAEVKPRNDVVELMSARRQFRRARRNRTTRYRKPRFDNRVRSKHKGWLAPSVEVKIQEHMTAIRRACAILPVSKVVVETAEFDLQLLKAVAEGKPVPQGEDYQKGEMYGHYNVRQYVLWRDSYTCRICGMHGSVRKGVPLHVHHLESRRVGGDAPDNLVTLCTACHDKLHKGIIMAADIKKRKRRSTRDATFMGIMRMTLLRRLREQLPVPVVETRGYITKATRENLLVLPKSHTNDALAIAHGPQGFRAEYLPNIRQADRLYTICPVRHHNRQLHKATILKGGVRKANQAEKYICGFRLYDKVLYNGIECFVWGRRTSGSFLLRQLNGEKVKDGVSYKHLKLLERSQSYLVA

SEQ ID NO: 9066 - protein, 517 aa, Nocardiopsis sp.; identical to SEQ ID NO: 6685

SEQ ID NO: 9067 - protein, 415 aa, unidentified
MENKIEYCFVVDKNNRPLAPTKVNKGWYLVRKGRAKIKSRYPMVIQLEKEVEPDEDDESHMVCGIDDGSIHVGLAIVQKCPTKNKVVFKGTMEQRRDVKHLIDIRRGHRRYHRCHKRYRQVRFNNRSSSKRSNRLAPSIKQKKDAVLRVLYQLNKWCNIQEYFLEDVCIDIRAMADGYKPCGWQYQKSNRLDENLRKAAILRDNYKCQECGKSNCMLEVHHIRARKYGGADTIGNLITLCKKCHDKTKGRERDFENRYFDMIKSRPKRFDYAMHVMQGKTYLREKISELGMLHLTNGGDTANKRINWNIEKSHSNDAICITDSIPDTCDVKEWIIKPIRRKSKAKTDNVLGIKHRDLVSYTYKNGKTYTGYVTALYPEQLVLNFQSKTKHCKKANARKCRLLWRFNNIYWLEQCV

SEQ ID NO: 9068 - protein, 431 aa, Escherichia sp.; identical to SEQ ID NO: 3801

SEQ ID NO: 9069 - protein, 415 aa, unidentified
MVYVLNINGVPLMPTDRHGKVRKLLKAKKAKVVKRTPFTIQLLYVSTEYTQPLTLGVDAGSKHIGISVTSSNKEVHCGQVEPRQDVSKLLDARRKARRSRRNHLRYRQPRFNNRVESKHKGWLAPSVECKINTHIKVIEDITKILPITNIVVEVAEFDTQKLLNSDVQGVEYQRGPLYQSNLRQYVLARDNYTCQWCKGKSKSKILHLHHWNYWNNDHSNKPSSLITLCDVCNDSKNHKENGFLYGWKPKITNNFRDVALMNCMRWALYNRLKEIYPNVKMTYGYITKAMRSEHNMPKSHVNDALCITGNPDVTRMNTMYLSKKNRVHNRQIHKANKLPRGRLKLNQAPYIVKGFRLNDKVLYNGAICFITGRRKTGYFGLKNIEGQTLSNSAKWKDLTLLEKAKYYSIERISRS

SEQ ID NO: 9070 - protein, 442 aa, unidentified; identical to SEQ ID NO: 2903

SEQ ID NO: 9071 - protein, 434 aa, Anoxybacillus sp.; identical to SEQ ID NO: 3421

SEQ ID NO: 9072 - protein, 413 aa, unidentified; identical to SEQ ID NO: 2636

SEQ ID NO: 9073 - protein, 414 aa, unidentified
MPCSPAKARLLLKEKKAIVKRRTPFTIQLTIATGETKQPVSLGVDAGYKHVGLSASTEKAELYASEVELRQDITDLLSARRALRQSRRNRKTRYRAPRFDNRIRTKRKGWLAPSVENRINAHLSRIEAVLRLLPVTKITVETASFDLQLLKNPDISGKEYQEGEQLGFWNIREYVLCRDGHVCQHCYGRSKDPVLNVHHLESRRTGGDSPGNLITLCETCHKALHRGEITLKAKRGQSFRAEAFMGIMRWEVLGRLKASHPELEVNNTYGYRTKHARIANDIAKSHCADAFCIAGNLGAERLGEFFFQKQTRRNNRQIHKLSILKGGIRKRNQAPFEVNGFRLFDKVACQGEEGFIFGRRSSGFFDVRKLDGTRISAGISYKKLHLLEKRRTYLTEIRKEEALPPLPEGRGLRA

SEQ ID NO: 9074 - protein, 422 aa, unidentified
LNKRGKPLMPCSPAKARLLLKEKKAIVVRRTPFTIQLTIATGETKQPVSLGVDAGYKHVGLSASTEKAELYASEVELRQDITDLLSARRALRQSRRNRKTRYRAPRFDNRIRTKRKGWLAPSVENRINAHLSRIEAVLRLLPITKITVETASFDMQRLKNPDISGKEYQEGEQLGFWNVREYVLFRDGHVCRHCHGRSKDPVLNVHHLESRRTGSDSPDNLITLCETCHKALHRGEITLKAKRGQSFRAQAFMGIMRREVLNRLKASYPELKVHETYGYLTKHARIANGIVKSHGADAFCIAGNLGAERLGEFFFQKQTRRNNRQIHKLSILKGGIRKRNQAPFEAKGFRLFDKVACQGEEGFIFGRRSSGSFDVRKLDGTRISAGISCKKLRLLEKRRTYLTEIRKEEALPPLPEGRGLRA

SEQ ID NO: 9075 - protein, 413 aa, unidentified; identical to SEQ ID NO: 2636

SEQ ID NO: 9076 - protein, 431 aa, unidentified
MPDKVYVISRLGHPLMPCSLAKARHLLDDKKAKVVKRMPFTIRLLYGSTKYIQPIILGVDAGSKTIGLSASTAKEEVFAAEVMPRNDVVENLSTRRELRRARRNRTTRYRKPRSDNRVRSNHERWLAPSVKVKIQEHITSIKRVCTILPISKVVIETAEFDLQLLKAIQEGKPIPEGEDYQKGEMYGSYNVCQYVLWRDNYTCICCGVRGTPKNPVRLHVHHFESRKYGGNAPDNHGTLCDDCHKKFHLGIITDVKLKTRRRQSTRDAAFMGIMRKTLMWRLRTELFIPVAETKGYITKATREKLLVLPKSHTRDALAIAQGRHGFGIKEYAYVEPANHIYTVRPVRHHNRQLHKASILKGGIRKRNQASKYVFGFRLYDKVLYQGKACFVWGRRTSGTFLLRTIDGIKVKDGVNYRNLTLLERSSNYLIA

SEQ ID NO: 9077 - protein, 512 aa, unidentified
MSTVYVLNKDGKPLMPTTRGGHVRHLLKEQKARVVRAKPFTIQLLYETNDVVQPLYLGIDPGRTNIGVAVVKANGTAVFTAHLETRNKEIPKLMQDRKKARRARRTNGRRCRRQRRAKANGTISKKCVKQTTAQNGSVSKRAKDIGVIKRRLPGCEKDVLCIGIKNKETKFTNRTRPEGWLTPTANQLLQTHINLVKKIQKFLPISDVVLEVNKFAFMRLDNPNIQKWQYQQGPLYKKESLESAVSEIQEHHCLFCKKPIDHYHHVVPQHKNGSNTIGNIVGLCAKHHDLVHKDSAWEKKLAKKSTGLYKKYGALGVLNQIIPTLTNELSSLFPKHSFVTNGKSTYDYRAAHGVSKDHWLDAYCIACSVLPSNVCDSNINNHMPYVLKQFRRHDRRVLNNENMNRVYTLNNKAVAINRHKAKDQKTVSLEEFRKEHPDDVCKLKVKEHHPTYRNMNRNFPGSVFLVGKQIHVMQGIASSKDGKATKYNDTSATAIAAGKCKFVAKNTGILFV

SEQ ID NO: 9078 - protein, 470 aa, unidentified; identical to SEQ ID NO: 8190

SEQ ID NO: 9079 - protein, 442 aa, unidentified; identical to SEQ ID NO: 3234

SEQ ID NO: 9080 - protein, 484 aa, Streptomyces sp.
MDETGAGRHNTAAGTGHVRGETLGSSPAAERVTSDRSVREKGREAHPYVFVLDKHGAPLQPCSSARARKLLRAGRAVVHRHTPFVIRLKDRTVAESVVDGVEIGIDPGSRHTGIAVFTAVKGERRGRFALQLDHRGATVHKNMLRRAAFRRRRRVANLRYRAPRFNNRAVTPGWLPPSLRHRVDTSLAWMERLTSWAPVRTVHMERAVFDTHALTQGKESLDGIEYQQGTLVGYEAREYLLTKWRHACAYCGATGVPLNIDHIRPRSRGGTDRISNLTLACIPCNQAKGNAPVEEFLAHSPQRLAKILAEAKAPLTDAAAVNSTRWALWRGLDARWRTHVSSGGRTKWNRIRNFLPKTHALDALAVGTVDAITRHPLQVLTAGCTGRGTYTRTRTDKHGFPRLRLPRKKTVHGFQTGDFVRAVVPTGKKAGTHTGRVAVRTKGSFNITTRHGTVQSIHHRHVRLLQRADGYTYTTEKETGRPQT

SEQ ID NO: 9081 - protein, 417 aa, unidentified
MIYVRSKEGSVLMPTERCGKIGYLLRHGKAHVVSRVPFVVQLDYDSTTYTQDVSLGIDAGSKHIGVSASSEKKEMLAAQVELRSDIVKLLSTRRELRRTRRNHKTRYRKSRFDNRKKKDGWLAPSVEQKIESHLKVIRLVHKLLPITKTAIEVAQFDDQKIKNPDIKGDEYQQGEQMGFWNVREYVLARDGHKCVHCKGKSKDPILNVHHLESRKTGGNSPSNLVTLCETCHKAYHRGEFDLKIKRGSSLRDAAVMNIMRWAVYERAKAEFGNVHLTYGYITKHTRIENGVTKTHAADAFCIAKNVHAMRLSSFFMCRCVPRHTRALHVANPKKGGIRRNTIASHKIGKSNFQRFDMVRWMGKECFIFGSTHGRPVLRDIDGLQVANQPSVNIKTIKFLKRLKNNILMEEKKFRRLN

SEQ ID NO: 9082 - protein, 350 aa, unidentified
MVNVLFVYMVNCHGQPLMPCSPRKARLLLKAGKAKIVKMVPFTLQLLYGSSGYKQEVALGIDAGTQHIGVCATTEKTVLFEAEVQPRTDIQELLATRRQFRRARRKRKTRYRQARFQNRKKPQGWLAPSVRHKVDAHLKVIKLVHKLLPVRRITIEVAQFDIQKIRNPDIEGEGYQQGPQLGFWNVREYVLFRDGHACQWCKGKSKDRILNVHHIESRKTGGDRPDNLITLCETCHDLIHRTHQEYKITRKRHGFRDATQMGIIRWKIYEQARASFPHVHLTYGYITKQTRIEHGLEKSHVVDARCISGHPLAASDGTWHLVKFIRRNNRQLHKATIRKGGKRQRNTAPK

SEQ ID NO: 9083 - protein, 525 aa, unidentified
LANLKLIDELLEKTEYIYVLGTDGKPQMPTNRKVRVRSLFKSGLAKIVDTVPFTIRLLYENDAVLQPITIAEDPGRTNIGAAVLTQLGDLVFSAVVETRNKSIKKLMSDRKAYRQASRRGERKARQRLAKRHGSMIKAGMIMRKLPQYAADKFVTCKIIKNTEARFCNRKRMPDWLTPTVNHLVQTHINLLNQIDVSLNKMVQTHINLIKKVEKYLPITDVAIEVNRFAFMQMENPDASGVDFQNGPLKGFDDVKAAICEQQHGKCLMCKNDIEHFHHIVPRSKGGSDTIQNQAGLCKKCHAKVHTDAEFQAKFKDKKEGLIKKYGALSALNQAIPFICKELLEIYSVEHVHFCTGKDTSLIRSSLGYEKTKDNQMHEVDAYCIGLAAIGADKAKRPDFNNVFKIKQFRRQDRQLVHYQKERTYYLDGKKIATNRNPRFEQKGDALSDWYKEQIKIYGQYEAEKMRSRLTVKKSKRSYNTTKRLMPGCVFYYDGQRHVMAGQSSYGRYQKIFLLQNVKSYSLMQD

SEQ ID NO: 9084 - protein, 400 aa, unidentified
LQFYRKEHGIMQYVYVLNKHGEPLMPCSPGKARLLLKQQKACVVKRTPFTIKLLFGSAGYKQPITLGVDAGSKHVGLSASTEKRELYSEEFTPRSDVVELLSTRRQNRRSRRNRKTRYRVPRFDNRVHSKLKGWLAPSVEVKIQEHITVIKHICKILPISLVRVETAEFDTQRLKAMLAGKPLPVGTDYQLGEMYDEYNVRQYVLKRDHYTCQCCGTHNTAKKVVKLHVHHLESRKTGGNAPSNLVTLCTTCHKNLHKGRVTLDGKERGKPLRDAAFMGIMRKTLMVRLKEELPIPVQGTYGYITKMRREQNDIKKSHVNDASCISKHPLAEPCSVCYRTKAIRHHNRQTHKANFSKGGIRKRSQMPYVVEGYRLWDKVLYKGQECFVSGRRASGSFTLK

SEQ ID NO: 9085 - protein, 512 aa, unidentified
MSTVYVLNKDGKPLMPTTRGGHVRHLLKEQKARVVRTKPFTIQLLYETNDVVQPLYLGIDPGRTNIGVAVVKTDGTAVFTAHLETRNKEIPKLMQGRKKARRARRTNGRRCRRQRRAKVNGTLSKKCVKQTTAQNGSVSKRAKKIGVIKRHLPDCEKEVLCIGIKNKEAKFSNRTRQEGWLTPTVNQLLQTHINLVKKIQKFLPISDVVLEVNKFAFMQLDNPNIQKWQYQQGPLYQKASLEEAVSEMQEHHCLFCKKPIDHYHHVVPQHKNGSNTIGNIVGLCAKHYDLVHKDTTWQKKLAKKKTGLNKKYGALSVLNQIIPALTKELSSLFPKHFFATNGKSTYDYRAAHGVSKDHWLDAYCIACSVLPNDVCDSDINNRVPYELKQFRRHDRRALHKENMSRVYTLNGKSVATNRHKATEQTTDSLEEFRQCQPDDVCKLKVKEHHPEYRNPKRNFPGCVFLVGKHTHVMQGPSGSHNGKADGYYDTNGNSYSSGKCKFVAKNEGIVFT

SEQ ID NO: 9086 - protein, 421 aa, unidentified
MRGQPLMPCSPAKARHLLKAGKAAVRRRTPFTIQLRIATGETKQSVTLGVDAGAKHVGLSAATEKEEVFASEVELRQDITGLLAARLSLRRDRRHRKTRYRAPRFLNRVRSKHKGWLAPSVENRIQAHMSRIDAVCRLLPVTKIVIETASFDVQKIKNLEVEGTGYQQGDQLGFWNVREYVLFRDGHVCQHCHGHAKDKILNVHHLESRQTGGDAPNNLITLCETCHKACHAGKIKLKVKRAQSFRAEAFMGIMRWTLLDRVRKAHPGLPVENTYGYLTKHTRIPHGLPKTHCVDAYCIAGNLKAVRRGVYLHQRQMRKHNRQIHKFTVLSKRLEDGTKIGYRKLNQSPYLVHSFRLFDKVRCLGQIGFIFGRRSSGYFDVRRLDGVKLSPSISWRKLTLLEKRSTYLTELRKQDGASSPV

SEQ ID NO: 9087 - protein, 423 aa, unidentified
MRVFVFNMRGEPLMPCTQRKARLLLKTGKAKIYKYNPFTIQLKYVTGENKQECHVGIDTGSKYIGLAVTSENKVLFKGEVELRQDVKSKIDTKRIYRRSRRNRKTRYRRCRFLNRKRFGKWLPPSLQNRINHTFKWIDKLCSFIPESILHIEVGKFDIAKMINSEVHSVDYSQGQTYGYQGERYFIFARDNYTCQVCGERNKPLQTHHIIYVSNGGTNRVDNQITVCKNCHNSTNHKNGGIFYKWQKEHKKVKQYKEPPFMNVLRQQILNQYPQALITYGFETTIKRKNIGLEKTHYNDAIVISGVSTISENLHEWLLIRQFRKKKRSLHEGVPRKGRKEPNRIQKRNSKNTPYYRGFYLNDKVSVFGKSGYITGFTNSGAYVKGVDGEYIVLPNKSYKRVNIASLKFICHNNNWQYITKNAV

SEQ ID NO: 9088 - protein, 351 aa, unidentified
LGIDAGAKHIGFSATAEKEELFACETTLRTDIVDLLSTRLQNRRTRRSRLRYRKPRFTNRGSSKKKGWVAPSVKQRIDSHLNEVNEIHKILPITKIVIEVAQFDTQKMKNHDISGSDYQNGEQLGFWNVREYVLFRDGHKCSHCKGKSKDPVLNVHLESRKTGGDSPSNLVTLCESCHKAFHKGEIELKKKRGKSLRDAAVMGIMKWKLYEELKSRYDNVSMTFGYITKYNRIKYGIEKSHTSDAFVISRNFNAKRIERQYLKRLVRRHNRQIHKMKILKGGKKKNNQAPFGVFRFRLFDKVLYNNEICFIYGRRKSGNFNIRDFNGENPKDVSYKKLKLIRGKMHPIILK

SEQ ID NO: 9089 - protein, 410 aa, Bacillus sp.
MTYCFVLDAQGRKLSPTKENRAWYLIRMQKAILKNKFPMVIQLKKEIPVAKIDLTPVHLGIDDGSKFVGIAVVQECKRKNKPLFKGTIELRTDVKDKMTVRRGYRRYRRYHKKYRPDRFNNRSSSKIEGRLAPSIKQKKDSILRVINQLHKWIRIHYVSLEDVLIDIRALEKGHKPYKWEYQQSNRLDENIRKAAVLRDHNCCQDCGITNTRMEVHHIIPRRLNGSDSINNLITLCSTCHGHVTGDELHHSRRLLKKVKGRNISYNDAMHVMQGKSYLQNELKKIAPISLTTGGDTANKRIDWEIDKSHANDGIVICNLKVKPNQCELKNWTIKTMRKRSSKKIESANGFHHRDFVKYTKRNGETYLAYITAIYPKKNQCNMTTIDGKILKRYGLSRLSLIWRFSKIFWL

SEQ ID NO: 9090 - protein, 413 aa, unidentified; identical to SEQ ID NO: 5215

SEQ ID NO: 9091 - protein, 420 aa, unidentified; identical to SEQ ID NO: 5136

SEQ ID NO: 9092 - protein, 456 aa, unidentified
MSTCVCVLSNSGERLMPTFRLGKVRRLLKDGKAKIVKHHPFTIQLLYDSKTNTQPIEICEDVGYNYIGISVKSESHEYVSAQYDTLQDEKEHHDDCRKYRRTRRNRLRYRKPRFDNRKRSEGWLAPSLEHKKQLNIRLIERYVSVIPITRATVEVGSFDTMLLQAIQKGESKPEGVDYQKGPRYNLATLREAVFYRDNYTCQVCGRKIADGAILHMHHMFYWKGRHGYQLDELVTACEKCHTPANHQKGGKLFGFGENKEFANLSGAAFMNAVRWQIVNALYATYGKEFVTITYGAMTKEKRIILGIEKTHNNDAYAMGDYHPAHRCVFRHYQKRRRNNRVLEKFYDATYIDARTGNKAKGKELFNGRINRNHKKDSENFHKYRSKKVSKGRRSIRRQRYAIQPYDTVRLEGKTYITSGCHNKGTRLLIPANGKSKSVAISKVQVVCHAGAWIQII

SEQ ID NO: 9093 - protein, 406 aa, unidentified; identical to SEQ ID NO: 4271

SEQ ID NO: 9094 - protein, 442 aa, unidentified; identical to SEQ ID NO: 3161

SEQ ID NO: 9095 - protein, 451 aa, unidentified
MSVAVISKTGERLMPTSEYRARKLLKSGKAIKYSYHPFTIQLTERKTGNIQPIELCMDTGYIHIGISVKSEKHEYLTEQIDTLTDERSRHNARRMYRSQRRNRKRYRQPRFNNRKKDKGWIAPSLKHKKNIHVQAISRINNVMPLTDITMEMGNFDTQVLKAKEEGRPLPQGVDYQHGERYRIATLREAVFARDGYKCQCCGRTIKDGAILHVHHIKYRSQGGTNSISNLATVCDKCHTPKNHKPGGKLYGWKPKLPSFKGATFMTTIRWQLYNEAKALFPDIDIHITYGAATKERRRELNIDKSHINDAFVMGQFHPRHRIKAVLYKKKRRNNRCLEKFYDAKYIDSRDGKKRSGQELFNGRINRNHKKDSENLHQYRLQKVTAGKRTVRKQHYSVQPHDIIIYESRKRETTGCHCNGARVMLLPDKKSVSIKKIKIYRYAGGYFKSTFN

SEQ ID NO: 9096 - protein, 456 aa, unidentified
MNTCVCVLSNNGERLMPTFRLSKVRRLLKDGKAKIVKHHPFTIQLLYDSKTNKQPIEICEDVGYNYIGISVKSESHEYVSAQYDTLQDEKEHHDDCRKMRRARRNRLRYRKPRFDNRKRSEGWLAPSLEHKKQLNISLVERYVSVIPITHATVEVGSFDTMLLQAIQKGETKPEGADYQEGPRYNLATLREAVFYRDNYTCQVCGRKITDGAILHMHHMFYWKGRHGYKLDELVTACEKCHTPANHQKGGKLFGFGEDKEFADLSGAAFMNAVRWQIVNALHTTYSKEFVTITYGAMTKEKRIALQLEKSHNNDAYAMGDFHPVHRCGFRHYQKRRRNNRVLEKFYDATYIDARTGNKAKGKELFNGRISRNHKKDSENLHKYRSEKVSKGRRSIRKRRYAIQPYDTVRLKGKTYITSGCHNKGTRLLIPVNGKSKSVTISKVQVVCHAGPWIQII

SEQ ID NO: 9097 - protein, 451 aa, unidentified
  REGION 1..451: note = Ga0315285_10064038
MQKFKEKLKNTPKDAHQVLCSVNHQLNREETLSEDGIVRSLNNPDGDHFQHTESSLKALVYVISKEGNPLMPCTYAKAIRMLKKGAASVIKRIPFTIQLNFFCENKVQEIILGVDTGYKNIGISAVSNSKELLSVNVELRIDISEKLKERAMYRRNRRNKLWYREPRWNNRANAKQEGRLMPSVLQKVNTHITIIERIKKILPISKIIIETGLFDMAKMNNDGIRNWEYAKGVQYGFENTKAYVLSRDSHKCYFNDKCSDKLHVHHIKFRKDGGSDNPNNLITLCEKHHKQLHDDKIKLDKVGKFKKLKAATVMNIIRKSLLEYFPEAIETFGYETKVKSRELGIEKSHINDAFVIAGGSIQDRSKSFTMIQKRKNNRCLQLNRKGFKPSIKKQRSKIQPLDLFWVKGKEYVCKGMFNYGKYICYGSTKLKEYFKIELVEKHYYQGSLVWN

SEQ ID NO: 9098 - protein, 420 aa, unidentified; identical to SEQ ID NO: 6507

SEQ ID NO: 9099 - protein, 398 aa, unidentified
VKKRTPFTIQLVYGSSGYTQEVILGVDAGSKTIGMSASTTKEELFSAEVKPRNDVVDLLSTRREFRRERRNRKTRYRKPRFDNRVRSKHKGWLAPSVEVKIQEHITSIKRVCRILPVSKVVIETAEFDLQLLKAIADGKPVPQGEDYQKGEMYGHYNVRQYVLWRDNYTCQCCGAHATKKKEVRLHVHHLESRKVGGDAPDNQVTLCESCHEKLHKGLIAEKDFKKRKRRSTRDATFMGIMRKTLMQRLCSELPIPVVKTRGYITKATREKLLVLPKSHTNDALAIAQGKRGFNVGYLPEIAQIDKIYTIRPVRHHNRQLHKATILKGGIRKSNQTEKYVFGYRLFDKVQFNGQDCFIWGRRTTGIFTIKMINGKMIKDGISFKKLKLVEKSTNYLIV

SEQ ID NO: 9100 - protein, 423 aa, unidentified
MLVYVLKQNGQPFMPTERFGKVRRLLKEGKAEVVRREPFTIKLLYEPETDVVQECYCGVDTGSKHIGVAVVGDDKVLYQSQTELRNNIKKKMDSRRMYRHNKRSRKTRYRKPRFLNRRNSIKKDRLPPSVKHKVQSHIDEIEFCKKILPVSDLILEVSQFDTALMKNPSLMNEKVRHWGHQQGFNYGYSSRREAILHRDNYTCQCCSKKNCRLEVHHIKFRSNGGTDDEENLITLCEDCHKGVHAGTVVLNKKPKKSKGLKHATHMSIIRSWLLKEYPNAIETFGFVTAENRNHLQLEKDHYIDACVIASGGLEFKELDVIYRKRRVSVQDRVLTDGIRDEKKLPTGKVHGFKKYDKVKYLGEICFVKGRRNSGAFVLMNIDNNSIDFRDRGGKLNPSYKSIKRMNARKSILCINQVVERKVY

SEQ ID NO: 9101 - protein, 413 aa, unidentified
MTNYAFVLDADNKQLTPTKEQKAWFLIRKKRATLVSKYPMVIQLKKKIPDKEICKDEVRCGIDDGGLHVGVALVQKCHTRNKVIFKGVIEQRNDVKHLMDVRRGYRRYHRYHKRYRPARFNNRNSSKREGRIAPSILQKRQATTRVINQLNKWINITNYWLEDVAIDIRALTDGYKPYRWQYQKTNRLDENIRKAVILRDGCKCMECGKSNCRLEVHHIKPKRLKGSNTLGNLITLCAKCHQKTESVEELYMDRYFALLNSSDNKNLNYAQHVMIGKKWLREQLSNLGMLHLTNGGDTANKRIDWDITKSHSNDAICITDLKPDTCEIKEWVIKPMRRQSKAKADNVLGIKHRDLVEYTFRNGETHRGYVTALYPEQNAINFQSPTKHCKKVNARKCKVLWKYSKIYWLDNVS

SEQ ID NO: 9102 - protein, 413 aa, unidentified; identical to SEQ ID NO: 2636

SEQ ID NO: 9103 - protein, 442 aa, unidentified; identical to SEQ ID NO: 2903

SEQ ID NO: 9104 - protein, 450 aa, Clostridium sp.
MVYVIDINGNPLMPTNEAKARKLLKNKKAIVKELKPFTVQLNYETSNYTQRITLGIDSGYLNIGFSAITDKKELIVGEVKLLQGIKDRIQEKAMYRRQRRNRLRYRKARWNNRTKSKHKGWLAPSLQHKLDSHIKFIDSLYNVLPITKCVVEIANFDIQKIKNPNISGEEYQQGEMMGFWNLREYILHRDNHKCQNPNCKNKSKEQILEIHHIKYRSEGGSDSPNNLITLCSKCHTSPNHKKGKFLYDWCINGKKVRGFKDATFMSMIRWYLINTLKEKHSNISITYGYITKNHRITHKIKKTHYNDAFAIAKGINQIRNNDIFNVSQARRNNRSLEKFYDCKIIDVRTGNKVSGGDLNCGRRTRNKNHSTENLRIYRGEKISKGQRRIRKQKYFYQPNDLVRYEGKIYTVKGSQNGGKYVALKEIKKVPKVDLLTPYKFQKGFVYEIYK

SEQ ID NO: 9105 - protein, 555 aa, Streptomyces sp.; identical to SEQ ID NO: 3041

SEQ ID NO: 9106 - protein, 443 aa, Anoxybacillus sp.; identical to SEQ ID NO: 7070

SEQ ID NO: 9107 - protein, 468 aa, unidentified; identical to SEQ ID NO: 5936

SEQ ID NO: 9108 - protein, 634 aa, Nocardiopsis sp.; identical to SEQ ID NO: 3305

SEQ ID NO: 9109 - protein, 557 aa, unidentified; identical to SEQ ID NO: 3108

SEQ ID NO: 9110 - protein, 406 aa, unidentified; identical to SEQ ID NO: 4082

SEQ ID NO: 9111 - protein, 450 aa, Cupriavidus sp.
VAVCVLDRQGRPLMPCSEKRARLLLARGRARVHRVVPFVIRIVDRRQADGHLQSLRVKLDPGSKVTGIALVRELPVADDGNGDSAPGAVVLSLIELVHRGRSISEALTARRMFRRRRRGANLRYRAARFQNRSRAPGWLPPSLKHRVDTTLTWVARLRRWAPVTVLSCELVRFDPQALEQPEIAGVEYQQGTLFGYELREYLLEKWGRRCAYCDRRDLPLQIEHIQARATGGTDRVSNLTLACGPCNQAKGAQPIDRFLARQPARLVKILAHAKRPLKDAAAVNATRWALVSALKSTGLPVQLASGGRTKFNRMRLFIPKTHALDAVCVGRLSHAHAWHRPTLTITCTGRGSYQRTRLDRYGFPRGYLMRGKTVHGFRTGDAVRATVPTGKNAGEHAGRVAVRASGSFNIQAKPSLVQGISHRHCRLMQRADGYGYQFQPTDSITQDGPG

SEQ ID NO: 9112 - protein, 436 aa, Deinococcus sp.
MALTRNKETMSNRVFVLNPDKSPRMPCIPKRARKMLEAGKAAVWRRYPFTIILKSEAGRQSQPLTLKLDPGSKTTGMALVLEGKTGRQVVWGAELHHRGHAVRDNLTKRRQLRSARRSRKLRHRPARFLNRTRPEGWLPPSLMHRVLTVISWAKRLDRFTMLDSFSMELVSFDTQKMMNPDIQRQDYQKGTLFGTECRAYLMHKWEGKCAYCGRKAEEVEHLVPRSRGGSNRISNLVMSCRKCNNLKDNQTLEEFLKRKPAQLRRIQAQQQASLADTAAVNATNYRLLDELKRFGYPVETGSGAQTSFNRQQQEYDKAHWIDAACVGNSGEQVRVPHLRPLQIKCMGRGNRQMCRTDKYGFPNKHRTRQKVFFGFQTGDICRAIVTTGKKIGAYVGRISVRATGSFALFLGAGKVDGINKRFFQTLQRQDGYSYSF

SEQ ID NO: 9113 - protein, 442 aa, unidentified
MVTVQQSTHHLPFGRVFIRRNLFMVYVISQDGKPLMPCSDPIARLLLKQGKAKVKKREPFTIKLTYETTNHTQGLTLGVDTGSGTIGTAVSKDNGDIVYMSEVVVRNDITDKMTQRTKYRRNRRNRKTRYRKARWLNRASSIKKDRFSPTMQSKLHSHVREIEYIQSILPVTEMVFETGQFDMHLMKNPSLANSKVRPWGYQKGANYGFENTKAMVLNRDNYTCQCCKGKHKDSKLEVHHIVFRSQGGSDEESNLLTLCHTCHKDLHSGKISPKLSGKVKGNLKFATQMNSIRKQLFRFYPNAIETFGYVTKANRLHLGVDKEHYYDACTIATQGNAFNVKSNLYKKKCVSDGDFQKTKGIRSEQPIVTDKICGFRKFDKVRYFGNDYFIKGRMSTGYAILMDIDGNKIDFSTMPRGYKTPKLSNCKRITARSTVMTQVKVV

SEQ ID NO: 9114 - protein, 414 aa, unidentified
MPCSPAKARLLLKEKKAIVKRRTPFTIQLTIATGETKQPVGLGVDAGYKHVGLSASTDKAELYASQVELRQDITDLLSARRALRRARRNRKTRYRAPRFNNRIRTKRKGWLAPSVENRINAHLSRIEAVLRLLPVTKITVETASFDLQLLKNPDISGKEYQEGEQLGFWNIREYVLCRDGHVCQHCYGRSKDPVLNVHHLESRRTGGDSPGNLITLCETCHKALHRGEITLKPKRGQSFRAEAFMGIMRWEVLGRLKASHPELEVNNTYGYRTKHARIANDIAKSHCADAFCIAGNLGAERLGEFFFQKQTRRNNRQIHKLSILKGGIRKRNQAPYEIKGFRLFDKVACQGEEGFIFGRRSSGFFDVRKVDGTRISAGISYKKLRLLEKRRTYLTEIRKEEVLPPLPEGRGLRA

SEQ ID NO: 9115 - protein, 444 aa, unidentified
MGEIVNFILKERSAIMLVYVLDMNGQPLMPTHNGAKVRVLLKQKRAKVVSKCPFTIKLLYESTSFTQPLTLGVDTGSKYVGSAVINDATSEVLYESQTELRDDIKAKMERRRQFRRTRRDKLRYRPKRFNNRKASKRKDRYSPTLISKFQGHVREIKFINSILPISSTILEIGEFDPHLLQDPSLAYRKWDYQKGELYQQENFKQAAKARDGYKCQCCGKRGCRLEVHHLIPRSRGGSDKLANLITLCADCHHLAHSSEEQLIVFQKKFGKKTKGTLKYATQMNVLRHMLQREYPDAELTYGFITKEMCRVFGLEKSHMIDACCIASRGVLFKNKNANKYKKKCVPKGDYTRTDMCGRKFTILPKGKIVGFRRYDKVLYNNKEYFVVGRMSRGHVYLIDIDNNRVQVERTKRNTGEKYMSKAEIKVSLVRKIASSRTCLCTINK

SEQ ID NO: 9116 - protein, 414 aa, unidentified; identical to SEQ ID NO: 4264

SEQ ID NO: 9117 - protein, 420 aa, Bacillus sp.
MTHCFVLDAQGRKLSPTKEKRAWYLIRKQKAILKCKFPMVIQLVREVPEEEIDTTPIHLGIDDGSKLAGIALVQECGTENKPVFKGTIELRIDVKEKLAVRRGHRRYRRQHKKYRPARFDNRSSSRKEGRIPPSIRQKKDSVLRVVRQLTKWVRIDQIFLEDVLIDNRALEKGYKPYRWEYQQRNRLDENIRKAAILRDRNTCQDCGATNTRMEVHHITPRRLHGSDSIHNLITLCSKCHEKIAGEELLHSQRFYQKIKGKSISFRDAMHVMQGKTYLQKALREIAPLNLTTGGDTANKRIDWDIEKTHANDSIVICNLRVNPEQCEMKDWVIKPMKKRSSKKIKSANGIYHRDFVRYTKRNGESYIAYITALYPERNQCNMTTIDGKVLKRYGLSRLSLLWRFNRIYWLINSNEGGESW

SEQ ID NO: 9118 - protein, 570 aa, Streptomyces sp.; identical to SEQ ID NO: 5250

SEQ ID NO: 9119 - protein, 410 aa, Bacillus sp.; identical to SEQ ID NO: 8195

SEQ ID NO: 9120 - protein, 466 aa, unidentified
LSIKLLINIGEGVIYSSICTGLSLQTYQKRKEAPCMVYVLDINGQPLMPTTRHGKVRRLLNSHLAKVVKRCPFTIQLLYQSTKEIQPVSLGVDAGSKHIGMAATTEKKVVYQEELSARNDVVKLLSARRTLRRTRRNRKTRYRKPRFNNRVHSKHKGWLAPSVEVKIQEHITTIKRICQILPISEIQVETAEFDLQRLKAMEEGRTPPVGTDYQLGEQYDFYNTRQYVLHRDGYTCQCCGTHDNNIKLHVHHIESRQTGGDAPNNLIILCEHCHKALHEGKLELPKGKKRGKSYRDATFMGVMRKTLLERLKKEIDVPVEGTYGYITKYWRERAGLEKSHIHDAVCISQYPYAKPLDIYYLTKTVRHHNRQIHKSNFSKGGIRKRNQAPYFVNGFRLFDKVLYKGKEYFIFGRRATGYFDIRTLDGTKVNKGSISYKKLRIQDTAKAYLKEARAIPHMNKFTCVLA

SEQ ID NO: 9121 - protein, 455 aa, unidentified
MVFVLDRHHKPLMPCHPARARRLLGKGRARIHKLYPFTIRLVDRELKDSTVQPVVLKLDPGSKETGMALVREDETKTHHALYFVNLKHRGSEIKQSLLQRRNFRRSRRSRNLRYRAPRFLNRTRPQGWLAPSLRHRVDTTLAWVERLRRLAPVATLEMELVKFDTQKMQNPEIDGVAYQQGKLAGFEVREYLLEKFGRKCIYCGAEGVPLNIDHIVPKSAGGSNRVSNLVPACVDCNQKKNNLPFEVFLKGDKAKINRIRSQLKTPLKDAASVNTTRWQLFEALKLTGLSLTTATGARTKYNRHQFGVPKEHWLDALCVGETAAVRGWQPLGVLVVKCTGRGAYKRTRLTKDGFPRGYLTRTKRFFGFGTGDMVVATVFASKKKGSYKGRVAVRKSGSFAIQTASRKVDGISYRYCRLLSRADGYGYSWHSSKSLINSTKETALLPRINTQVSAP

SEQ ID NO: 9122 - protein, 424 aa, unidentified
MSNFVFVLETNRKPLTPCTPGMARSLLKAGKAAVFRQYPFTIILNKEVQATPEPLTLKLDPGSKTTGLAILINHRVIWAAELTHRGQQIKDSLQSRRAIRRNRRNRKTRYRPARFLNRTRPDGWLAPSLQHRVETTITWVNRISRFAPVSSIVQELIRFDLQFIQNPEISGVEYQQGELQGYEVREYLLNKFNRQCAYCGAKDTALEVEHIQPRSRGGSDRVSNLTLACHPCNQRKGNQDVKDFLSGKPDVLKRVLAQAKTPFKDAAAVNTTRWALFNALNATGKPVATGSGGLTKFNRTRLGLPKTHWLDAACVGNTPMLEVLTTQPLQIKATGHGTRQMCRTDRFGFPSRYVPRFKFVQGFQTGDIVKAIVTSGKKIGVYVGRVAVRSSGSFNVSTAQGLVQGVSHKYCTPIHKKDGYAYGY

SEQ ID NO: 9123 - protein, 372 aa, unidentified
LSKVKTMRVFVFNMRGRPLMPCSQRKARLLLRENKAMIYKYHPFTIQLTYTTGETKQDCHIGIDTGSKYIGAAVRSEDKVFWKGEIELRQDIRSNLDTKRIYRRSRRNRKTRYRKPRFLNRKRRDEWLPPSLQSRINHTFHWIDTLSSLVPNPILHIEVGKFDVAKMINPEIHGVDYQHGQTYGFFDERYFVFARDNYTCQCCGKSKNKILNTHHIIYRSNGGTNRVDNLITVCTDCHTSQNHRKGGIFYQWQEQHKKVKQYKEPPFMNTLRKRIFVAYPDAEITYGSETTPKRKAMKLDKTHYNDAIVISGINEIKENPEEWLLIKQFRKKKRSLHEATARKGRKKPNRNQTRNSKNTPYYKGFYLNDKVS

SEQ ID NO: 9124 - protein, 465 aa, unidentified
MSTCVCVLSNNGERLMPTIRLGKVRHLLKDGKAKIIKHHPFTIQLLYDSETNIQPIEICEDVGYNYIGISVKSQSHEYVSAQYDTLQDEKDCHDSCRKMRRTRRNRLRYRKPRFDNRKHDKGWLAPSLEHKKELNVNVIKMYCEVMPITHATVEVGSFDTMLVKAIEEGKATPESTDYQKGPRYNLASLREAVFYRDNYTCQVCGRKANEGAILHVHHMFYWKGRHGNSLNELVTVCEKCHTPANHQKGGKLYGFGENIKFANLSGAAFMNTVRWQIVNELYAAFGKPFVTFTYGAMTKEKRIALHLDKSHSNDAYAMGNFHPVDRCAFEHYEKVKRNNRILEKFHDSRYIDIRTGKEAKGKELFNGRISRSHKKDSENLHKYRGKRIRKGYRALRRKKVALNSGDLVSLNGETLIVHGTHTNKKGNVRVEFKVAALNGKKSASLKKLKIVKTSTPMHSAWAKVS

SEQ ID NO: 9125 - protein, 439 aa, Ktedonobacter sp.
MSKVFVLDTNHQPLNPVHPGEARLVLKQGKAAIWRRFPFTVILKYAVPAPQVEPLRVKLDPGSKTTGIAVLHDASGEVIFAAELSHRGHKITEALATRRARRRGRRQRKTRYRKPRFDNRRKKGEGWLPPSQISRLSNVLTWVRRLSGLCPITACSMELVKFDMQQMETPEISGGQYQQGTLAGYEVREYLLEKWGRQCAYCGAKDVPLEIEHINPRSKSRDDRVCNLTLACHPCNEKKGTQDIRDFLKHQPDLVQKILAQAKAPLKDAAAVNVTRWALYRRLQALGLPIECGSGGLTKSNRTMRGLPKSHWMDAACVGQSTPKVLKTTGVMPLLIVAQGHGSRQVTNGDRYGFPKGKPKQGGRVKGFRTGDMVKAVVLTGTKKGAYTGRVLVRASGSFDIVTKTARVAGISFTSCRVVQRSEGYRYALGTPVPEPQIR

SEQ ID NO: 9126 - protein, 426 aa, Anabaena sp.
MSKVFVIDTDKRPLNPIHSAQARQLLRNGKAAVFRSFPFTLILKELCSKTVLPLRLKIDPGAKHTGIALINDASGEVVFAAELKHRGFAIRDALTSRRQLRRFRRARITRYRKPRFLNRTRPLGWLAPSLQSRIENIKTWVKKLSKIAHVVAISQELVRFDMQLMANPDIQGREYQQGTLAGYETREYLLEKWDRQCAYCGVKDVPFQVEHIHPQAKGGSNSITNLALSCEKCNTKKGTKDIKDFLKKDPSKLEKILKQAKRPLADAAAVNTTRFVLLEVLKATGLPVETGSGGLTKFNRSQQKLAKTHWIDAACVGQLTPILNIKGVKPLLITANGHGTRQSCRTDKYGFPNRHCSRTKFHFGFQTGDIVKSVVKTGKKVGEYIGRIATRTTGSFNISTRNGLVQGISYKTCKTIHKKDGYGYSS

SEQ ID NO: 9127 - protein, 438 aa, Petrotoga sp.; identical to SEQ ID NO: 8698

SEQ ID NO: 9128 - protein, 464 aa, unidentified
MVIALDKNKRPAGFLTEKRCRKLFEQKRAVRYRMFPMVVILKDIDVRTFTQTLPEYRLKIDPGAKYDGFAIIDPVRDTVVFTLQVEHRAGQVKQNLDARRQARRNRRSRETVYRKNKFAQGGTFTQTGNEGKLPPSIQSILANTETWVKRLSRWVNLTSVSLEAVRFDTQLLDDPAIEGKEYQQGTLQGTEIREYLLDRYQHTCQYCGGVSGDPVLEWEHIRPRSRGGSDSIKNATLACHRCNQDKGSMTPEEWAGQLKTQKTKLSRARLQGIEKVLAGKRNGGSSRYCAWVNITRKELERFLFACFGKVECASGGRTKYNRTRLGFPKDHQYDAACVGKVPEQGHTDLTHGYYTLAKAVGHGSHFRGKINSCGIIIQKLPPREKNVFGFMNGDIVAADIPKREKRPYKYEGHHVGRVMTRARGEFDIRTTDGRLIGANHRYVTKIQNADGYQYAQYRTPGVSG

SEQ ID NO: 9129 - protein, 625 aa, Streptomyces sp.; identical to SEQ ID NO: 5044

SEQ ID NO: 9130 - protein, 440 aa, unidentified
MSTGLRAEQAEPAGICKGETLKVFVLNMRGKPLMPCSPAKARHMLKAGKAVVARRTPFTIKLTIATGETKQDVTLGVDAGAKYVGISATTEKEEVFASEVELRQDITGLLADRLAFRRARRNRKTRYREPRFNNRVRSKNKGWLAPSVENRIQAHISRIEAVCRVLPITKIVIETASFDIQKIKNPEVEGTGYQQGDQLGFWNVREYVLFRDGHVCWHCRGRSKDLILNVHHLESRKTGGDAPNNLITLCETCHKAYHAGKIKLKARRGTSFRAEAFMGIMRWTLLDRVRRAHPELPVENTYGYLTKHTRIVLGLSKTHCADAFCIAGNLNALRRGDFLYQRQTRKHNRQIHKCSILKGGVRKLNQAPFLVKGFRLFDKVKCKGRIGIIFGRRSSGSFDVRTLDGARLSAGISSKKLMLLEKRTTFLTQLRKENGASSPS

SEQ ID NO: 9131 - protein, 431 aa, unidentified; identical to SEQ ID NO: 4463

SEQ ID NO: 9132 - protein, 441 aa, unidentified
MELRITYCKVEYFQGVDTLVYVISIDGKPLMPCKPVIARLLLKQHKAKVIKKYPFTIKLLYKTKTEYTQPLTLGIDTGSSKIGSAVVDENNNVLYLSQVEVRNDITDKMKQRAKYRRNRRNRKTRYRKARWLNRKNSIKEDRFSPTIVSKINSHLKEINFVKSILPIQNVILETATFDPHALKNPAVLHNKWLYQKGVNYGFANTRAYVLDRDNYTCQYCKGKSKDSKLEVHHIIFRSQSGSDESKNLITLCKTCHGKLHNGKINLKKNGKVKGQLKHATQMNSIRQQLLRLLPEATETFGFITKEHRQLMKLPKEHYYDAVAIACLNNIENTGLIGVNFKTKNILFKRCIADGDFQQTKGVRSEQRIITGKIQGFRKLDKVEYQSKEYFIKGRMSTGYAILMDIEGNKINLKPIPKFEKMKRMQARKSWIISQETIQNIC

SEQ ID NO: 9133 - protein, 442 aa, unidentified; identical to SEQ ID NO: 4522

SEQ ID NO: 9134 - protein, 431 aa, unidentified
MPNKVYVINKHGRPLMPCSPAKARHLLDAGKAKVKKRTPFTIQLVYGSSGYTQEVILGVDAGSKTIGMSASTTKEELLSAEVKPRNDVVDLLSTRREFRRARRNRKTRYRKPRFDNRVRSKHKGWLAPSVEVKIQEHITAIRRVCGILPVSKVVVETAEFDLHLLKAIADGKPVPQGEDYQKGEMYGHYNVRQYVLWRDDYTCQCCGAHATKKKEVRLHVHHLESRKVGGDAPDNQVTLCESCHEKLHKGLIAEKDFKKRKRRSTRDATFMGIMRKTLMQRLCSELPIPVVKTRGYITKATREKLLVLPKSHTNDALAIAQGKRGFNVGYLPEIAQIDKIYTIRPVRHHNRQLHKAAILKGGIRKSNQAGKYVFGYRLFDKVQFNGQDCFIFGRRTSGYFVVKTIDGKVIHNSASFKKLKLVERASNYLIA

SEQ ID NO: 9135 - protein, 520 aa, unidentified
MNYLDFVLMVDKNKVPCIPIKESTAAYLLRHNKAKIINHDPTVIQRFDEYSADYEIRNIFELKIDSGYLNIGFSVSDSEHEYLAGQVNLLQGMSERLTVRASNRKFKRARLRYRKNKNVDYKTVHNSTYKNGNQDGWIAPSIQHKIDSHIRLIKKIAQWVPIDRIIIEVAKFDIQKMIADLDGRIISGKDYQNGEMKGYENVTAYVRDRDKHTCQMCLSSGKVKNKNNDTIEVHHIIPRAAGGTNRPSNLICLCHHHHRLVHSNNNNNKYFNELQNKKMPDTYKDSTFMNIVRYKIYNALCADFKDVELAYGYETKINRRLIGLPKFHYTDAVCLKEWKNISLTKFIYIVDQKRCNDRKMESFFDAKYIDIRDGKTKSGTELCYTRLDNASSWRTTCKNEVDNLRQYREKKVEKGKQRRECHFYCLKAGDLIFIKSGNHKGNLAEVKTMQIHKGKYKIFFTYKNQKVDNPTISLSPEEYGQLKKNECSKVKIVRTRRGMIWRKYNRLEYENTYKDQYDKN

SEQ ID NO: 9136 - protein, 407 aa, unidentified; identical to SEQ ID NO: 4077

SEQ ID NO: 9137 - protein, 239 aa, unidentified
LQFYRKEHGIMQYVYVLNKHGEPLIPCSPGKARLLLKQQKACVVKRTPFTIKLLFGSAGYKQPITLGVDAGSKHVGLSASTEKRELYSEEFTPRSDVVELLSTRRQNRRSRRNRKTRYRVPRFDNRVHSKHKGWLAPSVEVKIQEHITVIKHICKILPISLVRVETAEFDTQRLKAMLAGKPLPVGTDYQLGEMYDEYNVRQYVLKRDHYTCQCCGTHNTAKKVVKLHVHHLESRKTGG

SEQ ID NO: 9138 - protein, 443 aa, Anoxybacillus sp.; identical to SEQ ID NO: 3426

SEQ ID NO: 9139 - protein, 457 aa, unidentified
VWLYQAVYNLGEGFLPSSEERTAFYWLLIYRKEHGIMQYVYVLNKHGEPLMPCSPGKARLLLKQQKACVVKRTPFTIKLLYGSAGHKQPVALGIDAGSKHVGLSASTEKRELYREEFTPRNDVVELLSTRRQNRRSRRNRKTRYRAPRFDNRVHSKHKGWLAPSVEVKIQEHITVIKRICRILPITLVRVETAEFDTQRLKAMLKGKPLPVGTDYQLGEMYDEYNVRQYVLKRDNYTCQCCGAHPTEKKPIRLHVHHIESRHVGGNAPNNLITLCVACHKALHEGKITLDKGKKRGKPLRDAAFMGIMRNTLLARLKDELNIPVKQTYGYITKLLREKNKIPKSHVNDARCIAKAPNAKPCDTMLYTRALRHHNRQIHKAKILKGGIRKKNQAPYLVKGFRLWDKVRYNGEECFITGRRSSGYFALKKYDGTVISNSASYKKLMLLEAATNYITERS

SEQ ID NO: 9140 - protein, 419 aa, Anaeromusa sp.
MFMNLVYVLDHNRKPLMPTTPAKARILLRQGKAKVIRKLPFTIKLLQESTTTYTQPLTHGIDTGSKTIGSAVIRPKGNVLYLSEIEIRNDIAGKMKDRSKYRRNRRNRKTRYRQARWRNRKNSIKTNRFSPTMTSKINSHIKEINFVKSILPITKTILETATFDPHALKNPEVLTNKLLYQQGINYGFANTKAYVLTRDQYTCQHCKGKSKDHRLEVHHILYRSEGGSDDQENLITLCKPCHDKVHSNEITLKLKGKKKGQLSHATQMNTIRVQLLKQLPTVQETFGFITKEHRQQHTNEKKHYIDAIFIATQGAKPIYKTSQLILKKCIPDGDYQQTKGIRSEQRIPTGKIQGFRKFDKVTYQGSYYFIKGRMSTGYAILMDAQYQTVKLKPIPKFQKMQRDSARRSWIISQKTIANI

SEQ ID NO: 9141 - protein, 415 aa, unidentified; identical to SEQ ID NO: 6534

SEQ ID NO: 9142 - protein, 450 aa, unidentified; identical to SEQ ID NO: 2935

SEQ ID NO: 9143 - protein, 388 aa, unidentified
LVYGSSGYTQEVILGVDAGSKTIGVSALTKKEELFAANVIPRNDVVDLLSTRREFRRARRNCKTRYRKPRFDNRVRSKHKGWLAPSVEVKIQGHITAIRRVCGILPVSKVVVETAEFDLQLLKAIEKGKPVPQGEDYQQGEMYGHYNVRQYVLWRDDYTCQCCGAHTTKKKEVRLHVHHLESRKTGGDAPSNLITLCDSCHEKLHKGLIAEKDFKKRKRRSTWDATFMGIMRKTLMQRLCSELPIHVVETRGYITKATREKLLVLPKSHINDALAIAQGKHGFNVGYLPGILQIDMIYTIRPVRHHNRQLHKATILKGGIRKSNQTGKYVFGYRLFDKVQFNGQDCFIWGRRTTGIFTIKTINGKMIKDGISFKKLKPVEKSTSYLIA

SEQ ID NO: 9144 - protein, 415 aa, unidentified
  REGION 1..415: note = Ga0373625_0010177
MPTNRQGKVRHLLKDGLAKVVQRTPFTIQLLYDSDEYTQPITLGVDAGSKTIGLSATLVPPSNGRTETDKKELFSAEVQLRTDIVDLLSTRRQNRRTRRSHKTRYRKARFQNRKKDKGWLAPSIRHKIDTHLTMVDKIHKILPITKIIVEVAQFDIQKIKNPEISGVEYQQGAQLDFFNVREYVLYRDDHKCQLCNGKSKDKILNVHHIESKKTGGNAPNNLITLCETCHKKHHEGNITLKVKRGHIFKDPVFMGIMRWAFYNTLKEKYPNVLMTYGYLTKNTRIANKLPKDHRTDALCITGNPTVIGLDTWYFYKKVRCQNRQIHKNTINKGGSRKINQSPFIVLGFRLFDKVKYNDQECFVFGRRVSGSFDIRLLDGTTVNAGVGYKKVQVLEQRKTILIERRRAIPPVPSES

SEQ ID NO: 9145 - protein, 441 aa, unidentified
MTRAIGETAPNCVFVLDTDRMPQTPVHSAVARQMLRAKTAAVFTCHPSTIILKTAVPALLAAHTHRLKIDPGSKTTGLALLDGATVVWAAELTHRGQRIRDALLSRRAMRRNRRQRNTRYRQPRFDNRTRPDGWLPPSLTSRVAHVMTWVERLARLCRITSLSQELVRFDMQRMQHAESAGVEYQHGELAGYEVREYLLEKWHRTCAYCHKTGVPLQVEHVIPKARGGSDRVSNLTLACGPCNQQKSTQTAAEFGFPAVQAQGKLPLKDAAAVNTTRWALYRALQTTGLPVETGTGGRTKYNRSRLGIAKSHWGDAACVGASTPDTLCVRGIQRLGIRAMGHGTRQMCRTDAHGFPKSHRARQKRYFGMQTGDIVQAVVPKGKYAGTWTSRVVVKASGWFDLVIYGKKASVHQKHCTRLWAADGYTYTLPAVAGTAMSSPR

SEQ ID NO: 9146 - protein, 515 aa, Blautia sp.
MTALEERLSKTEYIYVLGFDGKPQMPTRRKRHVLKLLKTGRARIAEDIPFTIRLTYRNAPVLQPVTLAEDPGRTNIGAAVLSPLGDLLFAAVIETRNKEIKKLMTDRQKSRQASRRGERKARQRLAKRYGSMVKSGMVMRKLPMYAADRFVTCKFIRNTQARFCNRKRCPDWITPTVQHLMQTHLNIIRKISRYLPVTDIAFEVNRFAFMHMENPEAMGVDFQNGPLKGYGDVKEAIRTQQHGKCLMCKKPISHFHHIVPRSRGGSDTIQNLAGLCPECHTKVHTDTAFRKDFDEKKSGQLKKYGALSALNQAVPFICKKLLEEYGEEHVHFCRGLDTSLIRTALGFEKTKKNQMHEVDAYCIGLAALEVNEVETPAFDHTFQIRQFRRQDRSIIHHQTGRSYYQGKEKVAQNRKPGFEQKTTALSQWYKEQVRIHGEKEAEKLRSQLWVEKSCRHYNDMDRFLPGAVFLYEGKRYVLSGRITNGKYLRACGQGMKNFPAAECTFIRHNAGLVFI

SEQ ID NO: 9147 - protein, 241 aa, unidentified
MFVDMVYVQDIDGKPMMPTTRHGKVRRLLKDKKAVVVNLCPFTIRLTYVTSDYKQEIVLGVDAGTKHVGLSATTKSKELYSSEVILRNDIVDLLSTRRELRRTRRNRLRYRKHRFNNRIKSRRPGWVAPSVRYKIDAHIRVIDNVCSILPISRIVIEVAQFDTQKINNPNISGKEYQEGNKLGFWNVREYVLARDGHKCQYCKGKSKSKILNVHHLESRKTGGDSPSNLITLCETCHKEYH

SEQ ID NO: 9148 - protein, 440 aa, unidentified
  VARIANT 410: note = X can be any naturally occurring amino acid
  VARIANT 422: note = X can be any naturally occurring amino acid
  VARIANT 437..438: note = X can be any naturally occurring amino acid
LKNETNQTKNRVLVIDKNKQPLMPCHPARARQLMRKGRAAVYRRYPFTIIIKEREGGDTQPTALKFDPGAKTTGIAVVVDCKRGKRCVFAAELEHRGWQIKEGLEKRRAIRRSRRHRKTRYRKPRFKNRTKPKGWLPPSLQSRVDNIASWTKKLRSRIPVSSLSMERVRFDAQKLVNPEISGVEYQQGTLFGYEIREYLLEKWGRKCAYCSKKDVPLQIEHMTPKSRGGSNRIGNLTLSCEKCNQKKNTKTAEEFGFSGLREKSCKPLRAAAAMNATRNAIYSVLKATGLSLETGTGGRTKYNRSKQGYAKEHWLDAMCVGESGENVFVEKQHEVLELKAMGRGSRQMCRVDRYGFPRTKAKSEKRVRGFQTGDIIRAVVPKGKKKGVYEGRVAVRKSGSFNIKQGKQKXVQGIGWKHCKIXQQIDGYSYKNRMGVXXPL

SEQ ID NO: 9149 - protein, 460 aa, Fischerella sp.
MRGESKNKAGLNSSCDKSNQRINNTTKPALFSSQYARQNFVFVLDTNKQPVNPIPPKRARELLTKQKAAVYRMYPFTLILKHAVPNPTPKPLTIKLDPGSKFTGIAVLSGDDVIWVAELEHRGWQIKNALESRCSLRRSRRHRKTRYRQPRFDNRKRFEGWLPPSLMHRVLTIETWVKRLCRYAPITQIVMELVKFDTQALQNPEIDGVEYQQGELFGYEVREYLLEKWGRKCAYCDKEGVPLQIEHMHPRAKGGSNRVSNLTLSCERCNTKKGTKSIDEFLKKDASRLEKIKQQAKKPLKDAAAVNATRWALFRTLKDILPTTTGTGGRTKYNRVRFELPKQHWIDAACVGQVERLNLLTQQPLRIKCTGWGTRQMCGTNKYGFPIRHRERKQVHFGFRTGDIAKVVVTEGSKIGQYVGRVLCRARGSFDIVTKSGRVGDIHYRFCKTIHKKDGYSYAF

SEQ ID NO: 9150 - protein, 457 aa, unidentified; identical to SEQ ID NO: 4299

SEQ ID NO: 9151 - protein, 415 aa, unidentified
LMPCSPAKARLLLKEKKAIVKRRTPFTIQLTIATGETKQPGSLGVDAGYEHVGLSASTEKAELYASEVELRQDITDLLSARRALRQSRRNRKTRYRAPRFDNRIRTKRKGWLALSLENRINAHLSRIEAVLRLLPVTKITVETASFDLQLLKNPDISGKEYQEGEQLGFWNIREYVLCRDGHVCQHCYGRSKDPVLNVHHLESRRTGGDSPGNLITLCETCHKALHRGEITLKAKRGQSFRAEAFMGIMRWEVHNRLRALHPGIEVSNTYGYRTKHARIANGIAKSHCADAFCIAGNLGAERLCEFFFQKQTRRNNRQIHKLSILKGGIRKRNQAPFEVKGFRLFDKVACQGEEGFIFGRRSSGFFDVRKLDGTRISAGISCKKLHLLEKRRTYLTEIRKEEALPPLPEGRGLRA

SEQ ID NO: 9152 - protein, 456 aa, Halomonas sp.
MAVFVLDKQKRPLMPCSEKRARLLLERGRAVVHKRYPFCIRLKDRVGGDTQPLRLGIDPGSKTTGLALMRESDGEQCHVLCLFDLVHRGFQIKKALAQRAAFRRRRRSKNLRYRAPRFDNRTRKAGWLPPSLQHRVDTIMAWVERLSRLAPITGISQELVRFDTQKMENPEISGVEYQQGTLLGYEVREYLLEKWGRECAYCGATETALEIEHVVPRTSGGSNRVSNLTIACHDCNQAKDSLPLATFFATDKGLKKRLKANGHTADARLERVQRELKRPLRDASAVNATRWALFNALNAIGLPVAVGTGGRTKFNRKRLDIPKTHALDAACVGVFDTLHDWTVPTLTIKCTGRGSYQRTRLTKHGFPRGYLMRQKQVQGFQTGDMVKAVVPCGKKAGTHTGRVAVRKTGSFNIQTDHGAVQGISHKHCTVIQRGDGYGYHHTPSIHHKGGAGQTVA

SEQ ID NO: 9153 - protein, 396 aa, unidentified; identical to SEQ ID NO: 4508

SEQ ID NO: 9154 - protein, 354 aa, unidentified
ALPIFCGIDDGSTHVGLAIVQKCLTKNKVVFKGTIEQRQDVKRLMDVRRGYRRYHRCHKRYRQARFNNRSSSKRTCRLAPSIKQKKDAILRVLYQLNSWIDIQEYYLEDVCIDIRAMTDDYKPYRWQYQKSNRLDENLRKATILRDGCRCQECGKSNCILEVHHIRARRYGGADTIGNLITLCKKCHDKTESREKDFEEGYFNMIKSKPKRFDYAMHVMQGKTYLREKISELGILHLTNGGETANKRIEWNIVKSHSNDAICITDGIPDTCDIKEWIIKPMRRKSKAKTDNVLGIKHRDLVSYTYKSGETHTGYVTALYPEQLALNFQSKTKHCKKVNARKCRLLWKFNKIYWL

SEQ ID NO: 9155 - protein, 423 aa, Arthrospira sp.; identical to SEQ ID NO: 2894

SEQ ID NO: 9156 - protein, 419 aa, unidentified; identical to SEQ ID NO: 6355

SEQ ID NO: 9157 - protein, 472 aa, Psychromonas sp.
VKPVSLSLNLSITLSKRNLPAQAENVLKGNLVQRVFVLSNTQQPLMPCHPARARELLRQNKAAVFKRYPFTIVLHDRETGYIQPIEVKLDPGSKTTGIALNLHGKKGIKTVWAANLSHRGHQITEAITARSQQRRARRSRNLRYRKPRFLNRAKPKGWFAPSILSRVHNCETWIYRLIKMAPVTLSAIETVRFDMQLMENPNIAGLEYQRGTLLGFELREYLLQRDNHTCQYCGGASGDKILNIDHKHPRAKGGSDRLANLILSCHSCNGDKNATLIPDWLKQVKKSKSKLNIARAKRLPGIIANKVNALRDAAAVNATRYKIGDIVKASGLPVTFWSGGRTKKNRTEQGYQKDHWIDAACVGESGERVFIAKSLKPILISATGHGSRQMCRVDKYGFQRTSAKKNSCVAGFSTGDIVKAVVPGGKNKGTYTGRIAVRASGYFNLKSENIVIQGIKHQHCQILHERDGYNYH

SEQ ID NO: 9158 - protein, 426 aa, Beggiatoa sp.
MQSVFVLDLEKNPLMPCHPARARKLLRKGRAAVYKRYPFTIILKDRVGGELQPVELKFDPGSKTTGIAVVGQFELGQEVVFGANLEHRGQQIKQDLKSRRANRSARRNRKTRYRPARFNNRCRTLGWLPPSLMSRVFNVETWTKRLQKLVPITSIAVETVRFDTQKMQNPEISGIEYQQGVLAGYEVREYLLEKCAYCGKTNVPLEIEHIQPKSKGGSDRISNLTIACVPCNQKKGNRPVEDFLKRKPKILKKVKAQTKKSLKDTAAVNATRYAIGNVLKKTKLPVTFWSGARTKFNRTSQNYPKYHWIDAACVGETGASVCIPDTLKPLTIVAMGHGTRQMCRVDKYGFPRTSAKKQKVIKGFQTGDLVKAVVTSGKKIGTYFGRIAVRTTGYFNITTKNGETTQGISWKCCQMLQGVDGYNYII

SEQ ID NO: 9159 - protein, 415 aa, unidentified; identical to SEQ ID NO: 5047

SEQ ID NO: 9160 - protein, 336 aa, unidentified
ARRALRQSRRNRKTRYRAPRFDNRIRTKRKGWLAPSVENRINAHLSRIKAVLRLLPVTKITVETASFDLQLLKNPDISGKEYQEGEQLGFWNVREYVLFRDGHVCQHCHGRSKDPVLNVHHLESRRTGSDSPDNLITLCETCHKALHRGEITLKAKRGQSFRAQAFMGIMRREVLNRLKASYPELKVHETYGYLTKHARIANGIVKSHGADAFCIAGNLGAERLGEFFFQKQTRRNNRQIHKLSILKGGIRKRNQAPFEAKGFRLFDKVACQGEEGFIFGRRSSGFFDVRKLDGTRISAGISCKKLRLLEKRRTYLTEIRKEEALPPLPEGRGLRA

SEQ ID NO: 9161 - protein, 421 aa, unidentified; identical to SEQ ID NO: 5881

SEQ ID NO: 9162 - protein, 426 aa, Pseudoflavonifractor sp.; identical to SEQ ID NO: 2797

SEQ ID NO: 9163 - protein, 438 aa, unidentified; identical to SEQ ID NO: 3630

SEQ ID NO: 9164 - protein, 427 aa, Nostoc sp.; identical to SEQ ID NO: 2670

SEQ ID NO: 9165 - protein, 411 aa, unidentified; identical to SEQ ID NO: 3917

SEQ ID NO: 9166 - protein, 483 aa, unidentified
MLNKNSVFVLNNNKVSCDPIHPAKARKLLSEGKAAVFRNYPFTIILKSESKPTKNYRIKVDPGAKFTGLALLSNSNIIWCAELEHRGFQISESLIKRRQVRRFRRNRKTRYRQPRFLNRTRPNGWLAPSLISRVQNIKSWVDKLIKLVPVSAISMELVKFDTQKIVNPEIQGTEYQKGELFSYEVREYLLEKFNRTCVYCGTKEAVFNLDHFHPKSRGGSDKVSNLVLSCVQCNQNKRARLPTEFLSDRPKLLALINKQRKLPLADAAAVNATRWKLKLVLESTGLEIETGSGGLTKYNRKRNGISKSHWTDAACVGTSTPDSLNISNYQPLIIKAMGRGNRQMVKPDKYGFPKTKPKLRQKSFYGFQTGDIVKAVVTKGKKIGTYVGRVAVRKTGNFNIKTQTETVQEISYKYCKIIHKSDGYIYSFGELVKQESTNFVKKVVKVLDTPIQLNLFDTSELTTVGVSVAKQSTSKSQKEKEKV

SEQ ID NO: 9167 - protein, 451 aa, unidentified
MSVAVMSKTGMRLMPTSEYRARKLLKSKKATVYRYNPFTIQLTERETGDVQTVELCMDTGYLHIGTSVKSEKHEYLGVQIDTLTDEKQKHDACRMYRRQRRSRKRYRQSRFNNRKRSDGWIAPSLEHKKDIHIQTISRICNAIPITNITLEMGNFDTQVLKALEENRPLPQGTDYQHGERYGIATLREAVFARDKYTCQCCRKTIADGAILHVHHIIYRSRGGTNRMSNLATVCDRCHTPANHKPGGRLYNWKPKIASFKGATFMTAVRWKMYNEVKSKFSDINIHITYGAETKEQRRAFDITKSHVNDALVMGQFHPKHRSRPVCYKKKRRNNRCLEKFYDAKYIDSRDGKKRSGQELFNGRINRNHKKDSENLHQYRQQKVSAGRRTIRKQHYSIQPHDIIVFNRQQFETFGCHCNGARAILLPQKKSVAIKKLSVHKYAGGYFKSDFT

SEQ ID NO: 9168 - protein, 353 aa, unidentified
MPNYQNYVFVVDTLGQPLSPTHRARARKLLKQGLAAVFRTYPFTIILKKTVENPGNEALRLKLDPGASVTGIALVNQSRDTVIWAAELTHRGDRIRAKLTARRVVRRHRRCRKTRYRQARFNNRKRQEGWLAPSLKHRVETTLTWVNRLISSRPITDISMELVRFDTQKLPNPEISGVEYQQGVLFGYELREYLLTKWQHQCAYCGGQNIPLEIEHIQPKSQGGFDRVSNLGIACHKCNQKKGSQPVEQFLLPKPEILKRCSVQAQAPLKNAAAVNSTRWALFNRLKPTGLPIEIGTGGLTKYNRTVQGLPKTHWLDAADCVGKSTHPPVENQNSPAITNYLFWARWPSKSGS

SEQ ID NO: 9169 - protein, 493 aa, unidentified; identical to SEQ ID NO: 2644

SEQ ID NO: 9170 - protein, 425 aa, Anabaena sp.
MSNFVLVLDTNKKPLTPIHPGDARFLLNQQKAAVFRRFPFTIILKEPKSHVPTQPIELKIDPGSKTTGFALVQNNKVIWGMELQHRGLAIKESLETRKGVRRGRRSRHTRYRQARFLNRTKPQGWLAPSLSHRVLTINTWVKRLCNFAPITDIVQELARFDLQQLENPEISGFEYQQGELQGYEVREYLLNKWNRKCAYCTAENVPLQVEHIKPKAKGGTNRISNLCLACEKCNIKKGTQDIEKFLVKKPELLKQILSQAQRTLKDASAVNSTRWALFNKLKETGLPITTGSGGLTKFNRTRLGLPKTHWIDAACVGKVETLKILTTKILTVKSTGHSCRRFCRINKFGFPCTEPKKIFTHVSTGDFVKATLHKDRKNITSGKYVSRVKTPTKNGCEIVINGFRVEFSTMKDITKVHCSDGYSYV

SEQ ID NO: 9171 - protein, 512 aa, unidentified
MSTVYVLNKDGKPLMPTTRCGHVRYLLKEKKARVVASKPFIIQLLYETDDVVQPLYLGIDPGRSNIGVAVVKTDGMAVFTAHLETRNKEIPKLMKKRKDSRRARRTNGRRCRRQRRAKANGTISKKCVKQTTAQNGSVSKRAKEIGVIKRHLPGCEKDVLCIGIKNKEAKFNNRTRPTGWLTPTANQLLQTHINLVKKIQKFLPISDVVLEVNKFAFMQLDNPNIQKWQYQKGPLYQKESLKSAVSEMQEHHCLFCKKKIDHYHHVVPQHKNGSNTIDNIVGLCTQHHDLVHKDATWQKRLAKKKTGLNKKYGALSVLNQIIPTLTKELSSLFLKHFFVTNGKSTYDYRAAHGVNKDHWLDAYCIACSVLPNDTCDKIINSRVPYEFKQFRRHDRRALNNENMSRVYTFNGKMVATNRHKATEQTTDSLEEFRQRQPNDVCNLKVKEHHPTYRNMSRNYPGSIFLVEKQVHIMQGIAGSKDGEATTYKDTNANSIAAGKCKFVAKNSGILFV

SEQ ID NO: 9172 - protein, 427 aa, Parasutterella sp.; identical to SEQ ID NO: 4733

SEQ ID NO: 9173 - protein, 474 aa, unidentified
MSVFVISKNSERLMPTNRLGKVRHMLKDGRAIIYQRNPFTIQLTYETTEYVQPVELCQDTGYQHIGTSVKSESEEYVAAQHDLLLSEKGNHDDCRKYRRDRRNRKRYRAPRFDNRRAAKKPGWIAPSLRNKADRHIDIIRRYIAVAPITSVTIEIGQFDPQVLKAVAEGKPIPTGIAYQHGPMYGIDTLREAVFQRDKHTCIFCGRGLKQGAVLHTHHVYFWRDQHGDSLDELATCCEKCHTPKNHKKGGKLWGYDKKLPRYSGAAFMNTVRWYIYNQLQEYFPDTEIHITYGAATKRARLDLGLDKSHVNDAFAMGKLHPGKRAKAQLFVKRRRNNRCLEKFYDAKYIDVRDGKVKTGAELGCQRINRRELRISDKSQRIYRGKKKSSGRRSVRKQRYSIRPGDVLICNNRKTTAEGVHCNGTRVTIERQSYSIKNITLLYHMGGWIKTTINGKISKTTTSNYERRHGDSSLH

SEQ ID NO: 9174 - protein, 512 aa, Ruminococcus sp.
  VARIANT 512: note = X can be any naturally occurring amino acid
MTTLEERLSKTEYIYVLGFDGKPQMPTRRKRHVLKLLKTGRARIAEDIPFTIRLTYRNAPVLQPVTLAEDPGRTNIGAAVLSPLGDLLFAAVIETRNKEIKKLMADRKKSRQASRRGERKARQRLAKRYGSMVKSGMIIRKLPMYAADKFVTCKFIRNTQARFCNRKRCPDWITPTVQHLVQTHLNIIRKISRYLPVTDIAFEVSRFAFMHMENPEAIGVDFQNGPLKGYGDVKEAIRTQQHGKCLMCKKPIAHFHHIVPRSRGGSDTIQNLAGLCTEFHTKVHTDTAFRKDFDEKKSGQLKKYGALSALNQAVPFICKKLLEEYGEEHVHFCRGLDTSLIRTALGFEKTKKNQMHEVDAYCIGLAALEVNEVETPAFDHTFQIRQFRRQDRSIIHHQTGRSYYQGKEKVAQNRKPGFEQKTTALSQWYEEQVRIHGEKEAEKLRSQLRVEKSCRHYNDMDRFLPGAVFLYEGKRYVLSGRITNGKYLRACGQGMKNFPAAECTFIRHNAGX

SEQ ID NO: 9175 - protein, 450 aa, unidentified; identical to SEQ ID NO: 2935

SEQ ID NO: 9176 - protein, 424 aa, unidentified; identical to SEQ ID NO: 3351

SEQ ID NO: 9177 - protein, 472 aa, Cupriavidus sp.; identical to SEQ ID NO: 3767

SEQ ID NO: 9178 - protein, 456 aa, unidentified; identical to SEQ ID NO: 4017

SEQ ID NO: 9179 - protein, 536 aa, unidentified; identical to SEQ ID NO: 4526

SEQ ID NO: 9180 - protein, 430 aa, unidentified; identical to SEQ ID NO: 4817

SEQ ID NO: 9181 - protein, 453 aa, unidentified; identical to SEQ ID NO: 5967

SEQ ID NO: 9182 - protein, 415 aa, unidentified
MVYVLDKNGQPLMPTDRHRKVRLMLQSGQAKVIKRCPFTIQLNYDSGHQTQEISLGIDAGSKHIGVSTTTKIKVLYEVDVELRNDIVDLLSSRRELRRGRRNRKTRYRQAKFNNRRRGNGWLAPSIRQKIGTHLTVVENICKMLPISRIMVETASFDIQKIKNPDIQGAEYQQGDQLEFWNVREYVLFRDGHTCQCCKGKSKDKILNVHHIESRKTGGNAPNNLITLCETCHTGYHKGTVQLPKAIKRGMRFKDAAFMGIMRWAFYEALKQQYEPVALVHNTYGYITKHTRIAYNLPKEHYVDARCISGNPEASSNGEYYYQKKVRCHNRQIHKLTVLKGGIRKQNQATYLVKGYRLFDKVSYQGKGYFVFGRRQSGFFDIRTLSGEKVNKGSLNCKKLKFIATRTYYLTERRAV

SEQ ID NO: 9183 - protein, 434 aa, unidentified
MDNRVFVLSRTRKPLMPCHPARARKLLRTGRAAVFRRMPFTIILLDREDGDTQPLEGKYDPGANTTGIALVALFKRGRRVIWAANLHHRGLQIEEKMTERRGFRRNRRKRHCRYRPARYNNRARPKGWLPPSLTSRVENVRTWHRRLMSRAPVSEVHIETVRFDTQKLQNPEIEGVEYQRGELFGYEVREYLLEKWGRECAYCGAEQVPLEIEHIVPKSRGGSDRVSNLTLACRACNQAKGNRDVREFLANDPERLAKILAQAKAPLKGAAAVNSTRYAIGEAIKASDLPVSFWSGGRTKRNRLSQGYQKDHWIDAACVGASGESVFVPKGFLPLEIQARGRGHRRVHNNDDFGFPRGAPRKCKRVQGFQTGDLVELVCKRGKSAGRHVGRLTSIRARGWFVLRKGGRNHDRPAREFRLLARADGYEYTTGTTG

SEQ ID NO: 9184 - protein, 431 aa, unidentified
MLVYVISKDGQPLMPISRCGKVRRLLKNRQAKVVRRCPFTIKLLFEPEHNFVRECYLGVDTGSKHVGVAVVSNDRVLYQSQTELRANIKKKIDYRRMYRRYRRYRKTRYRKCRFLNRRNSIKKDRLPPSVQHKVQAHIDEIEFCKKILPVLDENIILEVSQFDTALMKNSSLMNEKIKHWGYQQGFNYGYSSRRKAVLHRDNYTCQCCGKKNCRLDVHHIIYRTNGGSNDETNLITLCKECHTKVHKGIITIDKKPKKMKLKHATHMSIIRNRLLKVYPQAIETFGFVTSENRHHLGLEKAHYIDACVIASGGLEFEPSDTVYYKRRGSCNERKLTKGVRDEQKLPVGKIQGFRRFDKVKYFGKEYFIMSRITRGGYAFLMDIFNNKIDFSDKPKGWRWPKLLNCKRISARRSTLCMLTTKIVSENKNSNQ

SEQ ID NO: 9185 - protein, 506 aa, unidentified
MVCVVSNTGKRLMPTTEYKARKLMEKGRAKIYQYDPFTIIILDREDGYTQFVELKCDTGDKHIGMSICSEKHEYVSVEVNPLKDEKEKHNDQKKYRRTRRNRKRYRKPRFDNRKRKEDWLAPSLEHKVEIHKHWIEKYIKVMPIEKVILETGTFDTQRLKAINDGKTLPVGTDYQRGEQYDFYTMRDAVFSRDHYTCQCCKKSMNTNKNMVLRTHHIGYWKGDRSNRVSNLLTVCDKCHTQVNHQPSGKLYGLQPKSKKLPEAAFMNSVRYILVDEIYKLQEKLNVSFEVETTYGSMTKLKRKELGIAKSHVNDAYVMGEFHPKHRCQSEQYQKKRRNNRILSKFYDAKYIDSRDNSIKTGKELSSGRTNRNHKRDSENLHQYRKQKVTKGKTTIRKNHYPFQPKDIVLYDGKKYKVNGTNNKGKSVQLYIEERVSIEEITLAKKKKNMQTEEIECGDKVIYEKKIYTVKNIINTKHVLLSGLISTKPENLKHLKYSNGYDKVEIV

SEQ ID NO: 9186 - protein, 515 aa, unidentified; identical to SEQ ID NO: 5111

SEQ ID NO: 9187 - protein, 431 aa, unidentified; identical to SEQ ID NO: 8838

SEQ ID NO: 9188 - protein, 536 aa, unidentified; identical to SEQ ID NO: 4526

SEQ ID NO: 9189 - protein, 412 aa, unidentified; identical to SEQ ID NO: 4932

SEQ ID NO: 9190 - protein, 423 aa, Moorena sp.; identical to SEQ ID NO: 5218

SEQ ID NO: 9191 - protein, 415 aa, Bacillus sp.; identical to SEQ ID NO: 2671

SEQ ID NO: 9192 - protein, 419 aa, unidentified; identical to SEQ ID NO: 3670

SEQ ID NO: 9193 - protein, 443 aa, Chromatium sp.; identical to SEQ ID NO: 6630

SEQ ID NO: 9194 - protein, 466 aa, unidentified
LSIKPLINIGEGVIYSSICTGLSLQTYQKRKEVPCMVYVLDINGQPLMPTTRHGKVRRLLNSHLAKVVKRCPFTIQLLYQSTKEIQPVSLGVDAGSKHIGMAATTEKKVVYQEELSPHNDVVKLLSARRTLRRTRRNRKTRYRKPRFNNRVHSKHKGWLAPSVEVKIQEHITAIKRICQILPISEIHVEISEFDLQRLKAMEEGRTLPVGTDYQLGEQYDFYNTRQYVLHRDGYTFQCCGTHDNNIKLHVHHIESRQTGGDAPSNLITLCEHCHKALHKGKLELPKGKKRGKTYRDATFMGIMRKTLLERLRKEVDVPASGTYGYITKYWRERAGLEKSHINDAICISKYPYAKPLDTYYLTKAVRNHNRQIHKSNFSKGGIRKRNQAPYLVKGFRLFDKVLYQGKEYFIFGRRATGYFDIRTLDGTKVNKGSISYKKLRIQDTAKAYLKEARAIPHMNKFTCVLA

SEQ ID NO: 9195 - protein, 470 aa, unidentified; identical to SEQ ID NO: 7284

SEQ ID NO: 9196 - protein, 281 aa, unidentified
VWLYQAVYNLGEGFLPSSEERTAFYWLLIYRKEHGIMQYVYVLNKHGEPLMPCSPGKARLLLKQQKACVVKRTPFTIKLLYGSAGYKQPITLGVDAGSKHVGLSASTEKRELYREEFTPRNDVVDLLSTRRQNRRSRRNRKTRYRAPRFDNRVHSKHKGWLAPSVEVKIQEHITVIKRICRILPITLVRVETAEFDTQRLKAMLKGKPLPVGTDYQLGEMYDEYNVRQYVLKRDTYTCQCCGVSVKTTSRSSPGCRSIFANLRSAWGTRPPGTGAPVASAT

SEQ ID NO: 9197 - protein, 418 aa, unidentified; identical to SEQ ID NO: 4327

SEQ ID NO: 9198 - protein, 417 aa, unidentified
MPCSPAKARLLLKEKKAIVKRRTPFTIQLTIATGEAKQPVTLGVDSGYKHIGLSATTEKAELYASQVELRQDITDLLSARLALRRSRRSRKTRYRAPRFNNRMASKHKGWLAPSVENRIAAHLSRVEAVMRVLPVTAITVETAAFDTQLLKDPDIAGGAYQQGEQLGFWNVREYVLFRDEHVCQHCRGKSKDSILNVHHIESRRTGGDAPNNLITLCETCHKAFHREEIELKVKRGKSFKAETFMGIMRWTLFERLKKAHPELSVRNTYGYLTKHKRISHGIAKSHCADAYCIADNLGAKRLEGFFFQKQTRKHNRQIHKLLILKGGLKKKNQAPYEVKGFRLFDKVICKSEEAFIFGRRTSGSFDVRRLDGTRISAGISYKKLRLLEPRTTYLTEFRKEAALPPLHKCRGFRAEFL

SEQ ID NO: 9199 - protein, 511 aa, unidentified; identical to SEQ ID NO: 2813

SEQ ID NO: 9200 - protein, 457 aa, unidentified
MDAVAVISASGKPLMPTNPMRARKLIKKGKAVIYKYRPLFTIRLTERTDGDIQTIEYCCDTGYQHIGLSIKSRKHEYVNEQRDLLPNETERHNDSRKYRKARRRRKLRHRACRRDNRHDNQICKDGYAPSIRNKRDQHISLYRSYTEILPVERAVFEMGQFDTQVLKAIEKGEPLPQGKDYQHGERYGYATLREAVFARDDYTCICCGKNSFKDKRILCVHHLGFRIGDRTNRLANLATVCTKCHTPKNHQPKGKLYNLKPELKDFKGATFMTMVRWDMLDKLKVVSKDIQVDVTYGAATKEARRDLKIKKSHANDAYCMGSFHPSHRTDLKRYEKCRRNNRVLSKFYDATYIDIRDGKKKKANALGCNRTKRRESRRSEKNERIYRGKKVSKGRIVLRTKRAVIRPGDIVYVGKKKYIVASSKNLGAQLKLADGSLLTTSKVTKIIHCGGWKTVTL

SEQ ID NO: 9201 - protein, 515 aa, unidentified; identical to SEQ ID NO: 8359

SEQ ID NO: 9202 - protein, 406 aa, unidentified
MRSKPLMPCSPAKARHMLKAGKAVVVRRTPFTIKLTIATGETKQDVTLGVDAGARHVGISATTEKEEVFASEVALRQDITGLLADRLAFRRARRNRKTRYRAPRFNNRVRSKHKGWLAPSVENRIQAHMSRIEAVCRLLPVTKIVIETASFDIQKIRNPEVEGTGYQQGDQLGFWNVREYVLFRDGHICQHCRGRSKDPILNVHHLESRKTGGDAPNNLITLCETCHKAYHAGKIKLKVKRGQSFRAEAFMGIMRWTLLDRVRKTHPKLPVENTYGYLTKHKRIALGLPKTHCADAFCIAGNLKALRRGDFLFQQQTRKHNRQIHKCSILKGGVRKLNQAPFLVKGFRLFDKVRIGGQIGFVFGRRVRGTFNIRRLDKTVIGTDINCKKLSLLETRKTFLTELRKE

SEQ ID NO: 9203 - protein, 424 aa, unidentified; identical to SEQ ID NO: 3232

SEQ ID NO: 9204 - protein, 544 aa, unidentified
MKQKKQKVMVYILNKKGKPLMPTTRCGHVRKLLNSKKAVVVNSNPFTIRLKYDTPNGVQDVFAGIDSGRENIGSGVSNEDGDCLYLGELRTSNKSIKMKMTERVGFRRERRKHDRQNKQRKARKDHTEIQNGNADICRTTISCKSVQISYPAAEKSVTHKIIRGKEGKFANRHRDGDWITPSARQLVQMHMNDLKSMCKILPISHVTLERVAFDFQKLENENIKVWEYGKGKLYGYDSPEEYIHDVQDGKCLVCGKPHIDYLHHIIPRSKGGSDKVSNIAGLCYDCHYGPMGVHNCQNTQDRLPELKSEANKQYKVSLLNSVMPVLIEEMDKFCKANSIMFSICEGHDTAKVRDMYDLQKDHCIDGFAISLVDRNVKSVDVMPDRIYQKQRYKKKSKNIIQKRNYREYYDDKKLVAINRHKGTDQKADSLEEYMNTYAETHTTDECKKHFDSLVVKPARRTYTFHKEWRICPFHIGDKVRYEKKNKIKGNTKVDTFICEGIRFVKDENKAEVKHNKTKSKKMKFCRVLESGCTPYVDYRKLALM

SEQ ID NO: 9205 - protein, 443 aa, Anoxybacillus sp.; identical to SEQ ID NO: 4812

SEQ ID NO: 9206 - protein, 438 aa, unidentified
MNQVFVLDTTKQPLNPVHPGYARLLLKQGKAAVYRRYPFTIRLSRRVEQPILSPLRIKVDPGSKTSGLALVNDASGDVVWAAELTHRGEQIKRDLDRRRAIRRKRRQRKTRYRKPRFTNRRKRRGTLPPSLESRVCNVLTWVCRLMKVCPVTNISQELVRFDTQALETPDIEGAQYQRGQLSGYEVREYVLLKWKHQCAYCDARDVPLELDHIDPRSRHGSNRVSNLTLACTPCNQRKSNQDVRQFLRDEPERLARILAQMKAPLRDAEAVNATRWMLNARLKTLGLPVECGSGGRTKCNRITRELPKTHWLDAVCVGRSTPESLIIKNIVPLQIRATGHGSRQMCRMDKYGFPRTGSKQHKRVQGFQTGDLVRAVVTSGTKQGTYVGKVAVRSRGTFNISTAHGVVTDIPHRFCVLVARSDGYSYQQGKEAAFLPSA

SEQ ID NO: 9207 - protein, 465 aa, unidentified
MSTCACVLSKNGERLMPTIRLGKVRHLLKDGKAKIIKHHPFTIQLLYDSETNIQPIEICEDVGYNYIGISVKSQSHEYVSAQYDTLQDEKSCHDACRRMRRTRRNRLRYRQKRFDNRKRDKGWLAPSLKHKKELNVNVIKMYCEVVPITHATVEVGSFDTMLVKAIEEGKATPEGADYQKGPRYNLATLREAVFYRDNYTCQVCGREASEGAILHVHHMFYWKGRHDNSLSELITVCEKCHTPANHQKGGKLYGFGEDIKFANLSGAAFMNTVRWQIVNELYAAFGKPFVTFTYGAMTKEKRIALHLEKSHNNDAYAMGEFHPNCRCTFEHYEKVRRNNRILEKFYDSRYIDIRTGEIATGKELFNGRINRSHKKDSENLHKYRGKRIRKGYRALRRKKVALNPGGLVSLNGEILTVHGTHTKKNGSVNVEFKTPSKSGKKSTSLKKLKIIKTISPMRSAWDKVS

SEQ ID NO: 9208 - protein, 413 aa, unidentified
MTSYAFVLDANGKQLAPAKEQKAWFLIRKKRAALVSKYPMVIQLKKEIPENEICKDEIRCGIDDGGLHVGIALVQKCKTKNKVVFKGIMEQRNDVKHLMEVRRSYRRYHRYHKRYRLARFDNRKSSKRKKRIAPSILQKRQAIIRVIHWLNKWINITNYWLEDVSIDIRALTDGYKPYRWQYQKSNRLDENIRKAAILRDGGKCMECGKLNCRLEVHHIKPRRRNGSDTLDNLITLCESCHQKTEGQEELYMDRYFSLLKSSDHKKPYYAQHVMIGKEWLRKQLSSLGVLYLTNGGDTANKRIDWNIEKSHANDAVCITNLQPDTYDMKEWTVKPMRRQSKAKTDNVFRNKHRDLVEYTFKNGETHRGYVTALYPEQKAINFQSSTKHCKKVNARKCKLLWKYSKIYWFENAS

SEQ ID NO: 9209 - protein, 414 aa, unidentified; identical to SEQ ID NO: 6921

SEQ ID NO: 9210 - protein, 427 aa, unidentified; identical to SEQ ID NO: 5902

SEQ ID NO: 9211 - protein, 475 aa, unidentified
MVITLDKNKRPLGFMSERRCRILLEKKRAVLYRYFPTIVILKDVDARKLSGLSSYRIKIDPGAKYTGIAIVMDDTNEFMYAMQIEHRGEQIKKNLDTRRSARRNRRSRETGYRRPKWGNRCTAKEQRQSYDSRRDENWLPPSVKSTADNIISWIRRLCRWINITNCSIESVRFDTQLMENPEIEGVEYQQGTLYGYEVKEYLLEKYGHTCQYCGGKSNDPILEWEHMLPRSRGGSDRLKNASLACHNCNQDKGNHTLEEWQTILQDRIPKERGKQKELDQIRQKFVQQVMERKAPVKGLRYAAWVNSSRRYSQRHLYLRFPELECSSGGRTKYNRNLLKYPKEHHYDALCVGEIPEDGFVDRTHGYYLYAKATGRGTRLRGQINQCGVIIRKWMDRSKTAFGFQTGDLVVADVPKDTKYKYKGHFSGRVMIRKSGSFDIRTLSGELVTVNAKFCRLLQNNSGYQMMIKRAIPLGN

SEQ ID NO: 9212 - protein, 346 aa, unidentified
MVYVQDINGKPLMPTTRHGKVRRLLKDKKAVVVNLCPFTIKLMYVTSDYKQEIVLGVDAGTKHVGLSATTKSKELYSSEVILRNDIVDLLSTRRELRKARRNRLRYRKPRFDNRVKSKRPGWIAPSVKYKVDAHIRVVENVCSILPISRIVIEVAQFDTQKIKNPEISGKEYQEGDQLEFWNTREYVLARDGHKCQYCKGKSKDSILNVHHIESRKTGGDSPSNLITLCETCHKEYHKGNIDLKIRRGKSLRDAAVMGIMKWRLYEELKSRYDRVFMTFGYITKHNRIKYGIEKSHTSDAFVISKNINAKRIERQYLKRLIRRHNRQIHKMKILKGGEEEKQSSSF

SEQ ID NO: 9213 - protein, 401 aa, unidentified
RRQRRAKANGTISKKCVKQTTAQNGSVSKRAKEIGVIKRHLPGCEKEVLCIGIKNKEAKFSNRVRPEGWLTPTANQLLQTHINLVKKIQKFLPISDVVLEVNKFAFMQLGNPNIQKWQYQQGPLYQKASLEEAVSEMQEHHCLFCKKPIDHYHHVVPQHKNGSNTIGNIVGLCAKHHDLVHKDTTWQKKLAKKKTGLNKKYGALSVLNQIIPALTKELSSLFPKHFFATNGKSTYDYRAAHGVSKDHWLDAYCIACSVLPNDVCDSDINNRVPYELKQFRRHDRRALHKENMSRVYTLNGKSVATNRHKATEQTTDSLEEFRQCQPDDVCKLKVKEHHPEYRNPKRNFPGCVFLVGKHTHVIQGTSGSHNGKADGYYDTNGNSYSSGKCKFVAKNEGIVFT

SEQ ID NO: 9214 - protein, 348 aa, Enterococcus sp.
VTLREDKNNSIKKKMDQRRMYRRNRRSCKTRYRKARFNNRKNSKRKERFSPTMTSKLHSHQKEIEFIKSILPIAKLIFETGTFDPRLMKNPSLANPKVKPWGYQQGPNYGFENTKARVLVRDNHTCQICNKKPKNERLEVHHIVFRSQGGSDEENNLVTLCHSCHVELHKGLIHPNFEGSLKSALKYATQMNSIRIQLLKLYPDAIETFGYVTKANRLNLGLPKEHYVDAAVIATAGNQVKFACNLMIKRCIPKGDFQRTKGVRSEKTIPKGKIDGFKKYDKVRYFGNEYFIKGRRTSGYFTLMDIYGQTISFNHMSKGQKTPKAKNCHRISARKSWIVTTKKLENIA

SEQ ID NO: 9215 - protein, 376 aa, unidentified
PVSLGVDAGYKHVGLSASTENAELYASEVELRQDVSDLLSARRALRQSRRNRNTRYRAPRFDNRIRTKRKGWLAPSVENRINAHLSRIETVIRLLPVTKITVETTSFDMQLLKNSDIAGKKYQEGEQLGFWNVREYVLFRDGHVCQHCHGRSKDPVLNVHHLESRRTGGDSPGNLITLCETCHKALHRGEITLKAKRGQSFRAETFMGIMRWEVLDRLKASHPKLEVQNTYGYRTKHARISNGIAKSHCADAFCIAGNLGAERLGEFFFQKQTRRNNRQIHKLSILKGGIRKRNQAPYEIKGFRLFDKVACQGEEGFIFGRRSSGYFDVRKLNGTRISAGISCKKLRLLEKRQTYLTEIRKEEALPPLPEGRGVRA

SEQ ID NO: 9216 - protein, 460 aa, Streptomyces sp.; identical to SEQ ID NO: 6819

SEQ ID NO: 9217 - protein, 358 aa, unidentified
VLGVDAGTKHVGLSATTKSKELYSGEVILRNDIVELLSTRRESRRTRRNRLRYRKPRFENRVKSKRLGWVAPSVRHRIDAHIRIINNVCSILPVSRVIVEVAQFDTQKIKNPEISGKEYQEGDQLGFWNVREYVLARDGHKCQHCKGKSKDPILNIHHIESRKTGGDSPSNLITLCETCHKEFHKGNIKLKVKRGKSLRDAAVMSIMKWELYDELKSLYPNVKMTFGYITKYNRINHGIEKSHVSDAFVISRNFDSERLGYYYKLKLVRRHNRQIHKMKIPKGGKKRMNQSPFKVFGFKLFDKVMFQGEERFIYARRLSGQFKIKDIDGNNERNISYKKLRYVSHGLISIKTNLFLSQ

SEQ ID NO: 9218 - protein, 425 aa, unidentified; identical to SEQ ID NO: 6631

SEQ ID NO: 9219 - protein, 450 aa, unidentified; identical to SEQ ID NO: 2935

SEQ ID NO: 9220 - protein, 414 aa, unidentified
MPCSPAKARLLLKEKKAIVKRRTPFTIQLTIATGETKQPVSLGVDAGYKHVGLSASTEKAELYASEVELRQDITDLLSARRALRQSRRNRKTRYRAPRFDNRIRTKRKGWLAPSVENRINAHLSRIEAVLRLLPVTKITVETASFDLQLLKNPDISGKEYQEGEQLGFWNIREYVLCRDGHVCQHCYGRSKDPVLNVHHLESRRTGGDSPGNLITLCETCHKALHRGEITLKPKRGQSFRAEAFMGIMRWEVLDRLKASHPKLEVQNTYGYRTKHARISNGIAKSHCADAFCIAGNLGAERLGEFFFQKQTRRNNRQIHKLSILKGGIRKRNQAPYEIKGFRLFDKVACQGEEGFIFGRRSSGFFDVRKVDGTRISAGISYKKLHLLEKRRTYLTEIRKEEALPPLPEGRGVRA

SEQ ID NO: 9221 - protein, 502 aa, unidentified; identical to SEQ ID NO: 2616

SEQ ID NO: 9222 - protein, 431 aa, unidentified; identical to SEQ ID NO: 4463

SEQ ID NO: 9223 - protein, 414 aa, unidentified; identical to SEQ ID NO: 2588

SEQ ID NO: 9224 - protein, 418 aa, Methanobrevibacter sp.
MFVYVLNMHGESLMPCKPRKARVLLKEKKAKVVNRTPFTIQLLYRSSGYKQPVNLGVDAGSKYIGLSATTNKKELFKATVELRQDIPKLLESRKIQRRNRRSKLRYRPARFNNRGKKGKLAPSIQHKIDTHLTIIKRICNIIPIENIIVETAEFDVHKLKNPSVSGVDYQHGDAKGFYNVKSAVLSRDNYTCQICGAKNTKLQVHHIRFRSDGGSNRMDNLVTLCKECHDKVHTGELKYTKKVKSFKHSTHMNIIGKRLVQSLKNEFSNVFETFGYLTKYTREKLGLVKSHCNDAFVISHNLDAEQSNVEYSYKKVRRHNRQIHKFKPSKGGKRKCNQSPYIVNGFRRYDKVLYNDKECFITGKRSNGYFQLKTFDGTVISQGVSSKRLKLLEPIKGWLIDWRLAIPPRPKEVGVSLP

SEQ ID NO: 9225 - protein, 413 aa, unidentified
MTSYAFVLDVNGKQLAPTKEQKAWFLIRKKRAALVSKYPMVIQLKKEIQGNEICKDEIRCGIDDGGLHVGIALVQKCKTKNKVVFKGTIEQRNDVKHLMEVRRGYRRYHRYHKRYRQARFNNRKSSKREGRIAPSILQKRQATIRVINQLNKWINITNYWLEDVSIDIRVLTDGYKPYCWQYQKSNRLDENIRKAAILRDGGKCMECGKSNCRLEVHHIKPRRRNGSNTLDNLITLCESCHQKTEGQEELYMDRYFSMLKSSDHKNLNYAQHVMIGKKWLRKQLSSLGVLYLTNGGDTANKRIDWNIEKSHANDAVCITDLQPDTYDMKEWTMKPMRRKSKAKTDNVLGIRHRDLVEYTFKNGETHRGYVTALYPEQKAINFQSPTKHCKKVNARKCKLRWKYSEIYWFENVS

SEQ ID NO: 9226 - protein, 555 aa, unidentified
MYVRVIAKDGTPLMPTKRFGKVRHLLETGNAVAIKTRPFTIRLKYETTKYVQDLYGGIDTGRENIGSAVSKENGENVYLADTRSNNGSIHSQMYDRAGFRRERRRHDRQNKQRKAKHDHTEMQNGDKDKVRTTHDCISRKVSYPGAEEPVTHKVIQGKEGKFNNRKRPEGWITPSARQLVQVTMNEVKFMCDTMPIKQLSVERVSFDFQKLANVHIRKWQYSKGPLYGYNSYKDYIYDEQKGKCPFCGEELVHYHHMKPRHKRGTDTVQNIIGVCESCHEMIHCGEITDDMLHEAKDSVVRSFEVSLLNSVMPALIDAMKQFCDQRGIHLVVTDGKTTSDARDKYHIQKDHSTDAYCISLTGCDIDPANAKLDDHIFRKRRFKKKSKNIISARNQRVYYDGKEPVAYNRHRAMDQKTDSLEQYIAKFRLAHTSAEADKHFRSLTVKPARRTYTFHKNGTPAVIHAGDVVRYVKYNKTYGNTKTETFVALSCDMSGEGRVKYGNGNKAKKLKFCRTIAPGALQCVGVERTDVYLRAAALEETKRKTVRAGRKKIAG

SEQ ID NO: 9227 - protein, 442 aa, Lactobacillus sp.; identical to SEQ ID NO: 3489

SEQ ID NO: 9228 - protein, 470 aa, unidentified
MSVFVVGLNGCRLMPTSERKARLLLKQGKAFVEQKVPFTIRLNYKTGSTTQLGYLGIDTGSQHIGVSVVREDGTVLHKEEIGLRDSMSKRKLLEAKASLRRGRRYRKTRYRHPKWRPKTKRVYCEVPDRKGRHWQKKKITFTSKRPKGWLPPSLQSKTDHHIRWIKKLQDLLPEGYRLSIELGRFDPARMKNPEIHGNLYQKGPQYDYENVRAYVLDRDRYTCQICKKKGGKLHVHHILYRSHGATDDPQYMVTVCSDCHSAQNHLPGGILYQWMQEQKRFSRGLRDATFMNILRKRLIRAFPEAVFTYGNVTKVDREKLKLPKSHGNDATAIALVKTGITAVKDKESVICIQQVRRKKRSLHEETPRKGRKEPNRTAARNNKNTKAVTVTKRQNKKKVSMTGCLFDRVELNGKKGWISGFTGKSCYVKDADDQYLSTSPKYKQVSLSKLRILHHCGNWIIGAKKTLGKG

SEQ ID NO: 9229 - protein, 544 aa, unidentified; identical to SEQ ID NO: 3572

SEQ ID NO: 9230 - protein, 433 aa, Clostridium sp.; identical to SEQ ID NO: 7140

SEQ ID NO: 9231 - protein, 280 aa, unidentified
VKYKVDAHIRVVENVCSILPISRIVIEVAQFDTQKIKNPEISGKEYQEGDQLEFWNTREYVLARDGHKCQYCKGKSKDSILNVHHIESRKTGGDSPSNLITLCETCHKEYHKGNIDLKIRRGKSLRDAAVMGIMKWRLYEELKSRYDRVFMTFGYITKHNRIKYGIEKSHTSDAFVISKNINAKRIERQYLKRLIRRHNRQIHKMKILKGGKKKNNQAPFEVFGFRLFDKVLYNNKIFFVYGRRKSGSFNIRDFNGENSKDVSRKKFKLIRGKRHPIILK

SEQ ID NO: 9232 - protein, 560 aa, Streptomyces sp.; identical to SEQ ID NO: 6854

SEQ ID NO: 9233 - protein, 512 aa, unidentified
MSTVYVLNKDGKPLMPTTRCGHVRHLLKEQKARVVTSKPFTIQLLYETDDVVQPLYLGIDPGRTNIGVAVVKADGTAVFTAHLETRNREIPKLMKKRKDSRRTRRTDGRRCRRQRRAKANGTISKKCVKQDTAQNGSVSKRAKKIGVIKRHLPGCEKEVLCIGIKNKEAKFSNRVRPEGWLTPTANQLLQTHINLVKKIQKFLPISDVVLEINKFAFMRLDNPNIQKWQYQQGPLYQKASLEEAVSEMQEHHCLFCKKPIAHYHHVVPQSENGSNTIGNIVGLCTKHHDLVHKDTAWQKKLAKKKTGLNKKYGALSVLNQIIPALTKELSSLFPKHFFATNGKSTYDYRAAHGVSKDHWLDAYCIACSVLADDVCDNNINSHVPYELKQFRRHDRRALHKENMSRVYTLNGKSVATNRHKATEQTTDSLEEFRQRQPNDVCKLKVKEHHPEYRNPKRNFPGCVFLVGKHTHVMQGTSGSHNGKADGYYDTNGNSYSSGECKFVAKNGGIVFA

SEQ ID NO: 9234 - protein, 480 aa, unidentified
LHTKPLDNIGEGSLPPSGEINLKGMTFMVYVKSIDGKALMPTSNAKARKLLKQKKAKVVSLRPFVVKLTYKTKTEYTQKLNFGVDSGYSNIGFSVIDAKQEYIAGEVKLLEGMKKRLLEKASYRRIRRSRLRYRKARWNNRVKSKKKGWLAPSLKHKLDTHIKFIDYLKDILPIGKITIEVANFDIQKMKDDLISGIDYQNGDMFGFWNVREFVLHRDGHKCQNPNCKHKDKKEQILKVHHIRYRSEGGSDRPENLITLCSKCHTPANHKKGKFLYDWCVNGKKVRGFKEATFMSMIRWYLVNELKSKHNNMSITYGYITKNHRIQNGIEKSHLNDAFAIAKGTNQARTKERFLVIQDRLKNRSLEKFYDSKIIDIRIGKKVSGGDLNCGRSTRNKNLNTENLRKYRGVKISKGQRRIRKQKYFYQPNDLVKYDGKVYTVKGTQNEGKYIALKEIKKVPKVELLIPYVFKKGLNWSYGLC

SEQ ID NO: 9235 - protein, 428 aa, Moorena sp.; identical to SEQ ID NO: 4771

SEQ ID NO: 9236 - protein, 473 aa, Actinoplanes sp.; identical to SEQ ID NO: 2808

SEQ ID NO: 9237 - protein, 413 aa, unidentified
MVYVISKNGQPLMPTENYAKIRVLLKNKKAKIIKRCPFTIQLAYDSKNYTQDITLGVDAGSKHIGLSATTKDKVLFESDVELRNDIVDLLSTRRQNRRTRRNHKTRYRKPRFNNRRRKDGWLAPSIQNKVDTHLTVIRRVHEILPITKIIVEVASFDIQKIKNPTISGIEYQQGEQLDFWNVREYVLFRDGHTCQCCKGKSKDKILNVHHIESRHTGGNAPNNLITLCETCHSGYHKGIVKLPNTIKRGMSFRDATFMGIMRWYFYNKLKEAYPNVSLTYGYITKNTRIENGLSKNHYIDARCISGNPLAVSDGTVYYQKKIRCHNRQIYKNTILKGGIRKRNQADYEIKGFRLFDTIRYKGNTYIIFGRRNSGFFDIRTLDGIKVNNGSVSCKKMQLIQPNSNYLIEIRKCA

SEQ ID NO: 9238 - protein, 456 aa, unidentified; identical to SEQ ID NO: 7939

SEQ ID NO: 9239 - protein, 537 aa, unidentified
MQYVYVVDKHGKALMPTTRYRHVRKLLKSGKVVAICNKPFTIRLKYESSTYTQDLWEGIDTGRQNIGDAVSNEKGENVYLADVRTNNKSIKSNMQDRAGFRRERRRHDRQSKQRKAKHDGTEIQNGDDDTVRTKHSCKSIKISYPTADEPVIHKVIRGKEGKFANRKRPEGWITPSARQVIQITMNEIRQTARILPVNHINLERVSFDFQKLENQDIRRWEYGKGALYGYKTYKDYIWDEQHGKCACCGKPITQYHHIIHRAEGGINSVKNIIGLCNGCHNKIHASKDAEDKLKELKEGVRQRYYVGLLNSVIPALIEEVSAYCDEHGIEFTVTDGKTTAETREKYGLSKDHCTDAYAISLADRDVKSVSVSDRIYEKRRFKKKSGNIIAKRNQRVYKFDGKIIAYNRHKATNQKDDSFEEYMTKYAETHTDKECRQHVAQIEIIPAKRTYTYHKQGLVAPCHAGDIVRYEKHNKIKGNTKKDTFVATSVEMNGEGHIKYGDACGSRKIKFCRPIDSGCLQAVHNYQADEYLRKIAE

SEQ ID NO: 9240 - protein, 398 aa, Anoxybacillus sp.
AAIYKRYPFTIILKEIVDNFRPKTPYRLKIDHGSKHTGLAILRGQEVVWLGQLDHRTDIKERMDKRRAFRRARRNRKTRYRKPRFLNRRRKDGWLPPSLESRVQNIQTWVNHLKKLCPIGYISYENTKFDTQLMRNPEINGVEYQQGTLQGYEVREYLLEKFGRKCCYCGKENVPLEVEHIIPKSRGGTDRVDNLCLACHDCNQRKGSKTAEEFGYPHIQKQVKESLKDASAVNSTRWKVYEVLKQSGCEVECGTGARTKMNRIRLDLPKTHYFDACCVGERTPNHLYFKTKEVLFIRAKGRGSRSRTNLDRYGFPRGYLARQKFFFGFQTGDMVKAVIPRGKYQGVWFGEVACRKTGSFDIKGKDGKRIAQGINYRYVQVIQRFDGYTYRREGMNIA

SEQ ID NO: 9241 - protein, 512 aa, unidentified
MSTVYVLNKDGKPLMPTTRGGHVRHLLKEQKARVVRTKPFTIQLLYETDDVVQPLYLGIDPGRTNIGVAVVKADSTAVFTAHLETRNEEIPKLMQGRKKARRARRTNGRRCRRQRRAKANGTISKKCVKQTTAQNGSASKRAKEIGVIKRHLLGCEKDVLCIGIKNKEAKFSNRTRPEGWLTPTANQLLKTHINLVKKIRKFLPISDVVLEINKFAFMRLDNPNIQKWQYQQGPLYQKASLEEAVSEMQEHHCLFCKKSIAHYHHVVPQSENGSNTIGNIVGLCTKHHDFVHKDTAWQKKLAKKKTGLNKKYGALSVLNQIIPALTKELSSLFPKHFFATNGKSTHDYRIAHGVSKDHWLDAYCIACSVLPNDTCDRTINSRVPYELKQFRRHDRRALHKENMSRVYTLNGKSVATNRHKAAEQTTDSLEEFRQRQPNDVCKLKVKEHHPTYRNMNRNYPGSIFLIGKQVHVMQGIAGSKDGEATTYKDTNANSIAAGKCKFVAKNSGILFV

SEQ ID NO: 9242 - protein, 362 aa, unidentified
LSASTEKAELYASEVELRQDVSDLLSARRALRQSRCNRKTRYRAPRFDNRIRTKRKGWLAPSVENRINAHLSRIETVLRMLPVTKITVETASFDMQLLKNPDISGKEYQEGEQLGFWNVREYVLFRDGHVCQHCHGRSKDPVLNVHHLESRRTGGDSPGNLLTLCETCHKALHRREIKLKTKRGQSFRAEAFMGIMRWEVLNRLKASHPELEVHNTYGYRTKHTRIVNGIDKSHCADAFCIAGNLGAKRLGEFFFQKQTRRNNRQIHKLSILKHGLRKRNQAPFEVKGFRLFDKVVCQGEEGFIFGRRSSGSFDVRKLDGTRISAGISYKKLRLLEKRRTYLKEIRKEEALPPLPEGRSLRA

SEQ ID NO: 9243 - protein, 452 aa, unidentified
MTSLYIIVEVTITGASPGEVFMTTYNSVFVLDTTKKPLTPCQPARARALLRDGKAAVWRTVPFTIILKVAMPDAIVKPISCKIDPGSKQTGLALVDSDGRVVFAAVLEHRGNAIKAGLESRRSIRRGRRARNTRYRQARFLNRIRPEGWLPPSLQHRVETTLTWVKRFRRLCGVVEIAVERVKFDMQLMRNPEISGVEYQQGTLLGFTVREYLLEKWGRKCAYCGAENTPLQVEHIHPKANGGSSAVSNLALACEPCNKKKGTQDIKVFLKNKPELLKKVVAQAKRPLSAAAAVNATRNKLFVELLNTCLPVETGTGAQTKFNRTRLDYPKEHWIDAACVGESGATVTLNPELKPLLIKATGHGTRQMCTTDKFGFPRRAAKGGKAVNSVSTGDYARIVQPKGKYIGSYVGRISSINTTTNFVTMKVFGKTISFNSKLVTIIQKADGYAYAH

SEQ ID NO: 9244 - protein, 428 aa, unidentified; identical to SEQ ID NO: 5036

SEQ ID NO: 9245 - protein, 420 aa, unidentified
MQYVYVLNKHGEPLMPCSPCKARLLLKQKKACVIKRTPFTIKLLYGSTGYKQPVTLGIDAGSKHIGISATTEKYELYREEATPRNDVVDLLSARRAFRRSRRNRKTRYRAPRFSNRVHSKHKGWLAPSVEVKIQEHITLIKRVCRILPVTLVRVETAEFDTQRLKAMLESKPLPVGTDYQLGEMYDEYNVRQYVLKRDNYTCQCCDAHSTKTKAVKLHVHHLESRKVGGNAPNNLVTLCKDCHKALHAGKAKLNGRKRGKPLKDAAFMGIMRKTLMERLCKELKISIQGTYGYITKYLREKHDIPKSHTNDARCISRHPLAVPCDACYYTKAVRHHNRQLHKATILKGGIRKANQAPYMVKGYRLWDKVSYNGTECFITGRRTSGYFALKKLDGTVVSNSASYKKLRLLEVATNYITERR

SEQ ID NO: 9246 - protein, 555 aa, Streptomyces sp.; identical to SEQ ID NO: 6474

SEQ ID NO: 9247 - protein, 427 aa, Parasutterella sp.; identical to SEQ ID NO: 6030

SEQ ID NO: 9248 - protein, 423 aa, unidentified; identical to SEQ ID NO: 3576

SEQ ID NO: 9249 - protein, 414 aa, Parasutterella sp.; identical to SEQ ID NO: 2850

SEQ ID NO: 9250 - protein, 512 aa, unidentified
MSTVYVLNKDGKPLMPTTRGGHVRHLLKEQKARVVRAKPFTIQLLYETNDVVQPLYLGIDPGRTNIGVAVVKANGTAVFTAHLETRNKEIPKLMQDRKKARRARRTNGRRHRRQRRAKANGTISKKCVKQTTTQNGSVSKRAKEIGIIKRHLPGCEKDVLCIGIKNKETKYTNRERPEGWLTPTANQLLQTHVNLVKKVQKLLPISDVVLEVNKFAFMRLDNPDIQKWQYQQGPLYKKESLESAVSEMQEHHCLFCKKPIDHYHHVVPKSENGSNTIANIVGLCAEHHNLVHKDVAWQEKLAEEKTGLNKKYGALSVLNQIIPALTKELSSLFPKHFFVTNGKSTYDYRAAHGVSKDHWLDAYCIACSVLPNDTCDKTINSRVPYELKQFRRHDRRALNNENMSRVYTFNGKMVATNRHKATEQTTDSLEEFRQRQPNDVCNLKVKEHHPTYRNMNRNYPGSVFLVGNQVHVMQGIAGSKDGEATTYKDTNANSIAAGKCKFVAKNSGILFV

SEQ ID NO: 9251 - protein, 368 aa, Geobacillus sp.
LFVYIINKHGKPLMPCSPRKARLLLKQKKAKVVRRTPFTIQLLYGSSGYKQPVSLGVDMGTRHVGISATTKKDVLFEAEAQLRTDIVELLAIRRQFRRSRRNRKTRYREARFLNRRKPEGWLPPSIQHKINSHIKLIDLVHNILPATSVTIEVAAFDTQKLKNLNIRGVEYQQGEQMGFWNVREYVLYRDNHTCQYCKGKKKDPVLQVHHIESRKTGGDSPDNLITLCKTCHHEIHEKGLEHIFQRKRPPMRDASQMTAMRWAMFSRIREKYSHANITYGYITKCIRIANGLSKSHMVDARCISGNPLAKPSGTVYLLKFVRKNNRQLHKATILKGGKRKSNKAPRFVKGFQLFDKVVYERKECFIFG

SEQ ID NO: 9252 - protein, 480 aa, unidentified
LYTKPLDNIGEGSLPPSGEINLKGMTFMVYVKSIDGKALMPTSNAKARKLLKQKKAKVVSLRPFVVKLTYKTKTEYIQKLNLGVDSGYSNIGFSVIDAKQEYIAGEVKLLEGMKKRLLEKASYRRIRRSRLRYRKARWNNRVKSKKKGWLAPSLKHKLDTHIKFIDYLKNILPIEKITIEVANFDIQKMKDDLISGIDYQNGDMFGFWNVREFVLHRDGHKCQNPNCKHKDKKEQILKVHHIRYRSEGGSDRPENLITLCSKCHTPANHKKGKFLYDWCVNGKKVRGFKDATFMSMIRWYLVNELKSKHNNVSITYGYITKNHRIQNGIEKSHLNDAFAIAKGTNQARTKDRFLVIQDRLKNRSLEKFYDSKIIDIRTEKKVSGGDLNCGRSTRNKNLNTENLRKYRGAKISKGQRRIRKQKYFYQSNDLVKYDGKVYTVKGTQNEGKYIALKEIKKVPKVELLIPYVFKKGLNWSYGLC

SEQ ID NO: 9253 - protein, 490 aa, unidentified; identical to SEQ ID NO: 3566

SEQ ID NO: 9254 - protein, 416 aa, unidentified; identical to SEQ ID NO: 4794

SEQ ID NO: 9255 - protein, 464 aa, unidentified; identical to SEQ ID NO: 3455

SEQ ID NO: 9256 - protein, 423 aa, unidentified; identical to SEQ ID NO: 4024
  source 1..423: note = Lachnospiraceae bacterium UBA7287

SEQ ID NO: 9257 - protein, 406 aa, unidentified; identical to SEQ ID NO: 2874

SEQ ID NO: 9258 - protein, 420 aa, unidentified; identical to SEQ ID NO: 2681

SEQ ID NO: 9259 - protein, 411 aa, unidentified; identical to SEQ ID NO: 6901

SEQ ID NO: 9260 - protein, 407 aa, unidentified; identical to SEQ ID NO: 3417

SEQ ID NO: 9261 - protein, 465 aa, unidentified
MSTCVCVLSNSGERLMPTFRLGRVRHLLKDGKAKIIKHHPFTIQLLYDSKTNTQPIEICEDVGYNYIGISVKSESHEYVSAQYDTLQDEKEHHDDCRKYRRTRRNRLRYRKPRFDNRKRSEGWLAPSLEHKKQLNIRLIERYVSVIPITRATVEVGSFDTMLLQAIQKGESKPEGVDYQKGPRYNLATLREAVFYRDNYTCQVCGRKIADGAILHMHHMFYWKGRHGNSLSELITVCEKCHTPANHQKSGKLYGFGENVKFADLSGAAFMNTVRWQIVNELYAAFGKDFVTITYGAMTKEKRIALRLEKSHNNDAYAMGEFHPNHRCTFEHYEKVRRNNRILERFYDSRYIDIRTGEIATGKELFNGRINRNHKKDSENLHKYRGKRTYAGHRALLRKKVNLNPGDLVSLNGEVLVVHGTHTNKNGAVNVEFKVPAKNGQKSASLKKLKIVKTTDSMHSAWEKIS

SEQ ID NO: 9262 - protein, 442 aa, unidentified; identical to SEQ ID NO: 2637

SEQ ID NO: 9263 - protein, 456 aa, Halomonas sp.; identical to SEQ ID NO: 2773

SEQ ID NO: 9264 - protein, 423 aa, unidentified
MLVYVISKDGQPFMPTSRFGKVRRLLKEGKAKVVRREPFTIRLLYEPETDVVQECYCGVDTGSKHIGVAVVGNDKVLYQSQTELRSDIKRKMDRRRIYRRNRRSRKTRYRKPRFLNRGNSTKSDRIPPSVKHKVQAHIDEIEFCKKILPIADLILEVNQFDTALMKNPNLMNEKIKRWGYQQGFNYGYSSRRSAILHRDNYTCQCCGKKNCRLEVHHVKFKSDGGTDDEENLITLCEDCHKGVHAGTVTLNRKPKKSKNLKHATHMSIIRSWLLKEYPNAIETFGFVTSENRNHLKLQKDHYIDACVIASGGLEFKELDVVYRKRRVPKQGRALTKGVRGEKKLPTGKIHGFKRYDKVKYLGDVCFVKGRRNGGGFVLMNIDNNPIDFRDKGGKQKPPHNEIKRLNTRRSILCVGVREEGGIN

SEQ ID NO: 9265 - protein, 431 aa, unidentified
MPNKVYVINKHGRPLMPCSPAKARHLLDEGKAKVKKRTPFTIQLVYGSSGYTQEVILGVDAGSKTIGMSVSTTKEELLSAEVKPRNDVVDLLSTRREFRRARRNRKTRYRKPRFDNRVRSKHKGWLAPSVEVKIQEHITSIKRVCRILPVSKVVIETAEFDLQLLKAIADGKPVPQGEDYQQGEMYGHYNVRQYVLWRDDYTCQCCGAHATKKKEVRLHVHHLESRKVGGDAPDNQVTLCESCHEKLHKGLITEKDFKKRKRRSTRDATFMGIMRKTLMQRLCSELPIPVVETRGYITKATREKLLVLPKSHINDALAIAQGKRGFNVGYLPEIAQIDKIYTIRPVRHHNRQLHKATILKGGIRKSNQTEKYVFGYRLFDKVQFNGQDCFIWGRRTTGIFTIKTINGKMIKDGISFKKLKLVEKSTSYLIA

SEQ ID NO: 9266 - protein, 408 aa, unidentified; identical to SEQ ID NO: 4614

SEQ ID NO: 9267 - protein, 413 aa, unidentified
MTSYSFVLDANGKQLAPAKEQKAWFLIRKKRAALVSKYPMVIQLKKEIPENEICKDEIRCGIDDGGLHVGIALVQKCKTKNKVVFKGTIEQRNDVKHLMEVRRSYRHYHRYHKRYRPARFDNRKSSKRKKRIAPSILQKRQAIIRVIHWLNKWINITNYWLEDVSIDIRVLTDGYKSYSWQYQKSNRLDENIRKATILRDGGKCMECGKSNCRLEVHHIKPRRRNGSNTLDNLITLCESCHQKTEGQEELYMDRYFSLLKSSDNKNLNYAQHVMIGKMWLRKQLSGLGVLYLTSGGDTANKRIDWNIEKSHTNDAVCITDLQPDTCDIKEWAIKPMRRQSKAKTDHVLGIHHRDLVEYTFKNGETHRGYVTALYPDQKAINFQSQTKHCKKVNARKCKLLWNYSKIYWFENAS

SEQ ID NO: 9268 - protein, 472 aa, Pandoraea sp.
LPVFVLGRNGRPLMPCSEKRARKLLGAGRARVHRRYPFTLRLIDRQPADSRLQALELKLDPGSQTTGLALCRVAASVDGDGVVHRVMHIRFLMELVHRGRAIKQALQARSAMRRRRRGNLRYRAPRFDNRTRKAGWLPPSLQHRVDTTMAWARRLCKLAPVTHIAQELVRFDMQLMQNAEISGVEYQQGELAGYEVREYLLEKFGRSCQYCDATGVPLQVEHIHAKARGGSSRVSNLALACAPCNQKKDSRDIRAFLAQDPTRLARILARAKAPLRDAAAVNTTRWALFEALKGTGLSVSTASGAQTKCNRTRLGLPKTHSLDAACTGQADGVTGAAAPVLVVKCSGRGSRSRTRLNQFGFPRAYLSRSKTAFGFRTGDMVLATVPNGKKAGTYQGRVAIRQTGSFNIQSGKPGVPTVQGISQKHCKVLQRGDGYGYACQPSPYSTTKGNEACGLGAFPLRPEGRSVAEQLG

SEQ ID NO: 9269 - protein, 408 aa, unidentified
MVYVQDINGKPMMPTTRHGKVRRLLKDKKAVVVNLCPFTIKLMYVTSDYKQEIVLGVDAGTKHVGLSATTKSKELYSSEVILRNDIVDLLSTRRELRRSRRNRLRYRKPRFDNRIKSKRPGWVAPSVKYKVDAHIRVIDNVCSILPISRIVIEVAQFDTQKINNPNISGKEYQEGDQLGFWNVREYVLARDGHKCQHCKGKSKDPVLNVHHIESRKTGGDSPSNLITLCETCHKEYHKGNIDLKIKRRSSLRDAAVMGIMKWRLYEELKSKYDNISMTFGYVTKYNRIKHGIEKSHVFDAFVISKNFDAIRLGYYYKVRLARRHNRQIHKQKIPKGGIKRPNQSPFEVFGFRLFDRVMFENSYYFIFARRKTGSFNIRDIDGKNQRDITYKKLKLSRCKRFMVQKEMD

SEQ ID NO: 9270 - protein, 512 aa, unidentified; identical to SEQ ID NO: 3776

SEQ ID NO: 9271 - protein, 442 aa, unidentified; identical to SEQ ID NO: 3234

SEQ ID NO: 9272 - protein, 414 aa, unidentified
MPCSPAKARLLLKEKKAIVKRRTPFTIQLTIATGESKQPVSLGVDAGYKHVGFSASTEKAELYASEVELRQDVSDLLSARRALRQSRRNRKTRYRAPRFDNRIRTKRKSWLAPSVENRINAHLSRIEAVLRLLPVTKITVETASFDMQLLKNPDISGKEYQEGEQLGFWNVREYVLFRDGHVCQHCHGRSKDPVLNVHHLESRRTGGDSPGNLITLCETCHKALHRSEITLKTKRGQSFRAEAYMGLMRWEVLNRLKTSHPGLEVHNTYGYRTKYTRIVNGIDKSHCADAFCIAGNLGAERLGEFFFQKQTRRNNRQIHKLSILKGGIRKRNQAPFEVNGFRLFDKVACQGEEGFIFGRRSSGFFDVRKLDGTRISAGISYKKLHLLEKRRTYLTDIRKEEVLPPLPEGRGLRA

SEQ ID NO: 9273 - protein, 375 aa, unidentified
MVKSSERQERCCRLETPSNIGEGSQPGERPRRQNLRVVVLNKRGKPLMPCSPAKARLLPKERNAIVVRRTPFTVQLTIATGETKQPVSLGVDAGYKHVGLSASTEKAELYASEIELRQDITDLLSARRELRRARRNRKTRYRGPRFDNRIRTKRKEWFAPSVENRINAHLSRIEKVLRLLPVTTITVETASFDTQLLKNPDISGKEYQEGEQLGFWNIREYVLCRDGYVCQHCYGRSKDPVLNVHHLESRRTGGDSPGNLITLCETCHKALHRGEITLKAKRGQSFRAEAFMGIMRWEVLDRLKASHPELEVQNTYGYRTKHVRIANGIAKSHCADAFCIGGNLGAERLGEFFFQKQTRRNNRQIHKLSILKGAL

SEQ ID NO: 9274 - protein, 410 aa, unidentified; identical to SEQ ID NO: 8210

SEQ ID NO: 9275 - protein, 458 aa, Lactobacillus sp.; identical to SEQ ID NO: 4474

SEQ ID NO: 9276 - protein, 488 aa, unidentified
MLNIGEGKISCRPPLLVGDSNNSKEVYFMVVYVLNKNNKPLMPCKPQRARKLIKEKKAKIVNYKPFTIKLIYGSYGYTQNTNLGVDLGSKNIGIAVTTQNKVLAKGEIELRQDVSSLIETKKILRRGRRSRKTRYRRCKFNFRNKRVFNAPKGAKLKTLKKGSDSKKNWRTLSTNIDSNRPVGWLPPSIQSKIDNTFFWIDKYYNLLPKCNLSIEVGKFDMAKMINPEIEGADYQQGEAFGFYNTRYFVFARDNYTCQVCKKSKDKVLHTHHVIYKSKGGSDRADNLATICTDCHTSENHKPGGILYEWMIKKKKMKTYKEPPFMNSMRVKVFKKYPQANITYGSITTPRRKKLGLEKTHYNDAIAISKVECINQNCDEVFKIKQFRKKKRSLHEATARKGRKTKNTESKRNEKNTSFANGFYLNDKVEIFGQIGYITGFSGKSSAYVKNINDEYITIPGKKYKQVSIYALKFINHNNNWQYESNFAI

SEQ ID NO: 9277 - protein, 406 aa, unidentified; identical to SEQ ID NO: 2973

SEQ ID NO: 9278 - protein, 414 aa, unidentified; identical to SEQ ID NO: 2856

SEQ ID NO: 9279 - protein, 438 aa, unidentified; identical to SEQ ID NO: 4848

SEQ ID NO: 9280 - protein, 457 aa, Lactobacillus sp.
MRIAAGNMIAGKGGKMEYENANRVFLLNKDGKPLMPCRPRKARLLLKSGKAFVVKKYPFTIQLKYGSYGYKQKVSLGVDTGQRHIGFAVTSQDKVLYQSEVELRQDVHKNLYTRSIYRRSRRNCKTRYRQARFLNRVHGKRDGLWLPPSVKGKVNHNIAWIKRYLAVLPNPDLHIEVGKFDMAKMVNPAISGKQYQEGSLHGWKNYEYYVLARDKYTCQLCHKHGEGVKLVVHHIVYRSQGGTDRVDNLITLCTNCHTTKNHQPSGKLYKWMKAKKKVTTHLKGATFMNILRKRIMAAFPEASYQYGYQTFFERKKFNLPKGHFTDAIAISGIREINQMPETVTMISQFRKKKRSLHEASARKGRKEPNRTSKRNAKNTKYARGLWLNDYVHVIGTNLRGYVQSYLSKGAYVRLSDGLGNYVTKDGKNYISTKLCKPITHNGNWQKAEQKLSLYEFK

SEQ ID NO: 9281 - protein, 420 aa, unidentified
MQYVYVLNKHGEPLMPCSPRKARLLLKQKKACVVKRTPFTIKLLYGSTGYKQPITLGVDAGSKHIGISATTEKYEFYREEATPRNDVVDLLSARRAFRQGRRNRKTRYRAPRFNNRVHSKHKGWLAPSVEVKIQEHITVIKRICRILPVTLVRVETAEFDTQRLKAMLAGKPLPVGTDYQLGEMYDEYNVRQYVLKRDNYTCQCCGAHTTAKKTVKLHVHHLESRKVGGNAPNNLITLCTTCHNNLHKGKITLDGKKRGKPLKDAAFMGVMRKTLMERLRKKLKIPVQGTYGYITKYLREKNGIPKSHTNDARCISKNSLAIPCDTCYYTKAVRHHNRQLHKATILKGGIRKANQAPYIVKGFRLWDKVLYNGQECFISGRRSSGYFALRKFDGTTITNSISFKKLRLLEPATNYLIERK

SEQ ID NO: 9282 - protein, 442 aa, Virgibacillus sp.; identical to SEQ ID NO: 6559

SEQ ID NO: 9283 - protein, 411 aa, unidentified; identical to SEQ ID NO: 3731

SEQ ID NO: 9284 - protein, 493 aa, unidentified; identical to SEQ ID NO: 3154

SEQ ID NO: 9285 - protein, 453 aa, unidentified; identical to SEQ ID NO: 6768

SEQ ID NO: 9286 - protein, 477 aa, unidentified
VDVAVFVLDRSGKPLMPCSEKRARLLLDRGRARVHRLVPLAIRLLDRRVADCTLQPLRLKLDPGSKTTGIALVRDTATVETTTGESGPGAVVCNLFELMHRGAAIRKALRQRAAFRRRRRSANLRYRAPRFLNRTRTESWLAPSLQHRVDTTLAWVERLRRLAPVTALASELVRFDLQQVQNPEISGVEYQQGTLRGYEVREYLLEKFERTCAYCDAQNVPFNVDHVRPQAGGGSDRVSNLALSCVPCNEAKDDSPVEMFLAHDPERLARIKQQLKTPLRDAAVVNATRWTLVRALRATGLPLETGSGGRTKWNRVRLGIPKTHALDAACVGAVEQVVDWSRPALTIKATGRGAYQRTLLTAHGFPRGYLMRQKRAHGFRTGDLVAATIPAGRHAGQHRGRVAIRTRPSFALQTESGTFDVHARHLRLLQRGDGYGYCSQPLPQPLRGGLSSPRYDGGAVDQQALWSERWVRAKQDC

SEQ ID NO: 9287 - protein, 415 aa, unidentified
MQKVYVQNKDGEPLMPCTPAKAKHLLRDKKAEVIHLTPFTIRLNWDCENNTQEIIVGLDTGAVNIGCSAVNGERLLYASETKLRTDIHKKMQRRANYRHTRRCRKLRHRQPRFDNRKSGRQLPPSLQSKMDSTVKIVMQLSKILPISKVRVEIAKFDTQKLQNPDIEGKEYQKGVTEGYDNIRSYVFERDKYSCQICKKSKGILQTHHIKQRKDGGSDRPDNMTTVHKDCHKKFHLGEIEHKFRKPKEYKVETQVTILKDFIVMELKKNFDVELTFGHITKRNRMRLNLPKSHCFDAVAICNPKKIERIDKIFKRVCVTQRRYQMTKGVRSEKRLPNGELFGFRQWDKVKINNQIGFIKGKRSSGFFDVCDIDGNNVSHSVKYTKLQRLYSNNVMEVIASPPTTKVMGIRSETVL

SEQ ID NO: 9288 - protein, 433 aa, Lactobacillus sp.; identical to SEQ ID NO: 4182

SEQ ID NO: 9289 - protein, 431 aa, unidentified
MDAWDIIVVLNKRGKPLMPCSPAKARLLLKEKKAIVKRRTPFTIQLTIATGETKQPVSLGVDAGYEHVGLSASTEKAELYASEVELRQDITDLLSARRALRQSRRNRKTRYRAPRFDNRIRTKRKGWLAPSVENRINAHLSRIEAVLRLLPVTKITVETASFDTQLLKNPDIAGKEYQEGEQLGFWNVREYVLFRDGHVCQHCHGRSKDPVLNVHHLESRRTGGDSPGNLITLCETCHKALHRGEITLKAKRGQSFRAEAFMGIMRWEVLDRLKASHPKLEVQNTYGYRTKHARIVNGIAKSHCADAFCIAGNLGAERLGEFFFQKQTRRNNRQIHKLSILKGGIRKRNQAPYEIKGFRLFDKVACQGEEGFIFGRRSSGFFDVRKLDGTRISAGISCKKLHLLEKRRTYLTEIRKEEALPPLPEGRGLRA

SEQ ID NO: 9290 - protein, 406 aa, unidentified
MVYVQDINGKPLMPTTRHGKVRRLLKDKKAVVVNLCPFTIKLMYVTSDYKQEIVLGVDAGTKHVGLSATTKSKELYSSEVILRNDIVDLLSTRRELRKARRNRLRYRKPRFDNRVKSKRLGWIAPSVKYKVDAHIRVVENVCSILPISRIVIEVAQFDTQKIKNPEISGKEYQEGDQLEFWNTREYVLARDGHKCQYCKGKSKDSILNVHHIESRKTGGDSPSNLITLCETCHKEYHKGNIDLKIRRGKSLRDAAVMGIMKWRLYEELKSRYDRVFMTFGYITKHNRIKYGIEKSHTSDAFVISKNINAKRIERQYLKRLIRRHNRQIHKMKILKGGKKKNNQAPFEVFGFRLFDKVLYNNKIFFVYGRRKSGSFNIRDFNGENSKDVSRKKFKLIRGKRHPIILK

SEQ ID NO: 9291 - protein, 419 aa, unidentified; identical to SEQ ID NO: 4877

SEQ ID NO: 9292 - protein, 430 aa, unidentified
  REGION 1..430: note = Ga0315281_10003133
MQRIFVLGADGQPLDPCHPARARQLLRAGRAAIYRRFPFTLILKERLAGESVVHKHVIKIDPGARTTGLAVVNDAGRVVWAGELEHRGFAIRDHLLARRHVRRSRRFRHCRYRPARFNNRRKPKGWIPPSLMSRVANVATWVSRLRRVAPTTSLAMELVKFDTQAIVNPEISGVEYQHGTLYGSEVREYLLEKWGRTCAYCGERNVPLQIEHLIPTSRGGSDRVSNLTLACGKCNQRKGNQTAMEFGYPHLQVQARQPLKDAAAMNTTRWVLYRQLRDTGLPIEVGTGGRTKFNRVSLGLPKAHWIDAACVGKSGASVRVDVTLKPLAIRATGHGSRQMCRMDKYGFPRTGPKQVRRGHGFRTGDIVRAIVPSGKNRGTHISRVAVRATGRFDITTRKRGVQSIGWQYCHLLQYADGYAYSLDSKRGLVA

SEQ ID NO: 9293 - protein, 442 aa, Lactobacillus sp.
MKHENANRVFLLNKDGKPLMPCRPRKARLLLKSGKAFVVKKYPFTIQLKYGSYGYKQKVSLGVDTGQRHIGFAIVSQNKVLHQSEVELRQDVHKNLYTRKIYRRSKRNRKTRYRQARFLNRVHGKRDGLWLPPSIKGKVSHNIAWIKRYLAVLPNPDLHIEVGKFDMAKMVNPEISGKQYQEGSLKDWKNYEYYVLARDEYTCQLCHKHGEGVKLVVHHIVYRSQGGTDRVDNLITLCTNCHTTKNHQPGGKLYKWMKAKKKVTKQLKGATFMNILRKQIMTTFPEASFQYGSQTYVDRKNLLLPKGHFMDAIAISGIKPVGQMPETVTMISQFRKKKRSLHEATARKGRKQPNTSSKRNEKNTKYACGLWLNDYVRVIGNHVKGYVKGFKSNGYYVYLTDGLGNYVLNNGKNYINGQQCRLIMHNGNWQKAEQKLSLYEFK

SEQ ID NO: 9294 - protein, 431 aa, unidentified
MPNKVYVINKHGRPLMPCSPAKARHLLDAGKAKVKKRTPFTIQLVYGSSGYTQEVILGVDAGSKTIGMSASTTKEELLSAEVKPRNDVVDLLSTRREFRRARRNRKTRYRKPRFDNRVRSKHKGWLAPSVEVKIQGHITAIRRVCGILPVSKVVVETAEFDLQLLKAIEKGKPVPQGEDYQQGEMYGHYNVRQYVLWRDNYTCQCCGAHATKKKEVRLHVHHLESRKVGGDAPDNQVTLCESCHEKLHKGLIAEKDFKKRKRRSTRDATFMGIMRKTLMQRLCSELPIPVVKTRGYITKATREKLLVLPKSHTNDALAIAQGKRGFNVGYLPEIAQIDKIYTIRPVRHHNRQLHKAAILKGGIRKSNQAGKYVFGYRLFDKVQFNGQDCFIWGRRTTGIFTIKTINGKMIKDGISFKKLKPVEKSTSYLIA

SEQ ID NO: 9295 - protein, 429 aa, unidentified
MTALEERLSKTEYIYVLGFDGKPQMPTRRKRHVLKLLKTGRARIAEDIPFTIRLTYRNAPVLQPVTLAEDPGRTNIGAAVLSPLGDLLFAAVIETRNKEIKKLMTDRQKSRQASRRGERKARQRLAKRYGSMVKSGMVMRKLPMYAADRFVTCKFIRNTQARFCNRKRCPDWITPTVQHLVQTHLNIIRKISRYLPVTDIAFEVNRFAFMHMENPEAIGVDFQNGPLKGYGDVKEAIRTQQHGKCLMCKKPIAHFHHIVPRSRGGSDTIQNLAGLCPECHTKVHKDTAFRKDFDEKKSGQLKKYGALSALNQAVPFICKKLLEEYGEEHVHFCRGLDTSLIRTALGFEKTKKDQMHEVDAYCVGLAALEVNEVETPAFDHTFQIRQFRRQEPVHHPSSDRPLLLPGKRKSCPEPETGFRAENNGSFPVV

SEQ ID NO: 9296 - protein, 442 aa, unidentified; identical to SEQ ID NO: 3333

SEQ ID NO: 9297 - protein, 400 aa, unidentified
MPTTPRKARLLLKQGKAKVVKREPFTIQLLYPTGETKQDIVLGVDAGSKKIGLSATTDKQELFSAEVELRNDIVGLLSTRRQNRRTRRNRLRYRKPRFLNRVSRKKKGWLAPSIEHKVNTHLNIISKLHQILPITKIIVEVASFDIQKIKNPDVSGKEYQQGEQLGFWNVREYVLWRDGHKCQGKNGCKNKILNVHHIESRKVGGDSPNNLITLCEECHTDYHNGKLKLNLKRGQPFKDATFMGIMRWSFYNKLKELYPDVKMTYGYITKNTRIQNNLPKEHRVDALCIAGNPTVKRLDNWYYIKKVRNQNRQLHKNTILKGGYRKANKAQKYVFGYQLFDKVKYKNQECFIFGRRSSGSFDIRKLDGTKLSAGVTYKKLELIERAKSYLIERRERLSSP

SEQ ID NO: 9298 - protein, 421 aa, unidentified; identical to SEQ ID NO: 5881

SEQ ID NO: 9299 - protein, 420 aa, unidentified
MQYVYVLNKHDEPLMPCSPRKARLLLKQKKACVIKRTPFTVKLLHGSAGYKQPVTLGVDAGSKHIGISATTEKHELYREEATPRNDVVDLLSARRAFRRSRRNRKTRYRAPRFNNRVHSKHKGWLAPSVEVKIQEHITLIKHVFRILPVTLVRVETAEFDTQRLKAMLEGKPLPVGTDYQLGEMYDEYNVRQYVLKRDNYTCQCCGAHSTKTKGVKLHVHHIETRRTGGNAPNNLITLCKACHKALHAEKVTLDGKKRGKPLKDAAFMGIMRKTLMERLRKELKIPVQGTYGYITKYLREKNGIPKSHTNDARCISKNPLAIPCDTCYYTKAVRHHNRQLHRATILKGGIRKANQAPYIVKGYRLWDKVAYNGTECFITGRRTSGYFALKELDGTVVSNSISYKKLRLLEAATNYITERK

SEQ ID NO: 9300 - protein, 406 aa, unidentified; identical to SEQ ID NO: 7406

SEQ ID NO: 9301 - protein, 456 aa, unidentified; identical to SEQ ID NO: 2706

SEQ ID NO: 9302 - protein, 442 aa, unidentified; identical to SEQ ID NO: 3234

SEQ ID NO: 9303 - protein, 470 aa, Anaerostipes sp.; identical to SEQ ID NO: 2825

SEQ ID NO: 9304 - protein, 434 aa, Mitsuokella sp.
MGFLTTWARRKILPKGKVAEMPKIKKYAFVLDAKRKQLDPTIEQNAWRLVRQYKARLVSKFPMIIQLNKVMDNPNNDEIRCGIDDGANHVGMALVQKCQTRNKVLFKGTIEQRKDVKHLLTVRRGYRRYHRYHKQYRPARFLNRASSRRSGRLMPSIIQRKQAILRVIDRLRQWVRIDGYWLEDVKIDIRALTDGYKPYRWQYQKSNRLDNNLRLAAIHRDGCKCVECGKTKTRFEVHHITPRKTGGADTISNLITLCPKCHAKTFGRESQFADRYYALIGSTGHVEGLDDAQRVMQGKHWFREQLQQRGSLVLTTGGNTANKREDWDIAKTHSNDAVCITDLKPENIDIEEWTIKPMRRKNKAGVDEVCGFHHRDYVTYTYRNGETHTGYVTAMYPDKNQLNFQSPTKHCKRVNALKARLLWRYDKIYWFKCA

SEQ ID NO: 9305 - protein, 536 aa, unidentified
VLRPRYQCPTRWYPSREQGSGNGCLSGEENTDLEQEVSGTLSKGDHSHPGEQDFCVPAITIQGGPAMSVFVVGLNGCRLMPTSERKARLLLKHGKASVYRKVPFTIKLNYKTGSTTQSGYLGIDTGSQHIGVSVVREDGAVLHKEEIGLRDSMSKRKLMQSRASSRRGRRHRKTRYRHPKWRPKAKRVYCEIPDRKRRHWKKKEITFTSKRPKGWLPPSLQSKTDHHIRWIKKLQDLLPEGYRLSIELGRFDPARLKDPEIHGELYQKGPQYDYENVRAYVLNRDRYTCQVCGKKGGKLHVHHILYRSYGATDDPQYMATVCSDCHNTENHQQGGILYQWMQKQKKFTRGLRDATFMNILRKRLIEAFPGATFTYGNITKADRERLILPKSHGNDATAIAIVKTGIMTVKDKEPVIYIQQVRRKKRSLHEKTPRKGRKEPNRKASRYDKNTKAVTVTKRKNKKKISITGCLFDRVELNGKKGWISGFTDKSCYVKDENDQYIRTSPKYKQVSLSKLKILHHCGNWAIGARRSLGKG

SEQ ID NO: 9306 - protein, 419 aa, unidentified
KYVMVYVLSQNGQPLMPTENHAKVRALLKHGKAKVIQRCPFTIQLLYESTTHTQKINLGIDAGSKTIGVSATTDSKVLYESEVVLRNDIVELLSGRRALRNSRRSRKTRYRKPRFDNRKKPDGWLAPSIRQKIETHVTVVGNVMKILPVTKIIVETASFDIQKIKNPEIEGEGYQHGEQLDFWNVREYVLFRDGHTGQCCKGKSKDNILNVHHIESRKTGGNAPNNLITLCETCHKAYHKGIITLPKEIHRGMRFRDAAFMGIMRWAFYDRLKELYNPLGAEVINTYGYITKNTRIEHGLPKEHYVDARCISDNPAAKPLDHYYFQKKVRCHNRQIHKNTILKGGIRKRNQASYEVKGFRLYDQVLWKGQKCFIFGRRSTGRMDLRLLDGTHVNASVGYKNLKLLSMRKNYLIEQRKAG

SEQ ID NO: 9307 - protein, 414 aa, unidentified; identical to SEQ ID NO: 4822

SEQ ID NO: 9308 - protein, 475 aa, unidentified
MVITLDKNKRPLGFMSERRCRILLEKKRAVLYRYFPTIVILKDVDARKLSGLSSYRIKIDPGAKYTGIAIVMDDTNEFMYAMQIEHRGEQIKKNLDTKRGARRNRRSRETGYRRPKWGNRCTAKEQRQSYDSRRDENWLPPSVKSTADNIISWIRRLCRWINITNCSIESVRFDTQLMENPEIEGVEYQQGTLYGYEVKEYLLEKYGHTCQYCGGKSNDPILEWEHMLPRSRGGSDRLKNASLACHNCNQDKGNHTLEEWQTILQDRIPKERGKQKELDQIRQKFVQQVMEGKTPVKGLRYAAWVNSSRRYSQRHLYLRFPELECSSGGRTKYNRNVLKYPKEHHYDALCVGEIPEDGFVDRTNGYYLYAKATGRGTRLRGQINQCGVIIRKWRDRSKTAFGFQTGDLVVADVPKDTKYKYKGHFSGRVMIRKSGSFDIRTLSGELVTVNAKFCRLLQNNSGYQMMIKRAIPLGN

SEQ ID NO: 9309 - protein, 544 aa, Streptomyces sp.; identical to SEQ ID NO: 8078

SEQ ID NO: 9310 - protein, 425 aa, unidentified
MFVHVISKDGQPLMPTSRFGKVRRLLKNKKAKVVRRCPFTIKLLYEPESLVVQEVVLGQDTGSKHVGTVCIANNKVLYQSQVQLRTNIKSKMDSRRQSRRFRRDRKTRYRKPRFLNRANSTKKDRLPPSVRHKVQAHIDEIEFCKKILPVSKIVLEVSQFDTVLMKNPALIDEKVKRWGYQEGFNYGYASRREAVLHRDNYTCQCCGKKHAKLEVHHIIYRSKGGTDDEKNLIALCKKCHDAVHAGILIITKVPKKLNLKYATHMSIIRSQLLKFYPEAIETFGFVTKENRNHLNLPKEHYIDACVIASGGIEFELADILYQKRRVAKQNRQLCKGVRGERKIPTGKIFGFKRFDLVKYLKELCFIKARRNSGCFTLMDINNNTIDFRDRGGKKEPSYKYLERVNARKSVLCIRKRIGGKCSFIY

SEQ ID NO: 9311 - protein, 512 aa, unidentified; identical to SEQ ID NO: 7421

SEQ ID NO: 9312 - protein, 442 aa, unidentified; identical to SEQ ID NO: 3333

SEQ ID NO: 9313 - protein, 425 aa, unidentified
MENTLKVFVLNMRGQPLMPCSPPKARKLLRAGKAVPVHRTPFVIQLTVPTGETKQPITLGVDAGYKHVGLSATTAKEELLASEVELRQDVTGLLSDRLALRRARRNRKTRHRAPRFANRVRSKHKGWLAPSVENRIQAHISRIEAVCRVLPITKIVIETASFDIQKIKNPEVEGTDYLQGEQLGFWNVREYVLFRDGHVCQACKGRSKDLILNVHHIESRKTGGDAPGNLITLCETCHKAYHAGKLKQFSPRRGASFRAETFMGIMRWTVFNRLRERHPELPVTNTYGYLTKHKRIVAGLPKTHCADAFCIAGVLDAKRRGEYLFQKQTRRHNRQIHKLTILKGGVRKRHQAPYLVHGFRLFDKVLCKGEVGFIFGRRSSGAFDVRRLNGTKISAGISYKKLSLLEKRKMFLTELRKEGRDSSRV

SEQ ID NO: 9314 - protein, 448 aa, unidentified
VTLGKDFDSSLEENSFFLAVNLLGKERDIMYVYVINKHGEPLMPCSSHKARTLLNNKKACVVKRTPFTIKLLHGSAGYKQPITLGVDAGSKHVGLSASTETHELYREEFAPRNDVVDLLSTRREFRRTRRNRKTRYRAPRFNNRVHSKHKGWLAPSVEVKIQEHITIIKHACQIIPVSLVRVETAEFDTQRLKAMLEDKPLPVGTDYQLGEMYDEYNVRQYVLKRDNYTCQCCGAHATKTKQVKLHVHHLESRKTGGNAPNNLITLCPTCHKAIHEGKKTLSNKKRGKPFRDAAFMGIMRKTLLMRLRKELSIPVQQTYGYITKMLREKNNLPKSHTNDALCIAKHPKAAPCENCYRSKAVRHHNRQIHKASILKGGIRKNNQAPYIVKGFRLWDKVRYDGQECFISGRRVTGYFALKKLDGTVVTNSGSYKKLRLLETTKNYLRERM

SEQ ID NO: 9315 - protein, 465 aa, unidentified; identical to SEQ ID NO: 3070

SEQ ID NO: 9316 - protein, 469 aa, unidentified
MNVFVVGLNGCRLMPVSERKARLLLDDGKASVYRKVPFTIKLNYKTGSTTQPGYLGIDTGSQHIGVSVVRKDGTVLHKEEISLRDSMTKRKLLEAKASLRRGRRYRKTRYRHPKWRPKTKRVYCEVPDKKGRHWQKQKNTFTSKRPEGWLPPSLQSKTDHHIRWIKKLQNFLPEGYRLSIELGRFDPARMKDPEIHGELYQKGPQYDYENVRAYVLDRDRYTCQVCKKKGGKLHVHHILYRSQGASDNPQYMVTVCSDCHTTENHLPGGILYQWMQEQKKFTRGLRDATFMNLLRKRLMKTFTDAVFTYGNITKVDREKLKLSKNRGNDATAIALVRTGVTSVKDEEPVLYIQQVRRKRSLHEETPRKGRKEPNRTAARNSKNTKAVTVTKRRGGKKVSVTACLFDRVELNGKKGWITGFTGKACRIVDTEGNYVAATDKYTQVNISSIRILHHTGNWVTGLKRNVGKR

SEQ ID NO: 9317 - protein, 406 aa, unidentified
MVYIQDIDGKPMMPTTRHGKVRRLLKDSKAVVVNTCPFTIKLMYKTSGYKQEIVLGVDAGTKHVGLSATTKSKELYSSEVILRSDIVELLSTRRESRRARRNRLRYRKPRFENRVKSKRLGWVAPSVRHRIDAHIRVIDNVCSILPVSRVIVEVAQFDTQKIKNPDISGDEYQEGDQLGFWNVREYILARDGHKCQHCKGKSKDPILNVHHIESRKTGGDSPSNLITLCETCHKEYHKGNIDLKVKRGKSLRDAAVMGIMKWKLYDELKSRCDNVSMTFGYITKYNRIKYGIEKSHTSDAFVISRNFNAKRIERQYLKRLIRRHNRQIHKMKILKGGKKKNNQAPFEVFGFRLFDKVLYNNEILFVYGRRKSGNFNIRDFNGENPKDVSHKKLKLIRGKRHLIILK

SEQ ID NO: 9318 - protein, 431 aa, unidentified
MPNKVYIINKHGRPLMPCSPAKARHLLDAGKAKVKKRTPFTIQLVYGSSGYTQEVILGVDAGSKTIGMSVSTTKEELLSAEVKPRNDVVDLLSTRREFRRARRNRKTRYRKPRFDNRVRSKHKGWLAPSVEVKIQEHITSIKRVCRILPVSKVVVETAEFDLQLLKAIADGKPVPQGEDYQQGEMYGHYNVRQYVLWRDGYTCKCCGAHTTKKKEVRLHVHHLESRKVGGDAPDNQVTLCESCHEKLHKGLIAEKDFKKRKRKSTRDATFMGIMRKTLMQRLCSELPIPVVKTRGYITKATREKLLVLPKSHTNDALAIAQGKRGFNVGYLPEIAQIDKIYTIRPVRHHNRQLHKATILKGGIRKSNQTEKYVFGYRLFDKVQFNGQDCFIFGRRTSGYFVVKTIDGKVIHNSASFKKLKLVERASNYLIA

SEQ ID NO: 9319 - protein, 428 aa, unidentified
LKVFVLNMRGQPLMPCSPAKARHLLKAGKAAVRRRTPFTIQLRIATGETKQSVTLGVDAGAKHVGLSAATEKEEVFASEVELRQDITGLLAARLSLRRDRRHRKTRYRAPRFLNRVRSKHKGWLAPSVENRIQAHMSRIDAICGLLPVTKIVIETASFDIQKIKHPDVEGTDYQQGDQLGFWNVREYVLFRDGHVCQHCHGYSKDKILNVHHLESRQTGGDAPNNLITLCETCHKACHAGKIKLKVKRGQSFRAEAFMGIMRWTLLDRMRKAHSGLPVENTYGYLTKNTRITLGLPKTHCVDAYCIAGNLKAVRRGVCLHQRQVRKHNRQIHKCTVLSKTLKDGTKIGYRKLNQTPHLVKNFRLFDKVRCLGQTGFIFGRRSSGYFDVRRLDGVKLSSGISYRKLTLLEKRSTYLTELRKEDGASSPV

SEQ ID NO: 9320 - protein, 424 aa, unidentified; identical to SEQ ID NO: 4669

SEQ ID NO: 9321 - protein, 396 aa, unidentified
VVRRTPFTIQLTIATGESKQPVSLGVDAGYKHVGLSASTEKAELYASEVELRKDITDLLSARRALRQSRRNRKTRYRAPRFDNRIRTKRKGWLAPSVENRINAHLSRIEAVLRLLPITKITVETASFDMQRLKNPDISGKEYQEGEQLGFWNVREYVLFRDGHVCRHCHGRSKDPVLNVHHLESRRTGSDSPDNLITLCVTCHKALHRGEITLKAKRGQSFRAQAFMGIMRREVLNRLKASYPELKVHETYGYLTKHARIANGIVKSHGADAFCIAGNLGAERLGEFFFQKQTRRNNRQIHKLSILKGGIRKRNQAPFEAKGFRLFDKVACQGEEGFIFGRRSSGSFDVRKLDGTRISVGISCKKLRLLEKRRTYLTEIRKEEALPPLPEGRGLRA

SEQ ID NO: 9322 - protein, 441 aa, Sulfobacillus sp.; identical to SEQ ID NO: 4231

SEQ ID NO: 9323 - protein, 512 aa, unidentified
MSTVYVLNKDGKPLMPTTRCGHIRYLLKEKKARVVASKPFTIQLLYETNDVVQPLYLGIDPGRTNIGVAVVKTDGTAVFTAHLETRNKEIPKLMKKRKDSRRARRTNGRRCRRQRRAKANDTISKKCVKQATAQNGSVSKRAKEIGVIKRHLPGCEKEILCIGIKNKEAKFNNRTRPEGWLTPTANQLLQTHINLVKKIRKFLPISDVVLEINKFAFMQLDDPNIQKWQYQQGPLYQKASLEEAVSEMQEHHCLFCKKPIAHYHHVVPQSENGSDTIGNIVGLCTKHHDLVHKDTVWQKKLAKKKTGLNKKYGAQSVLNQIIPALTERLNTLFPKHFFVTTGKSTYDYRAAHGVSKDHWLDAYCIACSVLPNDVCDSGINNRVPYELKQFRRHDRRALHKANMSRVYTLNDKAVATNRHKAIKQTTDSLEEFRQNHPDDVYKLKVKEHHPEYRNSKRNFPGCVFLVGKHTHVMQGTSGSHNGQADGYYDTNGNSYSSGKCKFVAKNEGIVFT

SEQ ID NO: 9324 - protein, 446 aa, Pseudomonas sp.
VAVYVLDKTGTPLMPCSEKRARLLLERGRARIHRQVPFVIRLVDRRQADSALQSLTLKFDPGSKFTGIALVRQKGQRVSVLSLMELAHRGAAIRQAMQQRAAFRRRRRGQNLRHRTPRFDNRTRPEGWLPPSLRHRLDTTLGWVGRMRNWAPISDLAVERVKFDMQAIQNPEISGVQYQQGELAGYEVREYLLEKWGRCCAYCDAENTPLEIEHIVPRSAGGSDRVPNLTLACRPCNQRKGNQPVEVFLKARPELLARIKAKAKVPLRDAAAVNATRNALFRALLDTGLSVTTGTGAQTKFNRRCLGLPKTHALDAASVGEIRAIEHWQRPTLAIKATGRGEYQRTRLTAHGFPRGYLTRQKRHFGFQTGDQVRAEVPTGKKAGTHQGRVAVRKTGSFNIQTPDGVVQGIHHRHCTLIQRADGYAYSDTPTDSAQPQKEAARAGAR

SEQ ID NO: 9325 - protein, 421 aa, unidentified; identical to SEQ ID NO: 4238

SEQ ID NO: 9326 - protein, 431 aa, unidentified
MSYVFVIDQEKRPLDPVHPGRARKLLSSGKAAVYRRFPFVLILKHPVSEAHPQPLRLKIDPGSKTTGLAVLNDTSGQVLWAAELVHRGEEVHQALQKRAGVRRGRRSRHTRYRAARFSNRRRKRGWLAPSLCSRMQNVQTWTRRLMRWCPLGAISYEAVRFDTQAIQNPEIKGVAYQHGTLAGLEVKEYLLLKWRHKCVYCQKGDIPLEVEHIVPKRRGGSDRITNLTLACEACNQQKGSQTAQAFGFPHLQAQALQPLKDAAAVNSTRWALYERLKATGLPIEVSTGGQTKWNRKQRGIPKSHWLDAVCVGPSTPERVQWQHVIPLLITARGRQCRQLCNVDGWGFPRSRPKGPSKVFGFQTGDMVQAVVTRGKRMGTYVGRVAIKTDGYFKIIGTHGMVEGIHAGYCSPLHRVDGYEYQKGSAALPPQM

SEQ ID NO: 9327 - protein, 517 aa, Streptosporangium sp.; identical to SEQ ID NO: 3078

SEQ ID NO: 9328 - protein, 429 aa, unidentified
MSKQNYVLVLDGHKKPLSPCRPVTARKLLKAKKAAVFRLFPFTIILKKVVEETPEPMTIKLDPGSQTTGIALIQGDKVVWGAELTHRGQGIKASLESRRSLRRNRRNRKTRYRQPRFLNRKRSKGWLAPSLQHRVETTLTWVRKLIKLAPIDSIVQELVRFDLQKLENPEVSGIEYQQGQLAGYEVREYLLEKWDRKCAYCEVENVPFEVEHIHPKSKGGTDRISNLAIACHNCNQEKGNRDIRDFLSGKPDLLNRILKQAKSPLKDATAVNSTRWALFNKLKEMGLPVLTGSGGLTKFNRTRLNLPKTHWIDASCVGQIESLTLVTNQPILIKATGRGTRQMCGTNQYGFPTRHRSRTQIHKGFQTGDIVTATVVAGKKVGFYLGRVLCRASGSFDIATQNGRVTGISHKYCQSIHKKDGYSYGFQKH

SEQ ID NO: 9329 - protein, 420 aa, unidentified
MQYVYVLNKHDEPLMPCSPRKARLLLKQKKACVVKRTPFTIKLLYGSTGYKQPITLGVDAGSKHIGISAATEKYELYREEATPRNDVVDLLSARRAFRRNRRNRKTRYRAPRFNNRVHSKHKGWLAPSVEVKIQEHITLIKRVCRILPVTLVRVETAEFDTQRLKAMLEGKPLPVGTDYQLGEMYDEYNVRQYVLKRDKYTCQCCGAHPTKTKAVKLHVHHIETRRTGGNAPNNLITLCTACHKALHAGKVTLNGKKRGKPLKDAAFMGIMRKTLMERLLKELKIPVQETYGYITKYLREKHSIPKSHTNDARCISKNPLAIPCDTCYYTKAIRRHNRQLHKATILKGGIRKANQAPYTVKGYRLWDKVSCNGTECFITGRRTSGYFALKKLDGTVISNSISYKKLRLLEVATNYITERK

SEQ ID NO: 9330 - protein, 465 aa, unidentified; identical to SEQ ID NO: 8068

SEQ ID NO: 9331 - protein, 434 aa, unidentified; identical to SEQ ID NO: 7384

SEQ ID NO: 9332 - protein, 421 aa, unidentified; identical to SEQ ID NO: 2610

SEQ ID NO: 9333 - protein, 419 aa, unidentified; identical to SEQ ID NO: 6140

SEQ ID NO: 9334 - protein, 456 aa, unidentified
MSTCVCVLSNSGERLMPTFRLGKVRRLLKDGKAKIVKHHPFTIQLLYDSKTNTQPIEICEDEGYNYIGISVKSESHEYVSAQYDTLQDEKEHHDDCRKYRRTRRNRLRYRKPRFDNRKRSEGWLAPSLEHKKQLNIRLIERYVSVIPITRATVEVGSFDTMLLQAIQKGESKPEGVDYQKGPRYNLATLREAVFYRDNYTCQVCGRKIADGAILHMHHMFYWKGRHGYQLDELVTACEKCHTPANHQKGGKLFGFGENKEFANLSGAAFMNAVRWQIVNALYATYGKEFVTITYGAMTKEKRIILGIEKTHNNDAYAMGDYHPAHRCVFRHYQKRRRNNRVLEKFYDATYIDARTGNKAKGKELFNGRINRNHKKDSENFHKNRSKKVSKGRRSIRRQRYAIQPYDTVRLEGKTYITSGCHNKGTRLLIPANGKSKSVAISKVQVVCHAGAWIQII

SEQ ID NO: 9335 - protein, 456 aa, unidentified
MTNIYILDINGKPLMPCHNGAFVRCRLKNKEAKVVKRKPFTVQLMYEVKNNYKQDIYLGVDAGYKYIGFSASTSNQELFSGELEQDCGMVERNKERRMYRRQRRSRLRYRKARFNNRKAGKPQGWTAPSLQRKRDTHLRFIMMLSSIMPITDINVEIGLFDPALMKATAEGRTIKGADYQHGEAEGFENMKSYIRYRDSYTCQNPNCKCHKMKKEDREKLKLHVHHIGYYKHDRSSRPGNLITLCELSHTPETHQPGNLLYGWKPKMKSLRETAFMNTVRKEIVDTLKAVYPDKTVRYTYGYKTNLTRRDWHVPKSHHDDAFCIAGQYSLKRAETVYFNQQRRNNRSLEIFHDAKYIDSRDGKRKTGKELYCGRNTRNKNFNKENLHQYRSKKVSRGKRNIRKQHYKYQPNDIVVFEGQKYKIRGSHCKGSRVILDTKKSVSVKKIHILKHCSGIC

SEQ ID NO: 9336 - protein, 277 aa, unidentified
MPNKVYVINKHGRPLMPCSPAKARHLLDEGKAKVKKRTPFTIQLVYGSSGYTQEVILGVDAGSKTIGMSASTTKEELLSAEVKPRNDVVDLLSARREFRRARRNRKTRYRKPRFDNRVRSKHKGWLAPSVEVKIQEHITSIKRVCRILPVSKVVIETAEFDLQMLKTIADGKPVPQGEDYQKGEMYGHYNVRQYVLWRDNYTCQCCGAHATKKKEVRLHVHHLESRKTGGDAPDNLIPLCESCHEKLHKGVIAEGDCKSVSVVPHGMPHSWASCGRL

SEQ ID NO: 9337 - protein, 501 aa, unidentified
MKGGGIMPEVNIIVQNADGSPLMPTHHYGRVKRMLKVGKARIVSLKPFAIRLTYQIVNPGLDTVTLGIDPGRTNIGLSLIDSKGRNLGSYLVETDNRDIPHNVSNKKKHRQASRWGERKRRQRRAVAHDNTLKITELYRILPGCKKAIKCKGIKNSESRFNNRKRSEGWLTPTAKHLLNTHLRIVEIMSRYYPIANVAIEINRFDFAKMENPGIRNWEYQKGRLFGFKDRNDAVFHDQDGKCLLCGKRPIEHYHHIVPRGRGSESMDNIAGLCKQCHDLVHKDIHAQEQLKAKKQGLLKKHHAVSVINQIMPSLLKELSSRYPTYTTTGWQTQKMRAFYGYPQKEPDDGTHYIDAWLIAVDAMGITPAEIPAFEHVGTIMQFRRHDRARIHYQHERAYYLGKTKVCTNRHKRTGQTKTISLAEYRVLHPHEVSKLTVKKSTRGYNNMKRIMPGALVRWHGKILTVSGMHNTRYRFVETNICKEAPASECTIIRHNNGWAFI

SEQ ID NO: 9338 - protein, 431 aa, unidentified
MPNKVYVINKHGRPLMPCSPAKARHLLDEGKAKVKKRTPFTIQLVYGSSGYTQEVILGVDAGSKTIGMSASTKKEEVFAADVTPRNDVVDLMSTRREFRRARRNRKTRYRKPRFDNRVRSKHKGWLAPSVEVKIQEHITAIRRVCGILPVSKVVVETAEFDLQLLKAIEEGKPVPQGEDYQKGEMYGHYNVRQYVLWRDDYTCQCCGAHATKKKEVRLHVHHLESRKVGGDAPDNQVTLCESCHEKLHKGLIAEKDFKKRKRRSTRDATFMGIMRKTLMQRLCSELPIPVVKTRGYITKATREKLLVLPKSHTNDALAIAQGKRGFNVGYLPEIAQIDKIYTIRPVRHHNRQLHKATILKGGIRKSNQTEKYVFGYRLFDKVQFNGQDCFIWGRRTTGIFTIKTINGKMIKDGISFKKLKLVEKSASYLIA

SEQ ID NO: 9339 - protein, 423 aa, unidentified; identical to SEQ ID NO: 3576

SEQ ID NO: 9340 - protein, 518 aa, unidentified; identical to SEQ ID NO: 7282

SEQ ID NO: 9341 - protein, 442 aa, unidentified; identical to SEQ ID NO: 4418

SEQ ID NO: 9342 - protein, 402 aa, unidentified
LRVFVRNKRGKPLMPCSPAKARLLLKEKKAIVKRRTPFTIQLTIATGETKQPVSLGVDAGYKHVGLSASTEKAELYASEVELRQDITDLLSARRALRLSRRNRKTRYRAPRFDNRIRTKRKGWLAPSVENRINAHLSRIEAVLRLMPVTKITVETASFDMQLLKNPDIAGKEYQEGEQLGFWNVREYVLFRDRHVCQHCYGRSKDPVLNVHHLESRRTGGDSPGNLITLCETCHKALHHGEITLKTKRGQSFRAEAFMGIMRWEVLNRLKVSHPELEVNNTYGYRTKHVRIANGIAKSHCADAFCIAGNLGAKRLGEFFFQKQTRRNHRQIHKLSILKGGIRKRNQAPFEVKGFRLFDKVACKGEEGFIFGRRSSGYFDVRKLDGTRISAGISYKKLHLLEK

SEQ ID NO: 9343 - protein, 430 aa, unidentified
MPKVYVLNRHGRPLMPCTPAKARHLLDAGKAKVRHRTPFTIQLLYGSTGYTQEVILGVDAGSKTIGLSAATETEELFSAEVKPRNDVVELMSARRQFRRARRNRTTRYRKPRFDNRVRSKHKGWLAPSVEVKIQEHMTAIRRACAILPVSKVVVETAEFDLQLLKAVAEGKPVPQGEDYQKGEMYGHYNVRQYVLWRDSYTCCICGVHGSVRKGVPLHVHHLESRRVGGDAPDNLVTLCTACHDKLHKGIIMAADIKKRKRRSTRDATFMGIMRMTLLRRLREQLPVPVVETRGYITKATRENLLVLPKSHTNDALAIAHGPQGFRAEHLPNIRQADRLYTIRPVRHHNRQLHKATILKGGVRKTNQAEKYICGFRLYDKVLYNGIECFVWGRRTSGSFLLRQLNGEKVKDGVSYKHLKLLERSQSYLVA

SEQ ID NO: 9344 - protein, 414 aa, unidentified
LMPCSPAKARLLLKEKKAVVVRRTPFTIQLTIATGETKQPVSLGVDAGYEHVGLSASTEKAELYASEVELRQDVSDLLSARRALRQSRRNRKTRYRAPRFDNRIRTKRKGWLAPSVENRINAHLSRIETVLRLLPVTKITVETASFDMQLLKNPDIAEKEYQEGEQLGFWNVREYVLFRDGHVCQHCHGRSKDPVLNVHHLESRRTGGDSPGNLITLCETCHKALHRGGITLKAKRGQSFRAEAFMGIMRWEVLNRLKASHPELEVNNTYGYWTKHARIANGIAKSHCADAFCIAGNLGAERLGEFLFQKQTRRNNRQIHKLSILKGGRRKRNQASFEVKGFRLFDKVACKGEEIFIFSRRSSGYFDVRKLDGTRISAGISYKKLRLLEKRRTYLTEIRKEAFPPLPEGRSLRA

SEQ ID NO: 9345 - protein, 442 aa, unidentified; identical to SEQ ID NO: 2903

SEQ ID NO: 9346 - protein, 464 aa, Polaromonas sp.
MAVFVLDRSARPLMPCTEKRARLLLERGRARVHKVMPFTIRVVDLEAEDCEFQALRVKLDPGSKTTGIALVRETAEKNGVAVINLFELMHRGKQISEALTARRGHRRMRRSHLRYRAPRFLNRGNKKSGWLAPSLQHRVDTTLAWVNRLERLAPVSAISTELVRFDMQALENPDIEGAQYQQGTLAGYEVREYLLEKWGRTCAYCGARNVPLQIEHIHPKSKSGSDRIGNLTLACQCCNQKKAALPVEVYLARKPELFKRILGQAKRPLKDAAAVNSTRWALVNALKTTGLVVETASGGRTKFNRIQLGIPKTHALDAACVGYVNSITGWRKPTLCLKAMGRGSYQRTRLDKYGCARGYLTRSKSIQGFQTGDMVKAEVTQGKKTGIYTGRVAVRASGSFNIQTRHGLVQGVSHRYCTVVQRGDGYGYSLVAKTDATGTSPKQGDALHPALYLPGLKAGVSRAN

SEQ ID NO: 9347 - protein, 422 aa, unidentified
MSLTYVIVKNGQPLMPTERSGKVYRLLKNKQAKVVRRCPFTIKLLYEPESLVVQEVVLGQDTGSKHIGTACVGNNKVLYQSQIRLRDDIKSNMDGRRQARRFRRNRKTRYRKPRFLNRKNSTKLDRLPPSVKHKVQAHINEIEFCKKVLPISKIVLEVSQFDTYLIKNPSLISEKVRHWGYQKGFNYEWSSRREAILNRDNYTCQICGKKNTRLEVHHIIFRSQGGTNDENNLITLCSECHSDIHNEKIVLTKKPKKLNLKYATHMSIIRSQLLKVYSEAIETFGFVTKTNRENLSLPKDHYIDACIIASGGKIFELNDIIYRKRRVAKGDYRLTKGVRCEQKIPVGKIQGFRKFDKVKYLGKEYFIKGRMSSEFAVLMDIFNNKIDFSFMPKGWKTPKLSNLERISSRSSCICINQKSFQA

SEQ ID NO: 9348 - protein, 406 aa, unidentified; identical to SEQ ID NO: 4271

SEQ ID NO: 9349 - protein, 374 aa, unidentified
MVIQLMKEIPEKEICQDEIRCGIDDGGLHVGIALVQKCKTKNKVVFKGTMEQRNDVKHLMEVRRGYRRYHRYHKRYRQARFDNRKSSKREGRIAPSILQKRQATIRVIHWLNKWINITNYWLEDVSVDIRVLTDGYQSYRWQYQKSNRLDENIRKAAILRDGGKCMECGKSNCRLEVHHIKPRRRNGSNTLDNLITLCESCHQKTEGQEELYMDRYFSLLKSSDNKNLNYAQHVMIGKMWLRKQLSGLGVLYLTSGGDTANKRIDWNIEKSHANDAVCITDLQPDTCDVKEWTMKPMRRQSKAKTDHVLGIHHRDLVEYTFKNGETHRGYVTALYPEQKAINFQSPTKHCKKVNARKCKLLWKYSKIYWFENAS

SEQ ID NO: 9350 - protein, 416 aa, unidentified
MVYVLSKTGQPLMPTENHAKVRVLLKQQKAKIVHRCPFTIQLLYDSTNYTQPVSLGIDAGSRHIGISATTETKVLYEADVTLRNDIVNLLSTRREARRPRRSRKTRYRKPRFNNRTRKDGWLAPSVRQKVDTHLTTVRKVTEILPVNSITVETASFDIQKIKNLNIVSTDYQHGEQFDFWNVREYILFRDGHKCQCCKGKSKDPVLNVHHIESRKTGGNAPNNLITLCETCHKGYHNGTVSLPKNIRRGMKFNDAAFMGIMRLAFFNKVKETYEPLGIMVNMTYGYITKNTRIEHNLPKDHFIDARCISGHPDATSDGTVFYQKKVRCHNRQIHKQKIFKGGIRKRNQAPYEVKGFRLYDEVLWKGQKCFIFGRRSTGRMDLRLLDGTHINASVGYKNLKLLRKRSNYLTEQRKVG

SEQ ID NO: 9351 - protein, 442 aa, unidentified; identical to SEQ ID NO: 8269

SEQ ID NO: 9352 - protein, 376 aa, unidentified
PVSLGVDAGYKHVGLSASTEKAELYASEVELRQDITDLLSARRALRQSRRNCKTRYRAPRFDNRIRTKRKGWLAPSVENRINAHLSRIEAVLRLLPVTKITVETASFDLQLLKNPDISGKEYQEGEQLGFWNIREYVLCRDGHVCQHCYGRSKDPVLNVHHLESRRTGGDSPGNLITLCETCHKALHRGEITLKAKRGQSFRAEAFMGIMRWEVLNRLKASHPELEVNNTYGYRTKHARIANDIAKSHCADAFCIAGNLGAERLGEFFFQKQTRRNNRQIHKLSILKGGIRKRNQAPFEVNGFRLFDKVACQGEEGFIFGRRSSGFFDVRKLDGTRISAGISYKKLHLLEKRRTYLTEIRKEEALLALPEGRSLRT

SEQ ID NO: 9353 - protein, 466 aa, unidentified; identical to SEQ ID NO: 4047

SEQ ID NO: 9354 - protein, 515 aa, unidentified
MTALEERLSKTEYIYVLGFDGKPQMPTRRKRHVLKLLKTGRARIAEDIPFTIRLTYRNAPVLQPVTLAEDPGRTNIGAAVLSPLGDLLFAAVIETRNKEIKKLMADRKKSRQASRRGERKARQRLAKRYGSMVKSGMVMRKLPMYAADKFVTCKFIRNTQARFCNRKRCPDWITPTVQHLVQTHLNIIRKISRYLPVTDIAFEVSRFAFMHMENPKAMGVDFQNGPLKGYGDVKEAIRTQQHGKCLMCKKPIAHFHHIVPRSRGGSDTIQNLAGLCTECHTKVHTDTAFRKDFDEKKSGQLKKYGALSALNQAVPFICKKLLEEYGEEHVHFCRGLDTSLIRTALGFEKTKKNQMHEVDAYCIGLAALEVNEVETPAFDHTFQIRQFRRQDRSIIHHQTGRSYYQGKEKVAQNRKPGFEQKTTALSQWYEEQVRIHGEKEAEKLRSQLMVEKSCRHYNDMDRFLPGAVFLYEGKRYVLSGRITNGKYLRACGQGMKNFPAAECTFIRHNAGLVFI

SEQ ID NO: 9355 - protein, 453 aa, Erysipelotrichaceae sp.
MSVAVLSSTGRKLMPTSNYRARKLLKSHRAKIECYRPIFTIRLTDREEGNTQPIEYACDTGYQHIGVSIKSEKHEFVHAQYDMLSNETERHNDCRKCRRTRRNRLRYRKPRFDNRSKKNKEMAPSLRHRKENQIRLFESFCKVMPITSATFEMGKFDTQLLQAIADGKSLPEGKDYQRGSKYLYQTEREAVFGRDHYTCQVCGKSVKDGVILHTHHIGFWKGYRSNRISNLLTVCEHCHTAKNHQPGGKLWGLEPKSTNLAPATYMSTVRWAMYRDLVLTHPELDIYFQYGAKTAVTRKSLHLAKTHANDAYCIGSLHPKHRTAELVYQKKRRNNRILAKFYDAKYIDIRDGEKKSGSALSCGRTNRRESRRSDKNQRIYRGKKCSSGRTSVRKKRYSYQPGDAILFRSQRFTVNGAHCNGTRVILNTGKSVKMADLTCIKMEGGWRFLPAQA

SEQ ID NO: 9356 - protein, 462 aa, unidentified
MSVLVIGRNGRALMPTNPRKARLLLKKKTASVVCRHPFTIQLLYKTGCATQEGCIGIDTGSQHIGVGITCGDRVILKDEHALRSSMEKRSLLATRTVMRRGRRYRKVRYRKPKWRHHTKRMYFEKANRRGQHWRKVKTTTQSPRLKGWLPPSLQSKCDHHFRIIDRYLKYLPDPITRNLVIEAGRFDMARMNDPTIHGEMYQRGPMYDAENLRAYIFARDNYQCACCKAKAGTTRKADGTTVKLVAHHILFRSRGATDNPKYIISVCDHCHTTKAHQPGGILYSWMENNKKVARGLRDATFMNILRKRLFARYPQAAFTYGNITAADRKQLRLPKSHANDAVAISLFGKEASTVKNICQTMHYKQIRKSKRSLHEAIPRKGRKNPNTKAVRNKKNTTQVNGFKLWDSVLADGKKLFICSFTGTSAYLIDKNGCYISQPGKTYKQWPLSKLKRLHPNGNWLMA

SEQ ID NO: 9357 - protein, 434 aa, Lactobacillus sp.; identical to SEQ ID NO: 2383

SEQ ID NO: 9358 - protein, 477 aa, unidentified
MIIALDKNKRPLGFLTERRCRILMERKRAVLYRVFPTVVILMDMDVRKLRDLPSYRIKIDPGSKYTGIAIVRNDTDELVYAMQIEHRGDAVRAGLQKRKMARRNRRSRETGYRRAKWGNRCLSDGDKKSYNSSRKDGWLPPSILSVADNVLTWVQRLSRWINITDCSLEAVRFDTQLLENPNIKGEEYQHGTLFGYEIREYLLEKFGHTCQYCGGKSGDSVLEWEHIHPKSRGGSDRVKNAILSCSSCNRDKDNQTLEEWIGQIRSRVSREKGKRKELDSGRIERIQKVIDGKPEGQPMRYATWVSSSRRYLEKHLFQIFRDVECSSGGRTKYNRIRLGYSKEHHYDALCVGTVPEKGYHDRTNGYYLYAKATGRGTRLRGAVNQCGVIITKWTSRKKNFFGFQTGDIVVAEVPHKIPRPYKYEGRFVGRVMVRASGSFDIRTTDGKLATVKAGFCRLLQANSGCAYSMERTIPLDH

SEQ ID NO: 9359 - protein, 418 aa, unidentified; identical to SEQ ID NO: 6784

SEQ ID NO: 9360 - protein, 426 aa, unidentified; identical to SEQ ID NO: 3177

SEQ ID NO: 9361 - protein, 442 aa, Deinococcus sp.; identical to SEQ ID NO: 5259

SEQ ID NO: 9362 - protein, 470 aa, unidentified; identical to SEQ ID NO: 2825

SEQ ID NO: 9363 - protein, 414 aa, unidentified; identical to SEQ ID NO: 4264

SEQ ID NO: 9364 - protein, 462 aa, unidentified
MSVLVIGQNGRALMPTTTRKARILLKENKASVVCRHPFTIHLWYKTGCATQEGSIGIDTGSQHIGVGVTCGDKVILKDEHELRSSMEKRSLMETRATMRRGRRYRKVRYRKPKWRHHTKRMYFEKANRKGQHWRKVKTTTQSPRPERWLPPSLQSKCDHHFRIIDRYLKYLPDSITKNLVIEVGRFDMAHMNDPTIHGEMYQRGPMYDTENLRAYIFARDGYKCACCKAKAGSIRKKDGTSVKLVAHHIQFRSRGATDNPKYMISVCDHCHTTKAHQLGGILYSWMETNKKVTRGLRDATFMNILRRRLFDGYPQAAFTYGNITAVDRKRLLLPKSHANDAVAISLFGKDVSVINATCQTLRYKQVRKSKRSLHEATPRKGRKEPNTKAIRNKKNTTHVNGFKLWDSVLVNGQKLFICGFTGSSAYLVDQDGHYVSPPGKTYKQWTLSKLSRLHPNGNWLMA

SEQ ID NO: 9365 - protein, 529 aa, unidentified; identical to SEQ ID NO: 8434

SEQ ID NO: 9366 - protein, 451 aa, unidentified; identical to SEQ ID NO: 5203

SEQ ID NO: 9367 - protein, 434 aa, unidentified
MQRKGENPMVFVLDTNKRPLAPCHEAVARKLLKQGKAGIYRRFPFTIILKKSVDESENETTYRLKIDYGSRHTGLAILRGQEVVWLGQLDHRTDIKERIDKRRAFRRARRNRKTRYRKPRFLNRKRKEGWLPSSLESRVQNIQTWVNRLKKLCPIGYISYENAKFDTQLMRNPEINGVEYQQGTLQGYEVREYLLEKFGRKCCYCGKENVPLEVEHIIPKSRGGTDRVDNLCLACHDCNQRKGSKTAEEFGYSHIQEMVKKTLKDASVVNATRWKVYEVLKQTGLDVECGTGARTKMNRIRLDLPKTHYFDACCVGESTTNHLYFKTKEVLFIKAKGRGSRSRTNLDRYGFPRGYLARQKFFFGFQTGDMVKAVVPRGKYQGVWFGEVACRKTGSFDIKGKDGKRIAQGINYRYVQVIQRFDGYAYGKGVAELA

SEQ ID NO: 9368 - protein, 464 aa, unidentified; identical to SEQ ID NO: 6574

SEQ ID NO: 9369 - protein, 430 aa, unidentified; identical to SEQ ID NO: 3252

SEQ ID NO: 9370 - protein, 428 aa, Enterococcus sp.; identical to SEQ ID NO: 4335

SEQ ID NO: 9371 - protein, 423 aa, unidentified; identical to SEQ ID NO: 5734

SEQ ID NO: 9372 - protein, 416 aa, unidentified
MVYVLDKNGQPLMPTDRHRKVRLMLQSGQAKVIKRCPFTIQLNYDSGHQTQEISLGIDAGSKHIGVSTTTKIKELYEVDVELRNDIVDLLSSRRELRRGRRNRKTRYRQAKFNNRRRGNGWLAPSIRQKIGTHLTVVENICKMLPISRIMVETASFDIQKIKNPDIQGAEYQQGDQLEFWNVREYVLFRDGHTCQCCKGKSKDKILNVHHIESRKTGGNAPNNLITLCETCHTGYHKGTVQLPKAIKRGMRFKDAAFMGIMRWAFYEALKQQYEPVGTPVHNTYGYITKHTRIEHNLPKEHYVDARCISGNPDAFPSGEYYYQKKVRCHNRQIHKLTILKGGIRKQNQATYLVKGYRLFDKVSYQGKGYFVFGRRQSGFFDIRTLSGEKVNKGSLNCKKLKFIATRTYYLTERRAV

SEQ ID NO: 9373 - protein, 456 aa, unidentified; identical to SEQ ID NO: 4017

SEQ ID NO: 9374 - protein, 512 aa, unidentified
MPTVYVLNKDGKPLMPTTRCMHVRHLLKEQKAQAVASKPFTIQLLYETDDVVQPLYLGIDPGRTNIGVAVVKTDGTAVFTAHLETRNKEIPKLMQGRKKARRARRTNGRRCRRQRRAKANGTISKKCVKQTTAQNGSVSKRAKEIGVIKRHLPGCEKEILCIGIKNKEAKFNNRTRPEGWLTPTANQLLQTHINLVKKIQKFLPISDVVLEANKFAFMQLDNPNIQKWQYQQGPLYQKANLKEAVSEMQEHHCLFCKKPIAHYHHVVPQSENGSNIIGNIVGLCTKHHDLVHKDAAWQEKLAKKKTGLNKKYGALSVLNQIIPALTKELSSLFPKHFFATDGKSTYDYRTAHGVSKDHWLDAYCIACSVLPNDVCDSNINSHVPYELKQFRRHDRRVLHKANMSRVYTLNGKTVATNRHKAIKQTTDSLEEFRQSHPGDVCKLKVKEHHPAYRNLNRNYPGSVFLVDGQVHVMQGVSGSHNGKADGYYNTNGNAYPYYKCKFVVKNEGIVFA

SEQ ID NO: 9375 - protein, 423 aa, unidentified
MSNHVFVLDTNRKPLTPCQPGVARSLLNAGKASVFRRYPFTIILNKEVDANPEPLELKLDPGSKVSGMALKQGNRIIFAAELQHRGQQIVEALQSRRQLRRSRRNRKTRYRPARFLNRTRPQGWLAPSLQHRVDTLMTWVNRFRRLAPVGRITQELVRFDLQLMENPDISGVEYQQGALQGYEVREYLLEKWDRTCAYCGVPHVPLEVEHIQPQSKGGSDRVSNLTIACHSCNQAKGNGDIRDFLSGQPDVLSRLLGQAKSPLKDAAAVNSTRWALFKALKATGLRVTTGTGGQTKFNRLRLNLPKAHWLDAACVGDVKSLEVMTSKPLLIIAKGHGTRQMCGTDKYGFPTRHRSRIQVHKGFRTGNIVAATVTEGKKIGSYVGRVLCRASGRFDITTASVRVAGISHKYCKPIHRKDGYAYA

SEQ ID NO: 9376 - protein, 415 aa, Eubacterium sp.; identical to SEQ ID NO: 6925

SEQ ID NO: 9377 - protein, 477 aa, Polaromonas sp.
MAVFVLDRGGQPVMPCSEKRARLLLQSKRARVHRVMPFTIRLIDRSQTDCLLQPLRLKLDPGSRVTGLAVVREKPNTPGAKNAPAFEIAVINLFELVHRGRQISEALTARRQMRRRRRGNLRYRAPRGLNRGNKQKGWLAPSLQHRVDTTLAWVARLRRLAPITALSSELVRFDMQQLANPQIEGAEYQQGTLAGYEVREYLLEKWSRTCAYCDAQNTPLQIEHIEPRARGGSHRISNLCLACGPCNQKKAARTLQDFLKKDPARLARILAQAKKPLRDAAAVNATRWALAEALKATSLPLELASGGQTKFNRCTLGMPKTHALDAACVGRVDAIAGWQNHASATLTIKAMGRGSYQRTRLDGFGFPRGYLMREKSVHGFQTGDLVKAVVPKGKKAGTHVGRVAIRKTGSFNITTARGVVQGIGHKNCRVVQRNDGYGYFFNRAQHTGCEQAGPGATDALHPALYLPGLNPGVSRAS

SEQ ID NO: 9378 - protein, 341 aa, unidentified
VLCALRYIGIYRRTRRNRLRYRKPRFNNRISNKKEGWFAPSLKNKADQHIMLIQRLATVAPIKDIYLEVGSFDTQLLDAIAKGLPIQEGTDYQQGALYGEETLRKAVFQRDNYTCQVCGRTIKDGAKLHTHHFLYWKGRHGNRLDELCTVCEKCHTSANHQKGGKLYGWGADKKFKSYVSAAFMNTVRWYIVNQVKDLVSDTEVHTTYGAATKLARKDFQFEKSHVNDAYAMGKLHPNIRCETEYYKKVRRNNRCLEKFYDAKYIDIRDGKKKSGKELGCQRINRREPRMSEKNLRIYHGQKVSKGRRSIRKQRYSIRPGDVVLFNGQKYISKGCGSYGTQ

SEQ ID NO: 9379 - protein, 413 aa, unidentified; identical to SEQ ID NO: 3476

SEQ ID NO: 9380 - protein, 442 aa, unidentified; identical to SEQ ID NO: 2637

SEQ ID NO: 9381 - protein, 431 aa, Escherichia sp.; identical to SEQ ID NO: 3801

SEQ ID NO: 9382 - protein, 453 aa, Leptospirillum sp.
MLPQSRALEVPDADNREGQDETVGGKGAIPKPVANIPEGRRFARSALRPKGQCNVRFDGGFVQVFVLDKKKKPLVPCHPARARELLREGRAVVHRIAPFTIRLKDRIGGETQPIRVKLDPGSKTTGLAVVREEETDGEKTAHVLFQAEIHHRGSAIKKRLDQRRAFRRRRRSQLRYRTPRFDNRTRPDGWLPPSLRHRVDTTLAWVERLRRLVPVSELSQELVRFDMQKIENPEISGAEYQQGTLAGYEVREYLLEKWGRTCAYCGASDMPLEIDHIHPRSLGGSDRVSNLTLACRSCNLKKGNRPVGEFLAKTPERLSTILARAKAPLKDAAAVNTTRWALFQALKATGLPVETASGGRTKYNRTRLGIPKGHSLDAACVGKVDRIEGWNRPCLSVKVTGRGSYQRTRLDSFGFPRGFLTRTKAHFGFQTGDRVMAIVTNGKKPEPVPDGWP

SEQ ID NO: 9383 - protein, 427 aa, Nostoc sp.; identical to SEQ ID NO: 2670

SEQ ID NO: 9384 - protein, 242 aa, unidentified
MPNKVYIINKHGRPLMPCSPAKARHLLDEGKAKVKKRTPFTIQLVYGSSGYTQEVILGVDAGSKSIEISASTKKEEVFAADVTPRNDVVDLLSTRREFRRARRNRKTRYRKPRFNNRVRSKHKGWLAPSVEVKIQEHITSIKMVCRILPVSKVVVETAEFDLQLLKAIEEGKPVPQGEDYQQGEMYGHYNVRQYVLWRDNYTCQCCGAHPTKKKEVRLHVHHLESRKVGGNAPGNLVTLWRC

SEQ ID NO: 9385 - protein, 525 aa, unidentified
LMPTTRCGHVRKLLDSKKAVVVNSNPFTIRLKYDTPNGIQDVFAGIDSGRENIGSGASNEDGDCLYLGELKTSNKSIKIKMAERTGFRRERRRHDRQSKQRKAKKDHTEIQNGNDDICRTTISCKSVQISYPVAEESVTHKIIRGKEGKFANRHRDEGWITPSARQLVQMHMNDLKSMCKILPISHVTLERVAFDFQKLENENIKVWEYGKGKLYGYDSPEEYIHDVQDGKCLVCGKPHIDYLHHIIPRSKGGSDKVSNIAGLCYDCHYGPMGVHNCQDTQNRLPELKNEANKQYKVSLLNSVMTVLIEEMDKFCKANSIIFSICEGHDTAKVRDMYDLQKDHCFDGFAISLVGRNVESVDVIPDRIYQKQRYKKKSKNIIQKRNCREYYDGKKLVAVNRHKGTDQKADSLEEYMNTYAETHTADECKNQFESLTVKPARRTYTFHKEGRICPFHIGDKVRYEKKNKIKGNTKVDTFICEGIYFSKDENKAEVEHNKTKSKKMKFCRTIESGCIPYIDYRKLALI

SEQ ID NO: 9386 - protein, 426 aa, unidentified
MSNSTNYVFVLDASKKPLTPCKPGMARSLLKVGKAKVFRRYPFTIILNKLVAEKHKGLLLKIDPGSKQTGFALVSLGGEVICAMVLVHRGQQIRNALERRRTIRRGRRNRKTRYRSSRFLNRKRKKGWLPPSLMHRVLTTQTWVNRLIKLAPIDSIAMELVRFDTQKMVNPEVSGVEYQLGELAGYEVREYLLEKFNRTCAYCDAKNVPLEVEHIKPKSKGGSNRISNLTLACRPCNEAKGNQDIKDFLSGKPNLVKRILSEAKAPLKDAAAVNATRWKLFETLKATGLPITTGSGALTKYNRCRLDLPKEHWIDAACVGEVEQLTILTTQPLLVTAMGHGCRQMVQMDKYGFPRKGYQAKKPVAGWKTGDIINVVKGKNIGLKGVRIKTVRSKGNFDIRHGDAILSVSRNQIQPIHRRDGYNYSF

SEQ ID NO: 9387 - protein, 415 aa, unidentified; identical to SEQ ID NO: 6534

SEQ ID NO: 9388 - protein, 451 aa, unidentified; identical to SEQ ID NO: 2593

SEQ ID NO: 9389 - protein, 456 aa, unidentified; identical to SEQ ID NO: 5939

SEQ ID NO: 9390 - protein, 450 aa, unidentified
LRVRNPFQPGRRITTGRKPEETNLRVFVLNKRGQPLMPCSPAKARLLLKEEKAVVKRRTPFTIQLTQATGETVQPVTLGVKAGSKEIGLSASTDKAELYASSVQLRTDVVDLLSTRRELRRARRNRKTRHRAPRFDNRVHNKNKGWLAPSVENKINAHLSRVAAVRKLLPVTKIVVETAAFDIQKIKNPDIEGTEYQQGDQLGFWNVREYVLFRDGHKCCHCHGKSKDPILNVHHLESRKTGGNTPNNLITLCETCHKAYHAGKIALKAKRGQSFRDAAFMGIMRWTFFNRLKAQCPELEVRNTYGYLTKNTRIRCGLAKTKTTDAFCIAGNLGAKRLGEYFFQKQTRKHNRQIYKMSILKGGVRKRQQAPYEVKGFRLFDKVRYQGQEVFVFGRRLRGDFDIRTLSGKRISSGASYRKLKLVELKKTYLTEIRKEDAIPHATEVACPLA

SEQ ID NO: 9391 - protein, 420 aa, unidentified
MFVYVLDMNGQPLMPTQRFGKVRRLLRDKKAKVVRGCPFTIRLLYEPKTKIVQEVVLGVDTGSKHVGVACVGNDKVLYQAQIELRDDVKRKMDSRRMYRRNRRQRKARYRKPRFLNRGNSIRKDRYCPTIVSKYYGHEREIEFCKTILPITKVVLETGTFDTQLMEKPWIQEQKWAYQKGVNYGYANAREHALVRDKYTCQCCGKKNCRLEVHHIVFRRNGGSDSLENLITLCEDCHKAVHLGEIGLKLKGKRKSTMRYATQMSTIRCMLLKKYPDAIETFGFVTKANRENLGLQKDHYLDACVIASCGRLFKLSDTLYQKRCVPKQNRQLCKGVRGERKIPTGKVLGFKKFDKIEYMGEICFVKGRRSKGAFELMDINNNTLDFRDRGGNRTPSYKSLKRVNARKSILCISTKIERGIL

SEQ ID NO: 9392 - protein, 420 aa, unidentified
MQYVYVLNKHGEPLMPCSPRKARLLLKQKKACVVKRTPFTVKLLYGSTGYKQPVTLGVDAGSKHIGISANTKKYELYREEATPRNDVVDLLSARRAFRRSRRNRKTRYRAPRFNNRVHSKHKGWLAPSVEVKIQEHITLIKRVCRILPITLVRVETAEFDTQRLKAMLEGKPLPVGTDYQLGEMYDEYNVRQYVLKRDNYTCQCCGAHPTKTKAVKLHVHHIETRKTGGNAPNNLITLCTVCHKALHAGKVTLDGKKRGKPLKDVAFMGIMRKALLERLRKELKIPVQGTYGYITKYLREKHGIPKSHTNDARCISKNPLAIPCDTCYYTKAVRHHNRQLHKATILKGGIRKANQALYTVKGYRLWDKVSYNGKECFITGRRTSGYFALKKLDGTVISNSISYKKLRLLEVATNYITERK

SEQ ID NO: 9393 - protein, 568 aa, Streptomyces sp.; identical to SEQ ID NO: 7824

SEQ ID NO: 9394 - protein, 414 aa, unidentified
MPCSPAKARLLLKEKKAIVVRRTPFTIQLTIATGEAKQPVSLGVDAGYKHVGLSASTEKAELYASEVELRQDVSDLLSARRALRQSRRSRNTRYRAPRFDNRIRTKRKGWLAPTVENRINVHLSRIETVLRLLPVTKITVETASFDTQLLKNPDIAGKEYQEGEQLGFWNVREYVLFRDGHVCQHCHGRSKDPVLNVHHLESRRTGGDSPGNLITLCETCHKALHRGEIKLRAKRGQSFRAETFMGIMRWGVLNRLKASHPKLEVHNTYGYRTKHARIANGIAKSHCADAFCIAGNFGAKRLGEFFFQKQTRRNNRQIHKLSILKGGIRKRNQAPFEVNGFRLFDKVACQGEEGFIFGRRSTGYFDVRKLDGTCISAGISYKKLHLLEKRRTHLTEIRKEEALPPPPEGRGLRA

SEQ ID NO: 9395 - protein, 448 aa, unidentified
MYWLIALNILKKKGSALMVYVLDINGQPLMPTTRHGKVRRLLNGHLAKVVKRCPFTIQLLYQSTKETQSTSLGVDAGSKHIGLAATTEKKVVYQEEFTPRNDVVKLLSARRILPHSRRNRKTRYRKPRFNNRVHSKHKGWLAPSVEIKIQEHITAIKRICQILPISEIHVETAEFDLQRLKALEDGNPLPVGTDYQLGEQYDFYNTRQYVLHRDGYTCQCCGTHDNNVKLHVHHIESRQTGGNAPNNLITLCEHCHSALHEGKLKLPKGKKRGKSYRDTAFMGIMRKTLLERLRKEIDIPVTETYGYITKYWREKVGLEKGHINDAVCISKHPYAEPLDIYYLTKAVRHHNRQIHKTKFSKGGIRKRNQAPYLVKGFRLFDKVLYQNREYFIFGRRATGYFDIRTLDGTKVNKGSISYKKLRIQDTANAYLKEVKAIPHMNKFTCVLA

SEQ ID NO: 9396 - protein, 395 aa, unidentified
MDTGYIHIGISVKSEKHEYLAEQIDTLTDEKTKHGACRMYRTLRRGRKRYRQPRFNNRKRDKDWIAPSLEHKKDIHVQAISRINKVMPLTDITMEMGNFDTQVLKAKEEGKPLPQGADYQHGERYGIATLREAVFSRDGYKCQCCGRTISDGAILHVHHIKYRSQGGTNSMTNLATVCDKCHTPKNHKPGGKLYNWKPKLPDFKGATFMTTIRWQLYNEVKSLFPDINVHITYGAATKEQRRELNIDKSHVNDAFAMGKFHPKHRTNAALYKKKRRNNRCLEKFYDAKYIDSRDGSKRTGQELFNGRINRNHKKDSENLHRYRLQKITAGKRTVRKRHYNIQPHDIVMYENRKRETSGCQSNGTRVILLSDKKSVAVKKVKIYKYAGGYFKSAFN

SEQ ID NO: 9397 - protein, 414 aa, unidentified; identical to SEQ ID NO: 2588

SEQ ID NO: 9398 - protein, 420 aa, unidentified
MQYVYVLNKHGEPLMPCSPGKARLLLKQQKACVVKRTPFTIKLLFGSAGYKQPITLGVDAGSKHVGLSASTEKRELYSEEFTPRSDVVELLSTRRQNRRSRRNRKTRYRVPRFDNRVHSKHKGWLAPSVEVKIQEHITVIKHICKILPISLVRVETAEFDTQRLKAMLAGKPLPVGTDYQLGEMYDEYNVRQYVLKRDHYTCQCCGAHNTAKKVVKLHVHHLESRKTGGNAPGNLITLCATCHENLHKGKVTLDGKERGKPLRDAAFMGVMRKTLMARLKEELPIPVQGTYGYITKMRREKNDIKKSHTNDARCISKHPLAEPCSVCYRTKAIRHHNRQTHKVNFSKGGYRKRSQTPYLVEGYRLWDKVLYKGQECFVSGRRSSGSFALKKLDGTTISEGVTFKKLRLLEPATNYLIERM

SEQ ID NO: 9399 - protein, 594 aa, Streptomyces sp.
VRSSLVQPRIIPTRQLASNGTRERRSLAPGPSPRGPRVNSPSHHDHWITGRCPPMATFPAGEQTHRAVLPQQLALESVRADTPGGRDETAHGHPAHARGTGGKHGRGETGRGRTEPRRRHATTAATAGTAENGNGDVPPWGIGQARVFVLAKGGQPLMPCHPARARELLAKDRAVVARQAPFTMRLKDRTLADAEVDGVRLRIDPGSKGTGLALTDEKKEPAAHGPTVTARRGLVSIELQHRGDQIHHSMRQRAGYRHRRRSAHCRYRAPRSANRTHPDGWLPPSLRHRVDTTLSTARRLCRYAPVTEIHIESVTFDTHAMSAGRPLTGTEYQQGPLAGTEARAYLLELWGRACTYCGITGVPLNIDHIHPRSRGGSDRIANLALACIGCNQAKGSRPIEKFLANDPVRLAQILRQAKTPLRDSAAMNSTRWQLTAALSTLGVPVLTWSGGRTKRNRTAMGLAKTHTVDALCVGLLDHESGDVIVRVPQQVCLVKATGRGSYARTTPDRYGFPRLQRPRAKQHHGFITGDLVRATMPSGRWKGTWTGRVSVRSRGQHSLTTSAGRFNVLHRNLRLLQRAEGYSYASKRETPKIS

SEQ ID NO: 9400 - protein, 512 aa, unidentified
MSTVYVLNKDGKPLMPTTRCGHVRRLLKEQKAQVVTSKPFTIQLLYETDDVVQPLYLGIDPGRTNIGVAVVKIDGTAVFTAHLETRNKEIPKLMQGRKKARRARRTNGRRCRRQRRAKANGTISKKCVKQTTAQNGSVSKRAKKIGVIKRHLPGCEKEVLCIGIKNKEAKFSNRARPEGWLTPTANQLLQTHINLVKKIQKFLPISDVVLEINKFAFMRLDNPNVQKWQYQQGPLYQKASLEEAVSEMQEHHCLFCKNTIDHYHHVVPQHKNGSNTIGNIVGLCAKHHDLVHKDTSWQEKLAKKKTGLNKRYGALSVLNQIIPALTKELSSLFPKHFFATNGKSTYDYRAAHGVSKDHWLDAYCIAGSVLPNDACDNNINSHVPYELKQFRRHDRRALHKENMSRVYTLNGKSVATNRHKAIKQTTDSLEEFRQRQPNDVCKLKVKEHHPEYRNPKRNFPGCVFLVGKHTHVMQGTSGSHNGKADGYYDTNGNSYSSGKCKFVAKNKGIVFA

SEQ ID NO: 9401 - protein, 425 aa, Nodularia sp.; identical to SEQ ID NO: 3165

SEQ ID NO: 9402 - protein, 460 aa, Petrotoga sp.; identical to SEQ ID NO: 8096

SEQ ID NO: 9403 - protein, 434 aa, unidentified
MGFLTTWARRKILPKGKVAEMPKIKKYAFVLDAKRKQLDPTIEQNAWRLVRQYKARLVSKFPMIIQLNKVMDNPNNDEIRCGIDDGANHVGMALVQKCQTRNKFLFKGTIEQRKDVKHLLTVRRGYRRYHRYHKQYRPARFLNRASSRRSGRLMPSIIQRKQAILRVIDRLRQWVRIDGYWLEDVKIDIQALTDGYKPYRWQYQKSNRLDNNLRLAAIHRDGCKCVECGKTKTRFEVHHITPRKTGGADTISNLITLCPKCHAKTFGRESQFADRYYALIGSTGHVEGLDDAQRVMQGKHWFREQLQQRGSLVLTTGGNTANKREDWDIAKTHSNDAVCITDLKPENIDIEEWTIKPMRRKNKAGVDEVCGFHHRDYVTYTYRNGETHTGYVTAMYPDKNQLNFQSPTKHCKRVNALKARLLWRYDKIYWFKCA

SEQ ID NO: 9404 - protein, 413 aa, unidentified
MTSYSFVLDANGKQLAPTKEPKAWFLIRKKRAALVSKYPMVIQLKKKIQENEICKDEIRCGIDDGGLHVGIALVQKCKSKNKVVFKGTIEQRNDVKHLMEVRRNYRRYHRYHKRYRQARFDNRKSSKRKGRIAPSILQKRQATIRVINRLNKWINITNYWLEDVSIDIRVLTDGYKSYSWQYQKSNRLDENIRKATILRDGGKCMECGKSNCRLEVHHIKPRRRNGSNTLDNLITLCESCHQKTEGQEELYMDRYFSLLKSSDNKNLNYAQHVMIGKMWLRKQLSGLGVLYLTSGGDTANKRIDWNIEKSHANDAVCITDLRPDTCDVKEWTMKPMRRQSKAKTDHVLGIHHRDLVEYTFKNGETHRGYVTALYPEQKAINFQSPTKHCKKVNARKCKLLWNYSKIYWFENAS

SEQ ID NO: 9405 - protein, 431 aa, unidentified
MPNKVYVINKHGRPLMPCSPAKARHLLDAGKAKVKKRTPFTIQLVYGSSGYTQEVILGVDAGSKTIGMSASTTKEELLSAEVKPRNDVVDLLSTRREFRRARRNRKTRYRKPRFDNRVRSKHKGWLAPSVEVKIQEHITSIKRACRILPVSKVVVETAEFDLQLLKAIADGKPVPQGEDYQKGEMYGHYNVRQYVLWRDNYTCQCCGAHATKKKEVRLHVHHLESRKVGGDAPDNQVTLCESCHEKLHKGLIAEKDFKKRKRRSTRDATFMGIMRKTLMQRLYSELPIPVIETRGYITKATREKLLVLPKSHTNDALAIAQGKRGFNVGYLPEIAQIDKIYTIRPVRHHNRQLHKAAILKGGIRKSNQAGKYVFGYRLFDKVQFNGQDCFIWGRRTTGIFTIKTINGKMIKDGISFKKLKPVEKSTGYLIA

SEQ ID NO: 9406 - protein, 521 aa, unidentified; identical to SEQ ID NO: 3983

SEQ ID NO: 9407 - protein, 420 aa, unidentified; identical to SEQ ID NO: 3504

SEQ ID NO: 9408 - protein, 390 aa, unidentified
MVYVLNIDGQPLMPTDRHGKVRHLLKDGRAEVVKRCPFTIRLLYDSTHYTQDIVLGVDAGSKHIGLSGTTETKELYASDVELRNDIVDLISTRRQNRRFRRNRKTRYRKARFLNRLSDKKDWLAPSIRQKVDTHMTVVSRVCKILPVTKIIVETASFDIQKIKDPDISGTGYQHGEQLDFWNVREYVLFRDGHTCQCCKGKSKDPVLNVHHIESRKTGGDAPNNLITLCETCHKGYHSGAVQLPKAIHRGMRFKDAAFMGIMRWAFYNKLKEVYEPQDIEVSMTFGYLTKNTRIRHYLPKEHYIDARCISGHPEAIPSNEVFYQKKVRCHNRQIHKNTILKGGVRKRNQAGYLVKGFRLFDKVAYEGREYFIFGRRQSGFFDLRNLSGCK

SEQ ID NO: 9409 - protein, 544 aa, Blautia sp.; identical to SEQ ID NO: 4004

SEQ ID NO: 9410 - protein, 469 aa, Burkholderia sp.
VAVFVLDRKGKPVMPCSEKRARLLLERGRARVHRVIPFVIRLVDRQADSCTLQSLRIKLDPGSTATGMALVRDTETVDASTGEIQRGAAVLNLFELVHRGRQISEALTARRSMRRRRRGNLRYRAPRFLNRTRPAGWLAPSLQHRVDTTMAWVRRLMRWAPAAAISSELVRFDMQALENPEISGVEYQQGTLAGYEVREYLLEKWNRRCAYCDASSVPLQIEHIVARARGGSNRVSNLTLGCEPCNLDKGAQPVEVYLVKAPKRMAAILAQAKRPRKDAAAINATRWALANVLRATGLPVELASGGRTKFNRVTLGVPKTHALDAACVGALSGMTRWQRPTLSVSCTGRGSYQRTRLDRFGFPRGHLTRDKRIQGFQTGDLVRAEVPSGKKAGTHVGRVAVRATGYFNIQMAGRVVQGIARRHCQLIQRSDGYGYPRIAFQRGDAGEGRASHGALSIPGLKAEVSRATG

SEQ ID NO: 9411 - protein, 439 aa, unidentified
LKVFVLDTNKEIQEPVHPAEARLLLNQQKAAVFKRFPFIIILKEAVKEQPKKLRLKIDPGSRTTGITIVNDKSGEIVFAMELEHRGLRIKNLLDSRRVIRRNRRNRKTRYRQPRFLNRTRPKGWLPPSLKSRVYNIETWVKRLKQVCNVQNLSMELVRFDMQLMENPNISGVEYQQGELAGYEVKEYLLEKWGRACVYCGKKDIPLEIEHIVPKSKGGSNRISNLTISCVNCNRKKNVQSIDQFLKHKPELLKKIKAQTKRPLRGAAAVNATRWNLFNTLKKSGLPVEVGSGGLTKFNRTQRDLPKTHWLDAVCVGKSTPERLFQSHKNVLIVKAMGHGSRQMCRVDKYGFPRTKAKSKNKKVKGFQTGDIAKAIVTKGKKVGTYVGRVAVRTNGSFNVKVKKVTVQGISWKYCKKIHCIDGYNYNYNWQKEVAISPLP

SEQ ID NO: 9412 - protein, 427 aa, Parasutterella sp.; identical to SEQ ID NO: 3787

SEQ ID NO: 9413 - protein, 453 aa, Lactobacillus sp.; identical to SEQ ID NO: 4050

SEQ ID NO: 9414 - protein, 442 aa, unidentified; identical to SEQ ID NO: 3161

SEQ ID NO: 9415 - protein, 430 aa, unidentified; identical to SEQ ID NO: 3681

SEQ ID NO: 9416 - protein, 431 aa, unidentified
MVYVLNKNGQPLMPTNRHGKVRRLLKISKAKVIKRCPFTIQLLYNTTNCIQNITLGVDAGSKHIGLSATTKDKVLFEADVELRNDITKLLEARRKFRHSRRNRKTRYRKRRFNNRVSSKHKGWLAPSIEHKIQTHFAMVEKVHKMLPITKIVVETASFDMQLLKAQLEGEPIPKGMDYQKGELTGWNIREYIFHRDNYTCQWCKGKSKDSILVTHHHAYWKGDHTNKPSSLITLCNTCNDSKYHKKEANRLWGWEPKITNSYKHAAFMNVMRWVFYNRLKEIYANVSMTYGYITKNTRIKNNLPKTHYLDARCISGNPKAKSSGEYFYYKKVRCHNRQLYKANTLKGGIRKRNQAEYTVKGFRLFDRVEYQNHEYFIFGRRASGFFDIRNLNGQKVNKGSVSFKKLKLKETNKTYLIERCTVDTRDDLAPL

SEQ ID NO: 9417 - protein, 427 aa, Enterococcus sp.; identical to SEQ ID NO: 5630

SEQ ID NO: 9418 - protein, 413 aa, unidentified; identical to SEQ ID NO: 2815

SEQ ID NO: 9419 - protein, 544 aa, unidentified
MKQKKQKVMVYILNKKGKPLMPTTRCGHVRKLLDSKKAVVVNSNPFTIRLKYDTPNGIQDVFAGIDSGRENIGSGASNEDGDCLYLGELKTSNKSIKIKMAERTGFRRERRRHDRQSKQRKAKKDHTEIQNGNDDICRTTISCKSVQISYPVAEESVTHKIIRGKEGKFANRHRDEGWITPSARQLVQMHMNDLKSMCKILPISHVTLERVAFDFQKLENENIKVWEYGKGKLYGYDSPEEYIHDVQDGKCLVCGKPHIDYLHHIIPRSKGGSDKVSNIAGLCYDCHYGPMGVHNCQDTQNRLPELKNEANKQYKVSLLNSVMTVLIEEMDKFCKANSIIFSICEGHDTAKVRDMYDLQKDHCFDGFAISLVGRNVESVDVIPDRIYQKQRYKKKSKNIIQKRNCREYYDDKKLVAVNRHKGTDQKADSLEEYMNTYAETHTADECKNQFESLTVKPARRTYTFHKEGRICPFHIGDKVRYEKKNKIKGNTKVDTFICEGIYFSKDENKAEVEHNKTKSKKMKFCRTIESGCIPYIDYRKLALI

SEQ ID NO: 9420 - protein, 404 aa, unidentified
LLKEKKAIVVRRTPFTIQLTIATGEAKQPVSLGVDAGYKHVGLSASTEKAELYASEVELRQDVSDLLSARRALRQSRRSRNTRYRAPRFDNRIRTKRKGWLAPTVENRINVHLSRIETVLRLLPVTKITVETASFDTQLLKNPDIAGKEYQEGEQLGFWNVREYVLFRDGHVCQHCHGRSKDPVLNVHHLESRRTGGDSPGNLITLCETCHKALHRGEIKLKAKRGRSFRAETFMGIMRWGVLNRLKASHPKLEVHNTYGYRTKHARIANGIAKSHCADAFCIAGNFGAKRLGEFFFQKQTRRNNRQIHKLSILKGGIRKRNQAPFEVNGFRLFDKVACKGEEGFIFGRRSSGYFDVRKLDGTCISAGISYKKLHLLEKRRTYLTEIRKEEALPPPPEGRGLRA

SEQ ID NO: 9421 - protein, 430 aa, unidentified
MPNKVYVINKHGRPLMPCSPAKARHLLDAGKAKVKKRTPFTIQLVYGSSGYTQEVILGVDAGSKTIGVSALTKKEELFAANVIPRNDVVDLLSTRRESRRARRNRKTRYRKPRFDNRVRSKHKGWLAPSVEVKIQEHITAIRRVCGILPVSKVVVETAEFDLQLLKAIEEGKPVPQGEDYQKGEMYGHYNVRQYVLWRDNYTCQCCGAHATKKKEVRLHVHHLESRKVGGDAPDNQVTLCESCHEKLHKGLIAEKDFKKRKRRSTRDATFMGIMRKTLMQRLCSELPIPVVETRGYITKATREKLLVLPKSHTNDALAIAQGKHGFNVGYLPGIEQIDKIYTIRPVRHHNRQLHKAAILKGGIRKSNQAGKYVFGYRLFDKVQFNGQDCFIWGRTTGIFTIKTINGKMIKDGISFKKLKLVEKSTSYLIA

SEQ ID NO: 9422 - protein, 413 aa, unidentified; identical to SEQ ID NO: 2636

SEQ ID NO: 9423 - protein, 419 aa, unidentified; identical to SEQ ID NO: 6355

SEQ ID NO: 9424 - protein, 431 aa, unidentified; identical to SEQ ID NO: 5232

SEQ ID NO: 9425 - protein, 451 aa, unidentified
MKVFVKNMRGQALMPCSPRKARILLRQKKAKVVDYRPFTIQLCYPTGEAKQEVIIGIDQGARHIGIAVISQGKILAKGEVELRQDVHSLLQTRAEYRRGRRYRKTRYRKARFLNRIRPEGWLPPSIQEKLNANFAWIDKFCSLVPDSKLRIEVGKFDTAKMINPDIKGVDYQHGQTYGYYDVRYFVFARDNYTCQVCHKKNKILHTHHIIYKSKGGSDRADNLITVCTECHTHENHQEDGILYQWMLKHKKTRQYKEPSFMNILRIRTYKKYSEADITYGSVTTERRKALRLEKTHYNDAIAITGIDKVEENIDECFWIKQLRKRKRSLHEATPRKGRKEKNTEAKRNSKNTKQVNGWYLNDEVICYGRRGWITGFNSATSSSPAAFVVDKDGNYITVPEKKYKQVSLKLLKLVRHNNNWQYVVTKEEKSAASSEIPHPPIEVSESFLAAC

SEQ ID NO: 9426 - protein, 411 aa, Orenia sp.; identical to SEQ ID NO: 7492

SEQ ID NO: 9427 - protein, 420 aa, unidentified
MQYVYVLNKHGEPLMPCSPGKARLLLKQQKACVVKRTPFTIKLLFGSAGYKQPITLGVDAGNKHVGLSASTEKREFYCEEFTPRNDVVDLLSTRKQSRRSRRNRKTRYRAPRFDNRVHSKHKGWLAPSVEVKIQEHITVIKRICRILPVALVRVETAEFDTQRLKAMLEGKPLPVGTDYQLGEMYDEYNVRQYVLKRDHYTCQCCGAHTTTKKTVKLHVHHLESRKVGGNAPSNLITLCTTCHDALHKGKVSLDGKERGKPLRDAAFMGIMRKALMARLREELPIPVQGTYGYITKMRREQNDINKSHVNDARCISKHPLTEPCSVCYRTKAIRHHNRQTHKANFSKGGIRKRSQMPYVVEGYRLWDKVLYKGQECFVSGRRASGSFTLKKLDGTRISKGVTFKKLRLLEPATNYLIERM

SEQ ID NO: 9428 - protein, 414 aa, unidentified
MPCSPAKARLLLKEKKAIVKRRTPFTIQLTIATGETKQPVGLGVDAGYKYVGLSASTDKAELYASQVELRQDITDLLSARRALRRARRNRKTRYRAPRFNNRIRTKRKGWLAPSVENRINAHLSRIEAVLRLLPVTKITVETASFDMQLLKNPDIAGKEYQEGEQLGFWNVREYVLFRDGHVCQHCYGRSKDPVLNVHHLESRRTGGDSPGNLITLCETCHEALHRGEIALKTKRGHSFRAEAFMGMMRWEVLNRLKASHSELEVNNTYGYRTKHARIVNGIDKSHCADAFCIAGNLGAERLCEFFFQKQTRRNNRQIHKLSILKGGIRKRNQAPFEIKGFRLFDKVACKGEESFIFGRRSSGYFDVRKLDGTRISAGISYKKLRLLEKRRTYLTEIRKEEALPPLPEGRGLRA

SEQ ID NO: 9429 - protein, 454 aa, Streptomyces sp.
MVPVLDKRGRPLMPCHPARARELLAKGRAVVVRYVPFAIRLKDRLIEESTIAGVAVRVDPGSCGTGIAVTTDTEQLDHATGRGHAARRGLFAVELIHRSAQIRDGMKRRAGYRRRRRSGNLRYRAPRFDNRRRPAGWLAPSLRHRVEGTIGQVGRLMKLFPVVEIHIERNSFDTHALSLGRETLSALEYREGTLAGYEVREYLLEKWHRTCSYCGATGVPLQIDHIQPRAHGGSDRISNLTPACGPCNQAKSARLVEDFLAEQPERLARIKAEAKHPLRDAAAMNATRWQLWRSAAGLGPSVYAWSGGLTKFNRGAHGLAKSHTLDALAVGELPDRTRIVRHPAQVLTARATGRGSYARTRTDAYGFPRLHLTRRKKHYGFTTGDLVRAVIPRGKYAGTHTGRVAVRANGCHSIPVPGGHAGTSHKNLRLLQRADGYAYGTRFEKPVEPGSIGS

SEQ ID NO: 9430 - protein, 512 aa, unidentified; identical to SEQ ID NO: 2906

SEQ ID NO: 9431 - protein, 442 aa, unidentified
MSTSVFVLDKKHRPLMPCRPARARRLLRAGRARVVKRFPFVIRLVDRTVEQSEVQPVLIKLDPGSRETGAAVVRDDEKKRHHALAFFVIKHRGGAIRDALKARSAFRRRRRSQNLRCRSPRFLNRVKPKGWLPPSLRHRVETTLSFVRRMCRYLPVSGIATELVKFDSQKLQTPEVSGIEYQQGTLFEYEVREYLLEKFGRKCVYCGAEGVPLNIDHVVPRAKGGSNRVSNLVLACVSCNQKKGARSLEDFLKGKPEVLARVRRELKTPLRDAAAVNATRWVLFNELKATGLPVETGSGALTKFNRHAFGVEKEHWLDALCVGRLNGAVTRKGLNVLEIRCMGRGSRQRTRLTKYGFPRGYLMRQKCVHGFATGDMVEANVPKGKKAGLWRGRVAVRVSGSFNIQTPMGVIQGVGWKHCRLISHNDGYGYAWLGHAPHSSPA

SEQ ID NO: 9432 - protein, 418 aa, unidentified
MENGYVYVLSKEGKPLMPTRRFGKVRWWLKNGEAHVVHRTPFTIQMDRETTLRTQPVTLGMDSASEHLGISASTEARELLRVEVELRQDVKNNMSTRRELRRGRRYRKTRYRKLRFNNRGRKDFIAPTIEQKVRTHENIIKFVCSILPVEKVVIEVAPFDTQKLDNPDIEGAEYQNGPLKEFSNVREYVLYRDGHTCHHCKGKSGDKILQVHHIESRKVAGNSPRNLVTLCKTCHEAYHAKRIKLKLSSDVNLRHAAHISVIPVLVCQRLWQHGVHLRKTYGYVTKQRRFTASLPKSHTNDAFCIAGNINAIRLGYCYYMRCVRRHTRSLHVMKPNKGGLRRSALAPKFIGTSRIQRYDMVRYRGQECFVFGSTGGRLVLKDIYGKKVHTTQSVSTKTVKFLQKKRNGFMMYRVQEVL

SEQ ID NO: 9433 - protein, 411 aa, unidentified; identical to SEQ ID NO: 6244

SEQ ID NO: 9434 - protein, 492 aa, unidentified; identical to SEQ ID NO: 4486

SEQ ID NO: 9435 - protein, 413 aa, unidentified; identical to SEQ ID NO: 2636

SEQ ID NO: 9436 - protein, 442 aa, unidentified; identical to SEQ ID NO: 2903

SEQ ID NO: 9437 - protein, 372 aa, unidentified
MPGTNMSDFPHQLKRLNFMHPKSNCGRTSPICSLLSARRALRQSRRNRKTRYRAPRFDNRIRTKRKGWLAPSVENRINAHLSRIEAVLRLLPITKITVETASFDMQRLKNPDISGKEYQEGEQLGFWNVREYVLFRDGHVCRHCHGRSKDPVLNVHHLESRRTGSDSPDNLITLCETCHKALHRGEITLKAKRGQSFRAQAFMGIMRREVLNRLKASYPELKVHETYGYLTKHARIANGIVKSHGADAFCIAGNLGAERLGEFFFQKQTRRNNRQIHKLSILKGGIRKRNQAPFEAKGFRLFDKVACQGEEGFIFGRRSSGSFDVRKLDGTRISTGISCKKLRLLEKRRTYLTEIRKEEALPPLPEGRGLRA

SEQ ID NO: 9438 - protein, 418 aa, unidentified; identical to SEQ ID NO: 2425

SEQ ID NO: 9439 - protein, 413 aa, unidentified; identical to SEQ ID NO: 2636

SEQ ID NO: 9440 - protein, 414 aa, unidentified
MVYVINKQGQALMPTERFGKVRRLLKNSLAHVVCRIPFTIQLDYDTTDYTQPVSLGIDAGSKHIGISATTSEKELYAADVELRNDIVDKLSTRRGLRRTRRSRLRYRKARFNNRVSSKRKGWLAPSVENKIQTHLTVVEKIHKFLPITNIVVETASFDIQKINNPSISGSEYQQGEQLDFFNVREYVLFRDNHTCQHCKGKSKDKALNVHHIESRKTGGDSPKNLITLCETCHKAYHRGEFKLNVKRGKSFRDAAFMGIMRWSFYDRLKNIYPNVSMTFGYITKNTRITNNLPKEHYVDARCISGNPVAKPLGYYFYQKKVRCQNRQIHKANFLKGGRKKLNQAPFLVKGFRLFDLVEYQKELYYIFGRRSSGSFDIRKLDGTKVNKGSISCKHLRLIGKRKSILTEKRMQVNL

SEQ ID NO: 9441 - protein, 512 aa, unidentified
MSTVYVLNKDGKPLMPTTRCGHVRYLLKEKKARVVASKPFTIQLLYETDDVVQPLYLGIDPGRSNIGVAVVKTDGMAVFTAHLETRNKEIPKLMKKRKDSRRARRTNGRRCRRQRRAKANGTISKKCVKQTTAQNGSVSKRAKEIGVIKRHLPGCEKDVLCIGIKNKEAKFNNRTRPTGWLTPTANQLLQTHINLVKKIQKFLPISDVVLEVNKFSFMQLDNPNIQKWQYQKGPLYQKESLKSAVSEMQEHHCLFCKKKIDHYHHVVPQHKNGSNTIDNIVGLCTQHHDLVHKDATWQKRLAKKKTGLNKKYGALSVLNQIIPALTKELSSLFPKHFFVTNGKSTYDYRAAHGVSKDHWLDAYCIACSVLPNDTCDKTINSRVPYELKQFRRHDRRALNNENMSRVYTFNGKMVATNRHKATEQTTDSLEEFRQRQPNDVCNLKVKEHHPTYRNMSRNYPGSIFLVEKQVHIMQGIAGSKDGKATTYKDTNANSIAAGKCKFVAKNSGILFV

SEQ ID NO: 9442 - protein, 456 aa, unidentified; identical to SEQ ID NO: 4017

SEQ ID NO: 9443 - protein, 431 aa, unidentified
MPNKVYVINKHGRPLMPCSPAKARHLLDEGKAKVKKRTPFTIQLVYGSSGYTQEVILGVDAGSKTIGMSASTTKEELLSAEVKPRNDVVDLLSTRREFRRAQRNRKTRYRKPRFDNRVRSKHKGWLAPSVEVKIQEHITAIRRVCGILPVSKVVIETAEFDLQLLKAIADGKPVPQGEDYQQGEMYGHYNVRQYVLWRDGYTCQCCGAHATKKKEVRLHVHHLESRKVGGDAPDNQVTLCESCHEKLHKGLIAEKDFKKRKRKSTRDATFMGIMRKTLMQRLCSELPIPVIETRGYITKATREKLLVLPKSHTNDALAIAQGKQGFNVGYLPGIVQINKIYTIRPVRHHNRQLHKATILKGGIRKSNQTEKYVFGYCLFDKVQFNGQDCFIWGRRTTGIFTIKTINGKMIKDGISFKKLKLAEKSTSYLIA

SEQ ID NO: 9444 - protein, 431 aa, unidentified; identical to SEQ ID NO: 7729

SEQ ID NO: 9445 - protein, 431 aa, unidentified; identical to SEQ ID NO: 3801

SEQ ID NO: 9446 - protein, 427 aa, unidentified
PAKARGLLKKGLAKVISKKPFTIKLLFSSSGHKQKITAGMDTGSKTIGIAAIANGKVLYQAETKLRGEEIKKKMDQRRMYRRGRRGRKLRYRKPRFLNRRASRAINRLAPSVKHKVLSHLREKKFIESILPVSMWIVETASFDIHKITNPKGVSKALGKSQSYQKGRMLDFYNVKQYVLNRDKYQCQMCKKKKDLKLHVHHIKFRSNSGSNSPDNLVTLCETCHDKLHKLNKEEAEKSSKKLQKRAQKPTKHATEVSILRSQLCKHFRNLESSQAFEETFGYITKFNRENKNLPKAHHIDAICIATCGESIEMHNQNNTSDLFLRRYVSKGDYQQSRGIRSEVKIPTGKLFGLKKFDLVKTSKGVGFVKGKRSSGFFAISDINGTSISDSVNIKKNIGRIQARKAVLTWRSQFLPDLKDRISLREKR

SEQ ID NO: 9447 - protein, 424 aa, unidentified; identical to SEQ ID NO: 8578

SEQ ID NO: 9448 - protein, 403 aa, Halomonas sp.; identical to SEQ ID NO: 9022

SEQ ID NO: 9449 - protein, 448 aa, unidentified
LGATNFPNLGEANVTEQLGTNTMSNYVLVIDTNQKPLTPCSPGTARRLLNAGKAAVFRQYPFTIVLKKAVESDLESCELKIDPGSKTTGLALLKGNAVVWAGELSHRGQAIKNDLATRRACRRSRRSRKTRYREPRFLNRTRPKGWLPPSLSHRVETTMTWVNRLRKLCPIFSISQELVRFDTQKLQNPEVSGVEYQQGERFGYEVRQYLLEKWGRKCAYCGAENVPLEVEHIHPKSKGGSDRVSNLTLACHPCNLTKNTQDVQDFLSGSPDLLARILKQSKRPLKDAAAVNATRWRLFEELKATRLPVKVGTGGQTKYNRCRFGLPKTHWLDAACVGETDSIDVQTLQPLSIKATGHGTRQMCGIDRDGFPIRHRSKSRFVRGFQTGDIVRAEVPKGKKAGIHVGRVAVRSTGSFNISTAKGLVQGINAKYCKHIHQKDGYSYSYGD

SEQ ID NO: 9450 - protein, 469 aa, unidentified
VAVFVLDRSGKALMPCSEKRARLLLVRGRARLHRVVPFVIRLVDRRVESSAMQPLRIKLDPGSKSTGLALVRDTDSVDATTGAIQRGAVVLNLFELVHRGRQISEALTARRAMRRRRRGTLRYRAPRFLNRTRPAGWLAPSLQHRVDTTLAWVKRLMRWTPVLAVSSELVRFDMQALENPEISGIEYQQGTLTGYEVREYLLAKWGRKCAYCDAGQVPLQVEHIHSRARGGTNRVSNLTLACAPCNTTKGALPIAVFLVRDPKRLAAILAQAKRPLKDAAAVNSTRWALVQALKETGLPTELASGGRTKFNRTRLGIPKSHALDAVCVGEVAAVRAWQKPTLTVNCTGRGSYQRTRLDKYGFPRGYLTRSRRVHGFQTGDLVRADVPSGKKTGTHVGRVAVRATGNFNIQGAGEVVQGIAHRHCRLIQRSDGYAYSRIAPPKGDARVGTSLLSALSLPAVNDGVSRANG

SEQ ID NO: 9451 - protein, 424 aa, unidentified; identical to SEQ ID NO: 3434

SEQ ID NO: 9452 - protein, 507 aa, unidentified
VLNKDGKPLMPTTRGGHVRHLLKEQKARVVRTKPFTIQLLYETDDVVQPLYLGIDPGRTNIGVAVVKTDGTAVFTAHLETRNKEIPKLMKKRKDSRRARRTNGRRCRRQRRAKANGTISKKCVKQTTAQNGSVSKRAKEIGVIKRHLPGCEKEVLCIGIKNKEAKFSNRVRPEGWLTPTANQLLQTHINLVKKIQKFLPISDVVLEVNKFAFMQLDNPNIQKWQYQQGPLYQKASFEEAVSEMQEHHCLFCKKPIDHYHHVVPQHKNGSNTIGNIVGLCAKHHDLVHKDTTWQKKLAKKKTGLNKKYGALSVLNQIIPALTKELSSLFSKHFFATNGKSTYDYRAAHGVSKDHWLDAYCIACSVLPNDVCDSDINNRVPYELKQFRRHDRRALHKENMSRVYTLNGKSVATNRHKATEQTTDSLEEFRQCQPDDVCKLKVKEHHPEYRNPKRNFPGCVFLVGKHTHVIQGTSGSHNGKADGYYDTNGNSYSSGKCKFVAKNEGIVFT

SEQ ID NO: 9453 - protein, 386 aa, unidentified
MSKVFVLDTNFTPLNPIHSAQARQLLRSKKAAIYRQFPFTIILKESRSDSPISLLRLKIDPGAKFTGMVLVNDSTGEVVFAAELKHRGFAIRDALTSRSQLRRSRRARKTRYRQPRFLNRTRPERWLAPSLQSRIENIKTWVERLRKLAPIEAISQELVRFNMQLMTNPDIQGKEYQRGSNSITNLTLSCEKCNTKKGTKDIKYFLKKDPLKLEKILKQAKRPLADAAAVNTTRTALLEVLKATGLPVETGSGGLTKFNRSEQNLEKTHWIDAACVGKSTPILNIKGVKPLLITANGHGSRQSCRTDKYGFPSRHVPREKIHFGFQTGDIAKAVVTTGKKIGTYVGKVAIRSTGSFNISTKNGLIQGISHKFCKRIHAKDGYSYAQ

SEQ ID NO: 9454 - protein, 415 aa, unidentified; identical to SEQ ID NO: 6044

SEQ ID NO: 9455 - protein, 560 aa, unidentified
MANDYVFVVDRKGNPLMPTKRRGRVRHLLKEEKAVVIKTHPFTVKIKYDVGHYTQPMYEGIDSGRQNIGNAVSRENGENVLLEDVRTNNKSIKKNLMKRKVHRQERRRNNRHSRQRKAIHDGTEIKNGDDDKWHTDKDCKSVKVSYPAADNAVTHKVIRGKEGKFANRKRPDGWITPSARQIVQLTLNMVKETCSIMPIRRISFERVAFDFQKLANQNIHAWEYGKGPLYGFKTYKDCIYAEQKGKCPFCGKPITQYHHIIPRSAGGIDNVKNIIGLCDEHHTMVHNDAAFAETLSDAKAGVEQEYYAGLLNSAVPALIEALSVYCKEKSIELLITDGRTTRETRVKYGFDDKKDHCIDAYAISLADRNVKNISFAGRIIMKRRYKKKSKNIISARNQRIYVLNGQVIACNRHKAENQKENSLEEFLTQYRETHTEKKVQQMMHHIRILPAVRSYTFHKDGLKAICHPGDIVEYKKLNKTSGRMKRNIFVCTSVNFDGKDKYGNYCAAENHIGYDNGKGNGNRKAKFCTVLDSGCLQCTGIKRTDDYIAQLKADPSKKKG

SEQ ID NO: 9456 - protein, 420 aa, unidentified; identical to SEQ ID NO: 3288

SEQ ID NO: 9457 - protein, 501 aa, unidentified
MVFVLDKHKKPLMPCTEKRARLLLERGRAVVHRMSPFTIRLKDRTAEESRFQPLRLKLDPGSRTTGFAVLREDTPNRSEVILLGEIHHKPSIKDGLDVRRNQRHSRRNRKTRYREPRFNNRHPEKCAVCGKNAQHGSRYCRPCEKAKNFVDNGHREGRLAPSLEARVNQTLSVVDKLTRWLPITAISTEHVKFDTQLMQNPDISGVEYQQGELFGYEVREYLLEKWGRKCAYCGKEGVPLEVEHVVPRNPKRGPRGTDRISNLTLACEECNKAKGNLQPEEWLEKLKQSKRKLDQVRAENLPKILRKLKEPLRDAALVNATRWVLYDRLKKTGLSVECGTGARTKYNRLKMGLPKTHYYDACCVGESTPENLAINQEYVQVWTALGRGTRKMCNTDKYGFPVSHRTRQKMYFGFTTGDLVMAEVPEGKYAGRWVGRVAVRASGYFDIKDGSGKRICQGISYRHIKLLQRADGWQYEKIRVEKGGSGGASSPGVNAGASGAA

SEQ ID NO: 9458 - protein, 423 aa, Moorena sp.; identical to SEQ ID NO: 7848

SEQ ID NO: 9459 - protein, 414 aa, unidentified; identical to SEQ ID NO: 5358

SEQ ID NO: 9460 - protein, 460 aa, Fischerella sp.; identical to SEQ ID NO: 9149

SEQ ID NO: 9461 - protein, 442 aa, unidentified; identical to SEQ ID NO: 2637

SEQ ID NO: 9462 - protein, 279 aa, unidentified
VVVETAEFDLQLLKAIADGKPVPQGEDYQKGEMYGHYNVRQYVLWRDNYTCQCCGTHPSKKKEVRLHVHHLESRKVGGDAPDNQVTLCESCHEKLHKGLIAEKDFKKRKRKSTRDATFMGIMRKTLMQRLCSELPIPVVKTRGYITKATREKLLVLPKSHTNDALAIAQGKRGFNVGYLPEIAQIDKIYTIRPVRHHNRQLHKATILKGGIRKSNQTEKYVFGYRLFDKVQFNGQDCFIWGRRTTGIFTIKTINGKMIKDGISFKKLKLVEKSTSYLIA

SEQ ID NO: 9463 - protein, 465 aa, unidentified; identical to SEQ ID NO: 3856

SEQ ID NO: 9464 - protein, 420 aa, unidentified
MVYVLDVDGKPLMPTTRHGKVRRLLKEGKAKVVKRCPFTIQLLYDSTRYVQEINLGIDAGSKHIGVSATTKQKVLYEADVELRNDIVDLISTRRECRRTRRNRKTRYRKARFNNRVSTKKTGWLAPSVKQKIQTHLTVINNVYKILPVKNLTVETASFDIQKIKNPDISGEEYQQGEQLNFWNVREYVLFRDGHTCQCCKGKSKDKILNVHHIESRKAGGNAPNNLITLCETCHKGYHNGTVKLPKSIHRGMSFRDATFMNTMRKTLLSELRKTYPNVKETYGYVTKNTRITHNLPKDHYVDARCISGNPDAKPLGYYFYQRKIRCHNRKLHKINFSKGGIRKIDKMNYTVKGFRLFDKVVYNGNEYFVFARRKSGSFSVRNFLGEKPNKSGDISYRKLIFSETRHSILTEVRWWLHGYC

SEQ ID NO: 9465 - protein, 420 aa, unidentified
MQYVYVINKHGKPLMPCSPGKARLLLKQQKARVVKRTPFTIKLLYGSAGYKQPITLGVDAGSKHVGLSASTEKRELYSEEFTPRNDVVELLSTRRQNRRSRRNRKTRYRAPRFDNRVHSKHKGWLAPSVEVKIQEHITVIKRICRILPITLVRVETAEFDTQRLKAMLAGKPLPVGTDYQLGEMYDEYNARQYVLKRDHYTCQCCGAHTTTMKSVKLHVHHLESRKVGGNAPSNLITLCTTCHDNLHKRKVTLDGKKRGKTLRDAAFMGIMRKALMARLKEELSIPVQETYGYITKMRREQNDIKKSHVNDARCISKHPLAEPCSVCYRTKAIRHHNRQIHKANFSKGGYRKRSQMSYIVEGYRLWDKVLYKGQECFISGRRASGRFALKKLDGTSISKSVTFKKLRLLEPATNYLIERM

SEQ ID NO: 9466 - protein, 433 aa, Sutterella sp.; identical to SEQ ID NO: 6555

SEQ ID NO: 9467 - protein, 477 aa, Blautia sp.; identical to SEQ ID NO: 2707

SEQ ID NO: 9468 - protein, 427 aa, Ktedonobacter sp.
MVFVLDTKKKPLMPCTPKRARQLLARGRAVVHRVAPFVIRLKDRQVEDSVLQPLALKIDPGSQTTGMTLARVEDRSEGAIHHAVLLAEVQHRGHEVRARKVTQRHARRRRRSANLRHRAARAANRRIARGWLPPSLLSRIGNVVSWTKRLRRFAPVTRVDVECVRFDTQLLQNPEITGVQYQHGELFGWEIRAYLLLKYAYQCVYCGKRDTPFELDHIRPRSRGGSSRITNLALACHDCNRQKGAQTAAEWGHPEVEVQAQTPLRDAAAVNATRHKLVQELRVFGLPVGTWTGGRTRWNRARFGIAKTHAKDALCVGDLAGVREGRLKTVAITATGRGEHCRTNWSKQGFPRGYRLRHKQVKGFKTGDRVRAVVPDKLKTRGIHVGRVQVRKSGSFDIQTHEREVEGVNATYCCLVQRGDGYAYALA

SEQ ID NO: 9469 - protein, 442 aa, Lactobacillus sp.
MKHENANRVFLLNKDGKPLMPCRPRKARLLLKSGKAFVVKKYPFTIQLKYGSYGYKQKVSLGVDTGQRHIGFAIVSQNKVLHQSEVELRQDVHKNLYTRKIYRRSKRNRKTRYRQARFLNRVHGKRDGLWLPPSIKGKVSHNIAWIKRYLAVLPNPDLHIEVGKFDMAKMVNLEISGKQYQEGSLKDWKNYEYYVLARDEYTCQLCHKHGEGVKLVVHHIVYRSQGGTDRVDNLITLCTNCHTTKNHQPGGKLYKWMKAKKKVIKQLKGATFMNILRKRIMTAFPEASFQYGSQTYADRKNLLLPKGHFMDAIAISGIKSVGQLSDTVTMISQFRKKKRSLHEATARKGRKQPNTSSKRNEKNTKHARGLWLNDYVRVIGNHAKGYVKGFKSNGYYVYLTDGLGNYVLNNGKNYINGQQCRLIMHNGNWQKAEQKLSLYKFK

SEQ ID NO: 9470 - protein, 430 aa, unidentified; identical to SEQ ID NO: 3252

SEQ ID NO: 9471 - protein, 417 aa, unidentified
MPCSPAKARLLLKEKKAIVKRRTPFTIQLTIATGEAKQPVALGVDSGYKHIGLSATTEKAELYASEVELRQDITDLLSARLALRCSRRSRKTRYRAPRFDNRVASKCEGWLAPSVENRIAAHMSRVEAVMRVLPVTAITVETAAFDTQLLKNPDIAEAAYQQGEQLGFGNVREYVLFRDGHVCQHCRGKSKDPILNVHHIESRRTGGDAPNNLITLCETCHKAFHRGEIELKVRRGKSFKAATFMGIMRWTLFERLKKAHPELSVRNTYGYLTKHKRISHGIAKSHCADAYCIADNLGAKRLEGFFFQKQTRKHNRQIHKLSILKGGLRKKNQAPYEVKGFRLFDKVICKGEEAFIFGRRTSGSFDVRRLDGTRISAGINYKKLRLLEPRTTYLAEFRKEAAHPPLHECRGFRAEFL

SEQ ID NO: 9472 - protein, 512 aa, unidentified
MSTVYVLNKDGKPLMPTTRGGHVRHLLKEQKARVVRTNPFTIQLLYETDNLVQPLYLGIDPGRTNIGVAVVKTDGTAVFTAHLETRNKEIPKLMQGRKKARRARRTNGRRCRRQRRAKANGTISKKCVKQATAQNGSVSKRANEIGVIKRHLPGCEKEVLCIGIKNKEAKFSNRARPEGWLTPTANQLLQTHINLVKKIQKFLPISDVVLEINKFAFMRLDNPNVQKWQYQQGPLYQKASLEEAVSEMQEHHCLFCKNTIDHYHHVVPQHKNGSNTIGNIVGLCAKHHDLVHKDTSWQEKLAKKKTGLNKRYGALSVLNQIIPALTKELSSLFPKHFFATNGKSTYDYRAAHGVSKDHWLDAYCIAGSVLPNDACDNNINSYVPYELKQFRRHDRRALHKENMGRVYTLNGKSVATNRHKAIKQTTDSLEEFRQRQPNDVCKLKVKEHHPEYRNPKRNFPGCVFLVGKHTHVMQGTSGSHNGKADGYYDTNGNSYSSGKCKFVVKNEGIVFT

SEQ ID NO: 9473 - protein, 421 aa, unidentified; identical to SEQ ID NO: 2738

SEQ ID NO: 9474 - protein, 545 aa, Streptomyces sp.
MTTLPAGEQTHQAVLPQQPALESVGADTPGSRNETAHGHPATARGTGGKHGRGETDGHHTRARRRHAKTTATAAEAAENRNGDVPTHDHRYAGGVGAGRVFVLSKDGQPLMPCHPARARELLGKGRAVVARQTPFTIRLKDRTLAESEVDGVQLRIDPGSKGTGLALTHEKKETSSDGTTVTARRGLISVELQHRGDQIRMCMQQRAGYRHRRRSANCRYRAPRSHNRAQPRGWLPPSLRHRVDTTTSMATRMCRYAPVTEIHVEVTAFDTHSMSAGRTLTGTEYENGPLTGTNARAYLHAKWGSACAYCDTTGVPLNIDHLRPRSRGGSNRISNLVLACAPCNQAKGNRPVDIFLAHRPERLAKILQQVKAPLQDAAAMNTTRWRLLEALEALGRPVHDWPGTLTKQNRTTTGLEKTHTLDALCVGPLDHEGGDAIVRVPGNVLVAKATGRGSYARTTPDRFGFPRLRRARAKQHFGYVTGDLVRATMPSGKWAGTWTGRISVRARGQHSLTTPQGRINVSHRNLRLLQRGDGYGYARRQEMVE

SEQ ID NO: 9475 - protein, 501 aa, unidentified
MSYKVYVVDKNKKPLMPTTRFGKVRRLLKEKKAKVISSKPFVIQLLYEPKTHEVQPLHGGTDPGRENIGLSVIDDKGNIVYSAHLKTRNKDIPKLMAERKAHRQASRRGERLRRKRRAKKNKSTTTFPEGRKLSGYKDGVLMLKDIINTESRFNNRKRPKGWITPTVRQLIQTHINIIRQICSFLPVADWSIEGNKFAFMELEDSTIQGIDFQNGRLKGFKNASEYVKHLQKGKCIFCDNPIEHYHHITPRSKGGSDRPENLVGLCECCHHKVHKGEASLAAIGEKKKFAHLSVLNTALPFILKELQTIFGEDRLFICAGYDTKNYRVLYHIDKDHHLDAACIAGLTNNIQIQTKNLTTFEIQQYRNHNRSIIHHQTERTYKLKGKTIAKNRSKRFEQKGDSFHDWTRKTKKGKSRTEFRKLCAQITVQKSTRYKNDMNRLKPGTVFRYTKPEKKKTKLCAGKHILKGQITNGKYFKAQDVEGNFPVTNCEKLYFKSLLYL

SEQ ID NO: 9476 - protein, 413 aa, unidentified; identical to SEQ ID NO: 8063

SEQ ID NO: 9477 - protein, 442 aa, unidentified; identical to SEQ ID NO: 7529

SEQ ID NO: 9478 - protein, 418 aa, unidentified
MVYVINKQGQALMPTERFGKVRRLLKNGLAHVMYRIPFTIQLDYDTTNFIQPISLGIDAGSKHIGISATTSEKELYAADVELRNDIVEKLSTRREQRRTRRNRLRYRRARFNNRVSSKRKGWLAPSIENKIQTHLTVVEKIHKFLPITNIIVETAAFDIQKIKNPSISGKEYQQGEQLNFFNVREYVLHRDGHQCQHCKGKSKDPILNVHHIESRKVGGNSSQNLITLCESCHKAYHKGEIELEVKRGTSFRDSAFMSTMRWSFYKKLKNIYPNVSMTFGYITKHTRITNGLPKNHYVDARCISGNPTAKHLEYYFYQKKVRCQNRQIHKVNFLKGGRKKLNQAPYLVKGYRLFDLVEYQKDLYYIFGRRESGFFDIRKLDGTKVNKGSISCKKMRLIDIRKTIIIEKRMQGAIHPIN

SEQ ID NO: 9479 - protein, 407 aa, Fervidobacterium sp.
MHPFTIRLKDRTVQQSELQPLRLKLDQGAKVTGLSVLREDGDVAETVFLCEIHHKTDIKQKLDARCAVRRSRRNRKTRYRKPRFLNRRRPEGWLPPSFKARVNQLINAVRKLTKLLPISAISIEDAKFDTQKLQNPEISGIEYQRGTLFGYEVREYLLEKWGRKCAYCGRSDVPLEIDHIVPRSRGGTDRVSNLTLACRECNQKKGNKTAAEFGYPHVEEQARQTYKQPAFMNSIRSYLRKSLSGFGIPAEYGTGALTKANRIRLGLPKKHYFDACCVGESTSSEIRITQSYVQIWHAVGRGTRQMCNTDKFGFPRGHRQRRKKHFGFQTGDIVKAIVPRGKYAGIWVGAVAVRGSGFFDIKDTNGKRICQGISYKYCKLIQIADGWQYSKRKANYSKSHTTEVACL

SEQ ID NO: 9480 - protein, 415 aa, Bacillus sp.; identical to SEQ ID NO: 7196

SEQ ID NO: 9481 - protein, 420 aa, unidentified
MQYVYVLNKHGEPLMPCSPGKARLLLKQQKACVVKRTPFTIKLLFGSAGYKQPITLGVDAGSKHVGLSASTEKRELYSEEFTPRSDVVELLSTRRQNRRSRRNRKTRYRVPRFDNRVHSKHKGWLAPSVEVKIQEHITVIKHICKILPISLVRVETAEFDTQRLKAMLAGKPLPVGTDYQLGEMYDEYNVRQYVLKRDHYTCQCCGTHNTAKKVVKLHVHHLESRKTGGNAPSNLVTLCTTCHKNLHKGRVTLDGKERGKPLRDAAFMGIMRKTLMVRLKEELPIPVQGTYGYITKMRREQNDIKKSHVNDARCISKHPLAEPCSVCYRTKAIRHHNRQTHKANFSKGGIRKRSQMPYVVEGYRLWDKVLYKGQECFVSGRRASGSFTLKKLDGTRISKGVTFKKLRLLEPATNYLIERM

SEQ ID NO: 9482 - protein, 460 aa, unidentified; identical to SEQ ID NO: 7734

SEQ ID NO: 9483 - protein, 453 aa, Anaerotruncus sp.; identical to SEQ ID NO: 8749

SEQ ID NO: 9484 - protein, 262 aa, unidentified
HHCLFCKNTIDHYHHVVPQHKNGSNTIGNIVGLCAKHHDLVHKDSAWEKKLAKKSTGLYKKYGALGVLNQIIPTLTNKLSVLFPKHFFVTTGKSTHDYRESHSVSKDHWLDAYCIACSVLPSNVCDSNINNHVPYELKQFRRHDRRALHKENMSRVYTLNGKAVATNRHKAIKQTTDSLEEFRQSHPGDVCKLKVKEHHPAYRNLNRNHPGSVFFVGEQAHVMQSIVASKDGKATRYKDTNVNKIAAGQCRFVAKNEGIVFT

SEQ ID NO: 9485 - protein, 337 aa, unidentified
VVGNNLLSIKPLINIGEGVIYSSICTGLSLQTYQKRKEVPCMVYVLDINGQPLMPTTRHGKVRRLLNSHLAKVVKRCPFTIQLLYQSTKEIQPVSLGVDAGSKHIGMAATTEKKVVYQEELSARNDVVKLLSARRTLRRTRRNRKTRYRKPRFNNRVHSKHKGWLAPSVEVKIQEHITTIKRICQILPISEIQVETAEFDLQRLKAMEEGRTPPVGTDYQLGEQYDFYNTRQYVLHRDGYTCQCCGTHDNNIKLHVHHIESRQTGGDAPNNLIILCEHCHKALHEGKLELPKGKKRGKSYRDATFMGVMRKTLLERLKKEIDVPVEGTYGYITKYWR

SEQ ID NO: 9486 - protein, 426 aa, unidentified
MVYVQNHLGQPLMPTQDHRKVRLLLKAGAAVVVRRTPFTIRLTTRTKTYVQPVILGVDAGSKTVGMSAATHEEEVFAAELTPRNDVVKNLADRREFRNSRRGRTTRYRQPRFNNRVHSKHKGWLAPSVEVKIQEHITSIKRACELLPIGKVVVETAEFDLQLLKAIADGRPVPQSEDYQQGEMYGFYNVRQYVFFRDGYTCQCCGAHGKGVKFHTHHLESRKTGGNAPDDLVTVCDKCHKAFHTGLITDAKLKKRRRKSTRDAAFMGIMRKTLLQRLRAELPISVVETKGYITKATREQLLKLPKSHTNDALAIAMGRHGFGIEGVTYMPQRDRIFQIKPVRHHNRQLHKAIPKKGGRRQRNQGPKYVQGFRRFDKVLYRGQECFIWGLRTRGYFQLKLLDGAKVHESAKASELILLEHSSGYLIA

SEQ ID NO: 9487 - protein, 237 aa, unidentified
MYDEYNVRQYVLKRDHYTCQCCGTHNTAKKVVKLHVHHLESRKTGGNAPSNLVTLCTTCHKNLHKGRVTLDGKERGKPLRDAAFMGIMRKTLMVRLKEELPIPVQGTYGYITKMRREQNDIKKSHVNDARCISKHPLAEPCSVCYRTKAIRHHNRQTHKANFSKGGIRKRSQMPYVVEGYRLWDKVLYKGQECFVSGRRASGSFTLKKLDGTRISKGVTFKKLRLLEPATNYLIERM

SEQ ID NO: 9488 - protein, 431 aa, unidentified; identical to SEQ ID NO: 3235

SEQ ID NO: 9489 - protein, 493 aa, unidentified
MAVVYVISASGKPLMPTTRCGHVRGLLNERKARVVEQNPFTIQLNYETKEMTQPLYLGIDPGRTNVGAAVVREDGECVFTAQLTTRNKDVSKLMKARKQFRMAHRRLKRRCKRQRRAKAAGTISQKRELQRLLPGCEEPILCKGIRNKEARFNNRQRPAGWLTPTANHLLLTHLNMVKKLQKFLPITDVVLEVNRFAFMAMENPNIRRWQYQRGPLYGKGSVEDAVYAQQDGHCLFCGKPITHYHHVVPQHKNGSDTLENRVGLCIEHHDLVHKDRAWEAKMKEVKAGMNKKYHALSVLNQIIPALAEQLAELFPQHAFATTGKDTADFREDHGVTKEHHLDAYCIACSVLTEPGRVSAPTAKPHRLMQFRRHDRQVCHKENIKRVYLLDGKAVATNRHKAIEQKDNSLEEFRKTHTQQEVSSLTVKDHKPIYKDMRRSMPGGVFLCNGKVHTLLGSQGRYKGMPQYYHGTDRSRNNATRCIFLQLNCGLRWV

SEQ ID NO: 9490 - protein, 420 aa, unidentified; identical to SEQ ID NO: 3247

SEQ ID NO: 9491 - protein, 442 aa, unidentified; identical to SEQ ID NO: 3658

SEQ ID NO: 9492 - protein, 442 aa, Lactobacillus sp.
MKNERRKAMQNRVFVINQHGKALMPCKPRKARILLRDGKAKVLKKEPFTIQLLYGSSGYKQDVNIGIDSGQRHVGLAVTSQDKVLFQGEVELRQDVKLLLDTRRIYRRSRRNRKTRYRKARFLNRVSNRKDNWLPPSVASKVNHNINWIKRLLSVLPKADLHIEVGKFDMQKMKNPAINGEGYQQGDLYGYQTVKQFVLARDDYTCQVCKKKGGKLKIHHIIYRSLGGTNTIDNLITVCADCHTAKNHQSGILAKWCKDKKKVNKSYKGATFMNILRRRLFNAFPQAKFQYGACTTLQRADLNLTKSHYNDAVAISGIRKIKVKPTSIMMFKQFRKKKRSLHEATARKGRKTPNITSKRNAKNTKYAKGFWLNDYVKIKDSNKKGYISGFMSKGTNVRLRDIFGEYVSNSDKSYTSTKNISLINHSNNWQKQVITEKQYIMG

SEQ ID NO: 9493 - protein, 427 aa, Nostoc sp.
MSKVFVLDTEKRPLDPIHPAQARQLLRNKKAAVFRRFPFTIILKESRADASVSDLRIKLDPGAKITGIALVNDSTGEVVFAAELKHRGFAIRDALISRRQLRRSRRNRKTRYRKPRFLNRTRPEGWLAPSLMSRVHNVETWVNRLRKFAPITAISTELVKFDMQLIRNPEIEGKEYQQGTLAGYETREFLLEKWNRQCVYCGNKDIPLQIEHIHPRSKGGSNSITNLTLSCEKCNVKKGTKDIKDFLKKDPTRLQKILAQAKKPLADAAAVNATRYKLLDVLKSTYLPVECGSGGLTKFNRTNQQLQKTHWLDAACVGQSTPILIIKGIKPLLITANGHGTRQMCRTDKFGFPNRYVPKLKFIKGFQTGDIVKAVVTNGKKIGEYIGRVAVRSTGSFNISAQRGLIQGINYKFCKSIHKKDGYSYSS

SEQ ID NO: 9494 - protein, 442 aa, Lactobacillus sp.; identical to SEQ ID NO: 5193

SEQ ID NO: 9495 - protein, 420 aa, unidentified
MQYVYVINKHGKPLMPCSPGKARLLLKQQKARVVKRTPFTIKLLYGSAGYKQPITLGVDAGSKHVGLSASTEKRELYSEEFTPRNDVVELLSTRRQNRRSRRNRKTRYRAPRFDNRVHSKHKGWLAPSVEVKIQEHITVIKRICRILPITLVRVETAEFDTQRLKAMLAGKPLPVGTDYQLGEMYDEYNARQYVLKRDHYTCQCCGAHTTTMKSVKLHVHHLESRKVGGNAPSNLITLCTTCHANLHKRKVTLDGKKRGKTLRDAAFMGIMRKALMARLKEELSIPVQETYGYITKMRREQNDIKKSHVNDARCISKHPLAEPCSVCYRTKAIRHHNRQIHKANFSKGGYRKRSQISYIVEGYRLWDKVLYKGQECFISGRRASGRFALKKLDGTSISKSVTFKKLRLLEPATNYLIERM

SEQ ID NO: 9496 - protein, 398 aa, unidentified
RRAKANGTISKKCVKQTTAQNGSVSKRAKEIGVIKRHLPGCEKDVLCIGIKNKEAKFSNRTRPEGWLTPTANQLLQTHINLVKKIQKFLPISDVVLEINKFAFMRLDNPNVQKWQYQQGPLYQKANLEETVSEMQEHHCLFCKKKIDHYHHVVPQHKNGSNTIDNIIGLCTQHHDLVHKDATWQKRLAKKKTGLNKKYGALSVLNQIIPALTKELSSLFPKHFFVTNGKSTYDYRAAHGVSKDHWLDAYCIACSVLPNDTCDKTINSRVPYELKQFRRHDRRALNNENMSRVYTFNGKMVATNRHKATEQTTDSLEEFRQRQPNDVCNLKVKEHHPTYRNMNRNYPGSVFLVGNQVHVMQGIAGSKDGEATTYKDTNANSIAAGKCKFVAKNSGILFV

SEQ ID NO: 9497 - protein, 423 aa, Leptolyngbya sp.
MSNHVFVLDTNRKPLTPCKPGVARSLLKAGKASVFRRYPFTIILKKEVNANPEPIEVKLDPGSKVTGIALKQGNRIIFGAELQHRGRQIKDALLSRRQLRRSRRNRKTRYRQVRFLNRTRPDGWLAPSLQHRVDTLITWVNRFRRLAPVARIALELVRFDLQLMQNPEISGVEYQQGELPGYEVREYLLEKWGRKCVYCGTQNVALEVEHIQPQSKGGTDRVSNLTLACHSCNQSKSNRDIRDFLSSQPDLLSRILRQTKSPLKDAAAVNSTRWALFNALKATGLPVVTGTGGQTKFNRTRLELPKAHWLDAACVGEIESLEILTSKPLLIAAKGHGTRQMCGTNKYGFPTRHRSRVQVHKGFRTGDIVIATVTAGKKIGSYVGRVLCRASGSFDITTASGRVAGISHKYCKPIHRKDGYAYA

SEQ ID NO: 9498 - protein, 415 aa, unidentified; identical to SEQ ID NO: 3548

SEQ ID NO: 9499 - protein, 406 aa, unidentified
VVYVQDIDGNPLMPTTRHGKVRRLLKAKKAIVINLCPFIIQLTYATSSYKQEVVLGVDAGTKHVGLSATTKSKELYASEVILRSDVVDLLSTRRELRRKRRYRLRYRKPRFKNRIKYKKEGWIAPSIRRKIDSHIRIIGFVYSILPVSKLIVEVAQFDTQKIKNPEISGKEYQEGDQLGFWNVREYVLARDGHKCQHCKGKSKDPILNVHHIESKKTGGDSPSNLITLCETCHKEFHKGNIKLKVRRGRSLRDAAVMGIMKWRLYNKLKSLYSNVDITFGYITKYNRIRYGIEKSHISDAFAISRNFSSIKLGYYYKKKITRRHNRQIHKMKILKGGVKRLNQAPFKVFGFRLFDKVISQGDVYFIYGRRISGRFNIRDINGENKKDVYCNKLRYISNGLISVRVD

SEQ ID NO: 9500 - protein, 420 aa, unidentified; identical to SEQ ID NO: 6067

SEQ ID NO: 9501 - protein, 442 aa, Lactobacillus sp.
MKHENANRVFLLNKDGKPLMPCRPRKARLLLKSGKAFVVKKYPFTIQLKYGSYGYKQKVSLGVDTGQRHIGFAIVSQNKVLHQSEVELRQDVHKNLYTRKIYRRSKRNRKTRYRQARFLNRVHGKRDGLWLPPSIKGKVSHNIAWIKRYLAVLPNPDLHIEVGKFDMAKMVNPEISGKQYQEGSLKDWKNYEYYVLARDEYTCQLCHKHGEGVKLVVHHIVYRSQGGTDRVDNLITLCTNCHTTKNHQPGGKLYKWMKAKKKVIKQLKGATFMNILRKRIMTAFPEASFQYGSQTYVDRKNLLLPKGHFMDAIAISGIKSVGQLSDTVTMISQFRKKKRSLHEATARKGRKQPNTSSKRNEKNTKHARGLWLNDYVRVIGNHAKGYVKGFKSNGYYVYLTDGLGNYVLNNGKNYINGQQCRLIMHNGNWQKAEQKLSLYKFK

SEQ ID NO: 9502 - protein, 443 aa, Anoxybacillus sp.; identical to SEQ ID NO: 7148

SEQ ID NO: 9503 - protein, 430 aa, unidentified; identical to SEQ ID NO: 4504

SEQ ID NO: 9504 - protein, 429 aa, Parasutterella sp.; identical to SEQ ID NO: 4241

SEQ ID NO: 9505 - protein, 408 aa, unidentified; identical to SEQ ID NO: 4810

SEQ ID NO: 9506 - protein, 429 aa, Parasutterella sp.; identical to SEQ ID NO: 4241

SEQ ID NO: 9507 - protein, 292 aa, unidentified
MPNFVFVLNPDKQPLSPIHPAQARLLLKEKKAAVFRRYPFTIIFKEEVRQTAEPIKIKLDPGSQTTGIALVQSNQVILGAELTHRGQVISKNLTSRRQLRRGRRSRQTRYRKPRFLNRTHPLPPPRRGTEGVGWLAPSLQHRVDTTLTWVKRLIKLAPIESIAMELVRFDLQKQENPEISGAEYQYGTLYGWEVREYLLTKFNRTCQYCSAKDTPLEVEHIQPKSKGGSDRVSNLTLACHDCNQSKGNQDIQDFLKEEPDLLKRILKQAKMPTQRRKVREGWRRDGAIPQSG

SEQ ID NO: 9508 - protein, 428 aa, unidentified
LKVFVLNMRGQPLMPCSPAKARHLLKAGKAVVRRRTPFTIQLRIATGETKQSVTLGVDAGAKHVGLSAATEKEEVFASEVELRQDITGLLAARLSLRRDRRHRKTRYRAPRFLNRVRSKHKGWLAPSVENRIQAHMSRIDAVCRLLPVTKIVIETASFDIQKIKDPSVEGTDYQQGDQLGFWNVREYVLFRDGHVCQHCHGHAKDKILNVHHLESRQTGGDAPNNLITLCERCHKACHAGKIKLKVKRGQSFREEAFMGIMRWTLLDRVRKAHPGLPVENTYGYLTKNTRITQGLPKAHCVDAYCIAGNLKAVRRGVHLYQRQVRKHNRQIHKCTVLSKTLKDGTKIGYRKLNQTPHLVKNFRLFDKVRCLGQTGFIFGRRSSGYFDVRRLDGVKISSCINYRKLTLLEKRGTCLTELRKEDGASSPV

SEQ ID NO: 9509 - protein, 413 aa, unidentified
MTSYSFVLDANGKQLAPTKEPKAWFLIRKKRAALVSKYPMVIQLKKKIQENEICKDEIRCGIDDGGLHVGIALVQKCKSKNKVVFKGTIEQRNDVKHLMEVRRNYRRYHRYHKRYRQARFDNRKSSKRKGRIAPSILQKRQATIRVINRLNKWINITNYWLEDVSIDIRVLTDGYKSYSWQYQKSNRLDENIRKATILRDGGKCMECGKSNCRLEVHHIKPRRRNGSNTLDNLITLCESCHQKTEGQEELYMDRYFSLLKSSDNKNLNYAQHVIIGKMWLRKQLSGLGVLYLTSGGDTANKRIDWNIEKSHTNDAVCITDLQPDTCDIKEWAIKPMRRQSKAKTDHVLGIHHRDLVEYTFKNGETHRGYVTALYPDQKAINFQSQTKHCKKVNARKCKLLWNYSKIYWFENAS

SEQ ID NO: 9510 - protein, 460 aa, Ammonifex sp.
VQKQNCVLVLDKNKEPLMPCHPARARQLLKKGRAAVFRRHPFTIILKDREGGETQPLELKIDPGAKVTGLPLVAEFPRGREVLWAAELHHRGEQVREALHRRRGYRRFRRYRKTRYREPRFSNRGRPEGWLPPSLESRVANILTWGKRLCRWSPVTAVSVELAKFDTQKFQHPEISGIEYQQGELSGYEVREYLLEKYGRRCAYCGKEDVPLEVDHVVPKSRGGTDRVSNLTLACRECNRAKGNRLLQEWLEDLKKSRRAVDRKRAENIPKVLSLLKEPLKGAAFINATRYALVERLKALGLPVFTATAAQTKYNRARQGYPKAHWIDAACVGETGESVRLDPGMQALKITARGHGSRRVQNVDRYGFPRGEPKRVRRFMGFATGDLVKAVIPTGKYAGVHVGRVAIRSRPGFRLNGFDVHPKHLRLLQRADGYEYDWVKGGSGVSSPRPEGRGPRRRVI

SEQ ID NO: 9511 - protein, 424 aa, unidentified; identical to SEQ ID NO: 3434

SEQ ID NO: 9512 - protein, 413 aa, unidentified; identical to SEQ ID NO: 2636

SEQ ID NO: 9513 - protein, 503 aa, Streptomyces sp.
MGRGETYGRGTRARRRHAKSAASAAKAAENRSGDAPAHHQSYTGGVGASRVFVLARDGRPLMPCHPARARELLGKGRAVVARQVPFTIRLKDRALPDSEVDGVQLRIDPGSKGTGLVLTDEKREADERGTDVTVRRGLIAIELQHRGDQIHLRMRQRAGYRHRRRSVNYRYRAPRSDNRPRPPGWLPPSLRHRIDTTLSLATRLCRYAPVTEVHVERVAFDTHAMGAGRPLSEAEYRQGPLAGTTARAYLHAKWNSACAYCDARGVPLNIEHLRPRSRGGSHRVSNLVLACVPCNEAKGSTPVETFLSGRSDHLARILGRSRAPLHDAAAMNATRWRLTEVLGALGRPVHAWSGGRTKDNRSAMGLAKTHTLDALSVGRLNHESGDAIVRYPERVLVAKATGRGSYARTTPNRFGFPRLRRARAKQHFGYVTGDLVRATVPRGKWAGTWTGRISVRARGQHSLTTPRGRVNVSHRNLRLLQRGDGYGYGGRPEPTPSTSRKSS

SEQ ID NO: 9514 - protein, 457 aa, unidentified; identical to SEQ ID NO: 3236

SEQ ID NO: 9515 - protein, 450 aa, unidentified; identical to SEQ ID NO: 4205

SEQ ID NO: 9516 - protein, 442 aa, unidentified; identical to SEQ ID NO: 2903

SEQ ID NO: 9517 - protein, 413 aa, unidentified; identical to SEQ ID NO: 2636

SEQ ID NO: 9518 - protein, 406 aa, Geobacillus sp.; identical to SEQ ID NO: 3747

SEQ ID NO: 9519 - protein, 462 aa, Halomonas sp.
MAVFVWDKHKRPLMPCSEKRARLLLARGRAVVHKRYPFTIRLKDRVGGDTQPLRLGIDPGSKTTGLALMRETDSTESDGPQRHVLCLFDLVHRGYQIKKSLEQRRGFRRRRRSKNLRYRAPRFNNRTKPKGWLAPSLQHRVDTVMAWVERLSKLAPVTAISQELVRFDTQKLDNPEISGVEYQQGTLLGYEVREYLLAKWGRECAYCGTGDTPLEIEHVVPRSRGGSNRVSNLTLSCHPCNQAKGSLPLADFFSRDKGLRKRLKANGLSADARLERVQRQLKQPLRDASAVNATRWALFNALKTTGLPVAVASGGRTKYNRQRLGIPKTHALDAACVGAFGRLHDWTAPTLTIKCTGRGNYQRTRLTKYGFPRGYLMRQKQVRGFQTGDIVKAVVPSGKKAGTYTGRVAVRKTGSFNIQTDQGAVQGISHKHCTVIQRGDGYGYHLTPTIHQLKGGAGQAVA

SEQ ID NO: 9520 - protein, 433 aa, unidentified
MVYVQDIDGKPMMPTTRHGKVRRLLKDSKAVVVNTCPFTIKLMYKTSGYKQEIVLGVDAGTKHVGLSATTKSKELYSSEVILRSDIVELLSTRRESRRTRRNRLRYRKPRFNNRIKSKRTGWVAPSVRHRIDAHIRVIDNICSILPVSRVIVEVAQFDTQKIKNPDISGDEYQEGDQLGFWNVREYILARDGHKCQHCKGKSKDPILNVHHIESRKTGGDSPSNLITLCETCHKEFHKGNIKLKVSRGKSLRDAAVMGIMKWKLYEELKSRCDNVSMTFGYITKHNRIKYGIEKSHTSDAFVISMNINAKRIERQYLKRLIRRHNRQIHKMKILKGGKKKNNQAPFEVFGFRLFDKVLYNNKIFFVYGRRKSGSFNIRDFNGENPKDVSRKKFKLIRGKYDYQAGYTSSSIVYFPKQFCLGGPGKESNGKSRQ

SEQ ID NO: 9521 - protein, 420 aa, Bacillus sp.; identical to SEQ ID NO: 9117

SEQ ID NO: 9522 - protein, 415 aa, Bacillus sp.; identical to SEQ ID NO: 2431

SEQ ID NO: 9523 - protein, 512 aa, unidentified
MSTVYVLNKDGKPLMPTTRGGHVRYLLKEKKARVVTSKPFTIQLLYETDDVVKPLYLGIDPGRTNIGVAVVKTDGTAVFTAHLETRNKEIPKLMQGRKKARRARRTNGRRCRRQRRAKANGTISKKCVKQTTAQNGSVSKRAKKIGVIKRHLPGCEKKVLCIGIKNKEAKFSNRTRPEGWLTPTANQLLQTHINLIKKIRKFLPVNDVVLEINKFAFMQLDNPNIQKWQYQQGPLYQKASLEEAVSEMQEHHCLFCKQSIVHYHHVVPQSENGSDTIGNIVGLCTKHHDLVHKDTAWQKKLAKKKTGLNKKYGALSILNQIIPALTKELSSLFPKHFFATNGKSTHDYRAAHDVSKDHWLDAYCIACSILPNDTCDKNINGRVPYKLKQFRRHDRRALHKENMSRVYTLDGKKVATNRHKAIKQTTDSLEEFRQRQPNDVCKLKVKEHHPEYRNPERNFPGCVFLVGKHTHVMQGTSGSHNGKADGYYDTNGNSYPSGKCKFVAKNKGIVFA

SEQ ID NO: 9524 - protein, 465 aa, unidentified; identical to SEQ ID NO: 4016

SEQ ID NO: 9525 - protein, 413 aa, unidentified; identical to SEQ ID NO: 3476

SEQ ID NO: 9526 - protein, 518 aa, unidentified
MTPKKRKEASRMSEYIYVLGIDGNPQMPTKRKRHVEQLLQTGRARVFRQIPFTIQLTYENKPVLQPITIAEDPGRSNIGMAVVSLSGELLSAAVVQTRNKEIVKLMEKRKQHRRASRNGERKARQRLAKKCHTMIKTGFLMRKLPMYGKDKRVRCNVIKNTEAKFCNRKREDGWLTPSAEHLVRTHINLIHKMQKFLPITDVAIEINRFAFLSLEDPSISGVDFQNGPLKGYDDLNAAIEDLQDGHCLMCNSPIEHRHHIVPRSMQGSNTIGNIAGLCCKCHERVHKDARFEDRLKKKKAGLNKRYAAVSALNQAIPFICKRLEQEFGKEHVHYCSGRDTSMVRRSFGYHKTKEEQLHEVDAWCIAVLSLRQIPEKAPEFDHVHEILQFRRQDRSRIKAQTSRAYYHEGKKIAKNRKKAEGQREDSLQEWRKQQVKRYGEEQTRKMISQLEIKKSIRRYNRLDRLMPGAVFYYQGIRYVMRGQHCEGAYLQAVGMGSKDFPAKKCKIVVHNEGLVFVS

SEQ ID NO: 9527 - protein, 460 aa, Ammonifex sp.; identical to SEQ ID NO: 9510

SEQ ID NO: 9528 - protein, 468 aa, Fervidicola sp.
LVFVLDKKKRPLMPCSEKRARLLLQRGRAVVHCMHPFTIRLKDRVLEESVVQPLRLKIDPGAKTTGIAVMDESDPVCGKVIFLAEIKHKDGIKEAMKTRRDVRRSRRHRKTRYRKARFQNRNPEKCIACGRNARHKSDYCSICHENRNFVDNGFRKKRLPPSLEARVNQTINAVKKLMKLLPVTAISTEHVKFDTQLMQNPEIEGIEYQRGELFGYEVREYLLEKWGRKCAYCGEEGVPLEIEHIIPKSRGGTDRVSNLTLACHECNQKKGNLTAEEFGYPEIQEQAKKPLKDAAIMNATRWKLYRRLKELGLPVECATGARTKKQRIEHGLPKAHYYDACCVGITPGKLVFKTEYVSIWTAIGRGTRRMCNPDKYGFPKGHRTARKLYFGFQTGDIVKAIVPKGKYRGTWVGRVVVRTSGYFDLKDNYGKRICQGISYKTCCLIQRADGWQYDKCQRKEVLAHSSSQ

SEQ ID NO: 9529 - protein, 419 aa, Anoxybacillus sp.
LFVYVINKHGKPLMPCSPRKARILLTNKKAKVVKRTPFTIQLLYGSSGYKQPISLGVDAGAKHVGLSATTKNQVLLEAEVQLRTDIQELLATRRQFRRSRRNRKTRYRKARFLNRKKPNGWLAPSIQHKVESHIKLVKWVHSLLPITHITVEVAQFDTQKIKNPDIQGAAYQQGEQLGFWNVREYVLYRDGHTCQWCKGKLKDPVLNVHHIESRKTGGDSPSNLLTLCKTCHDRIHREGLEHEIQRRFPSLKDASHMSMMRWFIWNGLKKVYPHAKHTYGYITKHTRIVHRLAKTHMVDARCISGNPLATPSDTVFLLKFVRKNNRQLHKATISKGGKRKANKAERLVKGFQLFDKVMYHRQECFVFGRRSSGYFDLRLLDGTRIHASASVKKLKKVEHASTLLIERRKGDSSPTFALA

SEQ ID NO: 9530 - protein, 453 aa, unidentified
MPVAVVSKTGERLMPTSEHRARKLLKSGKAIKYSYHPFTIQLTERESGDVQPIELCMDTGYIHIGISVKSEKHEYLAEQIDTLTDEKARHDACRMYRRQRRSRKRYRQPRFNNRKRNDRWIAPSLEHKKSIHIQAILRICKVMPVTDITLEMGNFDTQVLKAREEGKPLPQGVDYQHGERYGITTLREAVFARDGYTCQCCGRAIKDGAILHVHHIVYRSQGGTNRMSNLITVCDKCHTPANHKQGGKLYNWKPKIASFKSATYMTTIRWKLYNEVKALFPDIDIDIHITYGAETKERRRALDIDKSHVNDAFVMGQFHPKHRSKPICYKKKRRNNRCLEKFYDAKYIDSRDGKKRSGQELFNGRISRNHKKDSENLHQYRLQKVTPGRRAIRRQHYPIQPHDIIVYNGNKIEVSGCQHKGTRVVFSKTKKSVQISKIKLFKYAGGYSKSVFN

SEQ ID NO: 9531 - protein, 450 aa, unidentified
MQKLLVEFENTPEDAPQVSCSISGALNRDKSLSVPCLLLADNNSDKDQHSGKNGQALSVPVINLRGKPLMPTRSGKARILLQQGKAIVIQRAPFTIQLCYLTGNYTQNIKLCIDAGYSTIGFSAINNKCELLSGELTLRKRISKLIEGKSNYRKTRRSRLLHRKPRFNNRNKPEGWFTPSIQHKLKTHLGLIEKLKKIPPVIKITIEVASFDTQKLQNPEITGVEYQQEELQGYEVREYMLEKWKHKCAYCGKSNLPLEIEHIIPKSRGGTDRVSNLTLACHKCNQKKGNQTAAEFGHSEIQKKTKQTLKATAFMNIVRWRLVNTLKCDWTYGYITKHARIKLGMKKSHVTDAFIAGGNVQERSRSYELTQTRRNNRSIQTNRKGHKPSIRRKRYRLQLNDLVKYIKSLCKVKDVHNYGRYVILEDKIGEIFDINVKKVEMVKHGKGIQF

SEQ ID NO: 9532 - protein, 512 aa, unidentified
MSTVYVLNKDGKPLMPTTRGGHVRHLLKEQKARVVRAKPFTIQLLYETNDVVQPLYLGIDPGRTNIGVAVVKANGTAVFTAHLETRNKEVPKLMQDRKKASRARRTNGRRCRRQRRAKANGTISKKCVKQDTAQSKNPSKRAKEIGIIKRRLPGYKKDVLCIGIKNKEAKYTNRTRPEGWLTPTANQLLQTHINLVRKMQKFLPISDVVLEVNKFAFMRLDNPDIQKWQYQQGPLYQKGSLENAVSEMQEHHCLFCDKPIDHYHHVVPQSENGSNTIANIVGLCAEHHNLVHKDAAWQKKLAEEKVGLNKKYGALSVLNQIIPALTNKLSVLFPKHFFVTAGKSTHDYRAAHGVSKDHWLDAYCIACSVLPSNVCDSNINNHMPYELKQFRRHDRRVLNNENMNRVYTLDNKAVAINRHKATEQEAASLEEFRKEHPNDVCKLKVKEHHPTYRNMNRNYPGSIFLVGKHVHIMQGIAGSKDGKATTYKDSNANSITASKCKFVAKNSGILFV

SEQ ID NO: 9533 - protein, 449 aa, unidentified; identical to SEQ ID NO: 4974

SEQ ID NO: 9534 - protein, 413 aa, unidentified; identical to SEQ ID NO: 2636

SEQ ID NO: 9535 - protein, 433 aa, Burkholderia sp.
MSVFVLDRSGKPLMPCSEKRATLLLARGRARVHRVMPFVIRLVDRKAGACARQPMRIKLDPGSKVTGIALVREADHGVAVLNLFELVHRGRQISEALAARRAFRRRRRGSNVRYRAPRFLNRRRSQGWLPTSLRHRVETTAAWVNRIRRWAPVTALSSELVRFDLQRLENPEISGIEYQQGTLAGYEVREYLLEKWNRTCIYCDVKGRPLQIEHLTAKARNGSNRIGNLGIACSNCNQDKGARDVREYVKDPQRLARILATASRPLKDAAAVNATRWALANALRATGLPLELASGARTKFNRVTHGIPKTHAFDAVCVGDVGSIRDWQRPSLAIKASGRGSYQRTRLTRHGFARGYLMRQKQVHGFQTGDHVRANVPGGKKAGSHIGRVAVRATGSFNIQTARAVVQGISYRYCTLIQRGDGYSYAPQPKDSF

SEQ ID NO: 9536 - protein, 411 aa, unidentified
MVYVQDIDGKPMMPTTRHGKVRRLLKDNKAVVVNTCPFTIKLTYKTSDYKQEIVLGVDSGTKHVGLSATTKSKELYASEVILRSDVVDLLSTRRGLRRTRRSRLRYRKQRFNNRVKSKKDGWIAPSVRHKIDSHIRIISFVYSILPVSKLIVEVAQFDTQKIKNPEISGKEYQEGEQLGFWNVREYVLARDGHKCQHCKGKSKDPILNIHYIESRKIGGDSPSNLITLCETCHKEFHKGNIKLKVSRGKSLRDAAVMGIMKWKLYEELKSKYDNVSMTFGYITKYNRINHGIEKSHVSDAFVISRNFNSCRLGYYYKRKLVRRHNRQIHKMKILKGGIRKRNQAPFKVFGFRLFDKVMFQGEEHFIYARRLSGQFNIRDINGENKKDVSCKKLKYVSHGLVSVKTNLFLSQ

SEQ ID NO: 9537 - protein, 413 aa, unidentified; identical to SEQ ID NO: 9225

SEQ ID NO: 9538 - protein, 432 aa, unidentified
MLTGLLAEQVDPAGIRKGDTLKVFVLNMRGKPLMPCSPAKARHMLKAGKAVVLRRTPFTISLTVATGETKQEVTLGVDAGAEHVGISATTEKEEVFASEVELRQDIKGLLADRLEFRRARRNRKTRYRAPRFDNRVRSKHKGWLAPSVENRIQAHISRIEAVCRVLPITKIVIETASFDIQKIKNPEVEGTDYLQGDQLGFWNVREYVLFRDGHVCRHCRGRSKDPFLNVHHLESRKTGGDAPNNLITLCETCHKAYHAGKIKLKARRGTPFRAEAFMGIMRWTLLERVRKAHLELPVENTYGYLTKHKHIVLGLPKTHCADAFCIAGNLSALRRGEFLYQRQTRKHNRQIHKCSILKGGVRKLHQAPFLVKGFRLFDKVKCKGRIGIIFGRRSSGYFDVRTLDGVRLSAGISSKKLMLLEKQTTFLTQLRK

SEQ ID NO: 9539 - protein, 414 aa, unidentified
MPCSPAKARLLLKEKKAIVKRRTPFTIQLTIATGETKQPEGLGVDAGYKHVGLSASTDKAELYASQVELRQDITDLLSARRALRRARRNRKTRYRAPRFNNRIRTKRKGWLAPSVENRINAHLSRIEAVLRLLPVTKITVETASFDMLLLKNPDIAGKEYQEGEQLGFWNVREYVLFRDGHVCQHCYGRSKDPVLNVHHLESRRTGGDSPGNLITLCETCHEALHRGEIALKTKRGHSFRAEAFMGMMRWEVLNRLKASHSELEVNNTYGYRTKHARIVNGIDKSHCADAFCIAGNLGAERLCEFFFQKQTRRNNRQIHKLSILKGGIRKRNQAPFEIKGFRLFDKVACKGEESFIFGRRSSGYFDVRKLDGTRISAGISYKKLRLLEKRRTYLTEIRKEEALPPLPEGRGLRA

SEQ ID NO: 9540 - protein, 430 aa, unidentified; identical to SEQ ID NO: 6405

SEQ ID NO: 9541 - protein, 447 aa, Geobacillus sp.; identical to SEQ ID NO: 6209

SEQ ID NO: 9542 - protein, 456 aa, unidentified
MSTCVCVLSNSGERLMPTFRLGKVRRLLKDGKAKIVKHHPFTIQLLYDSKTNTQPIEICEDVGYNYIGISVKSESHEYVSAQYDTLQDEKEHHDDCRKYRRTRRNRLRYRKPRFDNRKRGESWLAPSLRHKKELNVNVVKMYCAVMPITHATVEVGSFDTMLVKAIQEGKAIPEGADYQKGPRYNLATLREAVFYRDNYACQVCGRKIADGAILHMHHMFYWKGRHGYQLDELVTACEKCHTPANHQKGGKLFGFGEDKEFANLSGAAFMNAVRWQIVNALYATYGKEFVTITYGAMTKEKRIALQLEKTHSNDAYAMGDYYLAHRCVFRHYQKRRRNNRVLEKFYDATYIDARTGNKAKGKELFNGRINRNHKKDSENFHKYRSKKISKGRRSIRRQRYAIQPYDTVRLEGKTYITSGCHNKGTRLLIPVNGKSKSVAISKVQVVCHAGAWIQII

SEQ ID NO: 9543 - protein, 512 aa, unidentified; identical to SEQ ID NO: 8277

SEQ ID NO: 9544 - protein, 413 aa, unidentified
MTSYSFVLDANGKQLAPTKEPKAWFLIRKKRAALVSKYPMVIQLKKKIQENEICKDEIRCGIDDGGLHVGIALVQKCKSKNKVVFKGTIEQRNDVKHLMEVRRNYRRYHRYHKRYRQARFDNRKSSKRKGRIAPSILQKRQATIRVINRLNKWINITNYWLEDVSIDIRVLTDGYKSYSWQYQKSNRLDENIRKATILRDGGKCMECGKSNCRLEVHHIKPRRRNGSNTLDNLITLCESCHQKTEGQEELYMDRYFSLLKSSDNKNLNDAQHVMIGKMWLRKQLSGLGVLYLTSGGDTANKRIDWNIEKSHANDAVCITDLQPDTCDMKEWTMKPMRRQSKAKTDHVLGIHHRDLVEYTFKNGETHRGYVTALYPDQKAINFQSQTKHCKKVNARKCKLLWNYSKIYWFENAS

SEQ ID NO: 9545 - protein, 406 aa, unidentified; identical to SEQ ID NO: 3980

SEQ ID NO: 9546 - protein, 413 aa, unidentified; identical to SEQ ID NO: 5215

SEQ ID NO: 9547 - protein, 417 aa, unidentified
MPCSPAKARLLLKERKAIVKRRTPFTIQLTIATGEAKQPVALGVDSGYKHIGLSATTEKAELYASEVELRQDITDLLSARLALRRSRRSRKTRYRAPRFDNRVASKREGWLAPSVENRIAAHMSRVEAVMQVLPVTAITVETAAFDTQLLKNPDITGAAYQQGEQLGFWNVREYVLFRDGHVCQHCSGKSKDPILNVHHIESRRTGGDAPNNLITLCETCHKAFHRGEIELKIKRGKSFKAETFMGIMRRTLFERLKKAHPELNVRNTYGYLTKHKRISYGIAKSHCADAYCIADNLGAKRLEGFFFQKQTRKHNRQIHKLLILKGGLKKKNQAPYEVKGFRLFDKVICKGEEAFIFGRRTSGSFDVRRLDGTRISAGINYKKLRLLEPRTTYLTEFRKEAALPPLHKCRGVCAEFL

SEQ ID NO: 9548 - protein, 413 aa, unidentified; identical to SEQ ID NO: 3220

SEQ ID NO: 9549 - protein, 473 aa, unidentified
VIDIPEGREASASVTRPVRAFIERKTMSVFVLDKRKHPLMPCTERRARLLLSRRRAVVVRAYPFTIRLKNRTGDVTQPLRIKIDPGSKATGIAVVRENGQKQHVLALMELVHRGRQISKSLDQRRAFRRRRRNQLRYRAPRFLNRTKPKGWLAPSLQHRVDTTRSLVNRLRSLVPVVSISQELVRFDTQKMENPEVSGVEYQQGTLLGYEIREYLLEKWGRECAYCADTDTPLQIEHIDPKANGGSNRISNLTLACRPCNQEKDRKSLVSFFATSKRLKNHQAKLDRILKQCKKPLRDASAVNSTRWALHQTLKQTGLPVEVGTGGRTKFNRRRLNIPKTHALDAACVGEVEIVEGWDVPTLAIKATGRGSYKRTRLTKHGFPRGYLMRQKQVQGFQTGDMVRAVVPAGTKAGTWQGRVAVRKTGSFNIQTSSGAIQGISHRHCVLTQRADGYGYHIQPNQRKEEGDRENESR

SEQ ID NO: 9550 - protein, 422 aa, unidentified
MVYVLNINGHSLMPTERFSKVRRMLRDGKAKVIKRCPFTIQLLYQTTNNVQPVNLGVDAGSKHIGLSATTKNKVLYEADVELRNDIVTLLATRAELRRTRRNRKTRYRKPRFNNRIATKKEGWLAPSIKNKIQTHLSVVDKVYKILPVSKIIVETASFDIQKIKNPDINNEDYQQGEQLGFWNVREYVLFRDNHQCQCCKGKSKDKILNVHHLESRKTGGDAPNNLITLCEYCHKQYHLGKLNLPKNIHRGMKFNDAAFMGIMRWNFYDNLKKKYESSGVPVSLTYGYITKHTRIQYNLPKEHYIDARCISGNPTADSNGEYFYQKKVRCHNRQIHKTTILKGGRRKLNQAAYVIKNFHLFDKVEYQKENYFIFGRRTSGFFDIRKLDGTKINNGSISYKKLKLIEIKKYYLTERRIASPLI

SEQ ID NO: 9551 - protein, 470 aa, unidentified; identical to SEQ ID NO: 2825

SEQ ID NO: 9552 - protein, 465 aa, unidentified
MSTCVCVLSNSGERLMPTIRLGKVRRLLKDGKAKIVKHHPFTIQLLYDSKTNTQPIEICEDVGYNYIGISVKSESHEYVSAQYDTLQDEKEHHDDCRKYRRTRRNRLRYRKPRFDNRKRSEGWLAPSLEHKKELNVNVIKMYCEVMPITHAIVEVGSFDTMLVKAIEEGKATPESADYQKGPRYKLATLREAVFYRDNYTCQVCGRKANEGAILHVHHIFYWKGRHGNSLSELITVCEKCHTPANHQKGGKLYGFGEDIKFANLSGAAFMNTVRWQIVNVLYAAFGKPFVTFTYGAMTKEKRIALHLEKSHNNDAYAMGSFHPVNRCAFEHYEKVKRNNRILEKFYDSQYIDIRTGEIATGKELFNGRISRSHKKDSENLHKYRGKRICKGHRALRRKKVALNPGDLVSLNGEILVVHGTHTKKNGSVNVEFKTPSRGGKKSASLKKLKIVKTSNLMHSAWTKVA

SEQ ID NO: 9553 - protein, 431 aa, unidentified
MVYVLDINGQPLMPTARHGKVRRLLNSHLAKVVKRCPFTIQLLYQSTKEIQPVSLGVDAGSKHIGLAATIEQKVLYQEELTPRNDVVKLLSAKRACRHSRRNRKTRYRKPRFNNRVHSKHKGWLAPSVEVKIQEHITAIKNICKILPASEIHVETAEFDLQRLKAMEEGKTFPVGTDYQLGEQYDFYNTRQYVLHRDGYTCQCCGVHDKDVKLHVHHIESRQTGGNAPNNLITLCEHCHKALHEGKIKLPKGKKRGKSHRDAAFMGIMRNTLLERLKKEVSVPVMMTYGYITKYWREKADLEKSHINDAICISKHPYTKPLDTYYLTKVVRHHNRQIHKANFSKGGIRKRNQAPYLVKGFRLFDKVLYQGKEYFIFGRRTTGYFDIRTLDGTKANKGSVSYKKLRIQDTAKAYLKEVRAIPHMNKFTCDLA

SEQ ID NO: 9554 - protein, 449 aa, unidentified; identical to SEQ ID NO: 4729

SEQ ID NO: 9555 - protein, 451 aa, unidentified
MSVAVMSKTGMRLMPTSEYRARKLLKSKKATVYRYNPFTIQLTERETGDVQTVELCMDTGYLHIGTSVKSEKHEYFGVQIDTLTDEKQKHDACRMYRRQRRGRKRYSQSRFNNRKRSDGWIAPSLEHKKDIHIQTISRICNAMPITNITLEMGNFDTQVLKALEENRPLPQGTDYQHGERYGIATLREAVFARDKYTCQCCRKTIADGAILHVHHIIYRSRGGTNRMSNLATVCDRCHTPANHKPGGRLYNWKPKIASFKGATFMTAVRWKMYNEVKSKFSDINIHITYGAETKEQRRAFDITKSHVNDALVMGQFHPKHRSRPVCYKKKRRNNRCLEKFYDAKYIDSRDGKKRSGQELFNGRINRNHKKDSENLHQYRQQKVSSGRKTIRKQHYSIQPHDIVVFNRQQFETSGCHCNGARAILLPQKKSVAIKKLSIHKYAGGYFKSDFT

SEQ ID NO: 9556 - protein, 431 aa, unidentified; identical to SEQ ID NO: 4463

SEQ ID NO: 9557 - protein, 431 aa, unidentified
MNRVFVLSKTGKTLMPCHPARARQLLHDKKAVIKRLYPFTIQLTHRSEEYIQPVELKFDPGSKQTGIGIVLHGKNRFSAIYGTVLTHRGNEIKNNLDSRRMIRRSRRNRKTRYRQVRFLNRVRSKHKGWLAPSVQSRVDNIVEWSKRFIRYVTVGFITVESVKFDMQKMENADVDGIEYQRGTLFDYEVKEYLLEKYNYSCVYCGAKNVPFEKEHVIPRSRGGSNRISNLVLSCRSCNEKKDNLPIEEYLKDNPALLKKIKAQLKSSLKDAAAVNITRKQIVKELENLNVPVLTGTGAETKYNRVSQGYKKEHYIDALCAGTTGTKVYIPSTLKPLLIKKERRNNRQMCLVDKYGFPRGKAKGSKIVHGFKTGDIVKAVVLKGKKKGTYKGKVAVRSSGSFNIKVKQGVVEGIGWKNCVMLYRFDGYSYAY

SEQ ID NO: 9558 - protein, 431 aa, unidentified
MPNKVYVINKHGRPLMPCSPAKARHLLDEGKAKIKKRTPFTIQLVYGSSGYTQEVILGVDAGSKTIGMSVSTTKEELLSAEVKPRNDVVDLQSTRREFRRARRNRKTRYRKPRFDNRVRSKHKGWLAPSVEVKIQEHITAIKMVCRILPVSKVVIETAEFDLQLLKAIADGKPVPQGEDYQKGEMCGHYNVRQYVLWRDDYTCQCCGTHATKKKEVRLHVHHLESRKVGGDAPDNQVTLCESCHEKLHKGLITAKDFKKRKRRSTRDATFMGIMRKTLMQRLCSELPIPVVETRGYITKATREKLLVLPKSHTNDALAIAQGKQGFNVGYLPGILQIDKIYTIRPVRHHNRQLYKATILKGGIRKSNQTKKYVFGYRLFDKVQFNGQDCFIWGRRTTGIFTIKTINGKMIKDGISFKKLKLLEKSTSYLIA

SEQ ID NO: 9559 - protein, 526 aa, Streptomyces sp.
MATFHVGQQTHQVVLPQQLALEFASADTPGSRDETGREDHTDDVVPGVEHGRGETGKGVTESDRRHPGTSLPGEGLAARLSHLPHPVVFVLDRHGQPLQPTSPARARKLLKAGRAVVARHTPFVIRLKDRTVAESVVSGVELGIDPGSKYTGLAVFAADGDGVRRGLYHVELQHRGSQIRDKLTARAAHRRGRRSRNLRYRAPRFNNRVRPGGWLAPSLRHRVETTMTWTTRLARWAPVTAVHVELAAFDTQLLTSEDTLVGVEYQHGTLAGTEVREYLLAKWQRRCAYCGAYGVPLNIDHIHPRSRGGSDRISNLTLACIPCNHAKGSSSIEEFLRDKPTLAARIRAQAKKPLRDAAAVNATRWTLCRALESAFPCVRIATGGRTKWNRQRVGLSKTHTLDALCVGVLNAVTVHPRRVLIVTAGGRGRYRRTDLDRHGFPRKINPRSKAVFGFQTGDYARAVIPTGRYAGTHVGRVAVRTSGRFNMRTRHSLIQGIHHRHVRLLQRADGYAYATREEAGVRWLSR

SEQ ID NO: 9560 - protein, 512 aa, unidentified
MSTVYVLNKNGKPLMPTTRCGRVRHLLKEQKARVVTSNPFTIQLLYETDDVVQPLYLGIDPGRTNIGVAVVKTDGTAVFTAHLETRNKEIPKLMQGRKKARRARRTNGRRCRRQRRAKANDTISKKCVKQDTAQSGSASKRAKKIGVIKRHLPGCEKGVLCIGIKNKEAKFSNRTRPEGWLTPTANQLLQTHINLVKKIRKFLPISDVVLEINKFAFMQLDNPNIQKWQYQQGPLYQKASLEEAVSEMQEHHCLFCKKPIAHYHHVVPQSENGSDTIGNIIGLCTKHHDLVHKDTAWQKKLAKKKTGLNKKYGALSVLNQIIPALTKGLGSRFQGHFYVTTGKSTYDYREVHGVSKDHWLDAYCIACSVLPNDVCDSDINNRVPYELKQFRRHDRRALHKANINRVYTLNGKSVATNRHKAIKQTTDSLEEFRQCQPDDVCKLKVKEHHPEYRNPERNFPGCVFLVGKHTHVMQGTSGSHNGQADGYYDTNGNSYSSGKCKFVAKNKGIVFA

SEQ ID NO: 9561 - protein, 415 aa, unidentified; identical to SEQ ID NO: 6534

SEQ ID NO: 9562 - protein, 425 aa, unidentified; identical to SEQ ID NO: 3151

SEQ ID NO: 9563 - protein, 415 aa, Bacillus sp.; identical to SEQ ID NO: 2431

SEQ ID NO: 9564 - protein, 440 aa, unidentified
MPTNSYRARRLLKSKRAVIYKYRPVFTIKLVDRANGYTQPIEYKCDTGYQNIGISICSDTKEFVNEQRDLLKDEVKRHSDSRKYRRTRRNRLRYRKKRFDNRRGMISEDGFAPSIRNKRDVHVRLYEEYYKVFPITKAAFEMGQFDTQVLKAVEAGLPVPAGTDYQRGEQYGYATLREAVFARDNYTCICCGKSAIKDGVKLRIHHIGYLSGDRSNRMANLGSVCESCHTSKNHKPGGKLYNLKPKLKTFKGATFMTTVRYSMVKQLKAATPDVDIKVTYGAATKLARRVLSVKKTHSNDAYCMGEFHPKHRSDFKHYSKCRRNSRVLSRFYDAKYRDLRDGSVKTGSQLSCGRTNRKISRHTEFDERIYRAHKISRGRVSIRRQHYSLRPGDKVLYDGKVYFVTGMQNNGTCVKLTNGKVYSLKKVCVLQHCNAWTAVI

SEQ ID NO: 9565 - protein, 497 aa, Streptomyces sp.
VLPQQLALEFESADNPGIRDETGLGRRKASGVEHVRGEITGSAPTAGGVTPDHQVREPGREADPAVFVLDKHGTPLQPTSPARARKLLVSGRAVVARHTPFVIRLKDRTADASEVDGVELGIDPGSKHTGLAVFTARDGERRGRFAVQLDHRGAAIRKKLEQRSAYRRGRRTRNLRYRAPRFLNRTRPKGWLPPSLQHRVDTTMSWTGRLARWAPVRTVHVERVAFDTHAISAGKPLEGAEYQHGTLHGTEVREYLLAKFGRACSYCGATGVPLNIDHIRPRSRGGSDRVSNLTLACIPCNQAKGHRPVEEFAPKQAADILKRAKAPLRDAAAVNATRWALWRALDARLPTRTASGGRTKWNRVRCALPKTHTLDALAVGDLDTVTAWPRTVLVVKATGRGTYARTRADKHGFPRLRLPRTKQFFGYATGDLVRAVVPSGKNAGTHTGRIAVRSSGSFAVRTAGGLYTARYKYFRLLQRADGYAYTTQPEGGPSDAP

SEQ ID NO: 9566 - protein, 413 aa, unidentified; identical to SEQ ID NO: 2636

SEQ ID NO: 9567 - protein, 431 aa, unidentified
MPGKVYVISRLGHPLMPCSPAKARHLLDDGKAKVVKRTPFTIKLLYGSTEYTQPVILGVDAGSKTIGLSASTTKEELFAAEVMPRNDVVENLSTRREFRRARRNRTTRYRKPRFNNRVHSKNNGWLAPSVEVKIQEHITSIKRVCAILPISKIVVETAEFDLQLLKAVQDGKPVPEGEDYQKGEMYGSYDVRQYVLWRDNYTCTCCGVKGTDKKPVKLHVHHFESRKHGGNAPDNYGTLCEDCHKKLHLGIITDISLKTRKRPSTRDAAFMGIMRKTLMQRLITGLSIPVAETKGYITKAAREEILKLPKTHTNDALAIAQGRHGFGIREPAYVKPTNRIYTVRPVRHHNRQLHKATILKGGIRKLNQASKYIFGFRLYDKVLYQGGECFVWGRRTSGSFLLRTIDGTKVKDGVGYRNLTLLERSTNYLIA

SEQ ID NO: 9568 - protein, 437 aa, Clostridium sp.; identical to SEQ ID NO: 8243

SEQ ID NO: 9569 - protein, 431 aa, Aphanizomenon sp.
MSKVFVLDTEKRPLDPINPAQARQLLRNKKAAIFRQFPFTIILKKSCPDSPVSSLRLKIDPGAKFTGMALVNDSTGEVVFAAELKHRGFAIRDALTSRSQLRRSRRARKTRYRQPRFLNRTRPERWLAPSLQSRVENIKTWVERLRKLAPIRAISQELVRFDMQLMANPDIQGKEYQQGTLAGYESREYLLEKWGRQCAYCGVKDVPFQVEHIYPRAKGGSNSITNLTLSCEKCNTKKGTKDIKDFLKKDRSKLEKILEQAKRPLADAAAVNTTRLALLFVVKATGLPVETGSGGLTKFNRSQQNLEKTHWIDAACVGQSTPILNIKGVKPLLITANGHGTRQSCRTDKYGFPSRYVPRFKFVNGFQTGDIVKAVVTKGKKIGAYIGRVAVRTSGSFNISTISGLIQGISYKCCKSIHKKDGYEYGKSKIC

SEQ ID NO: 9570 - protein, 424 aa, Anabaena sp.
MQNYVFVVDTNKQPLNPIPPARARELLTKEKAAVFRMYPFTIILKHTVLNPTLKPLTVKLDPGSKFSGIAVLDEENVIWVAELEHRGGQIKNALESRRSLRRSRRNRKTRYRQPRFNNRKRTEGWLAPSLMHRVFTIETWVKRLCRYAPIVQITMELVKFDTQAMQNPEIDGVEYQQGELAGYEVREYLLEKWGRKCAYCDQEAVPLQIEHIHPRAKGGSNRVSNLTLSCQRCNTKKGTRSIDEFLQKNPSRLKKIQRQAKQPLRDAAVVNSTRWALFQTLKNILPTTTGTGGQTKYNRTRLELPKHHWVDAACVGNVEKLNLLTQQPLRIKCTGWGTRQMCGTDKYGFPIRHRERKQVHFGFRTGDIVKAVVLSGKKVGQYVGRLLCRKIGSFDIVTHVGRVAGISYRFCTPIHKQDGYSYKF

SEQ ID NO: 9571 - protein, 544 aa, unidentified; identical to SEQ ID NO: 3572

SEQ ID NO: 9572 - protein, 431 aa, unidentified
MPNKVYVINKHGRPLMPCSPAKARHLLDEGKAKVKKRTPFTIQLIYGSSGYTQEVILGVDAGSKTIGMSTSTKKEEVFAADVTPRNDVVDLMSTRREFRRARRNRKTRYRKPRFDNRVRSKHKGWLAPSVEVKIQEHITSIKRVCRILPVSKVVVETAEFDLQLLKAIADGKPVPQGEDYQKGEMYGHYNVRQYVLWRDDYTCQCCGAHATKKKEVRLHVHHLESRKVGGDAPDNQVTLCESCHEKLHKGLIAEKDFKKRKRRSTRDATFMGIMRKTLMQMLCSELPIPVVKTRGYITKATREKLLVLPKSHTNDALAIAQGKQGFNVGYLPGIVQIDKICTIRPVRHHNRQLYKAAILKGGIRKSNQAEKYVFGYCLFDKVQFNGQDCFIWGRRTTGIFTIKTINGKMIKDGISFKKLKPVEKSTGYLIA

SEQ ID NO: 9573 - protein, 446 aa, unidentified; identical to SEQ ID NO: 2419

SEQ ID NO: 9574 - protein, 406 aa, Moorena sp.
PLNPISPKKARRLLDKGKAAVFRMYPFTIILKTAIANPTISPGQIKIDPGSKVTGFALVQDDQVIWGMELEHRGGLIKKKLESRSAVRRGRRNRNTRYRKPIFLNRKRPEGWIAPSLEHRVLTIETWVKRLIKFCPINEISVERVKFDTQKMQNPEINGIEYQQGDLAGYEVREYLLEKWGRECAYCGKQNIPLQIEHIHPKSKGGSDRVNNLCLACEKCNQRKGNRPIEEFLKKKPGLLQKIKNKAKQPLRDAAAVNTTRNRIVKVLKEVKPVVTGTGAQTKYNRTKLGLSKQHWIDAACVGDIKTLVLRTSQPLLVTCKGQGGRQKAALNKYGYPIRHNPLKPIKGWSSGDIAKNLLTGEFGRVNPRSKSNSFNYTAPGKKAISLHLKNLLRVHRKDGYSYGFC

SEQ ID NO: 9575 - protein, 420 aa, unidentified; identical to SEQ ID NO: 4198

SEQ ID NO: 9576 - protein, 430 aa, unidentified
MPKVYVLNRHGRPLMPCTPAKARHLLDAGKAKVRHRTPFTIQLLYGSTGYTQEVILGVDAGSKTIGLSAATETEELFSAEVKPRNDVVELMSARRQFRRARRNRTTRYRKPRFDNRVRSKHKGWLAPSVEVKIQEHMTAIRRACAILPVSKVVVETAEFDLQLLKAVAEGKPVPQGEDYQKGEMYGHYNVRQYVLWRDSYTCCICGVHGSVRKGVPLHVHHLESRRVGGDAPDNLVTLCTACHDKLHKGIIMAADIKKRKRRSTRDATFMGIMRMTLLRRLREQLPVPVVETRGYITKATRENLLVLPKSHTNDALAIAHGPQGFRAEYLPNTRQADRLYTIRPVRHHNRQLHKATILKGGVRKANQAEKYICGFRLYDKVLYNGIECFVWGRRTSGSFLLRQLNGEKVKDGVSYKHLKLLERSQSYLVA

SEQ ID NO: 9577 - protein, 413 aa, unidentified
MTSYAFVLDANGKQLAPAKEQKAWFLIRKKRAALVSKYPMVIQLKKEIPENEICKDEIRCGIDDGGLHVGIALVQKCKTKNKVVFKGTIEQRNDVKHLMEVRRSYRHYHRYHKRYRPARFDNRKSSKRKKRIAPSILQKRQAIIRVIHWLNKWINITNYWLEDVSIDIRALTDGYKPYRWQYQKSNRLDENIRKAAILRDGGKCMECGKLNCRLEVHHIKPRRRNGSDTLDNLITLCESCHQKTEGQEELYMDRYFSLLKSSDHKNLNYAQHVMIGKEWLRKQLSSLGVLYLTNGGDTANKRIDWNIEKSHANDAVCITNLQPDTYDMKEWTVKPMRRQSKAKTDNVLGIKHRDLVEYTFKNGETHRGYVTALYPEQKAINFQSPTKHCKKVNARKCKLLWKYSKIYWFENAS

SEQ ID NO: 9578 - protein, 453 aa, Cupriavidus sp.
MAVFVLDKHGKPLMPCTEKRARLLLERGRARVHRLMPFAIRLIDGRVADSEFQPLRLKLDPGSKGTGVALVRETTDVNGIRHAIVLSLAEILHRGRQISEALLARRSMRQARRGRKTRYRASRFHNRRKPKGWLAPSLRHRVETTVSWVSRFRALAPITALSTELVRFDMQAMQHPEISGIQYQQGTLQGYELREYLLEKFGRICAYCDAKDRPLEIEHIDARANNGSNRVSNLTLACRPCNQKKGALPLEVFLHNDPQRVRRIRAHMKAPLRDAAAVNVTRFALLDALKATSLPVETGSGAQTKYNRRRLDIPKAHALDAACVGEVQAILGWQRPTLCIKCTGRGSYQRTRLTANGFPRGYLMRSKRAFGFQTGDMVKAEVPAGKRAGTHVGRVAIRATGKFNIQTIGGAVQGISHKYCSILQRGDGYGYALVAHSQKKIESRTGATLRVAR

SEQ ID NO: 9579 - protein, 242 aa, unidentified
MSTIYVLSKDGKPLMPNFVHKETAWQEKLAKKKTGLNKRYGALSVLNQIIPALTKELSSLFPKHFFVTTGKSTYDYRAAHGVSKDHWLDAYCIAGSILPNDVCDNNINNRVPYKLKQFRRHDRRALHKENMSRVYTLNGKKVATNRHKAIEQTTDSLEEFRQNHPDDVCKLKVKEHHQEYRNPGRNFPGCVFLVGKHTHVMQGTSGSHNGKADGYYDTNGNSYSSGKCKFVAKKRRDCIYIN

SEQ ID NO: 9580 - protein, 446 aa, unidentified
CRKLLEVRRAVFYRHYPAVIILKDVDARNIYKLPSYRIKIDPGAVHTGIAIVCNETNEVMYFLQIEHRGSEVKKALITRKQTRRNRRSRETRYRRCKFKNGGDFDSSRKNGWLPPSVKSTADNVIHWVEKLCRYINITECSFEAVRFDSQLMDNPEIGGEEYQQGTLSGYELREYLMEHFRHTCQYCGGESGDPVLEWEHKIPRSRGGSDSVKNASLACSCCNRDKGNRTLEEYLEDSKHISPKGKSEKALNEARISHISGILEKGTIYGSNRYSAWVNSTRRYIEKYLFLMFDDVECCSGGRTKYNRIKLKLPKDHHYDALCVGSVPKEGYTDRTNSYVLYVKATGRGTRFRGQCNSCGVITVKYKNNSKRKFGFQTGDIVQLNKPKGKDTGQYTGKVAVRSSGSFDLIRKGCKRITANYKYFRMMQYSDGYEYLGPLRPIPHSA

SEQ ID NO: 9581 - protein, 456 aa, unidentified
MNTCVCVLSNNGERLMPTFRLGKVRRLLKDGKAKIVKHHPFTIQLLYDSKTNKQPIEICEDVGYNYIGISVKSESHEYVSAQYDTLQDEKEHHDDCRKMRRARRNRLRYRKPRFDNRKRSEGWLAPSLKHKKELNVNVVKMYCAVMPITHATVEVGSFDTMLVKAIQEGKAIPEGADYQKGPRYNLATLREAVFYRDNYVCKVCGRKATEGAILHMHHMFYWKGRHGYKLDELVTACEKCHTPANHQKGGKLFGFGEDKEFADLSGAAFMNAVRWQIVNALHTTYSKEFVTITYGAMTKEKRIALQLEKSHNNDAYAMGDYHPACRCKFIHYQKRRRNNRVLEKFYDATYIDTRTGNKAKGKELFNGRISRNHKKDSENLHKYRSKKVSKGRRSIRRRRYAIQPYDTVRLEGKTYITSGCHNKGTRLLIPVNGKSKSVAISKVQAVCHAGAWIQII

SEQ ID NO: 9582 - protein, 442 aa, unidentified; identical to SEQ ID NO: 2903

SEQ ID NO: 9583 - protein, 396 aa, unidentified; identical to SEQ ID NO: 7124

SEQ ID NO: 9584 - protein, 414 aa, unidentified; identical to SEQ ID NO: 2588

SEQ ID NO: 9585 - protein, 448 aa, Variovorax sp.
VSVYVLDRSGRPLMPCSEKRARKLLNCGRARVHRLQPFVIRLVDRTQDDCTLQHLRLKLDPGSKATGAALVRESESTDATGEVRRAATVVNLMEIIHRGRQISEALTARRQMRRRRRGNLRYRAPRFLNRCGVKTGWLAPSLQHRVDTTMAWVKRLQRWAPIKSISSELVCFDMQALQNPEISGMEYQQGTLHGYEIREYLLEKWGRACAYCGTKDVPLQIEHIQAKARSGSNRPSNLTLACQCCNQKKGSRPIEEYLAKDPKRLAHILAYAKRPLKDAAAVNATRWALADALKATGVPLELSSGGRTKFNRSMLSVPKTHSLDAACVGLVDAISGWVKPVLTVKCTGRGSYQRTRLDKFGFPRGYLMRSKRVHGFGTGDMVIAKVPKGVKAGVHAGRVAVRASGSFNVQTHRDGIAAVFQGINHRHCRVVQRNDGYGYFLNRAISKT

SEQ ID NO: 9586 - protein, 407 aa, unidentified
MVYVQDINGNPLMPTTRHGKARRLLKNNKAVVVNLCPFTIRLTYETTNYKQEIVLGVDAGTKHVGLSATTKSKELYSGEVILRSDIVDLLSTRRELRKTRRNRLRYRKPRFNNRIKSKRPGWIAPSVKYKIDAHIRVIDNVCSILPISRIVIEVAQFDTQKIKNPDITNIEYQQGDQLGFWNVREYVLTRDNHKCQYCKGKSKDKILNVHHIESRKTGGDSPSNLITLCETCHNEFHKGNIDLKVKREKSLRDAAVMGIMKWRLYEILKSIFPNVSMTFGYITKYNRIHNDIEKSHVSDAFVISKNFNAKRLNFSYKIKLVRRHNRQIHKMKIPKGGTKRPNQSPFEIFGFRLFDRVRFDSKFYFIYGRRKTGSFNIRDINGENKKDVIYKKLKLSRCKRFMIQKEM

SEQ ID NO: 9587 - protein, 427 aa, unidentified; identical to SEQ ID NO: 8384

SEQ ID NO: 9588 - protein, 462 aa, unidentified; identical to SEQ ID NO: 4058

SEQ ID NO: 9589 - protein, 414 aa, unidentified
MPCSSAKARLLLKEKKAIVVRRTPFTIQLTIATGETKQPVSLGVDAGYKHVGLSASTEKAELYASEVELRQDVSDLLSARRALRQCRRNRKTRYRAPRFDNRIRTKRKGRLAPSVENRINAHLSRIKTVLRLLPITKITVETASFDIQLLKNPNIAGKEYQEGEQLAFWNVREYVLFRDGHVCQHCHGRSKDPVLNVHHLESRRTGGDSPGNLITLCETCHRALHRGEMKLRAKRGQSLRAEAFMGIMRWEVLGRLKTSHPELEVNNTYGYRTKHVRIRNGIAKSHCADAFCIAGNLGAERLGEFFFQKQTRRNNRQIHKLSILKGGIRKRNQAPFEVKGFRLFDKVAYKGEEGFIFGRRSSGFFDVRKLDGTRISAGISCKKLHLLEKRQTYIKEIRKEEALPPLPDGRDLRA

SEQ ID NO: 9590 - protein, 512 aa, unidentified; identical to SEQ ID NO: 2745

SEQ ID NO: 9591 - protein, 415 aa, unidentified
MENEMAYCFVVDKNNRPLAPTKVNKGWYLVRKGRAKIKSRYPMVIQLEKEVEPDKYDESRMVVGIDDGSAHVGLAIVQKCPTKNKVVFKGTIEQRQDVKHLMDVRRGYRRYHRHHKRYRQARFNNRHSSKRSGRLAPSIKQKKDAILRVLYQLNRWIDIQEYCLEDVCIDIRAMTDGYNPYKWKYQKSNRLDENLRKAAIIRDGCKCQECGRSNCVLEVHHIRARKYGGADTIGNLITLCSGCHQKTEGREREFEDRYFKIIGSKPKRFDYAMHVMQGKNYLREKISELGPLHLTNGGETANKRINWNIEKSHSNDAICITDCVPDTCDVKEWIIRPMRRKSKAKTDNVLGIRHRDLVSYTYKNGEIHTGYVTALYPELLALNFQSKTKHCKKVNARKCRLLWKFDKIYWLEQRV

SEQ ID NO: 9592 - protein, 419 aa, Bacillus sp.; identical to SEQ ID NO: 2411

SEQ ID NO: 9593 - protein, 453 aa, Lactobacillus sp.; identical to SEQ ID NO: 4050

SEQ ID NO: 9594 - protein, 332 aa, unidentified; identical to SEQ ID NO: 8875

SEQ ID NO: 9595 - protein, 593 aa, Streptomyces sp.; identical to SEQ ID NO: 8708

SEQ ID NO: 9596 - protein, 416 aa, unidentified
MVYVLSQHGQPLMPTENHAKVRALLKHGKAKVIQRCPFTIQLLYESTTHTQKINLGIDAGSKTIGVSATTDSKVLYESEVVLRNDIVELLSGRRALRNSRRSRKTRYRKPRFDNRKKPDGWLAPSIRQKIETHVTVVGNVMKILPVTKIIVETASFDIQKIKNPEIEGEGYQHGEQLDFWNVREYVLFRDGHTCQCCKGKSKDNILNVHHIESRKTGGNAPNNLITLCETCHKAYHKGIITLPKEIHRGMRFRDAAFMGIMRWAFYDRLKELYNPLGAEVINTYGYITKNTRIEHGLPKEHYVDARCISDNPAAKPLDHYYFQKKVRCHNRQIHKNTILKGGIRKRNQASYEVKGFRLYDQVLWKGQKCFIFGRRSTGRMDLRLLDGTHINASVGHENLKLLSMRKNYLIEQRKAG

SEQ ID NO: 9597 - protein, 254 aa, unidentified
EVAQFDTQKINNPEISGKEYQEGDQLGFWNVREYVLARDGHKCQYCKGKSKSKILNVHHIESRKTGGDSPSNLITLCEICHKEYHKGNIDLKIRRGKSLRDAAVMGIMKWRLYEELKSRYDRVFMTFGYVTKYNRIKYGIEKSHTSDAFVISMNINAKRIERQYLKRLIRRHNRQIHKMKILKGGKKKNNQAPFEVFGFRLFDKVLYNNKIFFVYGRRKSGSFNVRDFNGENSKDVSRKKFKLIRGKRHPIILK

SEQ ID NO: 9598 - protein, 431 aa, unidentified
MPNKVYIINKHGRPLMPCSPAKARHLLDEGKAKVKKRTPFTIQLVYGSSGYTQEVILGVDAGSKTIGMSVSTTKEELLSAEVKPRNDVVDLLSTRREFRRARRNRKTRYRKPRFDNRVRSKHKGWLAPSVEVKIQEHITSIKRVCRILPVSKVVIETAEFDLQLLKAIEEGKPVPQGEDYQQGEMYGHYNVRQYVLWRDGYTCQCCGAHATKKKEVRLHVHHLESRKVDGDAPDNQVTLCESCHEKLHKGLIAEKDFKKRKRRSTRDATFMGIMRKTLMQRLCSELPIPVVKTRGYITKATREKLLVLPKSHTNDALAIAQGKRGFNVGYLPEIAQIDKIYTIRPVRHHNRQLHKATILKGGIRKSNQTEKYVFGYRLFDKVQFNGQDCFIWGRRTTGIFTIKTINGKMIKDGISFKKLKLVEKSTSYLIA

SEQ ID NO: 9599 - protein, 560 aa, unidentified
HAKASSSQGKHNLLFRQGRLIAKKVTYMSTVYVLNKDGKPLMPTTRGGHVRHLLKEQKARVVQSNPFTIQLLYETNDAVQPLYLGIDPGRTNIGVAVVKADGTAVFTAHLKSRNKEIPKLMQDRKRARRARRTNGRRHRRQRRAKANGTISKKCVKQTTTQNGSVSKRAKEIGIIKRHLPGCEKDVLCIGIKNKETKYTNRERPEGWLTPTANQLLQTHVNLVKKVQKLLPISDVVLEVNKFAFMRLDNPDIQKWQYQQGPLYKKESLESAVSEMQEHHCLFCKKPIDHYHHVVPKSENGSNTIANIVGLCAEHHNLVHKDVAWQEKLAEEKTGLNKKYGALSVLNQIIPALTNKLSVLFPKHFFVTAGKSTHDYRAAHGVSKDHWLDAYCIACSVLPSNVCDSNINNHVPYELKQFRRHDRRVLHKANMSRVYTLNGKAVATNRHKAIKQTTDSLEEFRQNYPDDVYKLKVKEHHPAYRNLNRNYPGSVFLVGKQAHVMQGIASSKDGKTTKYNDTNATTITAGKCKFVAKNSGILFVQCKFRKALSDGTTKKLQYPVR

SEQ ID NO: 9600 - protein, 470 aa, unidentified
MVGGVSQIFQKKEVSALDTVAVISASGRKLMPTNSYRARRLLKSRRAVIYRYRPVFTIKLVDRTNGYTQPIEYKCDTGYQNIGISICSDTKEFVNEQRDLLKDEVKRHSDSRKYRRTRRNRLRYRKARWNNRKGMISKDGFAPSIRNKRDVHIHLYEEYYKVFPITKAVFETGQFDTQVLKAVEAGLPVPAGTDYQRGEQYGYATLREAVFARDSYTCICCGKSAIKDGVKLRIHHIGYLSGDRSNRMANLGSVCENCHTSKNHKPGGKLYNLKPELKTFKGATFMTTVRYSMVKQLKAATPDVDIRVTYGAATKLARKELNVKKTHSNDAYCMGEFHPKHRSDFKHYRKCRRNSRVLSRFYDAKYMDLRNSSIKKGSQLACGRTNRRIPRHTELNERIYRAHKISRGRVSIRRQHYSLRPGDKVLYDGKVYFVTGMQNSGTHVKLTNEKVYSLKKVHVLQHCNAWTAVI

SEQ ID NO: 9601 - protein, 408 aa, unidentified; identical to SEQ ID NO: 3192

SEQ ID NO: 9602 - protein, 429 aa, Macromonas sp.; identical to SEQ ID NO: 6403

SEQ ID NO: 9603 - protein, 413 aa, unidentified
MTSYAFVLDANGKQLAPAKEQKAWFLIRKKRAALVSKYPMVIQLKKEIPENEICKDEIRCGIDDGGLHVGIALVQKCKTKNKVVFKGTIEQRNDVKHLMEVRRSYRHYHRYHKRYRPARFDNRKSSKRKKRIAPSILQKRQAIIRVIHWLNKWINITNYWLEDVSIDIRALTDGYKPYRWQYQKSNRLDENIRKAAILRDGGKCMECGKLNCRLEVHHIKPRRRNGSDTLDNLITLCKSCHQKTEGQEELYMDRYFSLLKSSDHKNLNYAQHVMIGKEWLRKQLSSLGVLYLTNGGDTANKRIDWNIEKSHANDAVCITNLQPDTYDMKEWTVKPMRRQSKAKTDNVLGIKHRDLVEYTLKNGETHRGYVTALYPEQKAVNFQSPTKHCKKVNARKCKLLWKYSKIYWFENAS

SEQ ID NO: 9604 - protein, 416 aa, unidentified; identical to SEQ ID NO: 7823

SEQ ID NO: 9605 - protein, 436 aa, unidentified
MTKTLTTRTTQACVLDQQGKPLMPMTRLGKVYRLLKTQKAHIVSYEPFTIQLDYEPDTHIIQPLTLGVDSGAIHSGYSVANEHREYYNAEVIARNDISNRLSERHMYRRNRRSRKTRYRQPRFNNRKNKKKGWLPPSLEQKVAVQVNEIDHIHRYFPIETIIVETAEFDIQKIKNPGISGIEYQQGTLQGYNVRNYLLEKHRRKCFYCGKAVSDFEVEHMLPKSKGGSNRIDNLTLSCHDCNEKKGTSTAEEFIQQTLPAKKATAKLKQLPQEKRLFKYMAHMNTTRWTLYDTIKGIYPNVKMTYGYITKYNRIQAGLPKAHHIDAKCITGFATVPSMSQTVVKVKMRRHNRQLHRATFSKGHVRKTASLPKTIFSFQLYDLVCFNNHRYYIKSRRSSGYFALVSVENLKNEERTYKKLTLLAHTNAYLTNHYVNA

SEQ ID NO: 9606 - protein, 458 aa, unidentified
MSTGLRAEQAEPAGIRKGDTLKVFVLNMRGKPLMPCSPAKARHMLKAGKAVVLRRTPFTISLTVATGETKQEVTLGVDAGAEHVGISATTEKEEVFASEVELRQDIKGLLADRLAFRRARRNRKTRYRAPRFDNRVRSKHKGWLAPSVENRIQAHISRIEAVCRVLPITKIVIETASFDIQKIKNPEIEGEGYQQGEQLGFWNVREYVLFRDGHVCQACKGRSKDLILNVHHIESRKTGGDAPGNLITLCEACHKAYHAGKLKQFSPRRGASFRAETFMGIMRWTLLERVRKAHLELPVENTYGYLTKHKRIVLGLPKTHCADAFCIAGNLSALRRGEFLYQRQTRKHNRQIHKCSILKGGVRKLHQAPFLVKGFRLFDKVKCKGRIGIIFGRRSSGYFDVRTLDGVWLSAGISSKKLMLLEKQTTFLTQLRKEVGASSPSERKRFPRRIIMIREQQP

SEQ ID NO: 9607 - protein, 442 aa, Lactobacillus sp.; identical to SEQ ID NO: 3226

SEQ ID NO: 9608 - protein, 538 aa, Streptomyces sp.
MTTFPAGEQTHRAVLPQQPALESARADTPGSRDETAHGHPAPARDTGREHGRGETDGRGTGHRRRHAEKAANRDGDVPPQHITHHGGTGSGRVFVLAKGGEPLMPCHPARARQLLTNGRAVVARHTPFTIRLKDRTDADSQVDGVQLRIDPGSKGTGIAITETKQESTPDGAATTVRRGLMSIELRHRGWQIHRAMRQRAGYRRRRRSANRRYRARRSHNRTRPKGWLPPSVQHRVDTTLATAHRLSQYAPISEIHIEQVAFDTHAMSAGCDLTTAEYRSGTLAGTEIREYLLATWGRTCAYCGASGVPLNIDHIRPRSRGGSNRVSNLTLACISCNQAKGSTHVEEFLAHHPARLAAIRAQIKSPLRDAAVMNATRQLLTDALAGLGKPVLTWSGGRTKWNRTAMGLPKTHTLDALCVGQLNHEAGNRIVRVPQQVQVITATGRGSYARTTPDRYGFPRLTRARRKRHHGFATGDLVHASVPRGNWAGTWTGRVSVRASGKHSLGTPMGRFTVSHVHLRLLQRADGYAYSCRQEAAE

SEQ ID NO: 9609 - protein, 448 aa, unidentified; identical to SEQ ID NO: 5196

SEQ ID NO: 9610 - protein, 423 aa, unidentified; identical to SEQ ID NO: 3538

SEQ ID NO: 9611 - protein, 456 aa, unidentified; identical to SEQ ID NO: 5876

SEQ ID NO: 9612 - protein, 418 aa, unidentified
MVYVINKQGQALMPTERFGKVRRLLKNSLAHVVCRIPFTIQLDYDTTDYTQPVSLGVDAGSKHIGISATTSEKEMYAADVELRNDIVDKLSTRREQRRTRRSRLRYRKARFNNRVSSKRKGWLAPSVENKIQTHLTVVEKIHKFLPITNIVVETASFDIQKINNPSISGVEYQQGEQLDFFNVREYVLFRDNHTCQHCKGKSKDKVLNVHHIESRKTGGDSPNNLITLCETCHKAYHRGEFKLNIKRGKSFRDSAFMGIMRWSFYDRLKNIYPNVSMTFGYITKNTRITNDLPKEHYVDARCISGNPTAKPLGYYFYQKKVRCQNRQIHKANFLKGGRKKLNQAPFLVKGFRLFDLVEYQKDLYYIFGRRDSGFFDIRKLDGTKVNKGSINCKYLRLVDKRKSILIEKRMQVNLLTLR

SEQ ID NO: 9613 - protein, 419 aa, unidentified; identical to SEQ ID NO: 8922

SEQ ID NO: 9614 - protein, 427 aa, unidentified
MSKVFVLDTNFTPLNPIHSAQARQLLRTKKAAIFRQFPFTIILKKSRPDSPVSLLRLKIDPGAKFTGMALVNDSTGEVVFAAELKHRGFAIRDALTSRRQLRRSRRARKTRYRQPRFLNRTRPEGWLAPSLQSRVDNIKTWVERLRKLAPIEAISQELVRFDMRLIANPDIQGQEYQQGTLAGYETREYLLEKWGRQCAYCGVKDVPFQIEHIHPRAKGGSNSITNLTLSCEKCNTKKGTKDIKDFLKKDLSKLEKILKQAKRPLADAAAVNTTRTALLEVLKATGLPVETGSGGLTKFNRSQQQLEKNHWIDAACVGKSTPILNIKSVKPLLITANGHGSRQSCRTDKYGFPSRHVPREKIHFGFQTGDIAKAVVTTGKKIGTYVGKVAIRSTGSFNISTKNGLIQGISHKFCKRIHAKDGYSYAV

SEQ ID NO: 9615 - protein, 323 aa, unidentified
RRSRRNRKTRYRAPRFDNRVHSKHKGWLAPSVEVKIQEHITIIKRICKILPISLVRVETAEFDTQRLKAMLAGKPLPVGTDYQLGEMYDEYNVRQYVLKRDNYTCQCCGAHTTAKKLVKLHVHHLESRKTGGNAPSNLVTLCTTCHKNLHKGRVTLDGKERGKPLRDAAFMGIMRKTLMARLKEELPIPVQGTYGYITKMRREQNDIKKGHTNDARCISKHPLAEPCSVCYRTKAIRHHNRQTHKANFSKKGIRKRSQMPYLVEGYRLWDKVLYKEQECFVSGRRSSGSFTLKKLDGTSVSKGVTFKKLRLLEPATNYLIERM

SEQ ID NO: 9616 - protein, 416 aa, unidentified
MVYVLDKNGQTLMPTDRHRKVRLMLQSGQAKVIKRCPFTIQLNYDSGHQTQEIFLGIDAGSKHIGVSATTKIKVLYEADVELRNDIVNLLSSRREFRRGRRNRKTRYRQAKFNNRRLGNGWLPPSIRQKIGTHLTVVENICKILPISRIMVETASFDIQKIKNPDIQGAEYQQGDQLGFWNNREYVLFRDNHTCQCCKGKSKDKILNVHHIESRKTGGNAPNNLITLCEICHTGYHKGAIQLPKTVKRGMRFKDAAFMGIMRWAFYEALKQQYEPVGTPVHNTYGYITKHTRIEHNLPKEHYVDARCISGNPDAFPNGEYYYQKKVRCHNRQMHKLTILKGGIRKQNQATYLVKGYRLFDKVSYQGKGYFVFGRRQSGFFDIRTLSGEKVNKGSLSCKKLKFIATRTYYLTERRAV

SEQ ID NO: 9617 - protein, 447 aa, Halolactibacillus sp.
LRVFVKSMRGSNLDPCKNQKARQLLKEKKAKIISYKPFTIQMLIATGETTHESHVGIDLGAKYTGVAITQEDRVLAKGNIECRQDIKGLLETKKIYRRSRRSRKTRYRKCKFKHKTTRVYSNKKGKWVKKKTPFTSPRPKSWLPPSLESRTQNVFFWIDTFTSLLPKVTLHIEVGKFDVQKMKNPGIQGKSYQEGDTFGYHDVRYYVFARDNYTCQVCKKKGNILNTHHIIYRSHGGSDAPSNLISVCTDCHTSDNHKRGRILWNWMEKRKKVPTYKEPPFMNALRIRTFRRYPDARIIYGSETTPRRKELHLEKTHYNDAIAISGIQHIKENPPTIFYIKQFRKKKRSLHEATARKGRKNKNLTQKRNKKNTKEMKGIHLNDTVRIFGKIGFVSGFTNVGLYVKDIHNAYITKPGKTYKQVSFKDVTVENHNNNWQFISHLASDGA

SEQ ID NO: 9618 - protein, 412 aa, Coprococcus sp.
MTNYVFVLDAAGKQLAPTKETKAWFFIRKEHATLVSKYPMVIQLNKEVSDDEICKDEIRCGIDDGGLHVGIALVQKCQTKNKVVFKGTIEQRNDVKHLMDVRRGCRHYHRYHKRYRQSRFNNRSSSKRGRIAPSILQKRQATVRVINQLNRWIHITNYWLEDVSIDIRALTDSYKSYSWQYQKSNRLDENIRKAVILRDECKCMECGKSNCRLEVHHIRPRRLNGSNTLSNLITLCEKCLQKTEGSEELFMDKYFSLLKSSDNKNLNYAQHVMIGKKWLREQLSNLGLLYLTNGGDTANKRIDWNIEKSHSNDAICITDLQPDTCDVKEWTIKPMRRQSKAKTDNVLGIKHRDLVEYTFKNGETHKGYVTALYPKQNAINFQSPTKHCKKVNAKKCRLLWKFNKIYWLDNVS

SEQ ID NO: 9619 - protein, 413 aa, unidentified; identical to SEQ ID NO: 9603

SEQ ID NO: 9620 - protein, 427 aa, Enterococcus sp.; identical to SEQ ID NO: 2410

SEQ ID NO: 9621 - protein, 528 aa, Glycomyces sp.
LRAAVTRPSQQIILEVNKLATYRVGQKTDPGMLPQLQALEFTAADNPRIGNETGRGGLQAPGGVHGRGEIRDPSPGIAGVTRESGACGRETAPCVFVLAKDGTQLDPCHPARARKLLNKGRAVVARHTPFVIRLRDRSAAESEVQGVEVGIDPGSKHTGIAVFADVGGGRRQGLYALQVNHRGGKIRDKLTARAAYRRARRGRNLRYRTPRFANRTRPQGRLAPSLQHRVDTTMSQIARLRRWAPVTAVHVERVSFDTHAMSAGQSLTGVEYQQGTLAGYEVRQYLLEKWGRACAYCGAGDTPLQVEHIRPKARGGSHRISNLTLACGACNQAKNTTPVEMFLADRSTLLARILKQAKAPLSDAAAMNATRNALWGSLTGTGLPAHSSSGGRTKYNRFITGAPKSHTLDGLHVGALRAVPSWPGQVLVVKATGRGTYCRTRTDAFGFPRLKMPRTKQIHGFQTGDLVRAVVLRGKYQGTHTGRVAVRSSGSHTVQTPQGPVKTSWKNLHLLQRGDGYTYHRQEETCRP

SEQ ID NO: 9622 - protein, 448 aa, Aneurinibacillus sp.
MVYVLNPNGEPLMPTKRFGKVRRMLKNKQAKVVRRRPFTIQLTYETTNYVQPVALGVDAGYQTVGFSAVSEKEELLSGECRLLTGMSERLKERAMYRRQRRSRLRYRAPRFDNRRRTQGWLAPSIQHKLDSHVRLVELVKKLLPVQKVIVEVASFDIQAIQNPEIAGTLYQEGEQLDFWNLREYILHRDHHQCQNPNCKNKAVNPILQVHHVGYWKGDRSDRPGNLVTLCEMCHIPANHQLNGFLYGWEPKTQSFRPETFMSIVRWRLTQLLGGAATYGYVTKHVRIQHGIEKSHTNDAFVIAGGTTQSRTAPFVLQQVRRNNRSLEKFYGAKHVDIRTGAKASGQDLFCGRRTRNREMAGENLRQYRGLKLCKGRRSIRRMRYPLQPMDTVRFDGKDYLVSGTNNKGKTVVLKGCVRVPSVKKVRVVKYGKGFCWLAGEDRRVSSPI

SEQ ID NO: 9623 - protein, 413 aa, unidentified; identical to SEQ ID NO: 2636

SEQ ID NO: 9624 - protein, 429 aa, unidentified
MSKNPNQVFVLDSRKKPLTPCLPVIARKLLNAGKAKVFRLYPFAIILNKSVEEQPQPIEIRIDPGSKTTGIALVFLTQVIWGAELTHRGQAIKSRLETRRAIRRNRRNRKTRYRQPRFFNRIRRKGWLPPSLQHRVLTTITWVNRLCKLAPIKSIAFELVKFDTQKMQSPEVYGIEYQQGELQGYEVREYLLEKWNRKCAYCSAENLPLQVEHMNPRAKGGSNRVSNLCLACKKCNIKKGTEDIKDFLKSQPDLLKRIMSQAKASLKDAAAVNATKSALLEVLKATKLEHIYVGRGSLTKFNRTKLGLPKANWIDAACCGDVSQGLTLAINQPLLIKAMGWGSRQVVQTDKYGFPRKGYQPKKKVKGWKTGDIVSVIDGKYEGVKCKRIKTTRFKGNFDIRVNDTTVISVSRNQIKPVQRNDGYNYSFV

SEQ ID NO: 9625 - protein, 211 aa, unidentified
AKVKKRTPFTIQLVYGSSGYTQEVILGVDAGSKTIGISASTKKEEVFAADVTPRNDVVDLLSTRREFRRARRNRKTRYRKPRFNNRVRSKHKGWLAPSVEVKIQEHITSIKMVCRILPVSKVVVETAEFDLQLLKAIEEGKPVPQGEDYQQGEMYGHYNVRQYVLWRDNYTCQCCGAHPTKKKEVRLHVHHLESRKVGGNAPGNLVTLWRC

SEQ ID NO: 9626 - protein, 450 aa, unidentified; identical to SEQ ID NO: 2935

SEQ ID NO: 9627 - protein, 396 aa, unidentified; identical to SEQ ID NO: 9321

SEQ ID NO: 9628 - protein, 414 aa, unidentified
MPCSPAKARLLLKEKKAIVKRRTPFTIQLTIATGETKQPVGLGVDAGYKHVGLSASTEKAELYASEVELRQDITDLLSARRALRQSRRNRKTRYRAPRFNNRIRTKRKGWLAPSVENRINAHLSRIETVLRLLPVTKITVETASFDMLLLKNPDIAGKEYQEGEQLGFWNVREYVLFRDGHVCQHCYGRSKDPVLNVHHLESRRTGGDSPGNLLTLCETCHKALHRREIKLKTKRGHSFRAEAFMGMMRWEVLNRLKASHSELEVNNTYGYRTKHARIVNGIDKSHCADAFCIAGNLGAKRLGEFFFQKQTRRNNRQIHKLSILKGGIRKRNQAPFEAKGFRLFDKVACQGEEGFIFGRRSSGSFDVRKLDGTRISAGISCKKLRLLEKRRTYLTEIRKEEALPPLPEGRGLRA

SEQ ID NO: 9629 - protein, 451 aa, unidentified; identical to SEQ ID NO: 3061

SEQ ID NO: 9630 - protein, 423 aa, Anoxybacillus sp.
VLDTNKRPLAPCHEAVARKLLKQGKAAIYRRFPFTIILKKSVDESEIKATYRLKIDYGSRHTGLAILRGQEVVWLGQLDHRTDIKERIDKRRAFRRARRNRKTRYRKPRFLNRKRKEGWLPSSLESRVQNIQTWVNRLKKLCPIGYISYENAKFDTQLMRNPEINGVEYQQGTLQGYEVREYLLEKFGRKCCYCGKENVPLEVEHIIPKSRGGTDRVDNLCLACHDCNQRKGSKTAEEFGYPHIQKQVKESLKDASAINSTRWKAYEVLKQTGLDVECGTGARTKMNRIRLDLPKTHYFDACCVGESTTNHLYFKTKEVLFIKAKGRGSRSRTNLDRYGFPRGYLARQKFFFVFQTGDMVKAVVPRGKYQGVWFGEVACRKTGSFDIKGKDGKRIAQGINYRYVQVIQRFDGYAYGKGVAELA

SEQ ID NO: 9631 - protein, 413 aa, unidentified; identical to SEQ ID NO: 2636

SEQ ID NO: 9632 - protein, 518 aa, unidentified
MTPKKRKEASRMSEYIYVLGMDGDPQMPTKRKRHVEKLLQAGRARVFRQIPFTIQLTYENKPVLQPVTIAEDPGRSNIGMAVVSLSGELLSAAVVQTRNKEIVKLMEKRKQHRRASRNGERKARQRLAKKCHTMIKTGFLMRKLPMYGKDKRVRCNVIKNTEAKFCNRKREDGWLTPSAEHLVRTHINLIHKMQKFLPITDVAIEIHRFAFLSLEDPSISGVDFQNGPLKGYDDLNVAIEDLQDGHCLMCNSPIEHRHHIVPRSMQGSNTIGNIAGLCCKCHERVHKDARFEDRLKKKKAGLNKRYAAVSVLNQAIPFICKRLEQEFGKEHVHYCSGRDTSMVRRSLGYHKTKEEQLHEVDAWCIAVLALQHVPEKAPEFDHVHEILQFRRQDRSRIKAQTSRAYYHEGKKIAKNRKKAEGQKDDSLQGWRKRQVERYGEEQTRKMISQLKVKKSIRRYNRLDRLMPGAVFYYQGVRYVMRGQHSNGQYLQAVGMRDKEFPAKKCKIVVHNQGLVFVS

SEQ ID NO: 9633 - protein, 414 aa, unidentified
MPCSPAKARLLLKEKKAIVKRRTPFTIQLTIATGETKQPVSLGVDTGYKHVGLSASTEKAELYASEVELRQDITDLLSARRALRQSRRNRKTRYRAPRFDNRIRTKRKGWLAPSVENRIDAHLSRIEAVLRLLPVTKITVETASFDLQLLKNPDISGKEYQEGEQLGFWNIREYVLCRDGHVCQHCYGRSKDPVLNVHHLESRRTGGDSPGNLITLCETCHKALHRGEITLKAKRGQSFRAEAFMGIMRSEVLNRLKASHPELEVNNTYGYRTKHARIANDIAKSHCADAFCIAGNLGAERLGEFFFQKQTRRNNRQIHKLSILKGGIRKRNQAPFEVNGFRLFDKVACQGEEGFIFGRRSSGFFDVRKLDGTRISAGISYKKLHLLEKRRTYLTEIRKEEALPPLPEGRGLRA

SEQ ID NO: 9634 - protein, 544 aa, unidentified
LYIKMTSCTCTVFPAYNYAKASSSQGKHNLLLRQERLIVKEVAYMSTVYVLNKDGKPLMPTTRCGHVRYLLKEKKARVVASKPFTIQLLYETDDVVQPLYLGIDPGRSNIGVAVVKTDGMAVFTAHLETRNKEIPKLMKKRKDSRRARRTNGRRCRRQRRAKANGTISKKCVKQTTAQNGSVSKRAKEIGVIKRHLPGCEKDVLCIGIKNKEAKFNNRTRPTGWLTPTANQLLQTHINLVKKIQKFLPISDVVLEVNKFAFMQLDNPNIQKWQYQKGPLYQKESLKSAVSEMQEHHCLFCKKKIDHYHHVVPQHKNGSNTIDNIVGLCTQHHDLVHKDATWQKRLAKKKTGLNKKYGALSVLNQIIPALTKELSSLFPKHFFVTNGKSTYDYRAAHGVSKDHWLDAYCIACSVLPNDTCDKTINSRVPYELKQFRRHDRRALNNENMSRVYTFNGKMVATNRHKATEQTTDSLEEFRQRQPNDVCNLKVKEHHPTYRNMSRNYPGSIFLVEKQVHIMQGIAGSKDGKATTYKDTNANSIAAGKC

SEQ ID NO: 9635 - protein, 448 aa, unidentified
MSTGLRAVQAEPAGIRKGDALKVFVLNMRGRPLMPCSPARARHLLKAGKAVVRRRTPFTIQLRIATGETKQNVTLGVDAGAKHVGLSAATEKEEVFASEVELRQDITGLLAARLSLRRDRRHRKTRYRAPRFLNRVRSKHKGWLAPSVENRIQAHMSRIDAVCRLLPVTRIVIETASFDVQKIRNLEVEGTGYQQGDQLGFWNVREYVLFRDGHVCQHCHGHSKDKILNVHHLESRQTGGDAPNNLITLCETCHKACHAGKIKLKVKRGQSFRAEAFMGIMRWTLLDRMRKAHSGLPVENTYGYLTKNTRITPGLPKTHCVDAYCIAGNLKAVRRGVCLHQRQVRKHNRQIHKCTVLSKTLKDGTKIGYRKLNQTPHLVKSFRLFDKVRCLGQTGFIFGRRSSGYFDVRRLDGVKLSSGISYRKLTLLEKRSTYLTELRKEDGASSPV

SEQ ID NO: 9636 - protein, 414 aa, unidentified
MPCSPAKARLLLKEKKAIVKRRTPFTIQLTIATGESKQPVTLGVDAGYKHVGLSASTEKAELYASEVELRQGITDLLSARRALRRARRNRKTRYRAPRFDNRIRTKRKGWLAPSVENRINAHLSRIEAVLRLLPVTKITVETASFDMQLLKNPDIAGKEYQEGEQLGFWNVREYVLFRDGHVCQHCYGRSKDPVLNVHHLESRRTGGDSPGNLITLCETCHKALHRGDITLKAKRGKSFRAEAFMGIMRWEVLNRLKVSHPELEVNNTYGYLTKHARIKSGITKSHCSDAFCIAGNLGAKRLGEFLFQKQTRRNNRQIHKLSILKGGIRKRNQAPFEIKGFRLFDKVACKGEESFIFGRRSSGYFDVRKLDGTRISAGISCKKLRLLEKRRTYLTEIRKEEALPSLREGRGLRA

SEQ ID NO: 9637 - protein, 420 aa, unidentified
MLVYVLKQNGQPFMPTERFGKVRRLLKEKKAKVVRREPFTVKLLYEPKTDVVQECYCGVDTGSKHVGVAVVGNDKVLYQSQVELRSDIKRKMNRRRVFRRTRRNRKTRYRKCRFLNRRNSIKKDRLPPSVKHKVQVHIDEIEFCKKILPISDKNLILEVSQFDTALMKKPSLISEKVKHWGYQKGFNYGHSSRRKAVLHRDNYTCQCCGKKNCQLQTHHIIFRSRGGTDDENNMITLCKECHKGVHDGTIVLDKKPKKMNLKHATHMSIIRSQLFKVYPQAMETFGFITSENRHHLGLGKSHYIDACVIASGGLEFEPLDVVYYKRKVSKGDYKLARGSRSEQKLPTGKLFGFRKFDKVKYLGKEYFIKGRAAKSGHADLMDIFGNKIDFSFMPKGHKKPKLQNCRRISARESYLLISQK

SEQ ID NO: 9638 - protein, 415 aa, unidentified
MENEMAYCFVVNKNNRPLAPTKVNKGWYLVRKGRAKIKSRYPMVIQLEKEVEPDKYDESRMVVGIDDGSAHVGLAIVQKCPTKNKVVFKGTIEQRQDVKHLMDVRRGYRRYHRHHKRYRQARFNNRHSSKRSGRLAPSIKQKKDAILRVLYQLNRWIDIQEYCLEDVCIDIRAMTDGYNPYKWKYQKSNRLDENLRKAAIIRDGCKCQECGKSNCVLEVHHIRARKYGGADTIGNLITLCSGCHQKTEGREREFEDRYFKIIGSKPKRFDYAMHVMQGKNYLREKISELGPLHLTNGGETANKRIDWNIEKSRSNDAICITGCIPDTCDMKEWIITPMRRKSKAKTDNVLGIRHRDLVSYTYKNGEIHTGYVTALYPELLALNFQSKTKHCKKVNARKCRLLWKFDKIYWLEQRV

SEQ ID NO: 9639 - protein, 574 aa, Nocardiopsis sp.; identical to SEQ ID NO: 3358

SEQ ID NO: 9640 - protein, 430 aa, unidentified
MPKVYVLNRHGRPLMPCTPAKARHLLDAGKAKVRRRTPFTIQLLYGSTGYTQEVILGVDAGSKTIGLSAATETEELFSAEVKPRNDVVELMSARRQFRRARRNRATRYRKPRFDNRVRSKHKGWLAPSVEVKIQEHMTAIRRACAILPVSKVVVETAEFDLQLLKAIANGKPVPQGEDYQKGEMYGHYNVRQYVLWRDSYTCRICGAHGSVRKGVPLHVHHLESRRVGGDAPDNLVTLCTACHDKLHKGIIMAADIKKRKRRSTRDATFMGIMRKTLMQRLCAELPIPVIETRGYITKATREKLLVLPKSHTNDALAIAQGKHGFNVGYLPGIVQSDKTYTIRPVRHHNRQLHKATILKGGIRKANQAEKYVCGFRLYDKVLYNGIECFVWGRRTSGSFLLRALDGTKVKDGAGHRSLTLLERSSNYLIA

SEQ ID NO: 9641 - protein, 512 aa, unidentified
MSTVYVLNKDGKPLMPTTRGGHVRHLLKEQKARVVRAKPFTIQLLYETNDVVQPLYLGIDPGRTNIGVAVVKANGTAVFTAHLETRNKEVPKLMQDRKKARRARRTNGRRCRRQRRAKANGTISKKCVKQDTAQSKNPSKRAKEIGIIKRRLPGYKKDVLCIGIKNKEAKYTNRTRPEGWLTPTANQLLQTHINLVRKIQKFLPISDVVLEVNKFAFMRLDNPDIQKWQYQQGPLYQKGSLENAVSEMQEHHCLFCDKPIDHYHHVVPQSENGSNTIANIVGLCAEHHNLVHKDAAWQKKLAEEKVGLNKKYGALSVLNQIIPALTNKLSVLFPKHFFVTAGKSTHDYRATHGVSKDHWLDAYCIACSVLPSDVCDSNINNHMPYVLKQFRRHDRRVLNNENMNRVYTLNNKAVAINRHKAKDQKTVSLEEFRKEHPDDVCKLKVKEHHPTYRNMNRNFPGSVFLVGKQIHVMQGIASSKDGKATKYNDTSATAIAARKCKFVAKNTGILFV

SEQ ID NO: 9642 - protein, 398 aa, unidentified; identical to SEQ ID NO: 7752
  VARIANT 26: note = X can be any naturally occurring amino acid

SEQ ID NO: 9643 - protein, 324 aa, Nostoc sp.; identical to SEQ ID NO: 8503

SEQ ID NO: 9644 - protein, 442 aa, unidentified
MSTSVFVLDKKHRPLMPCRPARARRLLRAGRARVVKRFPFVIRLVDRTVEQSEVQPVLIKLDPGSRETGAAVVRDDGKKRHHALAFFVIEHRGGAIRDALKARSAFRRRRRSQNLRCRSPRFLNRVKPKGWLPPSLRHRVETTLSFVRRMCRYLPVSGIAAELVKFDSQKLQTPEVSGIEYQQGTLFEYEVREYLLEKFGRKCVYCGAEGVPLNIDHVVPRAKGGSNRVSNLVLACVSCNQKKGARSLEDFLKGKPEVLARVRRELKTPLRDAAAVNATRWVLFNELKATGLPVETGSGALTKFNRHAFGVEKEHWLDALCVGRLNGAVTRKGLNVLEIRCMGRGSRQRTRLTKYGFPRGYLMRQKCVHGFATGDMVEANVPKGKKAGLWRGRVAVRVSGSFNIQTPKGVIQGVGWKHCRLISHNDGYGYAWLGHAPHSSPA

SEQ ID NO: 9645 - protein, 437 aa, Clostridium sp.
MVYVLSKEGKPLMPTNRYAKVRVLLKSKKAVVVNSKPFTIKLSYNTEDFVQPITLGIDSGYLNIGFSAITKEKELISGEVKLLKGMSERLKEKAMYRRQRRSRLRYRKPRFDNRKRSKDWLAPSIQHKYDSHIKFIDKLKKLLPITNIIIEVANFDTHKLKDSSIEGAAYQNGEQKDFFNLREYILHRDGHKCQNPNCKNKNAESILQVHHIGFWKQDRSDRPGNLITLCNKCHTPKNHKEKGFLYGWQPKVKSFKEATFMSMIRWRLVNTLGCKYTYGYITKYNRITLKLEKTHYNDAFCIAGGSNQNRVKPLIFEQIKRNSRSLQKFYDAKVIDIRTNTKVSGLELFNGRRTRNKNLNSENLRKYRGVKVSKGQRRIRTKRYFYQPGDLVKYEDKVYTVKGTQNKGKYIALKELKKVPKVELLAPYKFRKGLVCV

SEQ ID NO: 9646 - protein, 427 aa, Anabaena sp.; identical to SEQ ID NO: 5141

SEQ ID NO: 9647 - protein, 415 aa, unidentified; identical to SEQ ID NO: 3018

SEQ ID NO: 9648 - protein, 490 aa, unidentified
MYVVYVLDRQGKPLMPTKRFGHVRRMLKTGKAKAISTKPFVIQLQYESTDFVQPLYGGTDPGRTNIGEAVLNNKGEVVYAAHVLTRNKEIPKLMADRAAHRKASCRGERLRRKRRAKANGTMTCFPEGRKLPGYKDGVLELKDIINTESRFNNRKRPAGWLTPTARQCIQTHLNMVQNICKILPVTNWTLEYNRFAFMQLEDGSVCGWDFQNGRLKGYASKEDYIYALQGGACVCCGASIEHYHHIKPRHKGGSNTHENLVGLCSVCHAEIHIGKRNLDKIGKYKKYAGTSIVNIAIPFIWDGIVKMFGDKAHICEGQETAELRKANSIPKEHFADAVCIAGIGYGITPQYDDNQPFKLRQFRCHDRSRINAQVERTYLDGKTIVAKNRKPRFEQKGDALSDLQSKIAKEHGELAARRAVSKLVVKKSYRRYNVPERIKPSAVFMFNNKKYLLRGQLTNGMYYRAFGEGTKNFPSRNCEVVSSGCSLTYM

SEQ ID NO: 9649 - protein, 281 aa, unidentified
VTVARVCEILPVSQIIVETASFDIQKIKNPEIQGVEYQRGEQMDFWNVREYVLFRDGHICQCCKGKKKDPVLNVHHIESRKSGGDAPNNLITLCETCHKGYHNGTIKLPTKIKRGMKFKDAAFMGIMRWTFYNTLKENYEPDIPVSMTYGYLTKNTRIQHNLPKGHHIDARCISGNPGAKSDGVYYYQKKVRCHNRQIHKFNTLRKGVRKLNQSEYLVKGYRLFDKVRYQGKEYFVFGRRKTGFFDIRTLSGEKVNNGSLSIKKIAFVDTRKNYITERRTA

SEQ ID NO: 9650 - protein, 435 aa, unidentified
MYVYVINRHGEPLMPCKPQKARVLLQNGKAAVVKRNPFTIKLIYGSSGYKQPVTLGMDAGSKHVGIAATTEKNVLYAEELSPRNDVVDLLSTRRQNRRTRRTRKTRYRQTRFENRVHSKPKGWIAPSVEVKIQEHVSAITRITKILPITKIRVETAEFDTQRLKAMEEGKPLPVGTDYQLGEMYDEYNVRQYVLKRDNYTCQFCKKHKDGTKFHVHHIESRKTGGNAPDNLVTLCEECHKAIHDGTKKLPDRRRGHSFKDAAFMGIMRKTLVARLREKYEPLGIHVQETYGYITKFWRERYGLEKSHINDAIVITKNYAAKYDGGYYLSKAIRHHNRQIHKNAILKGGIRKRNQALHTVKGFRMFDTVEYEDKEYFVFGRRTSGFMDIRTLDGTKVNKGSVSFKKIKYLSTNKGVLTERRMAILPADKSAGFLAR

SEQ ID NO: 9651 - protein, 421 aa, unidentified; identical to SEQ ID NO: 4235

SEQ ID NO: 9652 - protein, 448 aa, Thiorhodococcus sp.
MAVFVLDKKKRPLMPCSEKRARLLLKRERAVVVRLAPFTIRLKDRVGGATQPLRIKLDPGSKTTGLALVREEEIVDPETGEVTRTAHVVWLGELTHRGHQIREALTARSAMRRRRRTANLRHRAPRFDNRTKPCGWLAPSLRHRVETTVTWVERLRRLAPITAISQERVRFDMQAMQNPEISGLEYQQGTLAGYEVREYLLEKWRRTCAYCGAKDIPLQIEHIQPKSMGGSNRISNLTLACAPCNQKKGNRPVTVFLANKPDRLKRIQAHVSAPLRDAAAVNATRWALFESLKATGLPVETGSGGCTKFNRMRLGVPKTHALDAACVGQVDALHGWQCPTLAIKATGRGSYQRTRLDRFGFPRGVLMRQKRVHGFQTGDRVIACVPTGKKAGTYVGRVAIRATGSFNIQTAGAVVQGLSYRYCRTLQRADGYGYSFNPTPKEEARQAA

SEQ ID NO: 9653 - protein, 411 aa, unidentified
MVYVQDINGKPLIPTTRYGKVRRLLKANKAVVVNICPFTIKLTYVTSDYKQEIVLGVDAGTRHIGLSATTKSKELYSSEVILRNDIVDLLSTRRELRRTRRSRLRYRKPRFNNRIKSKKQEWIAPSVKYKIDAHIRVVEKVYSILPVSHIIIEVAQFDTQKIKNPDISGKEYQEGDQLGFWNVREYVLARDGHKCQHCKGKSKDAILNVHHIESRKTGGNSPSNLITLCETCHKEYHKGNIKLKVKRGTSLRDAAAMGMMKWKLLDKLKSLFPNVSMTFGYITKHNRINNNIEKSHISDAFVISKNFNAKRLNLQHKIKLVRRHNRQIHKMKIQKGGIKRPNQSPFEVFGFRLFDRVKFNDKFYFIYGRRKSGSFNIRDINGENSKDIMYKKLNLLRCKRFMIQIETKQTK

SEQ ID NO: 9654 - protein, 465 aa, unidentified
MSTCVCVLSNSGERLMPTFRLGKVRHLLKDGKAKIVKHHPFTIQLLYDSKTNTQPIEICEDVGYNYIGISVKSQSHEYVSAQYDTLQDEKACHGSCRKLRRTRRNRLRYRKPRFDNRKRGEGWLAPSLKHKKELNVNVVKMYCAVMPITHATVEVGSFDTMLLQAIRKGESKPEGADYQKGPRYNLATLREAVFYRDNYTCQVCGRKIADGAILHMHHMFYWKGRHGYQLDELVTACEKCHTPANHQKGGKLYGFGEDKEFANLSGAAFMNAVRWQIVNALYATYGKEFVTITYGAMTKEKRIALHLEKSHNNDAYAMGSFHPVNRCAFEHYEKMKRNNRILEKFYDSQYIDTRTGELTNGKSLFNGRISRSHKKDSENLHKYRGKRICKGHRALRRKKLALNPGDLVSLNGEILVVHGTHTKKNGSVNVEFKTSSRSGKKSASLKKLKIVKTSSLMHSAWTKVS

SEQ ID NO: 9655 - protein, 442 aa, unidentified
MSTSVFVLDKKHRPLMPCRPARARRLLRAGRARVVKRFPFVIRLVDRTVEQSEVQPVLIKLDPGSRETGAAVVRDDEKKRHHALAFFVIEHRGGAIRDALKARSAFRRRRRSQNFRCRSPRFLNRVKPKGWLPPSLRHRVETTLSFVRRMCRYLPVSGIAAELVKFDSQKLQTPEVSGIEYQQGTLFEYEVREYLLEKFGRKCVYCGAEGVPLNIDHVVPRAKGGSNRVSNLVLACVSCNQKKGARSLEDFLKGKPEVLARVRRELKTPLRDAAAVNATRWVLFNELKATGLPVETGSGALTKLNRHAFGVEKEHWLDALCVGRLNGVVTRKGLNVLEIRCMGRGSRQRTRLTKYGFPRGYLMRQKCVHGFATGDMVEANVPKGKKAGLWRGRVAVRVSGSFNIQTPKGVIQGVGWKHCRLISHNDGYGYAWLGHAPHSSPA

SEQ ID NO: 9656 - protein, 477 aa, unidentified
LYTKPLDNIGEGSLLPSGEINLKGMTFMVYVKSIDGKALMPTSNAKARKLLKQKKAKVVSLRPFVVKLTYKTKTEYTQKLNLGVDSGYSNIGFSVIDAKQEYIAGEVKLLEGMKKRLLEKASYRRIRRSRLRYRKARWNNRVKSKKKGWLAPSLKHKLDTHIKFIDYLKNILPIGKITIEVANFDIPKMKDDLISGVDYQNGDMFSFWNVREFVLHRDGHKCQNPNCKHKDKKEQILKVHHIRYRSEGGSDRPENLITLCSKCHTPANHKKGKFLYDWCVNGKKVRGFKDATFMSMIRWYLVNYLKSKHNNVSITYGYITKNHRIKNGIEKSHLNDAFAIAKGTNQARTKDRFLVIQDRLKNRSLEKFYDSKIIDIRTEKKVSGGDLNCGRSTRNKNLNTENLRKYRGVKISKGQRRIRKQKYFYQPNDLVKYDGKVYTVKGTQNEGKYIALKEIKKVPKVELLIPYVFKKGLNWSY

SEQ ID NO: 9657 - protein, 512 aa, unidentified; identical to SEQ ID NO: 3680

SEQ ID NO: 9658 - protein, 404 aa, unidentified
LLKEKKAIVKRRTPFTIQLTIATGESKQPVTLGVDAGYKHVGLSASTEKAELYASEVELRQDVSDLLSARRALRQSRRNRKTRYRAPRFNNRLRTKRKGWLAPSVENRINAHLSRIEAVLRLLPVTKITVETASFDLQLLKNPDISGKEYQEGEQLGFWNIREYVLCRDGHVCQHCYGRSKDPVLNVHHLESRRTGGDSPGNLITLCETCHKALHRGEITLKAKRGQSFRAEAFMGIMRSEVLNRLKASHPELEVNNTYGYRTKHARIVNGIAKSHCADAFCIAGNLGAERLGEFFFQKQTRRNNRQIHKLSILKGGIRKRNQAPFEVKGFRLFDKVACQGEEGFIFGRRSSGFFDVRKLDGTRISAGISCKKLHLLEKRRTYLTEIRKEEALPPLPEGRGLRA

SEQ ID NO: 9659 - protein, 460 aa, unidentified
MVAVVDLSGRPLMPTNEYRARKLLKQKKAKIFGYRPFTIQLTERKDTEIQPIELCMDAGYIHIGISAKSERHEYLGMQIDTLTDEKLKRDDKRQYRRQRRNRKRYRAPRFDNRRRKEGWIAPSLEHKKEIHIDAIQRICKVMPITDITLEMGNFDTHVLKAVEEGKPLPQGSDYQHGERYGIATLREAVFLRDGYKCQCCEKTVKDGAILHVHHIKYRSQGGTNRMSNLITVCDKCHTPQNHKPGGKLWNWKTKLAEFKGASYMTSIRWMLYNEVTALLPNSSVHITYGAKTKESRRELDIEKSHVNDAYVMGLFHPKHRTQPVYFKKKRRNNRVLEKFYDAKYIDGRDGKKRSGQELFNGRISRNHKKDSENLHLYRKQKVTKGKRSIRNRHYPIQPHDILLYQKNKYETAGCHNNGTRAILLPEKKSVALRQLTIYQYAGGYYRVPYESNKKEERTGS

SEQ ID NO: 9660 - protein, 427 aa, unidentified
MQQGNRVFVLNMRGEPLMPCSQRKARILLKEGKAIINRYNPFTIQLTYATGETKQDCHIGVDTGAKHIGIAVTSEDKILYKAEIELRQDVSSNIDSKRIYRRSRRNRKCRYRKPRFLNRKRTDEWLPPSLQNRINHTFTWINKFSALVPNPILHIEVGKFDTAKMINPDINGVDYQYGQTYGFFDERYFVFARDNYTCQVCGKSKGKILQTHHIIYRSNGGTNRVDNLITVCTDCHTSANHKKGGILYKWQAEHKKVKQYKEPPFMNTLRKRIFAKYPNAVITYGSETTPKRKDIGLEKTHYNDAIVISGIKTIKENPNEWLLIRQFRKKKRSLHEATARKGRREPNRTQKRNSKNTPFYKGFWINDKVSVLGQFGYITGFASGGAYIKNSDGEYITLPSKSYKQVGLANLRLVSHNNNWQYIRNAV

SEQ ID NO: 9661 - protein, 465 aa, unidentified
MSTCVCVLSNSGERLMPIFRLGKVRRLLKDGKAKIVKHHPFTIQLLYDSKANTQPIEICEDVGYNYIGISVKSQSHEYVSAQYDTLQDEKACHDSCRKLRRTRRNRLRYRKPRFDNRKRSEGWLAPSLEHKKQLNIRLIERYVSVIPITHATVEVGSFDTMLVKAIEEGKATPESADYQKGPRYNLATLREAVFYRDNYICKVCGRKATEGAILHMHHMFYWKGRHGNSLSELITVCEKCHTPANHQKSGKLYGFGENVKFADLSGAAFMNTVRWQIVNELYATFGKDFVTVTYGAMTKEKRIALHLEKSHNNDAYAMGSFHPVNRCAFEHYEKVKRNNRILEKFYDSQYIDTRTGELTNGKSLFNGRISRSHKKDSENLHKYRGKRICKGHRALRRKKLALNPGDLVSLNGEILVVHGTHTKKNGSVNVEFKTPSRGGKKSASLKKLKIVKTSNLMHSAWTKVS

SEQ ID NO: 9662 - protein, 397 aa, unidentified; identical to SEQ ID NO: 8898

SEQ ID NO: 9663 - protein, 425 aa, unidentified
MVYVISQDGQPLMPTDRHGKIRRLLKSDKAKVVKHCPFTIQLLYGSTDYTQEISLGIDAGSKYIGISATTQNRVLYESDVELRNDIVSLLSARRQNRRTRRNRKTRYRKPRFNNRISCKKKGWLAPSVRQRVNTHLTVVAKVHQILPVTRIIVETASFDIQKIKNPTISGTDYQQGDQLGFWNVREYVLFRDGHVCQCCKGKSKDKILNVHHIESRKTGGDSPDNLITLCKTCHTGYHRGTIKLPKTIHRGTSFRDASFMGIMRWSFYDELKTLYPDVNLTFGYITKNTRIKNNLPKEHYIDARCISGHPLAVSDETYYYQKKVRCHNRQIHKNTILKGGVRKRNQAPYFVKGFRLFDKVMYQGQECFIFGRRSTGRMDLRLLDRTHINASVSYKKLKLIESRKNYITERRTAVPPTGKSVDFPA

SEQ ID NO: 9664 - protein, 423 aa, Parasutterella sp.
LLNKRGKPLMPCSPAKARLLLKEKKAIVVRRTPFTIQLTIATGESKQPVSLGVDAGYKHVGLSASTEKAELYESEVELRQDVSDLLSARRALRQSRRNRKTRYRAPRFDNRIRTKRKGWLAPSVENRINAHLSRIETVIRLLPVTKITVETTSFDMQLLKNSDIAGKEYQEGEQLGFWNVREYVLFRDGHVCQHCHGRSKDPVLNVHHLESRRTGGNSPGNLITLCETCHKALHRGEIKLKAKRGHSFRAQAFMGIMRWEVLNRLKASHPELEVNNTYGYRTKHARIANDIAKSHCADAFCIAGNLGAERLGEFLFQKQTRRNNRQIHKLSILKGGIRKRNQVPFEVKGFRLFDKVAYKGEEGFIFGRRSSGYFDVRKLDGTHISAGISYKKLRLLEKRQTYLTEIRKEEALPPLPEGRGLRA

SEQ ID NO: 9665 - protein, 450 aa, unidentified
VDDLGRGAAPQTAAYSCLHYLFSQIKNTIERIAYQMVYVLNVNGVPLMPTDRHGKVRRLLKSKQARVVKRTPFTIQLLYDTPTCVQPLTLGVDAGSKHIGLSVSSENKEVYAGQIEPRQDVSKKLDERRQYRRSRRNRLRYRKPRFNNRTASKPKGWIAPSIACKIDSHVTVIGQLHQILPITEIVVEVADFDTQKMLNPDIQGKEYQTGPLFNSNLRQYIFARDGYTYQWCKGKSKNKILHIHHWNYWRGDHTNKPSSVITLCDVCNDSKNHKKDGFLYGWEPKITNNLKDAAFMNISRWALYNRLKEIYPNVRLTYGYITKVVRSDHGLEKSHVNDALCIANHPNATRLLYCYLIKKNRVHNRQLHKANKLKGGRLKLNQAPHLVKGYRLNDIVKCNGQNYVITARRRTGYFQLKNFITGEKLPSVSYKKLELLEKAKNYTTERIARN

SEQ ID NO: 9666 - protein, 396 aa, unidentified
VVRRTPFTIQLTIATGESKQPVSLGVDAGYKHVGLSASTEKAELYASEVELRKDITDLLSARRALRQSRRNRKTRYRAPRFDNRIRTKRKGWLAPSVENRINAHLSRIEAVLRLLPITKITVETASFDMQRLKNPDISGKEYQEGEQLGFWNVREYVLFRDGHVCRHCHGRSKDPVLNVHHLESRRTGSDSPDNLITLCETCHKALHRGEITLKAKRGQSFRAQAFMGIMRREVLNRLKASYPELKVHETYGYLTKHARIANGIVKSHGADAFCIAGNLGAERLGEFFFQKQTRRNNRQIHKLSILKGGIRKRNQAPFEAKGFRLFDKVACQGEEGFIFGRRSSGSFDVRKLDGTRISVGISCKKLRLLEKRRTYLTEIRKEEALPPLPEGRGLRA

SEQ ID NO: 9667 - protein, 512 aa, unidentified
MSTVYVLNKNGKPLMPTTRCGRVRHLLKEQKARVVTSNPFTIQLLYETDDVVQPLYLGIDPGRTNIGVAVVKTDGTAVFTAHLETRNKEIPKLMQGRKKARRARRTNGRRCRRQRRAKANDTISKKCVKQDTAQSGSASKRAKKIGVIKRHLPGCEKGVLCIGIKNKEAKFSNRTRPEGWLTPTANQLLQTHINLVKKIRKFLPISDVVLEVNKFAFMRLDNPNVQKWQYQQGPLYQKASLEEAVSEMQERHCLFCKKPIAHYHHVVPQSENGSNTIDNIVGLCTKHHDLVHKDTTWQKKLAKKKTGLNKKYGAQSVLNQIIPALTERLNTLFPKHFFVTTGKSTYDYRAAHGVSKDHWLDAYCIACSVLPNDVCDSGINNRVPYELKQFRRHDRRALHKANMSRVYTLNDKAVATNRHKAIKQTTDSLEEFRQNHPDDVYKLKVKEHHPEYRNPKRNFPGCVFLVGKHTHVMQGTSSSHNGQADGYYDTNGNSYSSGKCKFVAKNEGIVFT

SEQ ID NO: 9668 - protein, 416 aa, unidentified
MVYVLDKNGQPLMPTDRHRKVRLMLQSGQAKVIKRCPFTIQLNYDSGHQTQEISLGIDAGSKHIGVSTTTKIKVLYEVDVELRNDIVDLLSSRRERRRGRRNRKIRYRQAKFNNRRRGNGWLAPSIRQKIGTHLTVVENICKILPISRITVETASFDIQKIKNPDIQGAEYQQGDQLGFWNIREYVLFRDNHTCQCCKGKSKDKILNVHHIGSRKTGGNAPNNLITLCETCHTGYHKGTVQLPKAIKRGMRFKDAAFMGIMRWAFYEALKQQYEPVGTPVHNTYGYITKHTRIAYNLPKEHYVDARCISGNPEASSNGEYYYQKKVRCHNRQIHKLTVLKGGIRKQNQATYLVKGYRLFDKVSYQGKGYFVFGRRQSGFFDIRTLSGEKVNKGSLSCKKLKFIATRTYYLTERRAV

SEQ ID NO: 9669 - protein, 424 aa, unidentified
MRVFVFNMRGRPLMPCSQRKARLLLRENKAMIYKYHPFTIQLTYTTGETKQDCHIGIDTGSKYIGAAVRSEDKVFWKGEIELRQDIRSNLDTKRIYRRSRRNRKTRYRKPRFLNRKRRDEWLPPSLQSRINHTFHWIDTLSSLVPNPILHIEVGKFDVAKMINPEIHGVDYQHGQTYGFFDERYFVFARDNYTCQCCGKSKNKILNTHHIIYRSNGGTNRVDNLITVCTDCHTSQNHRKGGIFYQWQEQHKKVKQYKEPPFMNTLRKRIFVAYPDAEITYGSETTPKRKAMKLDKTHYNDAIVISGINEIKENPEEWLLIKQFRKKKRSLHEATARKGRKKPNRNQTRNSKNTPYYKGFYLNDKVSVFGKSRYITGFTSNAAYIKDENNDYITLPNKTYKQVSINKMKLECHNNNWQYIIKNAV

SEQ ID NO: 9670 - protein, 325 aa, unidentified
VLHTANLPLTLAKVSLRQVWPAYRRKGTYIMVYVVANDGQPLMPTERHGKVCRMLRSGMAKVIKKCPFTIQLQYESERNVQPVSLGVDAGSKHIGISATTKAKVLYESDVELRDDIVKLLATRRQLRRSRRSRKTRYRPARFDNRKRKEGWLAPSIRQKIGSHLTVVANVCKILPINQIIVETASFDIQKIKNPEIQGIEYQQGEQMDFWNVREYVFFRDGHTCQCCKGRSKDKILNVHHIESRKTGGNAPNNLITLCETCHKGYHNGTVILPKNIKRGMQFKDAAFMGIMRWAFYNALKEQYEPAVPVSMTYGYLTKNTRIEHG

SEQ ID NO: 9671 - protein, 419 aa, unidentified; identical to SEQ ID NO: 6355

SEQ ID NO: 9672 - protein, 406 aa, unidentified; identical to SEQ ID NO: 7944

SEQ ID NO: 9673 - protein, 408 aa, unidentified; identical to SEQ ID NO: 7570

SEQ ID NO: 9674 - protein, 462 aa, unidentified
LWRVPRCGADTTSLLNIVEANMTRVIGETMSTCVFVLTTDHVPQTPVHPAVARKMLTARAAAVFKRFPFTIILKTAEAAHLPVHTHRLKIDPGSKTTGLALLDGPKVVWAAEITHRGQRITDALLRRRALRRSRRQRQTRYRQARFLNRTRPAGWLPPSLHSRVANMMTWVQRLQRLCPIVALSQELVRFDAQLLQHPAISGIEYQHGTLAGYEVREYLLEKWGRACAYCGATDVPLEVEHIVPKVRGGSHRVSNLTLACVSCNQQKGSQTAGEFGFAKIQAQARVPLKDAAVVNATRWALYSALKTTELPVETGTGGRTKYNRTRRGIPKSHWSDAACVGASTPEALHVAGVQPLGIRAMGHGTRQMCRVGAQGFPKAHRTRQKQYFGMQIGDIVKASVPQGKYAGTWTSRVVVKNSGWFDLVIHGKKASVHHKHCTRLWSSDGYTYTLPAGAGTAVSSPH

SEQ ID NO: 9675 - protein, 414 aa, unidentified
MPCSPAKARLLLKEKKAIVVRRTPFTIQLTIATGESKQPVSLGVDAGYKHVGLSASTEKAELYASEVELRKDITDLLSARRALRQSRRNRKTRYRAPRFDNRIRTKRKGWLAPSVENRINAHLSRIEAVLRLLPITKITVETASFDMQRLKNPDISGKEYQEGEQLGFWNVREYVLFRDGHVCRHCHGRSKDPVLNVHHLESRRTGSDSPDNLITLCETCHKALHRGEITLKAKRGQSFRAQAFMGIMRREVLNRLKASYPELKVHETYGYLTKHARIANGIVKSHGADAFCIAGNLGAERLGEFFFQKQTRRNNRQIHKLSILKGGIRKRNQAPFEAKGFRLFDKVACQGEEGFIFGRRSSGSFDVRKLDGTRISAGISCKKLRLLEKRRTYLTEIRKEEALPPLPEGRGLRA

SEQ ID NO: 9676 - protein, 512 aa, unidentified; identical to SEQ ID NO: 4031

SEQ ID NO: 9677 - protein, 411 aa, unidentified
MVYVQDIDGKPMMPTTRHGKVRRLLKDNKAVVVNTCPFTIKLTYKTSDYKQEIVLGVDAGTKHVGLSATTKSKELYSGEVILRNDIVELLSTRRESRRTRRNRLRYRKPRFENRVKSKRLGWVAPSVRHRIDAHIRIINNVCSILPVSRVIVEVAQFDTQKIKNPEISGKEYQEGDQLGFWNVREYVLARDGHKCQHCKGKSKDPILNIHHIESRKTGGDSPSNLITLCETCHKEFHKGNIKLKVKRGKSLRDAAVIGIMKWRLYDKLKSLYPNVRMTFGYITKHDRINHGIEKSHVSDAFVISRNFDSERLGYYYKRKLVRRHNRQIHKMKAPKGGNKRMNQSPFKVFGFRLFDKVMFQGKERFIYARRLSGQFKIKDIDGNNERNISYKKLRYVSHGLISIKTNLFLSQ

SEQ ID NO: 9678 - protein, 348 aa, Enterococcus sp.; identical to SEQ ID NO: 9214

SEQ ID NO: 9679 - protein, 423 aa, Moorena sp.
MRVFVLNKNRQPLDPCRPARARILLSTGKAKVYRRYPFTIILTEEIKEPITHGSQIKIDPGAKTSGLAIVQGNRVVWGAELTHRGFQIRDALTSRRQLRRARRNRKTRYRKPRFLNRTRSKGWLAPSLMSRVKNILTWVEKLTRVCPVTGISQELVRFDTQKLQNPEISGIDYQQGTLYGYELREYLLEKWNRKCAYCGATGTQLEIEHIKPKSKGGSNRVSNLAIACHPCNQAKSNQDIELFLSNKPSVLKRVLSQARRPLADAASVNTTRWKLYHDLKSTGIPVEVGSGGLTKFNRCRQNLPKTHWLDAANVGKVETLIIEVTHPLLITAKGHGTRQLCRTNKYGFPVRHCSRTKIHKGFQTGDIVRAVVTKGKKIGTYVGRVATRKSGYFNISTKSGLVQGISHKYCQFIHRKDGYAYTN

SEQ ID NO: 9680 - protein, 442 aa, unidentified; identical to SEQ ID NO: 2637

SEQ ID NO: 9681 - protein, 456 aa, unidentified; identical to SEQ ID NO: 6138

SEQ ID NO: 9682 - protein, 419 aa, Geobacillus sp.; identical to SEQ ID NO: 4579

SEQ ID NO: 9683 - protein, 408 aa, unidentified
MVYVQDINGKPMMPTTRHGKVRRLLKENKAVVVSLCPFTIKLTYVTSDYKQEIVLGVDAGTKHVGLSATTKSKELYSSEVILRNDIVDLLSTRRELRKTRRNRLRYRKPRFNNRIKSKRSGWIAPSVKYKVDAHIRVIDNVCSILPIFRIVIEVAQFDTQKIKNPNISGKEYQEGDQLGFWNTREYVLARDGHKCQYCKGKSKDKILNVHHIESRKTGGNSPSNLITLCETCHKEYHKGNIDLKIKRGKSLRDAAVMGIMKWRLYEEIKSKYDRVSMTFGYVTKYNRINHDIEKSHVSDAFVISKNFNAIRLGYYYKVRLVRRHNRQIHKQKIQKGGIKRLNQSPFEVFGFRLFDRVMFENSYYFIFGRRKTGSFNIRDIDGKSQKNITYKKFKLSRCKRFMIQKEMN

SEQ ID NO: 9684 - protein, 447 aa, Bacillus sp.; identical to SEQ ID NO: 4471

SEQ ID NO: 9685 - protein, 422 aa, unidentified
MLVYVISKDGQPLMPISRCGKVRRLLKSKRVKVIKRCPFTIKLLFEPENDFVGECYCGVDTGSKHVGIAVVSNDRVLYQSQIELRDDIKRKMEQRRMFRRNRRSRKTRYRKTRFLNRANSTKPNKLPPSVKHKVQAHIDEIEFCKKILPVSDIILEVSQFDTALMKNPGLMNEKVKHWGYQQGFNYGYSLRRSAILHRDNYTCQCCGKKNCRLEVHHIKFRRNGGTDDEENLITLCEECHKGVHAGSVVLNKKPKKSKGLKHATHMSIIRSQLLKVYPQAIETFGFVTSENRNRLNLPKDHYIDACVIASGGLPFELSDVLYQKRRVSKQDRQLCQGMHGERKIPTWKVLGFKKFDLVEYMRELCFVKGRRSSGSFVLMDINSRLIDFRDKGGKQNPSYKSLKRVSARRSILCISKKNREIR

SEQ ID NO: 9686 - protein, 420 aa, unidentified; identical to SEQ ID NO: 8560

SEQ ID NO: 9687 - protein, 413 aa, unidentified; identical to SEQ ID NO: 2636

SEQ ID NO: 9688 - protein, 430 aa, unidentified
MPKVYVLNRHGRPLMPCTPAKARHLLDAGKAKVRHRTPFTIQQLYGSTGYTQEVILGVDAGSKTIGLSAATETEELFSAEVKPRNDVVELMSARRQFRRARRNRTTRYRKPRFDNRVRSKHKGWLAPSVEVKIQEHMTAIRRACAILPVSKVVVETAEFDLQLLKAVAEGKPVPQGEDYQKGEMYGHYNVRQYVLWRDSYTCRICGAHGSVRKGVPLHVHHLESRRVGGDAPDNLVTLCTACHDKLHKGIIMAADIKKRKRRSTRDATFMGIMRMTLLRRLWEQLPVPVVETRGYITKATRENLLVLPKSHANDALAIAHGPQGFRAEYLPNIRQADRLYTIRPVRHHNRQLHKATILKGGVRKANQAEKYICGFRLYDKVLYNGIECFVWGRRTSGSFLLRQLNGEKVKDGVSYKHLKLLERSQSYLVA

SEQ ID NO: 9689 - protein, 409 aa, unidentified; identical to SEQ ID NO: 7451

SEQ ID NO: 9690 - protein, 535 aa, unidentified; identical to SEQ ID NO: 6116

SEQ ID NO: 9691 - protein, 413 aa, unidentified; identical to SEQ ID NO: 2636

SEQ ID NO: 9692 - protein, 442 aa, unidentified; identical to SEQ ID NO: 4467

SEQ ID NO: 9693 - protein, 422 aa, unidentified; identical to SEQ ID NO: 5333

SEQ ID NO: 9694 - protein, 402 aa, unidentified
MPTERFGKVRRLLKNGLAHVVCRIPFTIQLDYETTNFVQSISLGVDAGSKYIGISATTNKKELYAADVELRNDIVEKLSTRREQRRTRRYRLRYRKARFNNRISSKRKGWLAPSIENKIQTHLTVIEKIHKFLPIANMVVETASFDIQKIKNPSISSKEYQQGEQFDFFNVREYVLFRDKHTCQYCKGKSKDNVLNVHHIESRKTGGNAPNNLITLCETCHKKYHKGEIQLKLKRGKTFRDAAFMGIMRWTFYDRLKSMYPNVSMTFGYITKNTRILSNLPKEHYVDARCISGNSQAKPLEYYFYQKKVRCQNRQIHKAKILKGGKKKLNQAPFLVKGYRLFDLVEYQKELYYIFGRRSSGFFDIRRLDGTKINNGSVSCKHIRLIDARKTLIIEKRVQGAS

SEQ ID NO: 9695 - protein, 494 aa, Erysipelotrichaceae sp.
MVIALDKGKRPLGFITERRARKLMEARRACVYRYFPFVLIIKDVDARQIPDLPEYRIKIDPGADTDGISIIHDNEILFAMHVKHRGRQVTENMTKRKVSRRNRRNRETRYRRSKFAKGGTFEHTGSKGKLPPSVNSVIGNTKTWIRHLCSWINITNASFEAARFDTQLMDNPEIEGEQYQHGTLHGTEVKEYLLDYYQHTCQYCGGKSGDPVLEWEHIKPKSRGGTDTVKNATLSCSCCNREKGNHTPKEWKEIILAKPHKTRLDEARLEGIDNVMKHTITGGSNRYCAWTNISRKKLERFLFDLFDEVECSTGGKTKYNRVQMGLLKDHQYDAACIGDSTPEKYIDRTHGYYVKAIGMGRGTRFRGQASKCGIIAVKYAPRERRVFGFMTGDIVAADVPHRTKRPFKYEGHYTGRVMTRATGSFDIRTLGGDKVTVKHDFCRIIQYVDGYQYSLCRTTEKTCQGAKWRFPPGHLMTGDPRLAVLKNRHRQKGK

SEQ ID NO: 9696 - protein, 442 aa, Sutterella sp.; identical to SEQ ID NO: 3234

SEQ ID NO: 9697 - protein, 426 aa, unidentified
MVYVLNNNGQPLMPTNRHGKVKHLLKTGKAKVVKRCPFTIKLMYDSKSYTQPLSLGVDTGSGTLGVAVSKDNGDVVYISEVVVRNDVTDKMQRRAKYRRNRRNRKTRYRKARWLNRANSIRKDRFSPTMQSKLHSHTKEIEYVKSILPITTVVFETGQFDTHLMKNPMLANLKIRHWGYQKGVNYGFENTRAMVLNRDKYTCQYCKGKRKDSRLEVHHIVFRCQSGSDEECNLITLCHTCHKKLHDGKINPDFTGKTKGTLNYATQMNSIRKQLFRLYPNAIETFGYVTKANRFVLNIEKEHYLDACIIATQGKPFVLKSKVLLKKKCVPKGDFQKTKGVRSEQPIVTKKIFGFKKFDKVKYFGKEYFIKGRMSSGYAALMDINGNKIDFSTMPKGYKTAKMTNLKRLEARSSWMITAEEVTQNIA

SEQ ID NO: 9698 - protein, 456 aa, unidentified
MSTCVCVLSNNGERLMPTFRLGKVRRLLKDGKAKIVKHHPFTIQLLYDSKTNTQPIEICEDVGYNYIGISVKSESHEYVSAQYDTLQDEKEHHDDCRKYRRTRRNRLRYRKPRFDNRKRSEGWLAPSLEHKKQLNIRLVERYVSVIPITHATVEVGSFDTMLLQAIQKGESKPEGVDYQKGPRYNLATLREAVFYRDNYTCQVCGRKIADGAILHMHHMFYWKGRHGYQLDELVTACEKCHTPANHQKGGKLFGFGEDKEFANLSGAAFMNAVRWQIVDALHATYGKEFVTITYGAMTKEKRIILGIEKTHSNDAYAMGDYHPVHRCVFRHYQKRRRNNRVLEKFYDATYIDARTGNKAKGKELFNGRISRNHKKDSEDLHKYRSKKVSKGRRSIRRQRYAIQPYDTVRLESKTYITSGCHNKGTRLLIPANGKSKSVAISKVQVVCHAGAWIQII

SEQ ID NO: 9699 - protein, 442 aa, Sutterella sp.; identical to SEQ ID NO: 7529

SEQ ID NO: 9700 - protein, 413 aa, unidentified; identical to SEQ ID NO: 2636

SEQ ID NO: 9701 - protein, 427 aa, Fischerella sp.; identical to SEQ ID NO: 6171

SEQ ID NO: 9702 - protein, 431 aa, Aphanizomenon sp.; identical to SEQ ID NO: 8468

SEQ ID NO: 9703 - protein, 412 aa, Shewanella sp.
MFVFVLNKNGKPLMPCKPQKARVLLRRGDAKVIKRTPFTIKLVGGSSGYKQPLVAGMDTGSKAIGCAVIGLGQVIYQSQVALRQDVSKKMEQRAMYRRNRRGRKCRYRPARWSNRASMRTTGRLAPSLKSKLDSHLRERNFVESILPISEWKVETASFDIHKITKPDVSGAGYQNGVQKGFYNVKAYVLHRDGYKCQSGRKGKHSNKLHVHHIQFRSNGGTDTPTNLTTLCETCHADLHANKFELKAKKSRTKHATEIGIIKSRLKEEWQFAETFGYETKYKREQVLRLQKEHYYDAVAICLEDGELVEPASSVYFKRHVAKGDYQQTKGARSEKRIPVGKLFGLKKHDFISTPQGSGFVKGKRSTGYFALETITGEKVHASANVKKNTIRVTARTTTLTQKMESASNSSSH

SEQ ID NO: 9704 - protein, 512 aa, unidentified; identical to SEQ ID NO: 4031

SEQ ID NO: 9705 - protein, 513 aa, unidentified; identical to SEQ ID NO: 3179

SEQ ID NO: 9706 - protein, 415 aa, Bacillus sp.; identical to SEQ ID NO: 6255

SEQ ID NO: 9707 - protein, 470 aa, unidentified
MSVFVVGLNGCRLMPVSERKARLLLKGGKASVYRKVPFTIKLNYKTGSTVQPGYLGIDTGSQHIGVSVVQKDGTVLHKEEIGLRDSMSKRKLLESRASSRRGRRYRKTRYRHPKWKPKTKRIYNEKADRKGRHWKKQKNTFTSKRQAGWLPPSLQSKTDHHIQWIRKLLDLLPEGYRLSIELGRFDPARMKDPEIHGELYQKGPQYDYENVRAYVLARDGYTCRVCKKKGGKLHVHHILYRSRGASDNPKYMAAVCSKCHTTENHLPGGILYQWMQDQKKFTRGLRDATFMNILKKRLRKAFPDAVFTYGNITKADREKLELPKSHGNDATAIALVKTEVKSVKDEEPVIHIQQVRRKKRSLHEETPRKGRKEPNRTASRSDKNTKSVTVTKGSGEKKASMTACLFDRVELDGKKGWITGFTGTSCYVKDKEDNYICTSSKYKQVSISRLRILHHCGNWAIGAEKPLGKG

SEQ ID NO: 9708 - protein, 431 aa, Escherichia sp.; identical to SEQ ID NO: 3801

SEQ ID NO: 9709 - protein, 371 aa, unidentified
VDAGYKHVGLSASTEKAELYASEVELRQDVSDLLSARRALRQSRRSRNTRYRAPRFDNRIRTKRKGWLAPTVENRINVHLSRIETVLRLLPVTKITVETASFDTQLLKNPDIAGKEYQEGEQLGFWNVREYVLFRDGHVCQHCHGRSKDPVLNVHHLESRRTGGDSPGNLITLCETCHKALHRGEIKLRAKRGQSFRAETFMGIMRWGVLNRLKASHPKLEVHNTYGYRTKHARIANGIAKSHCADAFCIAGNFGAKRLGEFFFQKQTRRNNRQIHKLSILKGGIRKRNQAPFEVKGFRLFDKVACQGEEGFIFGRRSTGYFDVRKLDGTCISAGISYKKLHLLEKRRTYLTEIRKEEALPPPPEGRGLRA

SEQ ID NO: 9710 - protein, 413 aa, unidentified
MTSYAFVLDANGKQLAPTKEQKAWFLIRKKRATLVSKYPMVIQLKKKIPDKEIYKDEIRCGIDDGGLHVGIALVQKCQTRNKVVFKGTIEQRNDVKHLMDVRCGYRRYHRYHKRYRPARFNNRSSSKREGRIAPSVLQKRQAIIRVINRLNKWINITNYWLEDVAIDIRALTDGHRPYWWQYQKSNRLDENIRKATILRDGRKCMECGKSNCRLEVHHIKPRRLKGSSTLGNLITLCTKCHQKTKGVEELYMDKYFALLNSSDNKNLDYAQHVMIGKKWLRKQLSNLGLLYLTSGGDTANKRIDWDITKSHSNDAVCITDLRPDTCEIKEWIIKPMRRQSKAKTDNVFGIKHRDLVEYTFGNGETHRGYVTALYPEQNALNFQSLTKHCKKVNARKCKVLWKYSKIYWLDNVV

SEQ ID NO: 9711 - protein, 441 aa, Sulfobacillus sp.; identical to SEQ ID NO: 4231

SEQ ID NO: 9712 - protein, 429 aa, unidentified
MNRVFVLSSTKKPLMPCTPARARRLLNGRKAAVYRLKPFTIILKFRADGDVQDVEFKIDPGSKTTGMALVAAFKQDCVLVWGANLQHRGQAIRNALESRSSLRRGRRNRHTRYRAPRFLNRTRPAGWLPPSLQSRVGNISTWYNRLLGVVPVASAEVETVRFDLQKIANPEISGVEYQQGALLGYEIREYLLEKWHRCCAYCGAKDVPLQVEHIRPRASGGGNSVTNLTLACAPCNTKKGAKPIEQFLAKKPDILKKVLAHARLPLKDAAAVNATRYATGNAIKSIGLPTGFWSGGRTKSNRISQGYTKDHFIDAACVGITGATVSIADGFVPISIKAMGRGNRQVTRVNKFGFPCAAAKSKKSVLGIRTGDLVRITQPKGKFAGSYSARVSAIKAASNFLSINLDKKQTWFSAKLATLVQRGDGYAYA

SEQ ID NO: 9713 - protein, 420 aa, unidentified
MVYVLDKNGHPLMPTCRHGKVKHLLKDGKAKVVKRCPFTIKLLYESTSHTQNLTLGVDTGSGTVGTAVSKDNGDIVYISEVVVRNDITDKMTRRSKYRRNRRNRKTRYRKARWLNRKNSIKTDRFSPTMTSKFHSHIKEIEYIKSILPITTMVFETGQFDTHLMKNPSLADPDIKHWGYQKGSNYGFENTKAMVLNRDGYNCQYCKGKHKDSKLEVHHIVFRSKGGSDEESNLITLCHTCHKDLHSGKIHPDFKGETKGTLKYATQMNSIRKQLFRSYPEAVETFGYVTKTNRLSLGVEKEHYYDACTIATQGNPFVVITNLYKKKCVSDGDFQKTKGIRSEQPIVTDKICGFRKFDKVQYFGKEYFIKGRMSTGYAFLMDIDGNKADFSAMPKRCKTPKLSNCKRLTARSTQMVLAVAV

SEQ ID NO: 9714 - protein, 424 aa, unidentified
MASMQYVYVLNKHGEPLMPCSPGKARLLLKQQKACVVKRTPFTIKLLYGSAGYKQPVALGIDAGSKHVGLSASTEKRELYREEFTPRNDVVELLSTRRQNRRSRRNRKTRYRAPRFDNRVHSKHKGWLAPSVEVKIQEHITVIKRICRILPITLVRVETAEFDTQRLKAMLKGKPLPVGTDYQLGEMYDEYNVRQYVLKRDNYTCQCCGAHPTEKKPVRLHVHHLESRHVGGNAPNNLITLCVACHKALHKGKITLDKGKKRGKPLRDAAFMGIMRNTLLARLKDELNIPVKQTYGYITKLLREKNKIPKSHVNDARCIAKAPNAKPCDTMLYTRALRHHNRQIHKAKILNGGIRKKNQAPYLVKGFRLWDKVRYNGEECFITGRRSSGYFALKKYDGTVISNSASYKKLMLLEAATNYITERS

SEQ ID NO: 9715 - protein, 430 aa, unidentified; identical to SEQ ID NO: 3252

SEQ ID NO: 9716 - protein, 312 aa, Fischerella sp.; identical to SEQ ID NO: 8098

SEQ ID NO: 9717 - protein, 416 aa, unidentified
VSEITSYAFVLDVNGKPLAPTKEQKAWFLIRKKRAALVSKYPMVIQLKKEIPENKICKDEIRCGIDDGGLHVGIALVQKCKSKNKVVFKGTIEQRNDVKHLMEVRRNYRRYHRYHKRYRQARFDNRKSSKRKERIAPSILQKRQATMRVIHRLNKWINITNYWLEDVSIDIRVLTDGYKSYSWQYQKSNRLDENIRKATILRDGGKCMECGKSNCRLEVHHIKPRRRNGSNTLDNLITLCESCHQKTEGQEELYMDRYFSLLKSSDNKNLNYAQHVMIGKMWLRKQLSGLGVLYLTSGGDTANKRIDWNIEKSHTNDAVCITDLQPDTCDIKEWAIKPMRRQSKAKTDHVLGIHHRDLVEYTFKNGETHRGYVTALYPDQKAINFQSQTKHCKKVNARKCKLLWNYSKIYWFENAS

SEQ ID NO: 9718 - protein, 456 aa, unidentified
MSTCVCVLSNNGERLMPTIRLGKVRHLLKDGKAKIIKHHPFTIQLLYDSETNIQPIEICEDVGYNYIGISVKSQSHEYVSAQYDTLQDEKSCHDACRRMRRTRRNRLRYRQKRFDNRKRDKGWLAPSLKHKKELNVNVIKMYCEVVPITHATVEVGSFDTMLVKAIQEGKAIPEGADYQKGPRYNLATLREAVFYRDNYVCKVCGRKATEGAILHVHHMFYWKGRHGNSLSELITVCEKCHTPANHQKGGKLYGFGENVKFADLSGAAFMNTVRWQIVNELYAAFGKDFVTVTYGAMTKEKRIALHLEKSHNNDAYAMGNCHPAHRCEFGHYQKRCRNNRVLEKFYDATYIDTRTGDKAKGKELFNGRISRNHKKDSEDLHKYRSKKVSKGRRSIRRQRYAIQPYDTVRLESKSYITSGCHNKGTRLLIPANGKSKSVAISKVQVVCHAGAWIQII

SEQ ID NO: 9719 - protein, 512 aa, unidentified
MSTVYVLNKDGKPLMPTTRGGHVRHLLKEQKARVVRAKPFTIQLLYETNDVVQPLYLGIDPGRTNIGVAVVKANGTAVFTAHLETRNKEIPKLMQDRKKARRARRTNGRRCRRQRRAKANGTISKKCVKQTTAQNGSVSKRAKDIGVIKRHLPGCEKEVLCIGIKNKEAKFSNRTRPEGWLTPTANQLLQTHINLVKKIQKFLPISDVVLEINKFAFMRLDNPNVQKWQYQQGPLYQKASLEEAVSEMQEHHCLFCKKPIDHYHHVVPQHKNGSNTIGNIVGLCAKHHDLVHKDSAWEKKLAKKSTGLYKKYGALGVLNQIIPTLTNELSSLFPKHSFVTNGKSTYDYRAAHGVSKDHWLDAYCIACSVLPSNVCDSNINNHMPYVLKQFRRHDRRVLNNENMNRVYTLNNKAVAINRHKAKDQKTVSLEEFRKEHPDDVCKLKVKEHHPTYRNMNRNFPGSVFLVGKQIHVMQGIASSKDGKATKYNDTSATAIAAGKCKFVAKNTGILFV

SEQ ID NO: 9720 - protein, 431 aa, unidentified; identical to SEQ ID NO: 4306

SEQ ID NO: 9721 - protein, 462 aa, unidentified
MSVLVIGRNGRALMPTNPRKARLLLKKKTASVVCRHPFTIQLLYKTGCATQEGCIGIDTGSQHIGVGITCGDRVILKDEHTLRSSMEKRSLLATRAVMRRGRRYRKVRYRKPKWRHHTKRMYFEKANRRGQHWRKVKTTTQSPRSKGWLPPSLQSKCDHHFRIIDRYLKYLPDSITRNLVIEAGRFDMARMNDPTIHGEMYQRGPMYDAENLRAYIFARDNYQCACCKAKAGTTRKADGTTVKLVAHHILFRSRGATDNPKYIISVCDHCHTTKAHQPGGILYSWMENNKKVARGLRDATFMNILRKRLFARYPQAAFTYGNITAADRKQLRLPKSHANDAVAISLFGKEASTVKNICQTMHYKQIRKSKRSLHEAIPRKGRKNPNTKAVRNKKNTTQVNGFKLWDSVLANGKKLFICSFTGTSAYLIDKNGCYISQPGKTYKQWPLSKLKRLHPNGNWLMA

SEQ ID NO: 9722 - protein, 422 aa, unidentified
LNKRGKPLMPCSPAKARLLLKEKKAIVVRRTPFTIQLTIATGESKQPVSLGVDAGYKHVGLSASTEKAELYASEVELRKDITDLLSARRALRQSRRNRKTRYRAPRFDNRIRTKRKGWLAPSVENRINAHLSRIEAVLRLLPITKITVETASFDMQRLKNPDISGKEYQEGEQLGFWNVREYVLFRDGHVCRHCHGRSKDPVLNVHHLESRRTGSDSPDNLITLCETCHKALHRGEITLKAKRGQSFRAQAFMGIMRREVLNRLKASYPELKVHETYGYLTKHARIANGIVKSHGADAFCIAGNLGAERLGEFFFQKQTRRNNRQIHKLSILKGGIRKRNQAPFEAKGFRLFDKVACQGEEGFIFGRRSSGSFDVRKLDGTRISAGISCKKLRLLERRRTYLTEIRKEEALPPLPEGRGLRA

SEQ ID NO: 9723 - protein, 428 aa, unidentified; identical to SEQ ID NO: 5055

SEQ ID NO: 9724 - protein, 416 aa, unidentified
MLVYVLNKHGKPLMPCKPSKARKLLKQGKAKITQREPFTIQLIYGSSGYKQPITLGIDAGSKFIGVSATTEKQELFSAEVELRNDIVQLLSERRQYRRSRRYRKTRYRKPRFSNRVRSKNKCWLAPSIENKIQTHLKIVEKVHKILPITKIITEVASFDIQKIKNPNIEGVEYQQGEQLGFWNVREYVLWRDNHTCQICKGKSKDNRLNVHHIESRQTGGNAPNNLITLCETCHNKYHKGELNVKLKRGQSFRDTAFMGIMRWTFYNRLKNIYPNVELTYGYITKNTRITHKLPKSHRIDALCISGNPKAKQLDYWYYIKQVRKHNRQIHKAKILRGGIRKLNQAPYLVKGFRLFDKVKYKRQECFIFGRRSSGYFDLRKLDGTVIHRSASYKDLKLLSKRKTLLWERREGVSSPT

SEQ ID NO: 9725 - protein, 416 aa, unidentified
LVYVLSKNGNPLMPTSRHGKVKHLLKDGKAKVVRRTPFTIQLLYDSPEYTQPITLGVDSGSKVVGLSATTEKKELFVSEITLRDDIPELLSTRRQNRRTRRNRLRYRMERFLNRTASKKEGWLAPSVKHKVDSHLKVIENVHRILPISRIVIETASFDIQKIRNPEISGTEYQQGEQLGFWNIREYVLWRDNHECQHCHGKSKDRILNVHHKESQKTGGDSPGNLVTLCETCHKSYHAGRIQLKLTPNKSYRDASFMGIMRWYVYNSLKELYPEVSMTYGYITKTNRIMNNIEKTHSADAYCISGNMNAIRSNETYNQAFKRKYNRQIHKANFLKGGKKKLNQSEYEVKGFRLFDHVRYKDEDCFIFGRRTSGYFDLRKLDGSVVHRSASFKELKLLKRQNTILIERKGCNGVLLS

SEQ ID NO: 9726 - protein, 473 aa, unidentified
MAVFVIGLTEKRLMPTTERKARILLKQKKAEVFCKNPFTIRLLYQTGGTTQHVTLGVDTGSQHLGFAVAGDNGNIIHEQEVSLRRSMEKRKLLVKCKESRRGRRYRKVRYRHPKWRHHTVRVYIQKGYRKKGVKRHWKKLKVQFSSPRPEGWLPPSLQSKTDHHIRWIHRFLDVLPKDTGMVLEVGRFDAARMKNPEIHGELYQRGPQYDYENVKAYVFDRDNYKCRCCHAKAGTRRKDGTVVKLIAHHIDYRSKGASDNPDALASVCDACHTAANHQPGGVLYDWMVKNKRFKQGLRDTAFMNILRRRLFETFPDAKYTYGNITAARRKELMLPKSHTNDAVAIACTGMDISSIGKRPNHEVYEQQVRKKKRSLHEANPRKWSKTKNRFAVRNSKNTKEVNGVCLFDKVEVLGKGYGWVTGFTGTSCYVLDKNGNYVTTADTYKQVAISRLKVIHHSGNWISGLKCPIGNGS

SEQ ID NO: 9727 - protein, 442 aa, unidentified; identical to SEQ ID NO: 3234

SEQ ID NO: 9728 - protein, 425 aa, Moorena sp.; identical to SEQ ID NO: 3008

SEQ ID NO: 9729 - protein, 247 aa, unidentified
MYGSYNVCQYVLWRDNYTCICCGVRGTPKNPVRLHVHHFESRKYGGNAPDNHGTLCDDCHKKFHLGIITDVKLKTRRRQSTRDAAFMGIMRKTLMWRLRTELFIPVAETMGYITKATREKLLVLPKSHTRDALAIAQGRHGFGIKEYAYVEPANHIYTVRPVRHHNRQLHKASILKGGIRKRNQASKYVFGFRLYDKVLYQGKACFVWGRRTSGTFLLRTIDGIKVKDGVSYRNLTLLERSSNYLIA

SEQ ID NO: 9730 - protein, 418 aa, unidentified
MVYVINKEGQALMPTERFGKVRRLLKNGLAHVICRIPFTIQLDYETTHFVQPISLGVDAGSKHIGISATTSEKELYAADVELRNDIVEKLSTRREQRRTRRNRLRYRKARFNNRVSSKHKGWLAPSVENKIQTHLTVVEKIHKFLPITKIIVETASFDIQKINNPSISSEEYQQGEQLGFFNVREYVLFRDNHTCQHCKGKSKDHILNVHHIESRKIGGNSPSNLITLCESCHKAYHNGKIDIKVKRGASFRDAAFMGIARWTTYERLKNIYSNVSMTFGYITKNTRITNGLPKEHHVDARCISGNPKSKPLGYYFYQKKVRCQNRQIHKANFLKGGRKKLNQSPFLVKGYRLFDLVEYQKKLYYIFGRRDSGFFDIRRLDGTKVNKGSISCKHIRLVDIRRSILTERRNSCSTLPTN

SEQ ID NO: 9731 - protein, 429 aa, unidentified
MMVYVLDMNGQPLMPTHNGAKVRVLLKQKRAKVISKCPFTIKLLYESTNFTQSLTLGVDTGSKYVGSAVINDVTSESIYESQTELRDDVKSRMDRRRQFRRVRRNKLRYRPVKFNNRRASKRKNRYTPTLISKFQGHKREIEFIKSILPIKDVILEVGEFDPQLLQDPTLAYRKWGYAKGELYQQENFKQAAKARDGHKCQCCGKKNCRLEVHHLLPRSRGGSDKLANLLTLCTDCHSLAHSSEEQLLAFQKKFGKKAKSTLRYATQMNVLRHMLQREYPEAELTYGFHTKEMRRVFGLEKSHMIDACCIASSGVLFKNETSNKYKKKCVPKGNYVRTNTTNGKHVIIPKGKIAGFRRYDKVLYNNKEYFIAGRRSIGKVYLIDIDNNRVQVDRIKRTTGEKYVSKAEIKVSLVKKVASAKTCLCTISK

SEQ ID NO: 9732 - protein, 434 aa, Mitsuokella sp.; identical to SEQ ID NO: 2893

SEQ ID NO: 9733 - protein, 557 aa, unidentified
MIYNLVSTRERSFMKQKKQKVMVYILNKKGKPLMPTTRCGHVRKLLNSKKAVVVNSNPFTIRLKYDTPNGVQDVFAGIDSGRENIGSGASNEDGDCLYLGELKTSNKSIKLKMTERAGFRKERRRHDRQNKQRKARKDHTEIQNGNADICRTTISCKSVQISYPAAEKSVTHKIIRGKEGKFANRHRDEGWITPSARQLVQMHMNDLKSMCKILPISHVTLERVAFDFQKLENENIKVWEYGKGKLYGYDSPEEYIHDVQNGKCLVCGKPHIDYLHHIIPRSKGGSDKVSNIAGLCYDCHYGPMGVHNCQNTQDRLPELKSEANKQYKVSLLNSVMPVLIEEMDKFCKANSIMFSVCEGHDTAKVRDMYDLQKDHCIDGFAISLVDRNVKSVDVMPDRIYQKQRYKKKSKNIIQKRNCREYYDDKKLVAVNRHKGTDQKADSLEEYMNTYAETHTTDECKKHFDSLVVKPARRTYTFHKEWRICPFHIGDKVRYEKKNKIKGNTKVDTFICEGIRFVKDENKAEVKHNKTKSKKMKFCRVLESGCTPYVDYRKLALM

SEQ ID NO: 9734 - protein, 456 aa, unidentified; identical to SEQ ID NO: 9335

SEQ ID NO: 9735 - protein, 430 aa, unidentified
MPNKVYVINKHGRPLMPCSPAKARHLLDEGKAKIKKRTPFTIQLVYGSSGYTQEVILGVDAGSKTIGMSASTKKEEVFAADVTPRNDVVDLMSTRREFRRARRNCKTRYRKPRFDNRVRSKHKGWLAPSVEVKIQGHITAIRRVCGILPVSKVVVETAEFDLQLLKAIEKGKPVPQGEDYQQGEMYGHYNVRQYVLWRDNYTCQCCGAHATKKKEVRLHVHHLESRKVGGDAPDNQVTLCESCHEKLHKGLIAEKDFKKRKRRSTRDATFMGIMRKTLMQRLCSELPIPVIETRGYITKATREKLLVLPKSHTNDALAIAQGKQGFNVGYLPGIVQINKIYTIRPVRHHNRQLHKATILKGGIRKSNQAGKYVFGYCLFDKVQFNGQDCFIWGRTTGIFTIKTINGKMIKDGISFKKLKPVEKSTSYLIA

SEQ ID NO: 9736 - protein, 388 aa, unidentified
  source 1..388: note = Archaeon sp.
MHGKPLMPTTPGKARILLKQGKATVIQRTPFTIQLCYLTGKYKQDIELGIDAGYSTIGFSATTEKKELLSGELTLRKRISKLLKQRRSYRRARRNRLWHRKSRFNNRSKPEGWLAPSIQHKLETHLRLIEKLKKILPITKITIEVAKFDQQKMNKTEIKGVEYQQGELQGYEVREYLLEKWKHKCAYCGKNNLPLEIEHIIPKIRGGTNRVSNLTLACHRCNQKKCDKTAAEFGYPEIQKKANQTLKSTAFMNIVRKKVVNTLKCAWTYGYITKHDRIKLGLEKNHVNDAFVIAGGTTQSRTIPDMATQTRRNNRSIQTNRKGHKPSIRRQRYKLQPNDLVRYKEILCKVKGVSSYGKWVRLVTKAGEIINTNVKKVELVKYGKGIQF

SEQ ID NO: 9737 - protein, 431 aa, unidentified; identical to SEQ ID NO: 3235

SEQ ID NO: 9738 - protein, 514 aa, unidentified; identical to SEQ ID NO: 7895

SEQ ID NO: 9739 - protein, 472 aa, unidentified; identical to SEQ ID NO: 2965

SEQ ID NO: 9740 - protein, 496 aa, Streptomyces sp.; identical to SEQ ID NO: 4777

SEQ ID NO: 9741 - protein, 512 aa, unidentified
MSTVYVLNKDGKPLMPTTRGGHVRHLLKEQKARVVRTNPFTIQLLYETDNLVQPLYLGIDPGRTNIGVAVVKTDGTAVFTVHLETRNKEIPKLMQGRKKARRARRTNGRRCRRQRRAKANGTISKKCVKQATAQNGSVSKRANEIGVIKRHLPGCEKEVLCIGIKNKEAKFSNRTRPEGWLTPTANQLLQTHINLVKKIQKFLPISDVVLEINKFAFMRLDNPNVQKWQYQQGPLYQKASLEEAVSEMQEHHCLFCKKPIAHYHHVVPQSENGSDTIGNIVGLCTKHHDLVHKDTAWQKKLAKKKTGLNKKYGALSVLNQIIPALTKELSFLFPKHFFATNGKSTYDYRAAHGVGKDHWLDAYCIAGSVLPNDACDNNINNHVPYELKQFRRHDRRALHKENMGRVYTLNGKSVATNRHKAIKQTTDSLEEFRQRQPNDVCKLKVKEHHPEYRNPKRNFPGCVFLVGKHTHVMQGTSGSHNGKADGYYDTNGNSYSSGKCKFVVKNEGIVFT

SEQ ID NO: 9742 - protein, 442 aa, unidentified; identical to SEQ ID NO: 7396

SEQ ID NO: 9743 - protein, 495 aa, unidentified
MSTTLARGESGGSMAGEVIHQRRHKVMAYVAVLSASGKSLMPTTAYKARKLLKSGRAKIYSYRPLFTIQMQDREEGTTQPIEMKVDTGAQYIGVSVCSEKHEYWNRRYDMLPNEKEMHDEARKNRRNRRQKLRYRAPRFDNRTHGHNRKEDKWFTPSLKHRENIHIQLAAKICAVVPVTDAYFEMGQFDIQVLKAYEAGKPIPVGDDYQKDERYGYATLREAIFARDNYTCQVCGAKLDDKHHPILRMHHIGYWKHDHSNRMGNLMTVCIKCHTAANHKPGGKLYGLEPELPTFKGAAFMNTVRWNMFTQLKKTLPNVKCHITYGAMTKLKRSELNTRKTHSNDAYCMGTLHPKWRTDFQHYQKVRRNNRVLSKFYDAQYIDTRDGEKMSGSQLSCGRTKRSESRHSIKNLRGYRGHRATSKGKKPKISKGHISIRRHKYAFNTGDIVIVQGKKLTVSGTQHYGEYVVFRDKTHAAAKAKEVTMYRHGDGWIRVV

SEQ ID NO: 9744 - protein, 427 aa, Scytonema sp.; identical to SEQ ID NO: 4708

SEQ ID NO: 9745 - protein, 431 aa, unidentified; identical to SEQ ID NO: 5232

SEQ ID NO: 9746 - protein, 442 aa, unidentified; identical to SEQ ID NO: 7529

SEQ ID NO: 9747 - protein, 304 aa, unidentified
VHSKHKGWLAPSVEVKIQEHITVIKRICRILPVALVRVETAEFDTQRLKAMLEGKPLPVGTDYQLGEMYDEYNVRQYVLKRDHYTCQCCGAHTTTKKTVKLHVHHLESRKVGGNAPSNLITLCTTCHDALHKGKVSLDGKERGKPLRDAAFMGIMRKALMARLREELPIPVQGTYGYITKMRREQNDIKKSHVNDARCISKHPLAEPCSVCYRTKAIRHHNRQTHKANFSKGGIRKRSQMPYVVEGYRLWDKVLYKGQECFVSGRRASGSFTLKKLDGTRISKGVTFKKLRLLEPATNYLIERM

SEQ ID NO: 9748 - protein, 442 aa, unidentified; identical to SEQ ID NO: 2637

SEQ ID NO: 9749 - protein, 424 aa, Caldicoprobacter sp.
MVYVISKAGKPLMPTERHGKVRRLLKQGLAKVVKREPFTVQLLYDTTTYTQPVTVGLDIGSKTTGVSAVTEKKEIFSAEVELRDDIKGLLLERRQYRRMRRYRKVRYRKPRFLNRARDDGWLAPSLQWKVDAHIRIVDMLGRIMPIERVVVEVAPFDTQKILNPDIEGADYQNGAQKGFWDVREYCLWRAGYRSELSGKRGILEVHHIVPRSEGGTDTPSNLIVLTADEHKGVHEGRIRIPKSKVEKVKMFKDAAHVSTIGWHIVNRLRERYSVEVTYGSTTKAKRLSCGMEKSHRVDAFIIAGGDLQERLREWYLGKFLRRQNRSLHKANPIKGGVRPVNTIKEAYGFRRYDRVEYEGIIGIIAGLRSSGYFAVRSLSGEKIHDSAKHNRLRLVEKAKTLMLERREERIPLHLEEDGVSCARI

SEQ ID NO: 9750 - protein, 414 aa, unidentified
MPCSPAKARLLLKEKKAIVKRRTPFTIQLTIATGETKQPVSLGVDAGYKHVGLSASTEKAELYASEVELRKDITDLLSARRALRQSRRNRKTRYRAPRFDNRIRTKRKGWLAPSVENRINAHLSRIEAVLRLLPVTKITVETASFDLQLLKNPDISGKEYQEGEQLGFWNVREYVLFRDGHVCQHCHGRLKDPVLNVHHLKSRRTGGDSPSNLITLCETCHKALHRGEITLKAKRGQSFRAETFMGIMRREVLDRLKASHPKLEVQNTYGYRTKHARISNGIAKSHCADAFCIAGNLGAKRLGEFFFQKQTRRNNRQIHKLSILKGGIRKRNQAPFEIKGFRLFDKVACKGEESFIFGRRSSGYFDVRKLDGTRISAGISCKKLRLLEKRRTYLTEIRKEEALPPLPEGRGLRA

SEQ ID NO: 9751 - protein, 496 aa, Streptomyces sp.; identical to SEQ ID NO: 4777

SEQ ID NO: 9752 - protein, 454 aa, Streptomyces sp.; identical to SEQ ID NO: 9429

SEQ ID NO: 9753 - protein, 429 aa, unidentified; identical to SEQ ID NO: 9712

SEQ ID NO: 9754 - protein, 393 aa, unidentified
NGTISKKCVKQATAQNGSVSKRANEIGVIKRHLPGCEKNVLCIGIKNKEAKFSNRTRPEGWLTPTANQLLQTHVNLVKKIQKFLPISDVVLEVNKFAFMRLDNPNVQKWQYQQGPLYQKASLEEAVSEMQEHHCLFCKNTIDHYHHVVPQHKNGSNTIGNIVGLCAKHHDLVHKDTSWQEKLAKKKTGLNKRYGALSVLNQIIPALTKELSSLFPKHFFATNGKSTYDYRAAHGVSKDHWLDAYCIAGSVLPNDACDNNINNRVPYELKQFRRHDRRALHKENMSRVYTLNGKSVATNRHKAIKQTTDSLEEFRQRQPNDVCKLKVKEHHPEYRNPKRNFPGCVFLVGKHTHVMQGTSGSHNGKADGYYDTNGNSYSSGKCKFVVKNEGIVFT

SEQ ID NO: 9755 - protein, 495 aa, unidentified
MAAVYVLSASGKPLMPTTRCGHVRILLKEGKARVVERIPFTIQLTYQSTEETQSLYLGIDPGRTNIGAAVIREDGECVFTAQLTTRNKDVPKLMKARKQFRMAHRRLKRRCKRQRRAKTNGTTSQKEAFQRLLPGCEEPITCKGIRNKEARFNNRKRPVGWLTPTANHLLLTHINLVQKLKKFLPITDVVLEVNRFAFMAMDNPHIQRWQYQRGPLFGQGSVEEAVYAAQDGHCLFCKNGIDHYHHVIPRRKNGSETLENRVGLCEEHHRLVHTEASWEEKLATKKAGLNKKYHALSVLNQIIPQLTEQLTELFPQHAFATTGQNTYAFREDHSIPKDHYLDAYCIACSVLADTSRVAIPKEAPYDIRQFRRHDRQACHKANIERKYIDAGGKVVASNRNKAIEQKTDSLVEYRVSHSEAEVSQLTVKPHLPQYKDMGRPMPGSLALHNGNVFVLTASDGRHNGFVDYYIDEHGEKHGARKCDIQTNNTGLQFCG

SEQ ID NO: 9756 - protein, 430 aa, Desulfobacter sp.
LSVFVLDTNKKPQNPVHPAKARLLLTEGKAAVFRQFPFTIILKETVLDVASNPLRIKIDPGSRDTGIAVINDDTGEIVFAMELRHRGQQIKNNLESRRAIRRSRRNRKTRYRKPRFDNRTRAEGWLPPSLKSRIHNIETWVNRLCRFCNIQAISMELVRFDMQKIQNPEISGVAYQQGELMGYEVREYLLEKWDRTCAYCGKTDIPLEIEHIVPRSKGGSNRVSNLTLACTACNRKKGNKPLEQFLSRKPRLLKRIQKQSKMPLKDAGAVNATRWDLFRTLKKTGLPVEIGSGGLTKFNRTTRGLHKTHWLDAACVGKSTPEKMFQIDKTVLIVKADGHGSRQMCRVNKFGFPRTTAKSTEKKVKGFQTGEIVKAVVTSGKKVGTYIGRVAVRKSGSFNIKTVDKTVQGISWKYCRLLHASDGYSYNTTC

SEQ ID NO: 9757 - protein, 381 aa, unidentified
  VARIANT 381: note = X can be any naturally occurring amino acid
MSRVLIVDQQRRPLMPCTPARARLLLKQKKAAVLRRCPFTLILHESRPEAVVQPLRLKIDPGSKVSGLALVNDTSGEVVWAAEVTHRGGQVHKDLQKRAGVRRGRRQRHTWYRPARYLNRRRPKGWLPPSLESRVQNVETWTQRLIFWAPVGSLSYEAVRFDTQALQNPEIEGTQYQHGTLAGLEVKEYLLLKWGQRCAYCEKMGLPLQLEHIIPKIRGGSNRVTNLTLACEQCNGKKGNQTAEEFGFPHLQAQAKAPLKDAAAVNSTRRVLHQRLVRTGLPIEASSGGRTKWNRRERDIAKTHWLDAANVGPSTPARLLFQHVRPWLIEANRRQDRQLCLVNALGFPRSKPKKKSPKHDFRTGDIVRAVVPAHLENPGIX

SEQ ID NO: 9758 - protein, 442 aa, unidentified; identical to SEQ ID NO: 2903

SEQ ID NO: 9759 - protein, 430 aa, unidentified
  VARIANT 384..409: note = X can be any naturally occurring amino acid
MVYVLDQSGQPLMPTERHGKVRHLLKSGKAKVIKRCPFTIQLLYNSTHYTQDITLGVDAGSKQIGLSATTKQKELYAAEIELRNDIVKLLAARRELRRSRRSRKTRYRKPRFQNRTHSRKPGWLAPSIRQRIQCHLTVIANVHKLLPTKTILIETASFDIQKIKHPDIHGVQYQKGEQLDFWNVREYVLFRDNHTCQCCKGRSKDNILNVHHIESRQTGGNAPNNLITLCETCHTGYHNGKVILPKTIKRGMSFKDAAFMGIMRWSCYDMLKNIYPDVHMTYGYITKNTRIGNNLAKEHYVDARCISKNPKAKPLPYYYYQKKVRCHNRQIHKTKPTKHGIRKRNQAEYVVHRYRLFDKVQYQNNEYFIFGRRKTGYFDIRTLXXXXXXXXXXXXXXXXXXXXXXXXXXKKLKLLEKSKKYLTETRLQTT

SEQ ID NO: 9760 - protein, 406 aa, unidentified; identical to SEQ ID NO: 7406

SEQ ID NO: 9761 - protein, 440 aa, Calothrix sp.
MTTNLIFVLDSDKKPLTMCTPGLARKLLDSQKAAMFKWYPATIILKKSVVELPLPYLELRIDPGSRFTGIALVEIETETIVWAMELEHRGLSISETLTSRSNIRKGRRSRNTRYRKERPNHKKSSGWLPPSLQHRVDTTMTWVRRIIKLAPIKSIAFERVKFDMQKIENPSIEGIEYQQGALQGYTLREALLDHWGRKCAYCNAIDVPLEIEHIQPKSKGGSDRFNNLTLSCHQCNQNKSNQTIDEFLKDDPARLNNIKKHQKQSLRDAAAVNSTRNKLFDSLKTFNIPIYSGSGAETKMMRIKSNLPKAHFIDAGCVNASYKVTLKTIQPLRVKCNGHGNRQFMTMDKHGFPRKDYAPKCVRKDWKAGDIIKVKKKGGNFVLGRVKKAAKTLAFIPFGGKETSFSPKNTKPIHRSDGYRYSFTTIDTEGRKRKRSFPAG

SEQ ID NO: 9762 - protein, 408 aa, unidentified; identical to SEQ ID NO: 6729

SEQ ID NO: 9763 - protein, 411 aa, unidentified; identical to SEQ ID NO: 6244

SEQ ID NO: 9764 - protein, 512 aa, unidentified
MSTVYVLNKDGKPLMPTTRGGHVRRLLKEQKAQVVTSKPFTIQLLYETDDVVQPLYLGIDPGRTNIGVAVVKTDGTAVFTAHLETRNKEIPKLMQGRKKARRARRTNGRRCRRQRRAKANGTISKKCVKQTTAQNGSVSKRAKKIGVIKRHLPGCEKKVLCIGIKNKEAKFSNRTRPEGWLTPTANQLLQTHINLIKKIRKFLPVNDVVLEINKFAFMQLDNPNIQKWQYQQGPLYQKASLEEAVSEMQEHHCLFCKQSIVHYHHVVPQSENGSDTIGNIVGLCTKHHDLVHKDTAWQKKLAKKKTGLNKKYGALSILNQIIPALTKELSSLFPKHFFATNGKSTHDYRAAHDVSKDHWLDAYCIACSVLPNDTCDKTINSRVPYELKQFRRHDRRALNNENMSRVYTFNGKMVATNRHKATEQTTDSLEEFRQRQPNDVCNLKVKEHHPTYRNMNRNYPGSVFLVGNQVHVMQGIAGSKDGEATTYKDTNANSIAAGKCKFVAKNSGILFV

SEQ ID NO: 9765 - protein, 460 aa, unidentified; identical to SEQ ID NO: 7734

SEQ ID NO: 9766 - protein, 456 aa, unidentified
LAAFVLDRNGKPLMPCTEKRARLLLVRRRARVHRVVPFTIRIIDRDIRTSDVQPLRIKLDPGSRVTGMALVRDFACSDGLRGAAVLNLFDLIHRGAQISKMLTVRRAMRRARRYRKTRYRAARLNNRRRSTGWLAPSLRHRLETTTAWVHRLRRFAPVVAISTELVRFDMQAMENPDIRGVEYQQGTLAGYELREYLLEKWGRQCAYCDATGRPLQIDHIKARALGGSNRVSNLTLACKSCNQQKDSLPLTTFLRHDSRRAAQILAHARAPLRDAAAVNMTRWALFGALKATGLQVEPSTGGRTKFNRAHLSVPKTHALDAACVGEVDMLRYWRRPTLAIRCTGRGAYRRTRLTASGFPRGYLMRQKRACGFQTGDLVRAKVPRGKKTGTYVGRVAIRASGSFNIQCAAQVMQGISHRYCTVMQRGDGYGYSFVAQFPKESENWGDATRRALSLPA

SEQ ID NO: 9767 - protein, 453 aa, unidentified
MLMAVAVVSRTGVPLMPTSPYRARKLLASGKAEKYGYDPFTIRLTERETGDTQPVELCMDTGYIHIGVSVKSEKHEYLALQIDTLTDEKKKHEKCREKRRNRRSRKRYRKPRFDNRKRDKGWLAPSLKHKKEIHVRAAERICRVVPVTDITMEMGNFDTQVLKAKEEGRPLPQGTDYQQGERYGTATLREAVFSRDNYTCLCCGRTMKDGAYFHVHHIRYRSQGGTDRMANLATVCEKCHTPANHQPGGKLYNWKPEIKSFKGATFMTAVRWQMYREIKEKIPDVSVHLTYGAATKERRRALDIEKSHVNDAFVMGRFHPGHRARPELYIKKRRNNRVLESFYDARYIDSRDGKRKPGKELFNGRISRNHKKDSENLHKYRLRKVSKGKRCIRKKHYLIQPHDILVYCGRKYETAGCHNLGTGAILLPERRSIAVSKLKIYRYSGGYYKAAFN

SEQ ID NO: 9768 - protein, 544 aa, unidentified
MKQKKQKVMVYILNKKGKPLMPTTRCGHVRKLLDSKKAVVVSSNPFTIRLKYDTPNGVQDVFAGIDSGRENIGSGASNEDGDCLYLGELKTSNKSIKMKMTERAGFRKERRSHDRQNKQRKARKDHTEIQNGNADICRTTISCKSVQISYPAAEKSVTHKIIRGKEGKFANRHRDEGWITPSARQLVQMHMNDLKSMCRILPISHVTLERVAFDFQKLENENIKAWEYGKGKLYGYDSPEEYIHDVQGGKCLICGKPHIDYLHHIIPRSKGGSNKVSNLAGLCYDCHYGPMGVHNCQDTQGRLPELKNEANKQYKVSLLNSVMPVLIEEMDKFCKANSIIFSICGGHDTAKVRDMYDLQKDHCIDGFAISLAGRNVKSVDVMPDRIHQKQRYKKKSKNIIQKRNCREYYDGKKLAAVNRHKGTDQKADSLEEYMNTYAETHTADECKKHFESLTVKPARRTYTFHKEGRICPFHIGDKVRYEKKNKIKGNTKVETFICEGIRFPKDENKAKVEHNKTKSKKMKFCRVLEPGCTPYIDYRKLVLI

SEQ ID NO: 9769 - protein, 417 aa, unidentified
MPCSPAKARLLLEEKKAIVKRRTPFTIQLTIATGEAKQPVTLGVDSGYKHIGLSATTEKAELYASQVELRQDITDLLSARLALRRSRRSRKTRYRAPRFDNRVASKRKGRLAPSVENRIAAHMSRVEAVMRVLPVTAITVETAVFDTQLLKTPDIAGAAYQQGEQLGFWNVREYVLFRDGHVCQHCRGKSKDPILNVHHIESRRTGGDAPNNLITLCETCHKAFHRGEIELKIKRGKSFKAETFMGIMRWTLFERLKKAHPELNVHNTYGYLTKHKRISHGIAKSHCADAYCIADNLSAKRLKGFFFQKQTRKHNRQIHKLSILKGGLRKKNQAPYEVKGFRLFDKVICKGEEAFIFGRRTSGSFDVRRLDGTRISAGISYKKLRRLESRTTYLTEFRKEAALPPLHKCRGFRAEFL

SEQ ID NO: 9770 - protein, 419 aa, Butyrivibrio sp.
MVYVISQDGKPLMPCSNTIARLLLKQGKAKVKRREPFTIKLTYETTSYTQDLTLGVDTGSGTIGTAVSKNNGDIVYISEIIVRNDITDKMTQRAKYRRNRRNRKTRYRKAKWLNRANSIKNDRFSPTMQSKLHSHVKEIEYIKSILPITKLVFETGQFDMHLMKNPSLASPKVKHWGYQKGANYGVENIKAMVLNRDNYTCQCCRGKHKDSKLEVHHIIYRSQGGSDEADNLITLCHTCHKALHDGKINPKLSGKTKGNLKYATQMNSIRKQLFRLYPGAIETFGYITKANRLRLGVNKEHYHDACTIATQGDSFALKTNLYKKKCISDGDFQKTKGIRSEQPIETKKICGFRKFDKVRYFGKEYFIKGRMSTGYAILMDIEGKKIDFSSMPKGYKTPKLNNCMRIAARTSQIIQTVAM

SEQ ID NO: 9771 - protein, 442 aa, unidentified
MSTSVFVLDKKHRPLMPCRPARARRLLRAGRARVVKRFPFVIRLVDRTVEQSEVQPVLIKLDPGSRETGAAVVRDDGKKRHHALAFFVIEHRGGAIRDALKARSAFRRRRRSQNLRCRSPRFLNRVKPKGWLPPSLRHRVETTLSFVRRMCRYLPVSGIAAELVKFDSQKLQTPEVSGIEYQQGTLFEYEVREYLLEKFGRKCVYCGAEGVPLNIDHVVPRAKGGSNRVSNLVLACVSCNQKKGARSLEDFLKGKPEVLARVRRELKTPLRDAAAVNATRWVLFNELKATGLPVETGSGALTKLNRHAFGVEKEHWLDALCVGRLNGAVTRKGLNVLEIRCMGRGSRQRTRLTKYGFPRGYLMRQKCVHGFATGDMVEANVPKGKKAGLWRGRVAVRVSGSFNIQTPKGVIQGVGWKHCRLISHNDGYGYAWLGHAPHSSPA

SEQ ID NO: 9772 - protein, 518 aa, unidentified; identical to SEQ ID NO: 2751

SEQ ID NO: 9773 - protein, 557 aa, Blautia sp.; identical to SEQ ID NO: 7395

SEQ ID NO: 9774 - protein, 423 aa, unidentified; identical to SEQ ID NO: 3951

SEQ ID NO: 9775 - protein, 453 aa, unidentified
MSVAVVSKTGMLLMPTSEYRARKLLKSKKAIIHGYHPFTIQLTERETGYIQPVELCMDTGYIHIGTSVKSEKHEYLGEQIDTLTDERQKHDACRMYRRQRRNRKRYRQPRFNNRERDDGWIAPSLEHKKTIHIQALSRICKVIPVTDITLEMGNFDTQVLKAREEGRPLPQGLDYQHGERYSVTTLREAVFLRDGYTCQRCGRTIKDGAILHVHHVVYRSQGGTNRISNLITICDKCHTPANHKPGGKLYGWKPKVASFKGATYMTTIRWKLYNEIKALFPDIDIHITYGAETKERRRAFDITKSHVNDAFVMGQFHPKYRSKPVCYKKKRRNNRCLEKFYDAKYIDSRNGKTRTGQELFNGRISRNHKKDSENLHQYRRQKISTGKRTIRKQHYAIQPHDIVIFNGEKFETSGCHNNGTRVILLPQKKSVAIKKLNIYRYAGGYFKSAFNQK

SEQ ID NO: 9776 - protein, 413 aa, unidentified
MTSYAFVLDANGKQLAPAKEQKAWFLIRKKRAALVSKYPMVIQLKKEIPENEICKDEIRCGIDDGGLHVGIALVQKCKTKNKVVFKGTIEQRNDVKHLMEVRRSYRHYHRYHKRYRPARFDNRKSSKRKKRIAPSILQKRQAIIRVIHWLNKWINITNYWLEDVSIDIRALTDGYKPYRWQYQKSNRLDENIRKAAILRDGGKCMECGKLNCRLEVHHIKPRRRNGSDMLDNLITLCKSCHQKTEGQEELYMDRYFSLLKSSDHKNLNYAQHVMIGKEWLRKQLSSLGVLYLTNGGDTANKRIDWNIEKSHANDAVCITNLQPDTYDMKEWTVKPMRRQSKAKTDNVLGIKHRDLVEYTFKNGETHRGYVIALYPEQKAINFQSPTKHCKKVNARKCKLLWKYSKIYWFENAS

SEQ ID NO: 9777 - protein, 430 aa, unidentified
MPKVYVLNRHGRPLMPCTPAKARHLLDAGKEKVRHRTPFTIQLLYGSTGYTQEVILGVDAGSKTIGLSAATETEELFSAEVKPRNDVVELMSARRQFRRARRNRATRYRKPRFDNRVRSKHKGWLSPSVEVKIQEHMTAIRRACAILPVSKVVVETAEFDLQLLKAVAEGKPVPQGEDYQKGEMYGHYNVRQYVLWRDSYTCCICGVHGSVRKGVPLHVHHLESRRVGGDAPDNLVTLCTACHDKLHKGIIMAADIKKRKRRSTRDATFMGIMRMTLLRRLREQLPVPVVETRGYITKATRENLLVLPKSHANDALAIAHGPQGFRAEYLPNIRQADRLYTIRPVRHHNRQLHKATILKGGVRKANQAEKYICGFRLYDKVLYNGIECFVWGRRTSGSFLLRQLNGEKVKDGVSYKHLKLLERSQSYLVA

SEQ ID NO: 9778 - protein, 414 aa, unidentified; identical to SEQ ID NO: 2588

SEQ ID NO: 9779 - protein, 424 aa, unidentified; identical to SEQ ID NO: 6533

SEQ ID NO: 9780 - protein, 406 aa, unidentified; identical to SEQ ID NO: 2973

SEQ ID NO: 9781 - protein, 470 aa, unidentified; identical to SEQ ID NO: 2825

SEQ ID NO: 9782 - protein, 419 aa, unidentified
MVYVISQDGKPLMPCSDPIARLLLKQGKAKVKKREPFTIKLTYETTNYTQGLTLGVDTGSGTIGTAVSKDNGDIVYMSEVVVRNDITDKMTQRAKYRRNRRNRKTRYRKARWLNRASSIKKDRFSPTMQSKLHSHVREIEYIQSILPVTEMVFETGQFDMQLMKNPSLANPKVRPWGYQKGANYGFENTKAMVLNRDNYTCQCCKGKHKDSKLEVHHIVFRSQGGSDEESNLLTLCHTCHKDLHSGKINPKLSGKLKGNLKYATQMNSIRKQLFRFYPNAIETFGYVTKANRLHLGVDKEHYYDACTIATQGNAFNVKSNLYKKKCVSDGDFQKTKGIRSEQPIVTDKICGFRKFDKVRYFGNDYFIKGRMSTGYAILMDVDGNKIDFSTMPRGYKTPKLSNCKRITARSTVMTQVKVV

SEQ ID NO: 9783 - protein, 466 aa, unidentified; identical to SEQ ID NO: 9194

SEQ ID NO: 9784 - protein, 453 aa, unidentified
MSTCVCVLGSDGERLMPTFRLGKVRRLLKDGKAKIIKHHPFTIQLLYDSKTNTQPIEICEDVGYNYIGISVKSESHEYVSAQYDTLQDEKACHDSCRKLRRTRRNRLRYRKPRFDNRKRGEGWLAPSLRHKKELNVNVVKMYCAVMPITHATVEVGSFDTMLVKAIQEGKAIPEGADYQKGPRYNLATLREAVFYRDNYTCQVCGRKIADGAILHMHHMFYWKGRHGNSLDELLTVCEKCHTPANHQKSGKLYGFGEDVKFSNLSGAAFMNTVRWQIVNELYAAFGKPFVTITYGAMTKEKRIALHLEKSHNNDAYAMGEFHPNCRCAFEHYEKVRRNNRILERFYDSRYIDIRTGEIATGKELFNGRINRNHKKDSENLHKYRGKRTYAGHRALLRKKVNLNPGDLVSLNGEVLIVYGTHTDKKGAVNVEFKTPAKNGRKSASLKKLKIVKT

SEQ ID NO: 9785 - protein, 415 aa, unidentified
MVYVVANDGQPLMPTERHGKVCWMLRSGMAKVIKKCPFTIQLQYESERNVQPVSLGVDAGSKHIGISATTKTKVLYESDVELRDDIVKLLATRRQLRRSRRSRKTRYRPARFDNRKRKEGWLAPSIQQKIGSHLTVVANVCKILPINQIIVETASFDIQKIKNPEIQGIEYQQGEQMDFWNVREYVFFRDGHTCQCCKGRSKDKILNVHHIESRKIGGNAPNNLITLCETCHKGYHNGTVILPKNIKRGMQFKDAAFMGIMRWAFYNALKEQYEPAIPVSMTYGYLTKNTRIEHGLLKEHYIDARCISGNPDAVSDGTYYYQKKVRCHNRQIHKQTILKGGIRKSNQAEYLVKGYRLFDKVRYHGREYFIFGRRKTGFFDIRTLSGEKVNKGSISVKKLTFADTRKNYLTERRTA

SEQ ID NO: 9786 - protein, 453 aa, Nostoc sp.; identical to SEQ ID NO: 3348

SEQ ID NO: 9787 - protein, 470 aa, unidentified
MSVFVVGLNGCRLMPVSERKARLLLKGGKASVYRKVPFTIKLNYKTGNTVQPGYLGIDTGSQHIGVSVVQKDGTVLHKEEIGLRDSMSKRKLLESRASSRRGRRYRKTRYRHPKWKPKTKRIYNEKADRKGRHWKKQKNTFTSKRQAGCLPPSLQSKTDHHIQWIRKLLDLLPEGYRLSIELGRFDPARMKDPGIHGELYQKGPQYDYENVRAYVLARDGYTCRVCKKKGGKLHVHHILYRSRGASDNPKYMAAVCSKCHTTENHLPGGILYQWMQDQKKFTRCLRDATFMNILKKRLRKAFPDAVFTYGNITKADREKLELPKSHGNDATAIALVKTEVKSVKDEEPVIHIQQVRRKKRSLHEETPRKGRKGPNRTASRSDKNTKSVTVTKGSGEKKASMTACLFDRVELDGKKGWITGFTGTSCYVKDKEDNYICTSPKYKQVSISRLRILHHCGNWAIGAEKPLGKG

SEQ ID NO: 9788 - protein, 412 aa, Enterococcus sp.; identical to SEQ ID NO: 5283

SEQ ID NO: 9789 - protein, 423 aa, Oscillatoria sp.; identical to SEQ ID NO: 5009

SEQ ID NO: 9790 - protein, 480 aa, Planomonospora sp.
VMATSDVRRQTHRRVLPQPAALESTGADTPGRDETARGDTIGDDCVPGIGPGRGETRAWRTRARGRHPEAAAVAEGERGGNVPSVFVLDKHGEPLMPCHPARARELLASGRAVVVRHTPFAIRLKDRTVADSRVAGVEAGIDPGSRHTGLSIFTQAGGVRRGIFALQLDHRGGWIRDKLTARAAYRRGRRSRNLRYRAPRFNNRTRPKGWLAPSLRHRVDGTLSWITRLRRWAPIRAIHVERVAFDTSAMAAGRSLSGTEYQQGTLAGYEVREYLLARWERRCAYCDAQNVPLNIDHIRPRARGGSDRISNLTLAVHAVSGGRTKWNRHRTAAPKSHTLDALHVGEMETVVSWPSTVLVASATGRGSYARTAPDRYGFPRLRRPRTKQVHGFATGDLVRAIVPAGKKAGTHVGRVAVRTTGSFNIRTVRGLVQSIGHRHVRLLQRADGYGYTTIKETTMTDRSAFSPRPEGQGFHAGGNQ

SEQ ID NO: 9791 - protein, 415 aa, unidentified
MENKIEYCFVIDKNNKPLAPTKINKGWYLIRKGRAKLKSKYPMVIQLEKEVKSDEDDESHMVCGIDDGSTHVGLAIVQKCLTKNKVVFKGTIEQRQDVKHLMDVRRGYRRYHRYHKRYRQARFNNRSSSKRTCRLAPSIRQKKDAILRVLYQLNSWIDIQEYYLEDVCIDIRAMTDDYKPYRWQYQKSNRLDENLRKATILRDGCRCQECGKSNCILEVHHIRARRYGGANTIGNLITLCKKCHDKTESREKDFEERYFNMIKSKPKRFDYAMHVMQGKTYLREKISELGILHLTNGGETANKRIEWNIVKSHSNDAICIADGIPDTCDIKEWIIKPMRRKSKAKTDNVLGIKHRDLVSYTYKSGETHTGYVTALYPEQLALNFQSKTKHCKKVNARKCRLLWKFNKIYWLEQCV

SEQ ID NO: 9792 - protein, 469 aa, unidentified; identical to SEQ ID NO: 9450

SEQ ID NO: 9793 - protein, 431 aa, unidentified
MLVYVLKQNGQPFMPTERFGKVRRLLKEGKAKVVRREPFTIKLLYEPEADVVQECYCGVDTGSKHIGVAVIGNDKVLYQSQTELRDDIKKKMDRRRDFRKTRRFRRTRYRKQRFLNRRNSIKKDRLTPSVKHKVQAHIDEIEFCKKILPISDENLILEVSQFDTALMKNPSLITEKVRHWGYQKGFNYGYSSRRSAILHRDGYTCQCCGKKNCRLEVHHIKFRRYGGTDDENNLITLCVDCHKGVHAGTVVLNKSPKKSKGLKHTTHMSIIRSRLLKKYPNAIETFGFVTSENRNHLKLEKAHYIDACVIASGGLEFKELDVIYIKRRVSKQDRILTKGVRDERKIPTGKIHGFKRYDKVKYLGRVCFVKGRRTKGDFVLMDINNNALDFRNMGGKQNPSYKSITRVNTRKSVLCIKERIEREGRLIPVLG

SEQ ID NO: 9794 - protein, 411 aa, unidentified; identical to SEQ ID NO: 9536

SEQ ID NO: 9795 - protein, 435 aa, Lactobacillus sp.
MQNRVFVINRQGEPLMPCKQQKCRKLLQAGRAKVVKKEPFTIQLLFGSTGYKQPVSIGVDSGQHHIGLAVTSQDKVLFQGEVSLRQDVKKLLDTRRAYRNGRRNRNTRYRPPRFLNRAKPVGWLPPSVASKVQHNINWIQRMQAVLPKADLHIEVGKFDMAKMKQPDITGLGYQQGDKYGYETTKQYVLARDNYTCQICQGKSKDPKLKIHHIIYRSTGGTNQVSNLLTVCANCHTLANHQPGGKLYALQAKQFQSHRSLKGATFMNILRRRLFMAFPAAKFQYGAQTTLDRAKLDLPKAHYNDAVTISGIQKITQRPTAVVMFHQFRKKKRSLHEATARKGRKVPNITSKRNAKNTKFSNSFYLNDYVQLPDGQKGNISGFSGKTTCYVKDGGNHYLTINPKYKQVNLSKLKVIRHQNNWNVAEIRTAVYTMAG

SEQ ID NO: 9796 - protein, 428 aa, Microcoleus sp.
MSILKPNYVFVLDANRKPLTPCKPSLARKLLKVGKAKVFRLYPFTLLLKKEVTEDPQPVTLKIDPGSKVTGLAILLDSSLIWVAELTHRGQAIKTSLESRRSLRRGRRSRHTRYRQARFLNRTKPKGWLAPSLRHRVETTLTWVNKLSKLAPVKTIFQELVRFDLQKIENPEISGVEYQQGVLAGYEVREYLLNKWERRCAYCSAENVPLQVEHIHPKASGGTNRISNLCLACEPCNTKKGTQDIKIFLAKKPDDLKKILAQAKRPLKDATAVNSTRWALLDGLKETGKVIITGSGGLTKFNRIRLELPKTHFFDAACVGDTPNISVLANQPLNIKATGHGSRQMCRTDKFGFPSRYVPRFKFVKGFQTGDIIKAVVTSGKKVGTYTGRVAVRSSGSFNVSAVQGLIQGINHKYCFSIHQKDGYNYGF

SEQ ID NO: 9797 - protein, 468 aa, unidentified
MVITLDKNKRPLGFMSERRCRILLEKKRAVLYRYFPTIVILKDVDARKLSGLSSYRIKIDPGAKYTGIAIVMDDTNEFMYAMQIEHRGEQIKKNLDTRRGARRNRRSRETGYRRPKWGNRCTAKEQRQSYDSRRDENWLPPSVKSTADNIISWIRRLCRWINITNCSIESVRFDTQLMENPEIEGVEYQQGTLYGYEVKEYLLEKYGHTCQYCGGKSNDPILEWEHMLPRSRGGSDRLKNAALACHNCNQDKGNHTLEEWQTILQDRIPKERGKQKELDQIRQKFVQQVMEGKTPVKGLRYAAWVNSSRRYSQRHLYLRFPELECSSGGRTKYNRNVLKYPKEHHYDALCVGKIPEDGFVDRTNGYYLYAKATGRGTRLRGQINQCGVIIRKWMDRSKTAFGFQTGDLVVADVPKDTKYKYKGHFSGRVMIRKSGSFDIRTLSGELVTVNAKFCRLLQNNSGCIACWR

SEQ ID NO: 9798 - protein, 447 aa, unidentified; identical to SEQ ID NO: 5398

SEQ ID NO: 9799 - protein, 447 aa, unidentified; identical to SEQ ID NO: 8397

SEQ ID NO: 9800 - protein, 434 aa, unidentified; identical to SEQ ID NO: 7534

SEQ ID NO: 9801 - protein, 413 aa, unidentified; identical to SEQ ID NO: 2636

SEQ ID NO: 9802 - protein, 478 aa, unidentified
MNTCVCVLSNNGERLMPTFRLGKVRRLLKDGKAKIVKHHPFTIQLLNDSKTNTQPIEICEDVGYNYIGISVKSESHEYVSAQYDTLQDEKEHHDDCHKMRRARRNRLRYRKPRFDNRKRGEGWLAPSLEHKKQLNVNVVKMYCAVMPITHATVEVGSFDTMLVKAIQEGKAIPEGANYQKGPRYNLATLREAVFYRDNYVCKVCGRKATEGAILHMHHMFYWKGRHGNSLNELLTVCEKCHTPANHQKSGKLYGFGEGVKFADLSGAAFMNTVRWQIVNELYAAFGKPFVTITYGAMTKEKRIALRLEKSHNNDAYAMGEFHPNHRYTFEHYEKVRRNNRILEKFYDSRYIDIRTGEIATGKELFNGRINRNHKKDSENLHRYRGKRTYAGHRALLRKKVNLNPGDLVSLNGEVLVVHGTHTNKKGVVNVEFKAPAKNGQKSASLKKLKIVKAADSIHPAWKKSILNHSTKGVAGYLR

SEQ ID NO: 9803 - protein, 406 aa, unidentified
VVYVQDIDGNPLMPTTRHGKVRRLLKAKKATVVNLCPFTIRLLYDTTGYKQEITLGVDAGTKHVGLSATTKSKELYASEVILRSDVVDLLSTRRELRRARRYRLRYRKPRFNNRIKSKKDKWIAPSIRQKIDSHIRIIGFVYSILPVSKLIIEVAQFDTQKIKNPEISGKEYQEGEQLGFWNVREYVLARDGHKCQHCKGKSKDSILNVHHIESRKTGGDSPSNLITLCETCHKEFHKGKIKLKVKRSASLRDAAVMGIMKWELYDELKSLYPNIKMTFGYITKHDRINHGIEKSHVSDAFVISRNFDSYRLGYYYKQKLVRRHNRQIHKMKILKGGIKKPNQAPFKVFGFRLFDKVRYQDNVYFVYGRRTSGCFNIRDINGNNNKNPTFKKLTYISHGLISVETV

SEQ ID NO: 9804 - protein, 512 aa, unidentified; identical to SEQ ID NO: 3720

SEQ ID NO: 9805 - protein, 413 aa, unidentified
MPCSPAKARLLLKEKKAIVVRRTPFTIQLTIATGESKQPVSLGVDAGYKHVGLSASTEKAELYASEVELRQDVSDLLSARRALRQSRRSRNTRYRAPRFDIRIRTKRKGWLAPTVENRINVHLSRIETVLRLLPVTKITVETASFDTQLLKNPDIAGKEYQEGEQLSFWNVREYVLFRDGHVCQHCHGRSKDPVLNVHHLESRRTGGDSPGNLITLCETCHKALHRGGITLKAKRGQSFRAEAFMGIMRWEVLNRLKASHPELEVNNTYGYWTKHARIANGIAKSHCADAFCIAGNLGAERLGEFLFQKQTRRNNRQIHKLSILKGGRRKRNQASFEVKGFRLFDKVACKGEEIFIFSRRSSGYFDVRKLDGTRISAGISYKKLRLLEKRRTYLTEIRKEAFPPLPEGRSLRA

SEQ ID NO: 9806 - protein, 430 aa, unidentified; identical to SEQ ID NO: 4817

SEQ ID NO: 9807 - protein, 414 aa, unidentified
MPCSPAKARLLLKEKKAIVKRRTPFTIQLTIATGEAKQPVSLGIDAGYKHVGLSASTEKAELYASEVELRQDITDLLSARRALRQSRRNRKTRYRAPRFDNRISTKRKGWLAPSVENRINAHLSRIEAVLRLLPVTKITVETASFDLQLLKNPDISGKEYQEGEQLGFWNIREYVLCRDGHVCQHCYGRSKDPVLNVHHLESRRTGGDSPGNLITLCETCHKALHRGEITLKPKRGQSFRAEAFMGIMRWEVLGRLKASHPELEVNNTYGYRTKHARIANDIAKSHCADAFCIAGNLGAERLGEFFFQKQTRRNNRQIHKLSILKGGIRKRNQAPYEIKGFRLFDKVACQGEEGFIFGRRSSGFFDVRKVDGTRISAGISCKKLHLLEKRRTYLTEIRKEEVLPPLPEGRGLRA

SEQ ID NO: 9808 - protein, 461 aa, unidentified
MVKSSERQERCCRLETPSNIGEGSQPGERPRRQNLRVVVLNKRGKPLMPCSPAKARLLPKERNAIVVRRTPFTVQLTIATGETKQPVSLGVDAGYKHVGLSASTEKAELYASEIELRQDITDLLSARRELRRARRNRKTRYRGPRFDNRIRTKRKEWFAPSVENRINAHLSRIEKVLRLLPVTTITVETASFDTQLLKNPDISGKEYQEGEQLGFWNIREYVLCRDGHVCQHCYGRSKDPVLNVHHLKSRRMGGDSPGNLITLCETCHKALHRGEITLKAKRGQSFRAEAFMGIMRSEVLNRLKASHPELEVNNTYGYRTKHARIANDIAKSHCADAFCIAGNLGAERLGEFFFQKQTRRNNRQIHKLSILKGGIRKRNQAPFEVNGFRLFDKVACKGEEGFIFGRRSSGFFDVRKLDGTRISAGISCKKLHLLEKRRTYLTEIRKEEALPALPEGRGLRA

SEQ ID NO: 9809 - protein, 554 aa, Streptomyces sp.
MTTFPVGEQTHLAVLPQQPALESVGADTPGSRDETAHGHPAAVRGTGREHGRGETGGLGTGVRRRHAKNVAPAAKAAENRSGDAPPHDQSYAGGVGAGRVFVISRDGHPLMPCHPARARELLGKGRAVVARQVPFVIRLKYRTLAESEVDGLCLRIDPGSKGTGLALTDEKQETDAQGGSFTGRRGLVSVELRHRGEQIRLCMRQRAGYRRRRRSANRRYRAPRPDNRSRPAGWLPPSLRHRVDTTYAVASRLCRYAPVNEIHVESVAFDVHAMSVGRPLADVEYQRGTLAGIEARSYLRSRWENACAYCDATDVPLNIEHLTPRSRGGSDRISNLVLACVPCNRAKGSMPVEGFLADRPDRLAKILRQARTPLDDAAAMNATRWQLLERVRVLGRPVNPCSGAQTHWNRDAMGLGKTHTVDALCVGAMDHERGDAIVRLPDRVLVVRATGRGSYARTTPDRFGFPRLRRSRVKRHFGFATGDLVRAVVPLGKWAGVWTGRVSVRATGRHSLTATEGRIDVSHRNLRLLQRADGYGYAFRPEGARQHLGKPVEP

SEQ ID NO: 9810 - protein, 482 aa, unidentified; identical to SEQ ID NO: 3624

SEQ ID NO: 9811 - protein, 472 aa, unidentified; identical to SEQ ID NO: 4432

SEQ ID NO: 9812 - protein, 383 aa, unidentified
MRVFVFNMRGRPLMPCSQRKARLLLRENKAMIYKYHPFTIQLTYTTGETKQDCHIGIDTGSKYIGAAVRSEDKVFWKGEIELRQDIRSNLDTKRIYRRSRRNRKTRYRKPRFLNRKRRDEWLPPSLQSRINHTFHWIDTLSSLVPNPILHIEVGKFDVAKMINPEIHGVDYQHGQTYGFFDERYFVFARDNYTCQCCGKSKNKILNTHHIIYRSNGGTNRVDNLITVCTDCHTSQNHRKGGIFYQWQEQHKKVKQYKEPPFMNTLRKRIFVAYPDAEITYGSETTPKRKAMKLDKTHYNDAIVISGINEIKENPEEWLLIKQFRKKKRSLHEATARKGRKKPNRNQTRNSKNTPYYKGFYLNDKVSVFGRVDILQDLRAMRHI

SEQ ID NO: 9813 - protein, 512 aa, unidentified
MSTVYVLNKDGKPLMPTTRGGHVRHLLKEQKARVVRTKPFTIQLLYETDDVVQPLYLGIDPGRTNIGVAVVKADGTAVFTAHLETRNKEIPKLMKKRKDSRRARRTNGRRCRRQRRAKANDTLSTKRVKQTTAQNGSASKRAKEIGVIRRRLPGCEKDVLCIGIKNKEAKFNNRTRPEGWLTPTANQLLQTHINLVKKIQKFLPISDVVLETNKFAFMQLDNPNIQKWQYQQGPLYKKESLESAVSEMQEHHCLFCKKQIDHFHHVVPQHKNGSNTIGNIVGLCARHHDLVHKETAWQEKLAKKKTGLNKKYGALGVLNQIIPALTKELGVLFPKHFFVTTGKSTYDYRAAHGVCKDHWLDACCIACSVLPNDVCDSSINNRVPYELKQFRRHDRRVLHKENMNRVYTLNSKKAATNRHKATEQESASLEEFRKEHPDDVCKLKVKEHHPTYRNMNRNYPGSVFFVDKQVHVMQGIARSKDGKATTYKDTNANLITAEGCKFVAKNSGILFV

SEQ ID NO: 9814 - protein, 431 aa, unidentified
MPNKVYVINKHGRPLMPCSPAKARHLLDEGKAKIKKRTPFTIQLVYGSSGYTQEVILGVDAGSKTIGVSASTKKEELFAANVIPRNDVVDLLSTRREFRRARRNRKTRYRKPRFDNRVRSKHKGWLAPSVEVKIQEHITSIKRVCRILPVSKVVIETAEFDLQLLKAIADGKPVPQGEDYQKGEMYGHYNVRQYVLWRDNYTCQCCGAHATKKKEVRLHVHHLESRKTGGDAPGNLVTLCDSCHEKLHKGLIAEKDFKKRKRRSTRDATFMGIMRKTLMQRLCSELPIPVIETRGYITKATREKLLVLPKSHTNDALAIAQGKQGFNVGYLPGILQIDKIYTIRPVRHHNRQLHKAAILKGGIRKSNQAGKYVFGYRLFDKVQFNEQDCFIWGRRTTGIFTIKTINGKMIKDGISFKKLKLAEKSTSYLIA

SEQ ID NO: 9815 - protein, 426 aa, unidentified; identical to SEQ ID NO: 8077

SEQ ID NO: 9816 - protein, 408 aa, unidentified; identical to SEQ ID NO: 4826

SEQ ID NO: 9817 - protein, 431 aa, unidentified
MPNKVYVINKHGRPLMPCSPAKARHLLDEGKAKIKKRTPFTIQLVYGSSGYTQEVILGVDAGSKTIGMSASTTKEELLSAEVKPRNDVVDLQSTRREFRRARRNRKTRYRKPRFDNRVRSKHKGWLAPSVEVKIQEHITSIKMVCRILPVSKVVIETAEFDLQLLKAIADGKPVPQGEDYQKGEMYGHYNVRQYVLWRDDYTCQCCGAHATKKKEVRLHVHHLESRKVGGDAPDNQVTLCESCHEKLHKGLITEGDFKKRKRRSTRDATFMGIMRKTLMQRLCSELPIPVVETRGYITKTTREKLLVLPKSHTNDALAIAQRKHGFNVGYLPGIAQIDKIYTIRPVRHHNRQLYKATILKGGIRKSNQTKKYVFGYRLFDKVQFNGQDCFIWGRRTTGIFTIKTINGKMIKDGISFKKLKLLEKSTSYLIA

SEQ ID NO: 9818 - protein, 442 aa, unidentified; identical to SEQ ID NO: 2903

SEQ ID NO: 9819 - protein, 377 aa, unidentified
FTIQLDYDTTDYTQPVSLGIDAGSKHIGISATTSEKELYAADVELRNDIVDKLSTRRGLRRTRRSRLRYRKARFNNRVSSKRKGWLAPSVENKIQTHLTVVEKIHKFLPITNIVVETASFDIQKINNPSISGSEYQQGEQLDFFNVREYVLFRDNHTCQHCKGKSKDKALNVHHIESRKTGGDSPKNLITLCETCHKAYHRGEFKLNVKRGKSFRDAAFMGIMRWSFYDRLKNIYPNVSMTFGYITKNTRITNNLPKEHYVDARCISGNPVAKPLGYYFYQKKVRCQNRQIHKANFLKGGRKKLNQAPFLVKGFRLFDLVEYQKELYYIFGRRSSGSFDIRKLDGTKVNKGSISCKHLRLIGKRKSILTEKRMQVNL

SEQ ID NO: 9820 - protein, 544 aa, unidentified
MKQKKQKVMVYILNKKGKPLMPTTRCGHVRKLLDSKKAVVVNSNPFTIRLKYDTPNGIQDVFAGIDSGRENIGSGVSNEDGDCLYLGELKTSNKSIKIKMAERTGFRRERRKHDRQNKQRKARKDHTEIQNGNDDICRTTISCKSVQISYPVAEESVTHKIIRGKEGKFANRHRDEGWITPSARQLVQMHMNDLKSMCKILPISHVTLERVAFDFQKLENENIKAWEYGKGKLYGYDSPEEYIHDVQDGKCLVCGKPHIDYLHHIIPRSKGGSDKVSNIAGLCYDCHYGPIGVHNCQDTQDRLPELKNEANKQYKVSLLNSVMPVLIEEMDKFCEANSIIFSICEGHDTAKVRDMYDLQKDHCLDGFAISLVGRNVKSVDVMPDRIYQKQRYKKKSKNIIQKRNCREYYDDKKLVAVNRHKGTDQKADSLEEYMNTYAETHTADECKNQFESLTVKPARRTYTFHKEGRICPFHIGDKVRYEKKNKIKGNTKVDTFICEGIYFSKDENKAEVEHNKTKSKKMKFCRTIESGCIPYIDYRKLALI

SEQ ID NO: 9821 - protein, 379 aa, unidentified
MQLYSVSIFSQGLHNLLLRQERFIVKEVAYMATVYVLNKDSKPLMPTTRCGHVRYLLKEKKARVVRANPFTIKLLYETDDVVQPLYLGIDPGRTNIGVAVAKGDGTAVFTAHLETRNKEIPKLMAKRKEYRQGRRHYRRCKRQRRAAAHGTLSKRCKKQDTAQGSNISERAQKIGVFERNLPGCEKPVLCIGIKNKEARFNNRVRPAGWLTPTANQLLVTHINFVKKICKFLPISDVVLEINKFAFMALDNPNIQKWQYQQGPLYQKGSLENAVSEQQDHHCLFCKKAIEHYHHVVPRSENGSNTIANIVGICIKHHDLVHKDTAWQKKLAKKKTGLNKKYGALSVLNQIIPALTKELSSLFPKHFFATNGKSTYDYRA

SEQ ID NO: 9822 - protein, 383 aa, unidentified; identical to SEQ ID NO: 6831

SEQ ID NO: 9823 - protein, 427 aa, unidentified; identical to SEQ ID NO: 4447

SEQ ID NO: 9824 - protein, 458 aa, unidentified; identical to SEQ ID NO: 4474

SEQ ID NO: 9825 - protein, 465 aa, unidentified
MSTCVCVLSNSGERLMPTFRLGKVRRLLKDGKAKIVKHHPFTIQLLYDSKTNTQPIEICEDVGYNYIGISVKSQSHEYVSAQYDTLQDEKACHDSCRKLRRTRRNRLRYRKTRFDNRKRGEGWLAPSLKHKKELNVNVVKMYCAVMPITHATVEVGSFDTMLVKAIQEGKAIPEGADYQKGPRYNLATLREAVLYRDNYTCQVCGRKVADGAILHMHHMFYWKGRHGNSLNELLTVCEKCHTPANHQKSGKLYGFGENVKFADLSGAAFMNTVRWQIVNELYAAFGKDFVTVTYGAMTKEKRIALRLEKSHNNDAYAMGEFHPNCRCTFEHYEKVRRNNRILEKFYDSRYIDIRTGEIATGKELFNGRINRNHKKDSENLHRYRGKRTYAGHRALLRKKVNLNPGDLVSLNGEVLVVHGTHTNKKGAVNVEFKTPGKSGQKSASLKKLKIVKAADSMHSAWEKIS

SEQ ID NO: 9826 - protein, 413 aa, unidentified; identical to SEQ ID NO: 2636

SEQ ID NO: 9827 - protein, 456 aa, unidentified
MSTCVCVLSNSGERLMPTFRLGKVRRLLKDGKAKIVKHHPFTIQLLYDSKTNTQPIEICEDVGYNYIGISVKSESHEYVSAQYDTLQDEKEHHDDCRKMRRARRNRLRYRKPRFDNRKRSEGWLAPSLEHKKQLNISLIERYVSVIPITRATVEVGSFDTILLQAIQKGKSKPEGVDYQKGPRYNLATLREAVFYRDNYTCQVCGRKIADGAILHMHHMFYWKGRHGYQLDELVTACEKCHTPANHQKGGKLFGFGEDKEFANLSGAAFMNAVRWQIVDALHATYGKEFVTITYGAMTKEKRIILGIEKTHNNDAYAMGDYHPVHRCVFRHYQKRRRNNRVLEKFYDATYIDARTGNKAKGKELFNGRINRNHKKDSENFHKYRSKKVSKGRRSIRRQRYAIQPYDTVRLEGKTYITSGCHNKGTRLLIPANGKSKSVAISKVQVVCHAGAWIQII

SEQ ID NO: 9828 - protein, 377 aa, unidentified
MTLGVDSGAIHSGYSLANEHREYYSAEVIARDNISKNLSDRRMYRQTRRSRKTRYRKPRFNNRKNKGKGWIPPSLEQKVTVQVNEIKHLHKYFPIENIIIEVAEFDIQKIKNPDISGKEYQQGTLYGYNIRNYLLEKYHHKCFYCDKEVSVFEVEHMIPRSRNGSNRIDNLTLSCHDCNQKKGTLTAEEFIRQTLSPQKAAQKLRQLPKTKQLLKYMAHMNATRWALYNTIKEMYESVSQTYGYITKYNRIDAGLPKAHHIDAKCITGFSTVPSFDVIVVKTKMRRHNRQLHRATFSKGHIRKAATLPRFVHGFQLYDIVMFNNHRYYIQSRRSTGSFTLVSLEGLKDENRMYSKLTQLAHTNAYMMNHMLMINKIN

SEQ ID NO: 9829 - protein, 447 aa, unidentified
VPAYRIKHITKKEAPYMVYVLDIDGQPLMPTSRHRKVRKLLNSHLAKVVKRCPFTIQLLYQSTKETQPVSLGVDAGSRHIGLAATTEQKVVYQEELVPRNDVVKLLSARRALRSSRRSRKTRYRKPRFNNRVHSKHKGWLAPSVEVKIQEHITAIKRICQILPISDIHVETAEFDLQRLKAMEEGRPLPVGTDYQLGEQYDFYNTRQYVLHRDEYTCQCCGTHDNNVKLHVHHIESRQTGGDAPNNLITLCEHCHKLLHAGKTILPKGKKRGKSYRDATFMGIMRKTLLERLKKEIDVPVEGTYGYITKYWRERAGLEKSHINDAICISKHPYARPLETYYLTKVVRHHNRQIHKTKLSKGGIRKRNQAPYLVKGFRLFDKVLYQGESYFIFGRRITGYFDIRTLDGTKVNKGSTSYKKLRIQDTAEAYLTEVRAIPHMNEFTCVLA

SEQ ID NO: 9830 - protein, 421 aa, unidentified; identical to SEQ ID NO: 3851

SEQ ID NO: 9831 - protein, 521 aa, unidentified
MSEDSTRDFLISGLQQNKGESVTMRYVYVLDMDGKPLMPTCRYGKVRRILKSGQAKVVDTLPFTIRLNYRTAGILQPVSVGQDPGRTNIGLAATRSDGTELFRAHCETRNKEIPKLMTERLAHRRASRRGERLARKRLAKKLGTTAKNLNERLLPGCKEPLAVKDIINTEARFNNRLRPEGWLTPTATQLLRTHLNLFERISRILPVTDVAVEVNRFAFMELTDPDKMHFEIDFRHGALFGTGGLKQAVREQQQGRCLLCRQREIEHFHHIVPKSKRGSDTIANIAGLCQECHTLVHKSQEAKERLDKKKQGLMKQYGGTSVLNQIIPSLVEELAKRYPGHLHVTTGGKTKVFREQYELDKDHDVDAYCIAVSWLFGIQPRLQTEPFEIKQFRKHNRANIHCQTERTYNLDGRVVAKNRKKRMEQKTDSLEDWFEKMVKQYGSKKSKQLMARLMVQKSTRHYNAKDRIMPGTVFRYAGRRYVMTGQLTGGKYYRAYGMEDKNFPVRKVTICQQNTGLVYVA

SEQ ID NO: 9832 - protein, 440 aa, unidentified
MVIVIDKRRQPCNTISAAYARILLFTKQAVIHKRFPFTIRLRNDNAVLKDRNYTIKLDPGSRITGVAITDNKDSVVMLAEIEHRGHIIKKNLDSRRAVRRSRRQRKTRYRPARFQNRTRPEGWLAPSIKSRADNVINFVKKYKKLLNITKVMIENVSFDTAQMSSDDHLIGTDYQQGPLYDTNLKEFIFSKTKGRCSYCGEKAEEIDHIIPRAKGGSNSTYNLTPACRSCNEKKSNLSLKEFGKLMNKDYSHLEPKKLPKDAAIVQSARNYMVKEITKIIPDTTTYDAWMTKYNRNQLGLSKQHYYDALSVGEIPTKFNFLTDKILQISAKGRGSRQMCRMDSYGFPRTSAKSSKSVKGFQTGDIVKAIVPKGSKQGEYLGKVAVRSSGYFDIQIKTQVIQGIGYKYCNIVQRSDGYSYNYKERDFLSDINNRVSIADFK

SEQ ID NO: 9833 - protein, 453 aa, unidentified
MSVAVVSKTGMLLMPTSEYRARKLLKSKKAIILGYHPFTIQLTEREAGYIQPVELCMDTGYIHIGTSVKSEKHEYLGEQIDTLTDERQKHDACRMYRRQRRNRKRYRQPRFNNRERDDGWIAPSLEHKKTIHIQALSRICKVIPVTDITLEMGNFDTQVLKAREEGRPLPQGLDYQHGERYGIATLREAVFTRDGYTCQCCGRAIKDGAILHVHHIVYRSQGGTNRMSNLITVCDKCHTPANHKPGGKLYGWKPKVASFKGATYMTTIQWKLYNEVKVLFPDIDIHITYGAETKERRRAFDITKSHVNDAFVMGQFHPKHRSKPVCYKKKRRNNRCLEKFYDAKYIDSRNGKTRTGQELFNGRISHNHKKDSENLHQYRRQKISTGKRTIRKQHYAIQPHDIVIFNGEKFETSGCHNNGTRVILLPQKKSVAIKKLNIYRYAGGYFKSAFNQK

SEQ ID NO: 9834 - protein, 512 aa, unidentified
MSTVYVLNKDGKPLMPTTRCGHVRYLLKEKKARVVTSKPFTIQLLYEADDVVQSLYLGIDPGRTNIGVAVVKTDGTAVFTAHLETRNKEIPKLMQGRKKARRARRTNGRRCRRQRRAKANGTISKKCVKQDTAQNGSVSKRAKEIGVIKRHLPGCEKDVLCIGIKNKEAKFSNRTRPEGWLTPTANQLLQTHINLVKKIQKFLPISNVVLEINKFAFMQLDNPNIQKRQYQQGPLYQKGSLESAVSEMQEHHCLFCKNAIDHYHHVVPQHKNGSNTISNIVGLCTKHHDLIHKETAWQEKLAKKKTGLNKKYGALSVLNQIIPALTKELSSLFPKHFFATNGKSTYDYRAAHAVSKDHWLDAYCIACSILPNDVCDSDINNRVPYELKQFRRHDRRALHKENMSRVYTLNGKKVATNRHKAVEQTTDSLEEFRQRQPNDVCKLKVKEHHPEYRNPKRNFPGCVFLIGKRTHVMQGTSGSHNGKADGYYDTNGNSYSSGKCKFVAKNEGIVFT

SEQ ID NO: 9835 - protein, 336 aa, unidentified; identical to SEQ ID NO: 3928

SEQ ID NO: 9836 - protein, 419 aa, Geobacillus sp.; identical to SEQ ID NO: 4579

SEQ ID NO: 9837 - protein, 413 aa, unidentified; identical to SEQ ID NO: 9603

SEQ ID NO: 9838 - protein, 427 aa, unidentified; identical to SEQ ID NO: 2980
  source 1..427: note = Cyanobacteria bacterium UBA11149

SEQ ID NO: 9839 - protein, 430 aa, unidentified; identical to SEQ ID NO: 4504

SEQ ID NO: 9840 - protein, 436 aa, unidentified
MAKTLTTQTTQACVLDRNGKPLMPTTRLGKVYHLLKTQKAHIVSYEPFTIQLDYEPDTQIIQPMTLGVDSGAIHSGYSVANEHREYYSAEVIARNDISNRLSDRRMYRQHRRSRKTRYRQPRFSNRKNKKKGWLPPSLEQKVAVQVNEINHIHRYFPIETIIVETAEFDIQKIKNPDICGIEYQQGTLQGYNIRNYLLEKHGRKCFYCGKTVSGFEVEHMLPKSRGGSNRIDNLTLSCHDCNQKKDTLTAEEFIQQTLPAKQAATKLKQLPKEKRLFKYMAYMNATRWTLYDAIKERYPNVKMTYGYITKYNRIQAGLPKAHHIDAKCITGFPTVPSIDQIVVKVKMRRHNRQLHRATFSKGHVRKTACLPTTVFGFQLYDIVLFNNHRYYIKGRRSSGSFALVSVEGLKDENRMYKKLTLLAHTNAYLTNRYVNA

SEQ ID NO: 9841 - protein, 442 aa, unidentified; identical to SEQ ID NO: 2903

SEQ ID NO: 9842 - protein, 426 aa, unidentified
MVYVQNHLGQPLMPTQDHRKVRLLLKAGAAVVVRRTPFTIRLTTSTKTYVQPVILGVDAGSKTVGMSAATHEEEVFAAELTPRNDVVKNLADRRKFRSSRRGRTTRYRQPRFNNRVHSKHKGWLAPSVEVKIQEHITSIKRACELLPIGKVVVETAEFDLQLLKSIADGMPVPQGEDYQKGEMYGFYNVRQYVFFRDGYTCQCCGAHGKGIKFHTHHLESRKTGGNAPDDLVTVCDKCHKAFHAGLITDAKLKKRRRKSTRDAAFMGIMRKTLLQRLRAELPIPVVETRGYITKATRERLLKLPKSHTNDALAIAMGRHGFGIKEVTYMPQSDRIYQIKPVRHHNRQLHKAIPKKGGRRQRSQGPKYVQGFRRFDKVLYRGQECFIWGLRTRGYFQLKLLNGTKVHESAKASELILLEHSSGYLIA

SEQ ID NO: 9843 - protein, 512 aa, unidentified
MSTVYVLNKDGKPLMPTTRCGHVRRLLKEQKARVVTSKPFTIQLLYETNDVVQPLYLGIDPGRTNIGVAAVKTDGTAVFTAHLETRNKEIPKLMQGRKKARRARRTNGRRCRRQRRAKANGTISKKCVKQTTAQNGSVSKRAKEIGVIKRHLPGCEKELLCIGIKNKEAKFSNRTRPEGWLTPTANQLLQTHINLVKKIQKFLPISDVVLEINKFAFMQLDNPNIQKWQYQQGPLYQKASFEEAVSEMQEHHCLFCKKPIAHYHHVVPQSENGSNTIGNIVGLCTKHHDLVHKDATWQKKLAKKKTGLNKKYGALSVLNQIIPALTKELSSLFPKHFFATNGKSTYDYRAAHGVSKDHWLDAYCIACSVLANDVCDSNINSHVPYELKQFRRHDRRALHKENMSRVYTLNGKSVATNRHKAIKQTTDSLEEFRQRQPNDVYKLKVKEHHPEYRNPKRNFPGCVFLVGKHTHVVQGTSGSHNSKADGYYDTNGNSYSSGKCKFVAKNKGIVFA

SEQ ID NO: 9844 - protein, 334 aa, Lactobacillus sp.
  VARIANT 223..229: note = X can be any naturally occurring amino acid
MKHENANRVFLLNKDGKPLMPCRPRKARLLLKSGKAFVVKKYPFTIQLKYGSYGYKQKVSLGIDTGQRHIGFAVVSKDKVLHQSEVELRQDMHTNLYTRKIYRRGRRNRKTRYRQARFLNRVHGKRDGLWLPPSVKSKVGHNIAWIKRYLAVLPSPDLHIEVGKFDMAKMVNPDISGKQYQEGSLKDWKNYEYYVLARDEYTCQLCHKHGEGIKLVVHHIVYXXXXXXXQLKGATFMNILRKRIMTTFPEASFQYGSQTYVDRKNLLLPKGHFMDAIAISGIKSVGQMPLTVTMISQFRKKKRSLHEATARKGRKQPNMSSKRNEKNTKYACGL

SEQ ID NO: 9845 - protein, 427 aa, Aphanizomenon sp.
MSKVFVIDTDKRPLNPIHSAQARQLLRNKKAAVFRQFPFTIILKESRPDLPVSPLRLKIDPGAKFTGMALVNDWTGEVIFAAELKHRGFAIRDALTSRRQLRRSRRAKKTRYRQPRFLNRTRPKGWLAPSLQSRVENIKTWVGKLRQLVPIGAISQELVRFDMQLIANPDIQGREYQQGTLAGYETREYLLEKWGRQCAYCGVKDVPFQVEHIHPRAKGGSNSITNLTLSCEKCNTKKGTEDIKDFLKKDPSKLEKILKQAKRPLADAAAVNTTRFALLFVLKATRLPVENGSGGLTKFNRSQQKLDKTHWIDAACVGQSTPILNIKGVKPLLITANGHGSRQSCRTDKFGFPNRHCSRTKFHFGFQTGDIVKSIVKTGKKVGEYIGRIATRATGSFNISTRNGLVQGISYKTCKTIHKKDGYGYSN

SEQ ID NO: 9846 - protein, 515 aa, unidentified; identical to SEQ ID NO: 3725

SEQ ID NO: 9847 - protein, 431 aa, unidentified
MPNKVYVINKHGRPLMPCSPAKARHLLDAGKAKVKKRTPFTIQLVYGSSGYTQEVILGVDAGSKTIGMSVSTTKEELLSAEVKPRNDVVDLLSTRREFRRARRNRKTRYRKPRFDNRVRSKHRGWLAPSVEVKIQEHITSIKRVCRILPVSKVVVETAEFDLQLLKAIADGKPVPQGEDYQQGEMYGHYNVRQYVLWRDGYTCKCCGAHTTKKKEVRLHVHHLESRKVGGDAPDNQVTLCESCHEKLHKGLIAEKDFKKRKRKSTRDATFMGIMRKTLMQRLCSELPIPVIETRGYITKATREKLLVLPKSHTNDALAIAQGKQGFNVGYLPGIIQTDKICTIRPVRHHNRQLHKATILKGGIRKSNQAEKYVFGYRLFDKVQFNGQDCFIWGRRTTGIFTIKTINGKMIKDGISFKKLKPVEKSTSYLIA

SEQ ID NO: 9848 - protein, 335 aa, unidentified
MVYVQDINGKPMMPTTRHGKVRRLLKENKAVVVSLCPFTIKLTYVTSDYKQEIVLGVDAGTKHVGLSATTKSKELYSSEVILRNDIVDLLSTRRELRKTRRNRLRYRKPRFNNRIKSKRSGWIAPSVKYKVDAHIRVIDNVCSILPIFRIVIEVAQFDTQKIKNPNISGKEYQEGDQLGFWNTREYVLARDGHKCQYCKGKSKDKILNVHHIESRKTGGNSPSNLITLCETCHKEYHKGNIDLKIRRGKSLRDAAVMGIMKWRLYEELKSKYDNISMTFGYVTKYNRINHDIEKSHVSDAFVISKNFNAIRLGYYYKVRLVRRHNRQIHKQKIQK

SEQ ID NO: 9849 - protein, 457 aa, unidentified
MDAVAVISASGKPLMPTNPMRARKLIKKGKAVIYKYRPLFTIRLTERTDGDIQTIEYCCDTGYQHIGLSIKSRKHEYVNEQRDLLPNETERHNDSRKYRKARRRRKLRHRACRRDNRHDNQICKDGYAPSIRNKRDQHISLYRSYTEILPVERAVFEMGQFDTQVLKAIEKGEPLPQGKDYQHGERYGYATLREAVFARDDYTCICCGKNAFKDKRILCVHHLGFRIGDRTNRLANLATVCTKCHTPKNHQPKGKLYNLKPELKDFKGATFMTMVRWDMLDKLKVVSKDIQVDVTYGAATKEARRDLKIKKSHANDAYCMGSFHPSHRTDLKRYEKCRRNNRVLSKFYDATYIDIRDGKKKKANALGCNRTKRRESRRSEKNERIYRGKKVSKGRIVLRTKRAVIRPGDIVYVGKKKYIVASSKNLGKQLKLADGSLLTTSKVTKIIHCGGWKTVTL

SEQ ID NO: 9850 - protein, 525 aa, Xylanimicrobium sp.
VLPQPRTLEPASADKAGVGRLHIKPSVATKRAAGDKHLASTTGVQHGRGETTRTGGDISQPATAGSGGRTGDRPLLVGRVFVLDRHGRPLQPTHPARARELLRKGRARVHRVVPFVIRLVDVDATTPGIEVDGVELGIDPGSKHTGMAVFTTDRAGTRQAVFLADLIHRGLTIKNAMTARKQLRRGRRSRNLRYRAPRFDNRRRRPVDGLDVWLAPSTRHRVVTTLSWVDRLAGWAPVTNVWVEAVRFDTQQMENPEIAGVQYQQGTLAGFEVREYLLTKYGHTCVYCDTQGVPLNIDHVRPRSKGGSDRVSNLVLACVPCNQAKDARPVETFLAHDPARLARIKAGLTRPLRDAAAVNSTRWALTRAIEARGFPTKTSTGGRTKYNRTQFAVPKAHALDALCVGDLTAVTGWPATTLTVTCTGRGTYQRAHVDKHGFPRKNKAGTPAVRSRTKVHHGFQTGDLVRAVVPTGKKKGTHVGRIGVRATGSMLVGKTDGINHKHIRRIQRADGYAYQTTPTVTKDET

SEQ ID NO: 9851 - protein, 406 aa, unidentified; identical to SEQ ID NO: 2752

SEQ ID NO: 9852 - protein, 512 aa, unidentified; identical to SEQ ID NO: 2792

SEQ ID NO: 9853 - protein, 424 aa, unidentified; identical to SEQ ID NO: 8578

SEQ ID NO: 9854 - protein, 413 aa, unidentified; identical to SEQ ID NO: 2636

SEQ ID NO: 9855 - protein, 406 aa, unidentified; identical to SEQ ID NO: 7944

SEQ ID NO: 9856 - protein, 418 aa, unidentified; identical to SEQ ID NO: 4424

SEQ ID NO: 9857 - protein, 481 aa, unidentified
VWHALQTKITLAKVSTQAVGNLCNYGSQIPSRVLFSAIHLAIRKGGIIMYVYVINKHGQPIMPCKPRKTRVLLQKGKATVVKQVPFTIRLLYGSSGYKQPVSLGMDAGSKHIGIAATTEKKVLYAEELKPRNDVIKLLSTKRQNRRARRNRKTRYREARFDNRVSSKQKGWIAPSVEVKIQEHISAILRIQKILPLTEIYVETAEFDTQRLKAVAEGKPLPTGTDYQLGEQYDSYNTRQYVLFRDGYKCQCCGKHGDDVKLHVHHKESRQTGGDAPNNLITLCEDCHKAIHTGTTQLPNDKAKRGKSYKDAAFMGIMRKAMVSQLRKLVDIPVTETYGYITKYHRELYHVEKSHINDAIMISKNYEAVAADTYYVSKAVRHHNRQLHKNTILKGGIRKRNQAPHVVKNFRLFDLVKYKNSYYYVFGRRSNGFMDIRTLDGKKVNKGSISNKRLKFVSASKGLLAERKKAIPLADKSASFLA

SEQ ID NO: 9858 - protein, 518 aa, unidentified; identical to SEQ ID NO: 7359

SEQ ID NO: 9859 - protein, 416 aa, unidentified
MVYVLDKNGQPLMPTDRHRKVRLMLQSGQAKVIKRCPFTIQLNYDSGHQTQEISLGIDAGSKHIGVSTTTKIKVLYEVDVELRNDIVDLLSSRRELRRGRRNRKTRYRQAKFNNRRRGNGWLAPSIRQKIGPHLTVVENICKMLPISRIMVETASFDIQKIKNPDIQGAEYQQGDQLEFWNVREYVLFRDGHTCQCCKGKSKDKILNVHHIESRKTGGNAPNNLITLCEICHTGYHKGAVQLPKTVKRGMRFKDAAFMGIMRWAFYEALKQQYEPVGTPVHNTYGYITKHTRIEHNLPKEHYVDARCISGNPDAFPNGEYYYQKKVRCHNRQIHKLTILKGGIRKQNQATYLVKGYRLFDKVSYQRKEYFVFGRRKSGFFDIRTLSGKQVNKGSLSCKKLKFIATRMYYLIERRAV

SEQ ID NO: 9860 - protein, 547 aa, Streptomyces sp.; identical to SEQ ID NO: 7542

SEQ ID NO: 9861 - protein, 433 aa, unidentified
AKIVKHHPFTIQLLYDSKTNTQPIEICEDVGYNYIGISVKSQSHEYVSAQYDTLQDEKACHDSCRKLRRTRRNRLRYRKPRFDNRKRGEGWLAPSLRHKKELNVNVVKMYCAVMPITHATVEVGSFDTMLVKAIQEGKAIPEGADYQKGPRYNLATLREAVFYRDNYTCQVCGRKVADGAILHMHHMFYWKGRHGDSLNELLTVCEKCHTPANHQKGGKLYGFGENVKFADLSGAAFMNTVRWQIVNELYAAFGKDFVTVTYGAMTKEKRIALRLEKSHNNDAYAMGEFHPNCRCTFEHYEKVRRNNRILEKFYDSRYIDIRTGEIATGKELFNGRINRNHKKDSENLHRYRGKRTYAGHRALLRKKVNLNPGDLVSLNGEVLVVHSTHTNKKGAVNVEFKVPAKNGQKSASLKKLKIVKTTDSMHSAWEKIS

SEQ ID NO: 9862 - protein, 413 aa, Clostridium sp.; identical to SEQ ID NO: 4134

SEQ ID NO: 9863 - protein, 420 aa, unidentified; identical to SEQ ID NO: 3685

SEQ ID NO: 9864 - protein, 413 aa, unidentified
MTSYAFVLDANGKQLAPAKEQKAWFLIRKKRAALVSKYPMVIQLKKEIPENEICKDEIRCGIDDGGLHVGIALVQKCKTKNKVVFKGTIEQRNDVKHLMEVRRSYRRYHRYHKRYRPARFDNRKSSKRKKRIAPSILQKRQAIIRVIHWLNKWINITNYWLEDVSIDIRALTDGYKPYRWQYQKSNRLDENIRKAAILRDGGKCMECGKLNCRLEVHHIKPRRRNGSDTLDNLITLCKSCHQKTEGQEELYMDRYFSLLKSSDHKNLNYAQHVMIGKEWLRKQLSSLGVLYLTNGGDTANKRIDWNIEKSHANDAVCITNLQPDTYDMKEWTVKPMRRQSKAKTDNVLGIKHRDLVEYTLKNGETHRGYVTALYPEQKAINFQSPTKHCKKVNARKCKLLWKYSKIYWFENAS

SEQ ID NO: 9865 - protein, 442 aa, unidentified; identical to SEQ ID NO: 3234

SEQ ID NO: 9866 - protein, 415 aa, unidentified; identical to SEQ ID NO: 6534

SEQ ID NO: 9867 - protein, 425 aa, unidentified
LKDVDARNIYKLPSYRIKIDPGAVHTGIAIVCNETNEVMYFLQIEHRGSEVKKALITRKQTRRNRRSRETRYRRCKFKNGGDFDSSRKNGWLPPSVKSTADNVIHWVEKLCRYINITECSFEAVRFDSQLMDNPEIGGEEYQQGTLSGYELREYLMEHFRHTCQYCGGESGDPVLEWEHKIPRSRGGSDSVKNASLACSCCNRDKGNRTLEEYLEDSKHISPKGKSEKALNEARISHISGILEKGTIYGSNRYSAWVNSTRRYIEKYLFLMFDDVECCSGGRTKYNRIKLKLPKDHHYDALCVGSVPKEGYTDRTNSYVLYVKATGRGTRFRGQCNSCGVITVKYKNNSKRKFGFQTGDIVQLNKPKGKDTGQYTGKVAVRSSGSFDLIRKGCKRITANYKYFRMMQYSDGYEYLGPLRPIPHSA

SEQ ID NO: 9868 - protein, 431 aa, Escherichia sp.; identical to SEQ ID NO: 4170

SEQ ID NO: 9869 - protein, 427 aa, unidentified
MHVFVLDKDKNPLAPCHPAKARRLLKSGRASVFRRYPFTLILHEIEAKDCVVPETQLKIDPGSQTTGLAILSENRVIWVSELSHRGQQIKNDLEKRRALRRSRRHRKTRYRKPRFLNRTRPKGWLPPSLNHRVETTMTWVNRLRKLCPIVSIAQELVRFDTQKLQDPEVSGIEYQQGELLGYEIREFLLEKWGRKCAYCGAENLPLEVEHIHPKSQGGSDRVSNLALACHQCNQAKGNRDIREFLSGKPSVLDRILKQAKAPLKDAAAVNATRWKLYQQLKETGLPVEVGTGGLTKFNRTQLGLPKTHWLDAACVGKSTPDRLDVAVEKPLLVAAKGHGVRQRCRPDRYGFPRAVAPKAKSFQGFQTGDIVKATIPQGKFAGNYTGRIAIRFRPSFRLNAGVKPFDVHPKYLTTVQKSDGYEYRFSK

SEQ ID NO: 9870 - protein, 428 aa, Microcoleus sp.
MSILKPNYVFVLDTKHKPLTPCKPSLARKLLKVGKAKVFRMYPFTIILRKEVADDPRPMILKIDPGSKVTGLAILLGSDIIWVAQLTHRGQAIKASLDSRRSLRRSRRSRHTRYRQARFLNRTRPKGWLAPSLRHRVETTLTWVKRLSRLAPVRTIFQELVRFDLEQIENPEISGVEYQQGVLAGYEVREYLLNKWDRRCAYCSAENVPLQVEHIQPRASGGTNRVSNLCLACEPCNTKKGTQDIKIFLAKKPDVLKKILAQAKRPLKDASAVNSTRWTLFNRLKETGKVIATGSGGLTKFNRIRLELPKTHFFDAACVGDTPSISVLANQPLNIKATGHGSRQMCRTDKFGLPSRYVPRFKFVKGFQTGDIVKAVVTSGKKVGTYTGRVAVRSSGSFNVSAVQGLIQGINHKYCFSIHQKDGYNYGF

SEQ ID NO: 9871 - protein, 427 aa, Leptolyngbya sp.
MQNYVFLLNADLTPLNMVHPARARELQDQGKAAVFCTYPYTLVLQQQVLNPTLQSYRLKIDPGSKFTGFAIQQGADIVFRMELKHRGLGISVGLTKRAGFRRRRRSRNLRYRKARFNRCKPPGWLAPSLSHRVQTVSTWIKRFSRYCPIVTLEIEQVRFDLQQLQNPEISGLDYQQGTLAGYEVREYLLEKWQRQCAYCGAKDTPLQIEHIHPKSRGGSDRVSNLCLACEPCNTKKGNQDVGDFLAGKPDVLKRVLAQAKAPLKDAAAVNSTRFAIVSMARQHCSDIRCWTGGRTKFNRCQQGLAKSHSLDAACVGESGAKVNILTAQPLLVDCKGQGSRQSRRVNASGFPAVKQPKAVYTHVRTGDVVAFVLTKDRKHVKQGKYTSRVRTPTAKGFEVLLNGFRVELSSMIGVKFKHKQDGYAYGF

SEQ ID NO: 9872 - protein, 434 aa, unidentified; identical to SEQ ID NO: 5659

SEQ ID NO: 9873 - protein, 413 aa, unidentified
MTNYAFVLDADGKQLAPTKEQKAWFLIRKKRAALVSKYPMVIQLNKEVPDEEICKDEIRCGIDDGGLHVGIALVQKCQTQNKIVFKGTIEQRNDVKHLMDIRRGYRHYHRYHKRYRQARFNNRSSSKQKGRITPSILQKRQATVRVINQLNKWINITDYWLEDVAIDIRAMTDGYKPYKWQYQKSNRLDENIRKAVILRDGCKCMECGKSNCKLEVHHIKPRRSKGSNTLGNLITLCAKCHHKTKGVEELYMDRYFALLNSSDNKNLNYAQHVMIGKKWLREQLSSLGILHLTNGGDTANKRIDWDIAKSHSNDAICITNLRPDECEIKEWTIKPMRRQSKAKTDNVLGIKHRDFVEYTFKNGETHRGYVTALYPEQNALNFQSPTKHCKKVNVRKCKVLWKYSKIYWLDNVS

SEQ ID NO: 9874 - protein, 502 aa, unidentified; identical to SEQ ID NO: 2616

SEQ ID NO: 9875 - protein, 417 aa, unidentified
MPCSPAKARLLLKEKKAIVKRRTPFTIQLTIATGEAKQPVSLGVDSGYKHIGLSATTEKAELYASQVELRQDITDLLSARLALRRSRRSRKTRYRAPRFNNRVANKREGWLAPSVENRIAAHVSRVETVIRLLPVTAITVETAAFDTQLLKNPDIAGVAYQQGDQIGFWNVREYVLFRDGHVCQHCRGKSKDPILNVHHIESRRTGGDAPNNLITLCETCHRAFHRGEIELKVKRGKSFKAETFMGIMRRTLLERLKKAHPELNVRNTYGYLTKHKRISHGIAKSHCADAYCIADNLGAKRLEGFFFQKQTRKHNRQIHKLSILKGGLRKKNQAPYEVKGFRLFDKVICKGEEAFIFGRRTSGSFDVRRLDGTRISAGINYKKLRLLEPRTTYLTEFRKEAAHPPLHECRGFRAEFL

SEQ ID NO: 9876 - protein, 719 aa, unidentified
MTSLTEFFSRQEDDNLKGISHKNNLFKRNIIAHMAVNGECTLSELTKELHISVPTITKLVQELVQENIVTDLGKVETPGGRRPNIFGLASSAIYFAGVNIGRDNMSFLITDLHNNIVKEEILNDFELQDRPQCLEKICSNIAHFIDTCGVERAKILGAGVSVSGRVNPTTGRSYRYFTSSEQSLRDMIEQRIGIRVLLENDTRARCYAEYTNSKSKDETDVLYLHLGRGLAIGIVMNGKLYYGKSGFAGEFGHIPFFDNEIICSCGKKGCLETEVSGIAIEQKFGRLISQGVNTILREKYNKHEAIHVDEIIDAAKHDDNLSIELIEEVGEKAGKAVAVRRTPFTIKLTIATGETKQDVTLGVDAGARHVGISATTEKEEVFASEVALRQDITGLLADRLAFRRARRNRKTRYRAPRFNNRVRSKHKGWLAPSVENRIQAHISRIEAVCRLLPVTKIVIETASFDVQKIKNPTIEGTDYQQGDQLGFWNVREYVLFRDGHVCQHCHGRSRDKILNVHHLESRKTGGDAPNNLITLCETCHKAYHAGKIKLKVKRGQSFRAEAFMGIMRWTLLDRVRKTYPKLPVENTYGYLTKHKRIALGLPKTHCADAFCIAGNLKALRRGDFLFQQQTRKHNRQIHKCSILKGGVRKLNQAPFLVKGFRLFDKVRIGGQIGFVFGRRVRGTFNIRRLDKTVIGTDINCKKLSLLETRKTFLTELRKE

SEQ ID NO: 9877 - protein, 442 aa, unidentified
MSTSVFVLDKKHRPLMPCRPARARRLLRAGRARVVKRFPFVIRLVDRTVEQSEVQPVLIKLDPGSRETGAAVVRDDGKKRHHALAFFVIEHRGGAIRDALKARSAFRRRRRSQNFRCRSPRFLNRVKPKGWLPPSLRHRVETTLSFVRRMCRYLPVSGIAAELVKFDSQKLQTPEVSGIEYQQGTLFEYEVREYLLEKFGRKCVYCGAEGVPLNIDHVVPRAKGGSNRVSNLVLACVSCNQKKGARSLEDFLKGKPEVLARVRRELKTPLRDAAAVNATRWVLFNELKATGLPVETGSGALTKLNRHAFGVEKEHWLDALCVGRLNGVVTRKGLNVLEIRCMGRGSRQRTRLTKYGFPRGYLMRQKCVHGFATGDMVEANVPKGKKAGLWRGRVAVRVSGSFNIQTPKGVIQGVGWKHCRLISHNDGYGYAWLGHAPHSSPA

SEQ ID NO: 9878 - protein, 428 aa, Mastigocladus sp.
MSNYVFLIDANQTPLNPVHPAQARKLLDCGKAAVFRRYPFTLVLKRVIENPNVYPLTLKIDPGSKFTGIALVTNQGDVIWAMELQHRGQQIKDALLHRLAVRRGRRNRNTRYRQARFLNRKRPDGWLAPSLRHRVLTTETWVKRLKKFAPIGSIAQELVRFDTQAMQNPEISGTEYQQGTLHGYECREYLLEKWNRQCAYCGVKDVPLEIEHIHPKSKGGSERISNLCLACHKCNQRKGNKDVKDFLKGKPEVLNRVQKLAKAPLKDAASVNSTRWMLFNTLKSFGLPVTTGTGGQTKFNRTRFELPKAHWIDAACVGVVEIIKLVTNKILKVRATGFGGRQRCQTDKFGYPQKHRPLRPIHGFSTGDIVRADVPKGKYAGTFTARVCPMSHGYGEFVIDKKRRSIKLEYLTPVHMKDGYDYVYTCTK

SEQ ID NO: 9879 - protein, 415 aa, unidentified
LKVFVLNMRGKPLMPCSPAKARHMLKAGKAFVVRRTPFTIKLTIATGETKQDVTLGVDAGARHVGISATTEKEEVFASEVALRQDITGLLADRLAFRRARRNRKTRYRSPRFNNRVRSKHKGWLASSVENRIQAHMSRIDAVCRLLPVTKIVIEAASFDVQKIKNPTIEGTDYQQGDQLGFWNVREYVLFRDGHVCQHCHGRSRDKILNVHHLESRKTGGDAPNNLITLCETCHKAYHAGKIKLKVKRGQSFRAEAFMGIMRWTLLDRVRKTHPKLPVENTYGYLTKHKRIALGLPKTHCADAFCIAGNLKALRRGDFLFQQQTRKHNRQIHKCSILKGGVRKLNQAPFLVKGFRLFDKVRIGGQIGFVFGRRVRGTFNIRRLDKTVIGTDINCKKLSLLWATAQAAVRAIGNDT

SEQ ID NO: 9880 - protein, 420 aa, unidentified
MQYAYVLNKRGEPLMPCSPGKARILLKQQKACVVKRTPFTIKLLHGSAGYKQPITLGVDAGSKHVGLSASTEKRELYSEEFTPRNDVVELLSTRRQNRRSRRNRKTRYRAPRFNNRVHSKHKGWLAPSVEVKIQEHITVIKHICRILPITLVRVETAEFDTQRLKAMLAGKPLPVGTDYQLGEMYDEYNVRQYVLKRDNYTCQCCGAHTTAKKTVKLHVHHLESRKVGGNAPSNLITLCTTCHNNLHKGKITLDGKKRGKTLRDAAFMGIMRNTLLTRLRNELNIPVQNTYGYITKLLREQNDIKKSHVNDARCISKHPLAKPCSVCYRTKAIRHHNRQIHKAKILKGGIRKANQAPYIVKGFRLWDKVLYNEQECFISGRRSSGYFALRKFDGTTITNSISFKKLRLLEPATNYLIERK

SEQ ID NO: 9881 - protein, 416 aa, unidentified
MVYVLSQHGQPLMPTENHAKVRALLKHGKAKVIQRCPFTIQLLYESTTHTQKINLGIDAGSKTIGVSATTETKVLYESEVVLRNDIVELISGRRALRSSRRNRKTRYRKPRFDNRKRPDGWLAPSVRQKIETHITVVENVMKILPVTKIIVETASFDIQKIKNPEIEGVGYQHGEQLDFWNVKEYVLFRDGHTCQCCKGKSKDNILNVHHIESRKTGGNAPNNLITLCETCHKAYHKGIITLPKEIHRGMRFRDAAFMGIMRWAFYDRLKELYNPLGAEVINTYGYITKNTRIEHGLPKEHYVDARCISDNPAAKPLDHYYFQKKVRCHNRQIHKNTILKGGIRKRNQASYEVKGFRLYDQVLWKGQKCFIFGRRSTGRMDLRLLDGTHVNASVGYKNLKLLSMRKNYLIEQRKAG

SEQ ID NO: 9882 - protein, 427 aa, unidentified
MQNYVFVIDTKKQPLNPISPKKARRLLDKGKAAVFRMYPFTIILKTAIDNPTISPCQIKIDPGSKVTGFALVQNNQVIWGMELEHRGGLIKKKLESRKAVRHRRRNRNTRYRKPRFLNRRRKEGWLAPSLEHRVLTIETWVKRLIKFCPINQIWVERVKFDTQKMQNPEINGVEYQQGELAGYEVKEYLLEKWGRECTYCGKQSVPLQIEHIHPKSLGGSNRVSNLCLACEKCNQRKGNKPIEEFLKKKPNLLQKIKTKTKQPLPDAAAVNTTRNKLVKVLRSIKFVVTGTGAQTKYNRTRLGLPKQHWIDAACVGNIETLVLKTSQPLLVTCKGQGGRQKAALNKYGYPIRHNPLKPIKGWLTGDIAKHQKLGIGKVTPRSKGSFGFTPLGMKGYKSCFPQDISAIHRKDGYTYSFCQHMPEFTWK

SEQ ID NO: 9883 - protein, 413 aa, unidentified
MTSYSFVLDVNGKPLAPTKEQKAWFLIRKKRAALVSKYPMVIQLMKEIPENEICQDEIRCGIDDGGLHVGIALVQKCKTKNKVVFKGTMEQRNDVKHLMEVRRGYRRYHRYHKRYRQARFDNRKSSKREGRIAPSILQKRQATIRVIHWLNKWINITNYWLEDVSVDIRALTDGYQSYRWQYQKSNRLDENIRKAAILRDDGKCMECGKSNCRLEVHHIKPRRRNGSNTLDNLITLCESCHQKTEGQEELYMDRYFSLLKSSDNKNLNDAQHVMIGKMWLRKQLSGLGVLYLTSGGDTANKRIDWNIEKSHANDAVCITDLQPDTCDMKEWTMKPMRRQSKAKTDHVLGIHHRDLVEYTFKNGETHRGYVTALYPEQKAINFQSPTKHCKKVNARKCKLLWNYSKIYWFENAS

SEQ ID NO: 9884 - protein, 458 aa, unidentified
  REGION 1..458: note = Ga0315273_10129197
MQKFKGKLKNVPRNTSLVPCSTNLELNRDQSLSVSGGLKDSKLTLNNPEVNQVQQTERSLKAKVFVLNKQGKPVMPCSYAKSKRMVKKGAARVVKRFPFTIQLNFECENVVQEVNLGIDTGFGNIGFSATTEKEELICGTLVLDGRTKERLDERRMYRRNRRNRLWYRKQRFDNRISTKKESWLPPSTERRYQTHLTLINRLKKILPISSITLEFAKFDIQKLKNPDIEGQDYQQGNLYQYQNVRSYLMAREKGKCQFCGQDFKNQPSHVHHIKPRSQDGNNQVDNLAILHEKCHEKIHREHLENQLKSNSKDYKQSTFMSIIHKRFWRDIPDLKVTYGNITFVNRTRLNLSKAHYNDAFVISGGTNQKRSEPLEINQVHRNNRVLQLNRKGFKPSIKKEKSKVNPRDLFWIKKKQYVCKGMFSYGRYILFGTVKKKEYFKFSEVTKIFHFGSFVWNS

SEQ ID NO: 9885 - protein, 431 aa, Escherichia sp.; identical to SEQ ID NO: 3801

SEQ ID NO: 9886 - protein, 465 aa, unidentified
MSTCVCVLSNNGERLMPTIRLGKVCHLLKDGKAKIIKHHPFTIQLLYDSKTNTQPIEICEDVGYNYIGISVKSQSHEYVSAQYDTLQDEKACHDSCRKLRRTRRNRLRYRKPRFDNRKRGEGWLAPSLRHKKELNVNVVKMYCAVMPITHATVEVGSFDTMLLQAIQKGESKPEGVDYQKGPRYNLATLREAVFYRDNYVCKVCGRKATEGAILHMHHMFYWKGRHGNSLDELLTVCEKCHTPANHQKSGKLYGFGENVKFADLSGAAFMNTVRWQIVNELYAAFGKDFVTVTYGAMTKEKRIALHLEKSHNNDAYAMGEFHPNCRCTFEHYEKVRRNNRILEKFYDSRYIDIRTGEIATGKELFNGRINRNHKKDSKNLHKYRGKRLYKGHRALVRKKVNFNPGDLVSLNGEVLVVHGTHTNKKGAVNVEFKTPAKNGRKSANLKKLKIVKAAGSIHPAWEKVS

SEQ ID NO: 9887 - protein, 473 aa, unidentified
MAVFVIGLTEKRLMPTTERKARILLKQKKAEVFCKNPFTIKLLYQTGGTTQHVTLGVDTGSQHLGFAVAGDNGNIIHEQEVSLRRSMEKRKLLVKCKESRRGRRYRKVRYRHPRWRHHTVRAYIQKGCRKKGAKRYWKKLKVQFSSPRPEGWLPPSLQSKTDHHIRWIHRFLDVLPKNIRMVLEVGRFDAARMKNPEIHGELYQRGPQYDYENVKAYVFDRDSYKCRCCHAKAGTRRKDGTVVKLIAHHIDYRSRGASDNPDALASVCDVCHTAANHQPGGVLYDWMVKNKRFKRGQRDTTFMNILRRRLFEAFPDAEYTYGNITAARRKELMLPKSHADDAVAIACTGMDINSIRKRPDHVVYVQQVRKKKRSLHEANPRKWSKTKNHFAVRNSKNTKEVNGVCLFDKVEVPGKGYGWVTGFSGTSCYVLDRNGNYVTTADTYKQVAISRLKVIQHSGNWISGLKCPIGNGS

SEQ ID NO: 9888 - protein, 339 aa, Pseudoalteromonas sp.
LRTDVSKKMQQRAMYRRTRRNRKLRYRPARWLNRASMRKEGRLAPSLKSKLDSHLREKKQVEAILPISHWKVETASFDIHKITNPTVTGAGYQQGAQLGYYNVKAYVLQRDNYKCQSGRKTKHSAKLHVHHKVFRSQGGTDAPSNLITLCETCHNDLHAGKFELKVKRSKTKHATEIGIVKVQLKQCWDFEETFGYVTKFKREQVLGLPKTHYYDAVSICCENGELVQQAKHVLRKRHVASGDYQQTKGVRSEKWIPVGKLFGLKKHDFVQTPQGTGFVKGKRSSGYFALETILGNKVHACANIKKNTVRISARTTTLTQPMEAARILVTKVPSILAVN

SEQ ID NO: 9889 - protein, 415 aa, Bacillus sp.; identical to SEQ ID NO: 2671

SEQ ID NO: 9890 - protein, 411 aa, unidentified
MVYVQDIDGKPMMPTTRHGKVRRLLKDNKAVVVNTCPFTIKLTYKTSDYKQEIVLGVDSGTKHVGLSATTKSKELYASEVILRSDVVDLLSTRRGLRRTRRSRLRYRKQRFNNRVKSKKDGWIAPSVRHKIDSHIRIISFVYSILPVSKLIVEVAQFDTQKIKNPEISGKEYQEGEQLGFWNVREYVLARDGHKCQHCKGKSKDPILNIHHIESRKIGGDSPSNLITLCETCHKEFHKGNIKLKVSRGKSLRDAAVMGIMKWKLYEELKSKYDNVSMTFGYITKYNRINHGIEKSHVSDAFVISRNFNSCRLGYYYKRKLVRRHNRQIHKMKILKGGIRKRNQAPFKVFGFRLFDKVMFQGEEHFIYARRLSGQFNIRDINGENKKDVSCKKLKYVSHGLVSVKTNLFLSQ

SEQ ID NO: 9891 - protein, 396 aa, unidentified
VVRRTPFTIQLTIATGESKQPVSLGVDAGYKHVGLSASTEKAELYASEVELRQDITDLLSARRALRQSRRNPKTRYRAPRFDNRIRTKRKGWLAPSVENRINAHLSRIETVIRLLPVTKISVETTSFDMQLLKNSDIAEKEYQESEQLGFWNVREYVLFRDGHVCQHCHGRSKDPVLNVHHLESRRTGGDSPGNLIALCETCHKELHRGEITLKAKRGQSFRAETFMGIMRWEVLDRLKASHPKLEVQNTYGYRTKHARIVNGIAKSHCADAFCIAGNLGAERLGEFLFQKQTRRNNRQIHKLSILKGGIRKRNQVPFEVKGFRLFDKVACKGEEGFIFGRRSSGYFDVRKLDGTRISAGISYKKLRLLEKRQTYLTEIRKEEALPPLPEGRGLRA

SEQ ID NO: 9892 - protein, 388 aa, unidentified
MPNKVYVINKHGRPLMPCSPAKARHLLDAGKAKVKKRTPFTIQLVYGSSGYTQEVILGVDAGSKTIGVSASTKKEELFAANVIPRNDVVDLLSTRREFRRARRNRKTRYRKPRFDNRVRSKHKGWLAPSVEVKIQEHITAIRRVCGILPVSKVVVETAEFDLQLLKAIADGKPVPQGEDYQKGEMYGHYNVRQYVLWRDDYTCQCCGAHATKKKEVRLHVHHLESRKVGGDAPDNQVTLCESCHEKLHKGLITEKDFKKRKRRSTRDATFMGIMRKTLMQRLCSELPIPVVKTRGYITKATREKLLVLPKSHTNDALAIAQGKRGFNVGYLPGIIQTDKIYTIRPVRHHNRQLHKAAILKGGIRKSNQAGKYVFGYRLFDKVQFNGQD

SEQ ID NO: 9893 - protein, 372 aa, unidentified; identical to SEQ ID NO: 8481

SEQ ID NO: 9894 - protein, 423 aa, Moorena sp.
MRVFVLNSNRQPLDPCKPARARILLSTGKAKVYRRYPFTIILTEEIQEPITHGSQFKIDPGSKTSGLAIVQGNRIVWGGELTHRGFQIRDALTSRRQLRCARRNRKTRYRKPRFLNRSRPEGWLAPSLMSRVHNILTWVKKLTRLCPIAGISQELVRFDTQKLQNPEISGIEYQQGTLYGYELREYLLEKWNRKCAYCGTTGTQLEIEHIKPLSKGGSNRVSNLAIACHSCNQSKSAQEIEQFLSGKPDVLKRVLSQAKRPLTDAAAVNTTRWKLYHELKSIGLPVEVGSGGLTKFNRCRQNLPKTHWLDAANVGKVDTLIIEGYQPLLIAAKGHGTRKICRTNKYGFPIRYCSRTKIHKGFQTGDIVRAVVTKGKKIGTYVGRVATRKSGSFNISTKSGLVQGISHKYCQFIHRKDGYAYRH

SEQ ID NO: 9895 - protein, 465 aa, unidentified; identical to SEQ ID NO: 4783

SEQ ID NO: 9896 - protein, 440 aa, Lactobacillus sp.; identical to SEQ ID NO: 5150

SEQ ID NO: 9897 - protein, 443 aa, Fervidobacterium sp.
  VARIANT 75..77: note = X can be any naturally occurring amino acid
MVFVLDKNKKPLMPCSEKRARLLLSRGRAVVHKMHPFTIRLKDRTVQQSELQPLRLKLDQGAKVTGLSVLREDGXXXDVAETVFLCEIHHKTDIKQKLDARRAVRRSRRNRKTRYRKPRFLNRRRPEGWLPSSFKARADQLVNVVIKLTKLLPISAISIEDAKFDTQKLQNPEISGIEYQRGTLFGYEVREYLLEKWGRRCAYCGRSDVPLEIDHIVPRSRGGTDRVSNLTLACRECNQKKSNKTAAEFGYPHIEERARQTYKQAAFMNSIRSYLSKSLSSFGIPVEYGTGALTKANRIRLGFPKEHYFDACCVGESTPSEIRITQSYVQIWRAVGRGTRQMCNTDKFGFPRGHRQRCKKHFGFQTGDIVKAIVPRGKYAGIWMGMVAVRASGFFDIKDKNGKRVCQGIRYKYCKLIQTADGWQYSKTKTNYSISHTTEVACI

SEQ ID NO: 9898 - protein, 423 aa, Deinococcus sp.; identical to SEQ ID NO: 6340

SEQ ID NO: 9899 - protein, 427 aa, unidentified
VCKVFVIDSEKRPLNPIHSAQARQLLRNKKAAIFKRFPFTIILKESCPDSPVQSLRLKIDPGAKFTGIALVNDGTGEVVFAAELKHRGFAIRDALTSRRQLRRSRRARKNRYRKPRFLNRTRPEGWLAPSLQSRVENIKTWVKKLRKLAPIQSISQELVRFDMQLMRNPEIEGKEYQQGTLAGYETREYLLEKWGRQCAYCGVKDVPLQIEHIHPRAKGGSNSITNLTLSCEKCNTKKGTKDIKDFLKKDPSKLSKILAQAKRPLFYAAAVNTTRFALLNELKETGLPVETGSGGLTKFNRSQQNLSKTHWLDATCVGKSTPILKVKGIKPLLITANGHGSRQSCRTDKFGFPNRYVPKFKFVKGFQTGDIVKCVVLSGKKIGEYVGRVAVRTTGSFNISPKKGLIQGISHKFCKCIHAKDGYSYAT

SEQ ID NO: 9900 - protein, 427 aa, Calothrix sp.
MSKVFLIDTNFKPLNPIHPARARQLLRSKKAAVFRKFPFTLILKERLPDVEVEPLRLKIDPGAKTTGFALVNDSTGEVVFAAELQHRGFKIRDALTSRRQLRRSRRNRKTRYRAPRFNNRKRREKWISPSLQSRVDNIITWVKRLQKFAFISAISQELVRFDTQLMQNSEVSGVEYQQGTLAGYETRQYLLEKWGRKCAYCGVEHVPLQIEHIQARAKGGSNRISNLTLSCEKCNLKKGTKDVKEFLKKDPKKLEAIIKQAKKPLADAAAVNTTRFTLLATLKATGLEVETGSGGLTQFNRVQQNLDKTHWIDAACVGKSTPILKFKGVKPLLITAKGYGTRQMCGTNKYGFPTRHRSNKQIHFGFQTGDIVKAIVTKGKKIGVYIGRIATRSTGSFNVSTKAGLVQGISYKDCKVIHHKDGYAYAN

SEQ ID NO: 9901 - protein, 408 aa, unidentified
MVYVQDIDGKPMMPTTRHGKVRRLLKANKATVVNLCPFTIRLTYATSGYKQEIVLGVDAGTKHVGLSATTKSKELYSSEVILRSDIVELLSTRRELRRTRRNRLRYRKPRFGNRVKSKHHGWVAPSVRHKVDAHIRVIDNICSTLPISRIIVEIAQFDTQKIKNPDISGNEYQEGDQLGFWNVREYVLARDGHKCQHCKGKSKDPILDVHHIESRKTGGDSPSNLITLCETCHKEYHKGNIDLKVKRGKALRDAAVMGIMKWKLYEELKSRYPNVSMTFGYITKYNRIKYGIEKYHISDAFVISKNFNALRLEYHYKVRLVRRHNRQIHKQKVLKGGAKKPNQSPFEVFGFRLFDRVMFEGNYYFIFGRRKSGSFNIRDINGGNQRNVTYKKLKLSIGKRFMIQKEMN

SEQ ID NO: 9902 - protein, 411 aa, unidentified
MLVYVLNQHSKPLMPCKPQKARKLLESGKAKVVSRVPFTIKLLHGSSGHKQEITAGMDTGSETVGCAAIANGKVIYQSEVKIRTDVSKKMQRRAMYRCTRRGRKCRYRKPRFLNRSSARKAGRLAPSLLSKLQSHLREKAQIEKILPISHWKVETASFDIHKITNPDVSGSDYQKGKLKGYYNIKAFVLNRDNYKCLSGRKVKHSKKLHVHHIIFKSKGGTNTPDNLLTLCESCHSDLHAGKFELRAKKSKTKHATEMGIIKARLLKIWDFEEAFGYETKFKREQVLNLAKSHSNDAIAICCGDNKTVKQSKFIIHKRHVAKGDYQQTKGVRSEKIIPTGKLFGFKKHDFIKTDKGTGFIKGKRSTGYFSLETILGEIIHNSANIKKNAVRLTARTTTLTQIMEMAIHPAA

SEQ ID NO: 9903 - protein, 460 aa, unidentified
MVAVVDLFGKPLMPTNEYRARKLLKRKKAKIFGYRPFTIQLTERKDTEIQPIELCMDTGYIHIGISAKSERHEYLGMQIDTLTDEKLKHDDKRQYRRQRRNRKRYRAPRFDNRRRKEGWIAPSLEHKKEIHIDAIQRICKVMPITDLTLEMGNFDTQVLKAVEEGKTLPQGSDYQHGERYGIATLREAVFLRDGYKCQCCEKSVKDGAILHVHHIKYRSQGGTNRMSNLITVCDKCHTPKNHKPGGRLWDWKPKLAEFKGASYMTSIRWMLYNEVTALLPNSSVHITYGAKTKESRRELDIEKSHVNDAYVMGLFHPKHRTQPVYFKKKRRNNRVLERFYDAKYIDGRDGKKRSGQELFNGRISRNHKKDSENLHLYRKQKVTKGKRSIRNRHYPIQPHDILLYQKKKYETAGCHNNGTRAILLPEKKSVALRQLTIYQYAGGYYRVPYESNKKEERTGS

SEQ ID NO: 9904 - protein, 439 aa, unidentified
MVLVVDKRKRPCNTISEAYARRLLFKKQAVIHKRFPFTIRLKNDNAVLKDRAYTVKLDPGSKHTGIAITDDKDSVVMLAELEHIGHLIKKDLNSRRIVRKSRRQRKTRYRPARFLNRVKPKGWLAPSIRSRADNVINFIKKYKKLINIDKVMIENVSFDTAQMSSNAKLWGSNYQQGPLYQNKLRSFIFSRSNDKCVYCGAKATEVDHVVPRSSGGTNSTYNLVASCRACNQIKSNQTLKEFGKIMNKDYSHLEPKKLPRDAAIVQSARNYMVREITKLVSDTTTHDAWLTRYNRDELGLPKEHYYDALSVGEIPTKFNFFTDKILQISAKGRGSRQMCRMDKYGFPGTKPKGSKLVEGFQTGDMVKAVVPKGLNKGEHLGRVIVKSSGYFEIKSKNSSVQGINHKYCRLIQKGDGYLYNYKESDFLSAIAKRVMICLH

SEQ ID NO: 9905 - protein, 419 aa, Scytonema sp.; identical to SEQ ID NO: 6324

SEQ ID NO: 9906 - protein, 414 aa, unidentified; identical to SEQ ID NO: 2588

SEQ ID NO: 9907 - protein, 408 aa, unidentified; identical to SEQ ID NO: 6729

SEQ ID NO: 9908 - protein, 482 aa, unidentified
LVGNVQAPWDVDPSPTLCGLCLKVLRGRNGDADKKPFPTLTKDENRPLGRTTGLRAEQAEPAGIRKGDTLKVFVLNMRGKPLMPCSPAKARHMLKAGKAVVVRRTPFTIKLTIATGETKQDVTLGVDAGARHVGISATTEKEEVFASEVALRQDITGLLADRLAFRRARRNRKTRYRAPRFNNRVRSKHKGWLAPSVENRIQAHMSRIDAVCRLLPVTKIVIEAASFDVQKIKNPTIEGTDYQQGDQLGFWNVREYVLFRDGHVCQHCHGRSRDKILNVHHLESRKTGGDAPNNLITLCETCHKAYHAGKIKLKVKRGHSFRAEAFMGIMRWTLLNRMRKAHPSLPVENTYGYLTKHKRIALGLPKTHCADAFCIAGNLKALRRGDFLFQQQTRKHNRQIHKCSILKGGVRKLNQAPFLVKGFRLFDKVRIGGQIGFVFGRRVRGTFNIRRLDKTVIGTDINCKKLSLLETRKTFLTELRKE

SEQ ID NO: 9909 - protein, 512 aa, unidentified
MSTIYVLNKDGKPLMPTTRGGHVRHLLKEQKAQVVTSKPFTIQLLYETDDVVQPLYLGIDPGRTNIGVAVVKIDGTAVFTAHLETRNKEIPKLMQGRKKARRARRTNGRRCRRQRRAKANGTISKKCVKQTTAQNGSVSKRAKKIGVIKRHLPGCEKEVLCIGIKNKEAKFSNRARPEGWLTPTANQLLQTHINLVKKIQKFLPISDVVLEINKFAFMRLDNPNVQKWQYQQGPLYQKASLEEAVSEMQEHHCLFCKNTIDHYHHVVPQHKNGSNTIGNIVGLCAKHHDLVHKDTSWQEKLAKKKTGLNKRYGALSVLNQIIPALTKELSSLFPKHFFATNGKSTYDYRAAHGVSKDHWLDAYCIAGSVLPNDACDNNINSHVPYELKQFRRHDRRALHKENMSRVYTLNGKSVATNRHKAIKQTTDSLEEFRQSHPGDVCKLKVKEHHPAYRNLNRNHPGSVFFVGEQAHVMQSIVASKDGKATRYKDTNVNKIAAGQCRFVAKNEGIVFT

SEQ ID NO: 9910 - protein, 515 aa, unidentified
MIPNERRHLMPYIYVIGMDGKPQMPTKRRRHVQKLLDTGKARITERVPFTIQLLYDNDPVLQPVILAEDPGRTNIGVATLDLKGNLLLSAAVETRNKEIAKLMEKRRQCRRASRNGERKARQRLAKKYGTMIQAGMRMRKLPQYAADAFITCKVIRNTQARFCNRRRLDGWLTPSARHLVQTHINLVHKVQKYLPVTDVAIEVNRFAFMQLEDPAICGVDFQTGPLKGYDDRDAAVYDLQDGKCLMCKHEITQYHHIVPRSRNGSNTIGNIAGLCDQCHDRVHKDADFAEQMKEKKEGMDKKYGALSVLNQAIPFICKQLETEFGRGHVHYCTGRETSLVRQSTGYQKTRKNQLHEVDAWCIGALALAEIPENVPDFKEIHLIRQFRRQDRSLVNAQTERVYKLGGKMVAKNRKKRTGQEIYALEDWYNRQVETYGKQEADCMRSRLKITKSRRRYNNPNRMMPGAVFLYEGVRYVMRGQHSKGAYLQAVGMENRDFPVRKCKILTRNTGLVFVS

SEQ ID NO: 9911 - protein, 430 aa, unidentified
MSNFIFVVDTNGQPLNPVPPGQARRLLKLQKAAIYRRYPLTIVLKYTVSAPQIQPHQLKIDPGAKVSGLAIVRDDKVIWGAELTHRGQQIKHDLASRRALRSHRRNRKTRYRQPRFLNRTRKSGWLPPSLESRVENILTWVNRIRRYVPITGISQELVKFDTQAMQNPEISGIQYQQGELAGYEIREYLLEKWGRKCAYCNAQNIPLEIEHIHLRSKGGSSRVSNLTIACRHCNEAKGNQELKDFLAQQPELFDRIAKQAKQPLKDAAAVNSTRWQLFNRLKETSLPVEIGTGGQTKYNRTRLELPKTHWLDAACVGLVSQLKILTAGPLLIQASGWGSRQICQPNKYGFPIRHKTRCKEFFGFKTGDMVQATLPTGKFAGTHRGRLIVRASGVFEMISPTGKVSPVRHKYCRAIHHNDGYTYTLSTCVQ

SEQ ID NO: 9912 - protein, 512 aa, unidentified; identical to SEQ ID NO: 3057

SEQ ID NO: 9913 - protein, 406 aa, unidentified; identical to SEQ ID NO: 7944

SEQ ID NO: 9914 - protein, 413 aa, unidentified
LKVFVLNMRGKPLMPCSPAKARHMLKAGKAVVVRRTPFTIKLTIATGETKQDVTLGVDAGARHVGISATTEKEEVFASEVALRQDITGLLADRLAFRRARRNRKTRYRAPRFNNRVRSKHKGWLAPSVENRIQAHMSRIEAVCRLLPVTKIVIETASFDIQKIRNPEVEGTGYQQGDQLGFWNVREYVLFRDGHICQHCRGRSKDPILNVHHLESRKTGGDAPNNLITLCETCHKAYHAGKIKLKVKRGHSFRAEAFMGIMRWTLLNRMRKAHPSLPVENTYGYLTKHKRIALGLPKTHCADAFCIAGNLKALRRGDFLFQQQTRKHNRQIHRCSILKGGVRKLNQAPFLVKGFRLFDKVRIGGQIGFVFGRRVRGIFNIRRLDKTVIGTDINCKKLSLLETRKTFLTELRKE

SEQ ID NO: 9915 - protein, 413 aa, unidentified; identical to SEQ ID NO: 2636

SEQ ID NO: 9916 - protein, 426 aa, unidentified
MVYVQDINGKPLMPTTRHGKVRRLLKDKKAVVVNLCPFTIKLMYVTSDYKQEIVLGVDAGTKHVGLSATTKSKELYSSEVILRNDIVDLLSTRRELRRSRRNRLRYRKPRFDNRVKSKRPGWIAPSVKYKIDAHIRVVENVCSILPISRIVIEVAQFDTQKIKNPNISGKEYQEGDQLGFWNTREYVLARDGHKCQYCKGKSKDKILNVHHIESRKTGGDSPSNLITLCETCHKEYHKGNIDLKIKRGKSLRDAAVMGIMKWRLYEEIKSKYDRVSMTFGYVTKYNRINHGFEKSHVSDAFVISKNFNAIRLGYYYKVRLVRRHNRQIHKQKIQKGGIKRLNQSPFEVFGFRLFDRVMFENSYYFIFGRRKTGSFDIRYIDGKNQKNVTYKKLKLSRCKRFMIQMELNKKTRTCFENERNSDRDAA

SEQ ID NO: 9917 - protein, 561 aa, unidentified
LLRLSIFPVDSSARVVLPRVMPFAASTQPRETQPPVSAGETYSKRRVAYMPTVYVLNKDGKPLMPTTRCMHVRHLLKEQKAQAVASKPFTIQLLYETDDVVQPLYLGIDPGRTNIGVAVVKTDGTAVFTAHLETRNKEIPKLMQGRKKARRARRTNGRRCRRQRRAKANGTISKKCVKQTTAQNGSVSKRAKEIGVIKRHLPGCEKEILCIGIKNKEAKFNNRTRPEGWLTPTANQLLQTHINLVKKIQKFLPISDVVLEANKFAFMQLDNPNIQKWQYQQGPLYQKANLKEAVSEMQEHHCLFCKKPIAHYHHVVPQSENGSNIIGNIVGLCTKHHDLVHKDAAWQEKLAKKKTGLNKKYGALSVLNQIIPALTKELSSLFPKHFFATDGKSTYDYRTAHGVSKDHWLDAYCIACSVLPKDVCDSSINSRVPYELKQFRRHDRRALHKENMKRMYTLNDKVVATNRHKAIKQTTDSLEEFRQRQPHDVCKLKVKEHHSEYRNPKRNFPGCVFLVGKHTHVMQGTRGSHNGKADGYYDTNGNSYSSGKCKFVVKNEGIVFT

SEQ ID NO: 9918 - protein, 419 aa, unidentified; identical to SEQ ID NO: 4877

SEQ ID NO: 9919 - protein, 425 aa, unidentified
MENTLKVFVLNMRGQPLMPCSPPKARKLLRAGKAVPVRRTPFVIQLTVPTGETKQPITLGVDAGYKHVGLSATTAKEELLASEVELRQDVTGLLSDRLALRRARRNRKTRHRAPRFANRVRSKHKGWLAPSVENRIQAHISRIEAVCRVLPITKIVIETASFDIQKIKNPEVEGTDYQQGEQLGFWNVREYVLFRDGHVCQACKGRSKDLILNVHHIESRKTGGDAPGNLITLCEACHKAYHAGKLKQFSPRRGASFRAETFMGIMRWTVLNRLRERHPELPVTNTYGYLTKHKRIVAGLPKTHCADAFCIAGVLDAKRRGEYLFQKQTRRHNRQIHKLTILKGGVRKRHQAPYLVHGFRLFDKVLCKGEVGFIFGRRSSGAFDVRRLNGTKISAGISYKKLSLLEKRKMFLTELRKEGRDSSRV

SEQ ID NO: 9920 - protein, 396 aa, unidentified
VVRRTPFTIQLTIATGESKQPVSLGVDAGYKHVGLSASTEKAELYASEVELRKDITDLLSARRALRQSRRNRKTRYRAPRFDNRIRTKRKGWLAPSVENRINAHLSRIEAVLRLLPITKITVETASFDMQRLKNPDISGKEYQEGEQLGFWNVREYVLFRDGHVCRHCHGRSKDPVLNVHHLESRRTGSDSPDNLITLCETCHKALHRGEITLKAKRGQSFRAQAFMGNMRREVLNRLKASYPELKVHETYGYLTKHARIANGIVKSHGADAFCIAGNLGAERLGEFFFQKQTRRNNRQIHKLSILKGGIRKRNQAPFEAKGFRLFDKVACQGEEGFIFGRRSSGSFDVRKLDGTRISAGISCKKLRLLEKRRTYLTEIRKEEALPPLPEGRGLRA

SEQ ID NO: 9921 - protein, 419 aa, unidentified; identical to SEQ ID NO: 4877

SEQ ID NO: 9922 - protein, 452 aa, unidentified; identical to SEQ ID NO: 3322

SEQ ID NO: 9923 - protein, 499 aa, unidentified; identical to SEQ ID NO: 3817

SEQ ID NO: 9924 - protein, 415 aa, Bacillus sp.; identical to SEQ ID NO: 2431

SEQ ID NO: 9925 - protein, 513 aa, unidentified
VLEELLSKTEYIYVIGTDGRPQMPTKRKRYVLKLLNTGKARIAEKVPFTIQLKYDNTPVLQPVTLAEDPGRTNIGAAALSPFGDLMFAAVIETRNKEIKKLMADRKAHRQASRRGERKARQRLAKKYGTMIKAGMAMRKLPQYAADKFVTCKFIRNTEARFCNRKRCSDWLTPTVNHLVQTHLNVIKKISRYLPVTDIAIEVNRFAFMQMENPNASGVDFQNGPLRGFDDVKAAIREQQNNKCLMCKNDIKHFHHMVPRSRGGSDTIQNQVGLCPKCHSKIHTDPAFKKKLEDKKSGLLKKYGALSALNQAIPFTCKALLEEYGGEHVHFCTGRETSLIRTSLGYEKTNDNQMHEVDAYCIGLAALGLKDIKLQSFVNTYKIKQFRRHGRSIIHHQTERSYYLDKQKIATNRKPRFEQAGDALSDWYEKQVKACGNAKAAKMLSTLKVKKSSRFYNSEGRLMPGTVFSYNGQRHVMSGQLTGGRYLRAYGDTKTNYPASKCKILRSNEGLVFI

SEQ ID NO: 9926 - protein, 545 aa, unidentified
VQFAWWLCHPKPSDNIEDVNHETALMLLQIKAGTETFGTAPCGSGPKAEGVSHERKSMNIVSVVTNTNKPLMPTSPYRARKLLSSGKAKIVKHRPFTILLVNRSDGNVQEIEYKSDTGYLHVGISVCSEKREFVREQRDLLPDEREKHNDRRKYRRTRRNRKRYRKARFDNRIGKIRKAEKNKHVWLPPSLDHKVDAQVQLFLRLYQVMPIKRAVFEMGQFDPALMKALEKGEAAPQGIDYQMGERYQIATRRAAAFTRDRYACVFCGRSIKDHAILHVHHIGFWKQDRSNRLDNLATCCEQCHTSENHRPGGILYGVEPKLESLASATYMNVVRFELLQRLKEAAPDVEFHISYGAKTSVIRKQRSISKSHTNDAYCLGQYFPKLRAEEIGFQKIRRNDRILQKFYDAEYLDSRDGTTKKGKELTNGRISRNHMKDHKNLHQYRGKKLSKGRVTIRRGRSSLKTGSLVRFDGEVLTVHGTHRSRRKNKAGHIKVSVNVEFECPSKTGRKSAALSKCQIISQSYNTGWKKIQLRKEEQGKIAAVG

SEQ ID NO: 9927 - protein, 430 aa, unidentified
MPKVYVLNRHGRPLMPCTPAKARHLLDAGKAKVRHRTPFTIQLLYGSTGYTQEVILGVDAGSKTIGLSAATETEELFSAEVKPRNDVVELMSARRQFRRARRNRTTRYRKPRFDNRVRSKHKGWLAPSVEVKIQEHMTAIRRACAILPVSKVVVETAEFDLQLLKAVAEGKPVPQGEDYQKGEMYGHYNVRQYVLWRDSYTCCICGVHGSVRKGVPLHVHHLESRRVGGDAPDNLVTLCTACHDKLHKGIIMVADIKKRKRRSTRDTTFMGIMRMTLLRRLWEQLPVPVVETRGYITKATRENLLVLPKSHANDALAIAHGPQGFRAEHLPNIRQADRLYTIRPVRHHNRQLHKATILKGGVRKANQAEKYICGFRLYDKVLYNGIECFVWGRRTSGSFLLRQLNGEKVKDGVSYKHLKLLERSQSYLVA

SEQ ID NO: 9928 - protein, 413 aa, unidentified; identical to SEQ ID NO: 2636

SEQ ID NO: 9929 - protein, 470 aa, unidentified; identical to SEQ ID NO: 2825

SEQ ID NO: 9930 - protein, 514 aa, unidentified
MSTVYVLNKDGKPLMPTTRCGHVRNLLKEKKARAVASKPFTIQLLYETDDVVQPLYLGIDPGRTNIGVAVVKTNGTAVFTAHLETRNKEIPKLMKKRKDSRRTRRTNGRRCRRQRRAKANGTISKKCVKQATAQNGSVSKRAKKIGVIKRHLPGCEREVLCIGIKNKEAKFSNRTRPESWLTPTANQLLQTHINLVKKIRKFLPISDVVLEINKFAFMQLDNPNIQKWQYQQGPLYQKASLEEAVSEMQEHHCLFCKKPIAHYHHVVPQSENGSNTIGNIVGLCTKHHDLVHKDATWQEKLAKKKTGLNKKYGALSVLNQIIPALTKELSSLFPKHFFATNGKSTYDYRAAHAVSKDHWLDAYCIACSVLANYVCDSNINSHVPYELKQFRRHDRRALHKENMNRVYTLNGKSVATNRHKAIKQTTDSLEEFRQRQPNDVYKLEVKEHHPEYRNPKRNFPGCVFLVGKHTHVMQGTSGSHNGKADGYYDTSGNSYSSGKCKFVAKNEGIVFTLN

SEQ ID NO: 9931 - protein, 431 aa, unidentified
MPNKVYVLNKHGRPLMPCSPAKARHLLDEGKAKVKKRTPFTIQLVYGSSGYTQEVILGVDAGSKTIGMSASTKKEELFAANVNPRNDVVDLLSTRREFRRARRNRKTRYRKPRFENRVRSKHKGWLAPSVEVKIQEHITCIKRVFSILPVSKVVVETAEFDLQLLKAIEEGKPAPEGEDYQKGEMYGHYNVRQYVLWRDGYTCQCCGARATKKKEVRLHVHHLESRKTGGDAPGNQITLCEDCHKKFHKGLIPDGTLKKRKRKPNRDVAFMGIMRKTLIERLRAELPIHVVETRGYITKATREKLLVLPKSHTNDALAIAQGKHGFNVGYLPGIVQIDKIYTVRPVRHHNRQLHKVTILKGGIRKANQAEKYVFGYRLFDKVQFDGQDCFIFGRRSTGIFNIKTIYGKMIKDGISFKKLKLVEKSTSYLIA

SEQ ID NO: 9932 - protein, 465 aa, unidentified
MNTCVCVLSNNGERLMPTFRLGKVRRLLKDGKAKIVKHHPFTIQLLYDSKTNTQPIEICEDVGYNYIGISVKSESHEYVSAQYDTLQDEKEHHDDCRMHRRTRRNRLRYRKPRFDNRKRGEGWLAPSLKHKKELNVNIVKMYCAVIPITHATVEVGSFDTMLVKAIQEGKAVPEGANYQKGPRYNLATLREAVFYRDNYACKVCGRKATEGAILHMHHMFYWKGRHGNSLGELLTVCEKCHTPANHQKSGKLYGFGEKIKFADLSGAAFMNAVRWQIVNELYTAFGKPFVTITYGAMTKEKRIALQLEKSHNNDAYAMGEFHPNLRCSFEHYEKARRNNRILEKFYDSRYIDIRTGETATGKELFNGRINRNHKKDSENLHKYRGKKTYAGHRALLRKKVSLNPGDLVSLNGENLIVHGTHTKKNGAVYVEFETPAKSGQKSASLKKLKIVKAADSIHPAWKKVS

SEQ ID NO: 9933 - protein, 436 aa, unidentified
MTKTLTKQTTQACVLDQHGKPLMPTKRLGKVYRLLKTKKAHIVSYEPFTIQLDYEPDTHIIQPMTLGVDSGAIHSGYSVANEQREYYSSEVIARDNISKNISDRSMYRRNRRSRKTRYRKPRFNNRKNKKKGWLPPSLEQKVAVQLNEIDHLHRHFPIETIIVEVAEFDIQKIKNPNISGKEYQQGTLQGYNIRNYLLEKHGRKCFYCNKEVSTFEVEHMIPKAKGGSNRIDNLTLSCHSCNQKKGTLTAEEFIKQTLPVEKAAKKLKQLPKEKRLFKYMAHMNATRWTLYNAINDKYSNVKMTYGYITKYNRIRAGLPKAHHIDAKCITGFAQVPSFDITVVKTKMRRHNRQLHRATFSKGHVRKAASLPTVMFGFRLYDIVMYNNHCYYIKGRRSSGAFTLVSVEGLKDENRTYKKLTLLAHTSAYLTNHYIDM

SEQ ID NO: 9934 - protein, 413 aa, unidentified
MRGQPLMPCSPAKARHLLKANKATVRRRTPFTIQLSIATGETKQDVTLGVDAGSKHIGLSATTEKAEVFASEVELRQDISGLLADRLALRRGRRHRKTRYRAPRFNNRVHSKHKGWLAPSIENRIQAHMSRIDAVCKLLPVNKIVIETASFDIQKIKNPGVEGKGYQQGDQLGFWNVREYVLWRDGHVCQHCRGRSKDKILNVHHLESRKTGGDAPNNLITLCETCHKALHSGKIKLKVKRGKSFKAETFMGIMRWTLLERVRLTHPHLPVENTFGYLTKHKRIVLGLPKTHCADAFCIAGNLKAQRTGVYLYQKQTRKHNRQIHKCSILKGGVRKLNQSPYLVKGFRLFDKVKCLGQVGFIFGKRSSGYFDVRTLGGKKLSPAIHAKKLTLLEKRKTFLTELRKENSASSPV

SEQ ID NO: 9935 - protein, 430 aa, unidentified; identical to SEQ ID NO: 4002

SEQ ID NO: 9936 - protein, 420 aa, Petrotoga sp.; identical to SEQ ID NO: 5114

SEQ ID NO: 9937 - protein, 425 aa, unidentified
MFVFVLSKDKRPLSPCHQARARKLLKEGKAAVYRKYPFTIILKEEVNPSKPQPCRIKLDPGAKVTGIALIQGDRMIFGAELEHRGFRIKDSLESRRQLRRGRRGRKTRYRKPRFLNRTRPKGWLPPSLQSRVENINTWVNRLRKLCPVDSISVELVRFDTQQLENPEISGVEYQQGTLCGYEVREYLLEKYHRTCQYCGAKEVPFEIEHIVPKSKGGSDRVSNLTLSCHKCNQKKGNRSVEEFLKGKPEVLKRVKANAKKPLRDAAAVNAARWAVFNRLKASGLEVEAGSGGLTKFNRTKHELPKTHWLDAACVGKSTPSKLRMLVQKPLKIKATGHGTRQMCRTNKYGFPTRYVPHKKDVKGFQTGDIVKAVVTKGKKTGIYVGRVAVRSTGSFNISTAKGVIQGINHKYCRQIHKKDGYSYAT

SEQ ID NO: 9938 - protein, 447 aa, unidentified; identical to SEQ ID NO: 3915

SEQ ID NO: 9939 - protein, 490 aa, unidentified
MYVVYVLDRQGKPLMPTKRFGHVRRMLKTGKAKAISTKPFVIQLQYESTDFVQPLYGGTDPGRTNIGEAVLNNKGEVVYAAHLVTRNKEIPKLMADRAAHRRASRRGERLRRKRRAKANGTMTCFPEGRKLPGYKDGVLKLKGIINTESRFNNRKRPAGWLTPTARQCIQTHLNMVRNICKILPVTDWTLEYNRFAFMQLEDGSVRGWDFQNGRLKGYASKEDYIYALQGGVCACCGTPIEHYHHIKPRHKGGSNTPENLVGLCSVCHAEIHTGKRSLDRIGKYKEYAGAFIVNIAIPFIWDGIARMFGDKAHICEGQETAELRRANNIPKEHFADAVCIASIGSGITPQYDNNQPFELRQFRCHDRSRINAQVERTYMDGKTIVAKNRKPRFEQKWDALFDLQSKMTKEHGELAARRAVSKLVAKKSYRRYNASERIKPSAVFIFNNKKYLLRGQLTNGMYYRAFGEGTKNFPSRNCEVVSSGCSLTYM

SEQ ID NO: 9940 - protein, 266 aa, unidentified
VCSILPISSIVIEVAQFDTQKIKNPEILGKEYQEGDQLGFWNTREYVLARDGHKCQYCKGKSKDKILNVHHLESRKTGGDSPSNLITLCETCHKEYHKGNIDLKIKRGSSLRDAAVMGIMKWKLYEELRSRYDRVSMTFGYITKHNRIKYGIEKSHTSDAFVISMNINAKRIERQYLKRLIRRHNRQIHKMKILKGGKKKNNQAPFEVFGFRLFDKVLYNNKILFVYGRRKSGSFNIRDFNGENSKDVSRKKFKLIRGKRHPIILK

SEQ ID NO: 9941 - protein, 413 aa, unidentified; identical to SEQ ID NO: 2636

SEQ ID NO: 9942 - protein, 415 aa, Bacillus sp.; identical to SEQ ID NO: 2431

SEQ ID NO: 9943 - protein, 427 aa, unidentified
MHVFVLDKDKKPLAPCHPAKARRLLKSGRASVFRRYPFTLILHEIEAKDCVVPETQLKIDPGSQTTGLAILSENRIIWASELSYRGQQIKNDLEKRRALRRSRRHRKTRYRKPRFLNRTRPKDWLPPSLNHRVETTMTWVNRLRKLCPIVSIAQELVRFDTQKLQNPEVSGIEYQQGELLGYEIREFLLEKWGRKCIYCGAENLPLEVEHIHPKSKGGSDRVSNLTLACHTCNQAKGNRDIREFLSGKPTVLNRILKQAKAPLKDAAAVNATRWKLYQQLKETELPVEVGTGGQTKFNRTRLGLPKTHWLDAACVGKSTPDRLDVAVEKPLLVAAKGHGVRQRCRPDKYGFPRTHAPKAKSFQGFQTGDIVKATIPQGKFAGNYTGRIAIRFRPSFRLNAGVKPFDVHPKYLTTVHQSDGYEYRFSK

SEQ ID NO: 9944 - protein, 428 aa, unidentified
LKVFVLNMRGQPLMPCSPAKARHLLKAGKAVVKRRTPFTIQLRIATGETKQNVTLGVDAGAKHVGLSATTEKEEVFASEVELRQDITGLLAARLSLRRDRRHRKTRYRAPRFLNRVRSKHKGWLAPSVENRIQAHMSRIDAVCRLLPVTKIVIETASFDIQKIKDPSVEGTDYQQGDQLGFWNVREYVLFRDGHVCQHCHGRSKDKILNVHHLESRQTGGDAPNNLITLCETCHKAYHAGKIKLKVKRGQSFRAEAFMGIMRWTLLDRVRKAHPGLPVENTYGYLTKHTRITHGLPKTHCVDAYCIAGNLKAVRRGVYLHQRQMRKHNRQIHKFTVLSKRLEDGTKIGYRKLNQSPYLVHGFRLFDKVRCLVQIGFIFGRRSSGYFDVRRLDGVKLSPSISWRKLTLLEKRSTYLTELRKEDGASSPV

SEQ ID NO: 9945 - protein, 520 aa, unidentified
MNYLDFVLMVDKNKVPCIPIKESTAAYLLRHNKAKIINHDPTVIQRFDEYSADYEIRNIFELKIDSGYLNIGFSVSDSEHEYLAGQVNLLQGMSERLTVRASNRKFKRARLRYRKNKNVDYKTVHNSTYKNGNQDGWIAPSIQHKIDSHIRLIKKIAQWVPIDRIIIEVAKFDIQKMIADLDGRIISGKDYQNGEMKGYENVTAYVRDRDKHTCQMCLSSGKVKNKNNDTIEVHHIIPRAAGGTNRPSNLICLCHHHHRLVHSNNNNNKYFKELQNKKMPDTYKDSTFMNIVRYKIYNALCADFKDVELAYGYETKINRRLIGLPKFHYTDAVCLKEWKNISLTKFIYIVDQKRCNDRKMESFFDAKYIDIRDGKTKSGTELCYTRLDNASSWRTTCKNEVDNLRQYREKKITKGRKQRECHFYCLKPGDLIFINLGNHKGNLAEVKTMQIHKGKYKIFFTYKNQKVDNPTISLSPEEYGQLKKNECSKVKIVRTRRGMIWRKYNRLEYENTYKDQYDKN

SEQ ID NO: 9946 - protein, 413 aa, unidentified; identical to SEQ ID NO: 2636

SEQ ID NO: 9947 - protein, 416 aa, unidentified
MVYVLTQNNLPLMPCTEVIARLLLTQGKAKCVSRTPFCIKLNYQTTNYLQEITLGVDTGSSKLGTAAVTKSGIVLYTAQVEIRNDITGKMTQRSKYRRNRRNRKTRYRAPRFLNRSNSTKTNRFSPTVISKINSHLKEIAFVQSILSITKVILETASFDLHALKDPKVLKNKWLYQKGINYGFANTKAFVLFRDDYTCQNCKGKTKNIKLETHHIIFRSNGGSDEQENLIALCKSCHDKVHTGELNLKRTGKIKSKLKYATQMNSIRIQLLKLLPNAEETFGFITKENRQALNLSKKHHFDAVSIATQSSNLKFKTNLLLKKCVPDGDYQQFKGIRSEQKIPTNKILGFRKFDKVLYLKNLYFIKGRMSSGYAILMDIEGTKIEFTNPKTVKLVKCKRISDRKSWLIQERGLRPLP

SEQ ID NO: 9948 - protein, 420 aa, unidentified
MQYVYVLNKHGEPLMPCSPRKARLLLKQKKACVVKRTPFTIKLLYGSTGYKQPITLGVDAGSKHIGISATTEKCELYREEAIPRNDVVDLLSARRAFRRSRRNRKTRYRAPRFNNRVHSKHKGWLAPSVEVKIQEHITLIKRVCRILPVTLVRVETAEFDTQRLKAMLEGKPLPVGTDYQLGETYDEYNVRQYVLKRDNYTCQCCGAHPAKTKAVKLHVHHIETRRTGGNAPNNLITLCTACHKALHSGKVTLNGKKRGKPLKDAAFMGIMRKTLMERLLKELKIPVQETYGYITKYLREKHSIPKSHTNDARCISKNPLAIPCDTCYYTKAIRHQNRQLHKATILKGGIRKANQAPYTVKGYRLWDKVFYHGSECFITGRRTSGYFALKKLDGTVVSNSASYKKLRLLEVATNYITERR

SEQ ID NO: 9949 - protein, 430 aa, unidentified; identical to SEQ ID NO: 4504

SEQ ID NO: 9950 - protein, 413 aa, unidentified
MTSYSFVLDVNGKPLAPTKEQKAWFLIRKKRAALVSKYPMVIQLKKKIQENEICKDEIRCGIDDGGLHVGIALVQKCKSKNKVVFKGTIEQRNDVKHLMEVRRNYRRYHRYHKRYRQARFDNRKSSKREGRIAPSILQKRQATIRVIHWLNKWINITNYWLEDVSVDIRALTDGYQSYRWQYQRSNRLDENIRKAAILRDGGKCMECGKSNCRLEVHHIKPRRRNGSNTLDNLITLCESCHQKTEGQEELYMDRYFSLLKSSDHKNLNYAQHVMIGKMWLRKQLSGLGVLYLTSGGDTANKRIDWNIEKSHANDAVCITDLQPDTCDMKEWTMKPMRRQSKAKTDHVLGIHHRDLVEYTFKNGETHRGYVTALYPDQKAINFQSQTKHCKKVNARKCKLLWNYSKIYWFENAS

SEQ ID NO: 9951 - protein, 396 aa, unidentified; identical to SEQ ID NO: 4508

SEQ ID NO: 9952 - protein, 431 aa, unidentified
MPDKVYVISRLGHPLMPCSPAKARHLLDDGKAKVVKRTPFTIKLLYGSTEYTQPVILGVDAGSKTIGLSASTTKEELFAAEVMPRNDVVENLSTRREFRRARRNRTTRYRKPRFNNRVHSKNNGWLAPSVEVKIQEHITSIKRVCAILPISKIVVETAEFDLQLLKAVQDGKPVPEGEDYQKGEMYGSYDVRQYVLWRDNYTCTCCGVKGTDKKPVKLHVHHFESRKHGGNAPDNYGTLCEDCHKKLHLGIITGISLKTRKRPSTRDAAFMGIMRKTLMQRLITGLSIPVAETKGYITKAAREEILKLPKTHTNDALAIAQGRHGFGIREQAYVKPTNRIYTVRPVRHHNRQLHKATMLKGGIRKLNQASKYIFGFRLYDKVLYQGGECFVWGRRRSGSFLLRTIDGTKVKDGVGYRNLTLLERSTNYLIA

SEQ ID NO: 9953 - protein, 423 aa, Arthrospira sp.
MSNHIFVLDTNRKPLTPCKPGMARSLLKAGKASVFRRYPFTIILNKEVDANPEPLELKLDPGSKVTGIALKQGNHIIFAAELQHRGQQIKEALLSRRQLRRSRRNRKTRYRPARFLNRTRPEGWLAPSLQHRVDTLMTWVHRFRRLAPVGRIAQELVRFDLQLMENPEISGVEYQQGELQGYEIREYLLEKWGRTCAYCGAQNVPLEVEHIQPRSKGGSDRVSNLTMACHSCNQAKGNGDIRDFLSGQPDVLSRLLRQAKSPLKDAAAVNSTRWALFKALKATGLPVTTGTGGQTKFNRLRLNLPKAHWLDAACVGPVESLEVLTSKPLLILAKGHGTRQMCGTNKYGFPNRHRSRRQIHKGFQTGDMVTATVTAGKKIGSYLGRVLCRASGSFDITTASVRVAGISHKYCQPIHRKDGYAYA

SEQ ID NO: 9954 - protein, 424 aa, Enterococcus sp.; identical to SEQ ID NO: 5552

SEQ ID NO: 9955 - protein, 420 aa, unidentified
MQYVYVLNKHGEPLMPCSPRKARLLLKQKKACVIKRTPFTIKLLYGSTGYKQPVTLGVDAGSKHIGISATTEKHELYREEATPRNDVVDLLSARRAFRRSRRNRKTRYRAPRFDNRVHSKHKGWLAPSVEVKIQEHITLIEHVCRILPVTLVRVETAEFDTQRLKAMLEGKPLPVGTDYQLGEMYDEYNVRQYVLKRDNYTCQCCGAHSTKTKGVKLHVHHIETRRTGGNAPNNLITLCKACHKALHAKKVTLDGKKRGKPLKDAAFMGIMRKTLMERLRKELKIPVQGTYGYITKYLREKNGIPKSHTNDARCISKNPLAIPCDTCYYTKAVRHHNRQLHKATILKGGIRKANQAPYIVKGYRLWDKVAYNGTECFITGRRTSGYFALKELDGTVVSNSISYKKLRLLEAATNYIIERK

SEQ ID NO: 9956 - protein, 414 aa, unidentified
MPTFKKYAFVLDAEGKRLDPTIEQNAWRLVRQHKARLVSKFPMVIQLNKVVDNPNNDEIRCGIDDGANHVGLALAQKCQTRNKVLFKGTIEQRKDVKHLLTVRRGYRRYHRYHKQYRPARFLNRASSRRSGRLMPSIIQRKQAILRVIDRLCQWINIDGYWLEDVKIDIRALTDGYKPYRWQYQKPNRLDNNLRLAAIHRDGCKCVECGKTKTRFEVHHITPREVGGADTISNLITLCPKCHAKTFGRESQFADRYYVFIGSTGHVEGLADAQRVMQGKHWFREQLQQRGSLVLTTGGNTANKREDWDIAKTHSNDAVCITDLQPENIAIEEWTIKPMRRKNKAGVDEVCGFHHRDYVTYTYRNGETHTGYVTAMYPELHALNFQSPTKHCKKANALKCKLVWRYSKIYWFKYA

SEQ ID NO: 9957 - protein, 431 aa, unidentified
MPNKVYVINKHGRPLMPCSPAKARHLLDAGKAKIKKRTPFTIQLVYGSSGYTQEVILGVDAGSKTIGVSASTKKEELFAANVIPRNDVVDLLSTRRESRRARRNRKTRYRKPRFDNRVRSKHKGWLAPSVEVKIQEHITSIKRVCRILPVSKVVVETAEFDLQLLKAIADGKPVPQGEDYQKGEMYGHYNVRQYVLWRDNYTCQCCGAHATKKKEVRLHVHHLESRKTGGDAPGNLVTLCDSCHEKLHKGLIAEKDFKKRKRRSTRDATFMGIMRKTLMQRLCSELPIPVVETRGYITKTTREKLLVLPKSHTNDALAIAQGKQGFNVGYLPGILQIDKIYTIRPVRHHNRQLHKAAILKGGIRKSNQAGKYVFGYRLFDKVQFNEQDCFIWGRRTTGIFTIKTINGKMIKDGISFKKLKLAEKSTSYLIA

SEQ ID NO: 9958 - protein, 442 aa, Anaerostipes sp.; identical to SEQ ID NO: 2903

SEQ ID NO: 9959 - protein, 431 aa, unidentified; identical to SEQ ID NO: 9952

SEQ ID NO: 9960 - protein, 418 aa, unidentified
MLNNQKEYAFVLDTKGKKLDPTIVQNAWRLVRQKKATLIAKRPMTIQLKKVIDNPNDDEIRIGIDDGAKHVGLALVQKCKTKNKVIFIATMEQRNDVHKLMEQRKNYRRYRRYWKRYRKARFSNRVSVRRKGRIAPSILQKRQAVVRIFDRLNKYIRINSIYLEDVAIDVRVLTDEKRLYSWQYQQSNRLDENLRKATILRDRCQCQMCGKRNCRLEVHHITPRRMNGANTIGNLITLCADCHSKVTGCEMEFAEQLYSKIGKKKNNAGLQYSSHVMVGKTWLREELSKRVPVLLTTGGDTANKRIDWNLEKSHEIDAICITNLEPESVGVKSWNIKPLRHQRKTMKVKEILGFRHRDIVCYTFKNGEYHEGYVTALYPSEGKQKEGLNFLSPTKHCKRVNPKKCQRLDRPDKFLWLV

SEQ ID NO: 9961 - protein, 431 aa, unidentified
MPNKVYVINKHGRPLMPCSPAKARHLLDDGKAKVKKRTPFTIQLLFGSTGYTQEVILGVDAGSKTIGLSASAETKELFSAEVKPRNDVVDLLSTRRESRRARRNRKTRYRKPRFDNRVRSKHKGWLAPSEEVKIQEHITAIKMVCRILPVSKVVIETAEFDLQLLKAIADGKPVPQGEDYQQGEMYGHYNVRQYVLWRDDYTCQCCGAHATKKKEVRLHVHHLESRKVGGDAPDNQVTLCESCHEKLHKGLITEGDFKKRKRRSTRDATFMGIMRKTLMQRLCSELPIPVVETRGYITKTTREKLLVLPKSHTNDALAIAQRKHGFNVGYLPGIAQIDKIYTIRPVRHHNRQLHKAAILKGGIRKSNQAGKYVFGYRLFDKVQFNEQDCFIWGRRTTGIFTIKTINGKMIKDGISFKKLKLLEKSTSYLIA

SEQ ID NO: 9962 - protein, 404 aa, unidentified
LRVFVLNKRGKPLMPCSPAKARLLLKEKKAIVVRRTPFTIQLTIATGETKQPVSLGVDAGYKHVGLSASTEKAELYASEIELRQDITDLLSARRELRRARRNRKTRYRAPRFDNRIRTKRKGWLAPSVENRINAHLSRIEAVLRLLPITKITVETASFDTQLPKNPDIAGKEYQEGEQLAFWNVREYVLFRDGHVCQHCHGRSKDPVLNVHHLESRRTGGDSPGNLITLCETCHKALHRGEIKLSAKRGQSLRAEAFMGIMRWEVLNRLKLSHPELEVNNTYGYRTKHARIANGIAKSHCADAFCIAGNLGAKRLGEFFFQKQTRRNNRQIHKFSILKDGIRKRNQAPFEVNGFRLFDKVACKGEEGFIFGRRSSGYFDVRKLDGTRISAGISYKKLHLLEKRQ

SEQ ID NO: 9963 - protein, 450 aa, unidentified; identical to SEQ ID NO: 2935

SEQ ID NO: 9964 - protein, 493 aa, unidentified
MAAVYVISASGKPLMPTTRCGHIRGLLNAGKARVVEREPFTIQLKYETPDVTQPLYLGIDPGRTNVGSAVVREDGECVFTAQLTTRNKDVPKLMKARKQFRMAHRRLKRRCKRQGRAKAAETLSQKGEFQRLLPGYEEPILCKGIRNKEARFNNRQRPAGWLTPTANHLLLTHLNMVKKLQKLLPITDVVLEVNRFAFMAMENPSIRRWQYQQGPLYGKGSVEDAVYAQQDGHCLFCGKPIAHYHHVVPQHKNGSETLENRVGLCNEHHDLVHKDRAWDAKMKETKAGLNKKYHALSVLNQIIPALTEQLTAMFPQHAFVTTGKDTADFREDYGIAKEHHLDAYCIACSVLAEPTKVAAPTGKPHRLMQFRRHDRQVCHKENIKRVYLSEGKAVATNRHKAIEQKDDSLEEFRKTHTQQEVSALTVKDHQPVYKDMRRFMPGGVFLFNGKVHTLQRSHGRYKGMPFYYIDTDGSKNHAKGCIFLQQNCGLRWV

SEQ ID NO: 9965 - protein, 470 aa, unidentified; identical to SEQ ID NO: 2825

SEQ ID NO: 9966 - protein, 344 aa, Streptomyces sp.; identical to SEQ ID NO: 7891

SEQ ID NO: 9967 - protein, 518 aa, unidentified
MTPKKRKEASRMSEYIYVLGMDGDPQMPTKRKRHVEKLLQAGRARVFRQIPFTIQLTYENKPVLQPVTIAEDPGRSNIGMAVVSLSGELLSAAVVQTRNKEIVKLMEKRKQHRRASRNGERKARQRLAKKCHTMIKTGFLMRKLPMYGKDKRVRCNVIKNTEAKFCNRKREDGWLTPSAEHLVRTHINLIHKMQKFLPITDVAIEINRFAFLSLEDPSISGVDFQNGPLKGYDDLNAAVEDLQDGHCLMCNSPIGHRHHIVPRSMQGSNTIGNIAGLCCKCHERVHKDARFEDRLKKKKAGLNKRYAAVSVLNQAIPFICKRLEQEFGKEHVHYCSGRDTSMVRRSLGYHKTKEEQLHEVDAWCIAVLSLQHVPEKAPEFDHVHEILQFRRQDRSRIKAQTSRAYYHEGKKIAKNRKKAEGQKDDSLQGWRKRQVERYGEEQTRKMISQLKVKKSIRRYNRLDRLMPGAVFYYQGVRYVMRGQHSNGQYLQAVGMRDKDFPAKKCKIVVHNQGLVFVS

SEQ ID NO: 9968 - protein, 408 aa, Bacillus sp.
MFVYVLNHHGEPLMPCSPRKARKLLQQQRAKVVQRTPFTIQLLYGSSGYKQPISLGVDAGTKQMGVSATTETNVLLEGEVQLRTDIQELLATRLQFRRARRNRTTRYRKSRFLNRKRNVGWLAPSVQNKVDAHIKLVKMIHKILPLTSITVEVAQFDTQLLKNPSIEGEAYQQGDQMGFWNAREYVFYRDRHTCQWCKGKKKDLILNAHHIESRKTGGDSPDNLMTLCETCHDELHAKGLEHLFKKKSQSFRDASQMTVMRWFIYNGLKNIYPHIQLTYGYLTKHTRISNRLVKEHAVDARCISGNPLAKPTASTYLWKFVRKNNRQLHKATIAKFGKRKSNKAVRFVKGFQLFDKVTYEGKECFVFGRRSSGYFDLRSLNGTKIHASASYKKLRLTECATTLLCERR

SEQ ID NO: 9969 - protein, 413 aa, unidentified; identical to SEQ ID NO: 2636

SEQ ID NO: 9970 - protein, 245 aa, unidentified
GSYNAFQYVLWRDNYTCICCGVRGTPKNPVRLHVHHFESRKYGGNAPDNHGTLCDDCHKKFHLGIIADVKLKTRRRQSTRDAAFMGIMRKTLMWKLRTELFIPVAETKGYITKATREKLPVLLNSHTRDALAIAQGRHGFSIKEYAYVEPANHIYTVRPVRHHNRQLHKASILKGGIRKRNQASKYVFGFRLYDKVLYQGKACFVWGRRTSGTFLLRTIDGIKVKDGVSYRNLTLLERSSNYLIA

SEQ ID NO: 9971 - protein, 459 aa, unidentified
  source 1..459: note = uncultured beta proteobacterium
VVFVLDKRGKPLMPCTERRARILLERRRARIHRLYPMVIRLVDRFAEDSEFQKLNLKLDPGSKTTGMALNCVDDSTEAVLSLFELMHRGALISKKLEQRRALRRTRRNRHTRYRQARFLNRGNKQKGWLAPSLMHRVNTTMAWIDRIMRWSPVSLLTQELVRFDTQKLENPEISGVEYQQGTLLGYEVREYLLNKWNRACAYCDAQNVPFEVEHIHPKSKGGSNRVSNLALACRSCNNKKDNLPIDVFLAKDQSRLKRILVQAKAPLKDPAAVNSSRWRLFNELKATGIVVKTGTGGQTKFNRVQNKIPKTHALDAACAGHVEFVSDWQKPTLSIKCSGRGTYARTKLDSYGFPRGYCLRQKQVHGFATGDIVRAKVTKGKKSGTYFGKVAIRESGSFNISTNAGVIQGVSHQYCKVVQRADGYGYLFNQDSKQSRVQGIALQSALSLPALKDGVSRAN

SEQ ID NO: 9972 - protein, 406 aa, unidentified; identical to SEQ ID NO: 7246

SEQ ID NO: 9973 - protein, 420 aa, unidentified
MVYVIGKDGKPLMPIRRHGKVRRLLNSGRVKVVSRDPFIIQLLFETKKELSDLVLGVDTGSSKIGCAVVTPKNEVLYISEVKIRNDITTKMERRKVYRRERRSRKLRYRKQRFLNRGNSNKKDRFSPTMVSKINSHIKEIEFIKNILPISTIVLETSTFDPHLLKMQEGGNPFNRHWGYQRGPNYGFANAKAACLNRDNYTCRCCKTKKGTLHAHHIVYRSNGGSDTLDNLITLCENCHKKLHDGKLESFESKLKGKKKGQLKYATQMNSIRLQLLKYYPEAIETFGFITKENRQLAGLEKTHYNDAVVIAMGSSDKPKFRIDILYKKQHIAKGQYKLYQGQRSHQKLPRGKVKGFLNKDIVEYRGGFYLIKGLMSSGYCKLSDIDDIEQKFENPKTVKLSSIKRISARRTTRCISQKII

SEQ ID NO: 9974 - protein, 273 aa, unidentified
VLTRKGSSAVKAAKACVVKRTPFTIKLLYGSAGYKQPITLGVDAGSKHVGLSASTEKRELYREEFTPRNDVVDLLSTRRQNRRSRRNRKTRYRAPRFDNRVHSKHKRWLAPSVEVKIQEHITVIKRICRILPITLVRVETAEFDTQRLKAMLKGKPLPVGTDYQLGEMYDEYNVRQYVLKRDNYTCQCCGAHPTEKKPVRLHVHHLESRHVGGNAPNNLITLCVACHKALHEGKITLDKGKKRGKPLRDAAFMGIMRNTLLARLKDELNIPVK

SEQ ID NO: 9975 - protein, 408 aa, unidentified
MVYVQDINGKPMMPTTRHGKVRRLLKDKKAIVVNLCPFTIKLMYVTSDYKQEIVLGVDAGTKHVGLSATTKSKELYSSEVILRNDIVDLLSTRRELRRSRRNRLRYRKPRFDNRIKSKRPGWVAPSVKYKVDAHIRVIDNVCSILPISRIVIEVAQFDTQKINNPNISGKEYQEGDQLGFWNVREYVLARDGHKCQHCKGKSKDPVLNVHHIESRKTGGDSPSNLITLCETCHKEYHKGNIDLKIKRGSSLRDAAVMGIMKWRLYEELRSRYDRVSMTFGYITKHNRIKYGIEKSHVFDAFVISKNFDAIRLGYYYKVRLVRRHNRQIHKQKIPKGGIKRPNQSPFEVFGFRLFDRVMFENSYYFIFARRKTGSFNIRDIDGKNQRDITYKKLKLSRCKRFMVQKEMD

SEQ ID NO: 9976 - protein, 419 aa, unidentified
MKKRKDSRRARRTNGRRCRRQRRAKANDTLSTKRVKQTTAQNGSASKRAKEIGVIRRRLPGCEKDVLCIGIKNKEAKFNNRTRPEGWLTPTANQLLQTHINLVKKIQKFLPISDVVLETNKFAFMQLDNPNIQKWQYQQGPLYKKESLESAVSEMQEHHCLFCKKQIDHFHHVVPQHKNGSNTIGNIVGLCARHHDLVHKETAWQEKLAKKKTGLNKKYGALGVLNQIIPALTKELGVLFPKHFFVTTGKSTYDYRAAHGVCKDHWLDACCIACSVLPNDVCDSSINNRVPYELKQFRRHDRRVLHKENMNRVYTLNSKKAATNRHKATEQESASLEEFRKEHPDDVCKLKVKEHHPTYRNMNRNYPGSVFFVDKQVHVMQGIARSKDGKATTYKDTNANLITAEGCKFVAKNSGILFV

SEQ ID NO: 9977 - protein, 413 aa, unidentified; identical to SEQ ID NO: 7541

SEQ ID NO: 9978 - protein, 376 aa, unidentified
MEKRELIEARAAFRRSRRYRNTRYRRPKWKHHTKRVYNEVPDSKGRHWRKVKISTQSPRPEGWLPPSLQSKCDHHMGIIDRYLAFLPDCISKNLVIEAGRFDMARMQDPSIHGEMYQRGPMYDAENLKAYVFARDGYRCTCCGQKAGSIRKDGTAVKLLVHHVLFRSRGATDNPKYLASVCNACHTAAAHRPGGKLHQWMLEAKEFTRGLRDATFMNILRRRLFTKYPEAAFTYGNITAADRKRLLLDKSHANDAVAISLFGKDVSSVKVACQTLHYRQVRRYKRSLHEANPRKGCKAPNTKAVRNAKNTSEVKGFHLWDTVKAGGQKLYITGFTGTSAYLTDQYKNYVSPPGKNYRQWTLSKITRLHPNGGWIMF

SEQ ID NO: 9979 - protein, 443 aa, unidentified
MRDYNLKGKLLMVFVLNRSKKPLNMITNAEARILLRKKLAVIHKIYPFTIRLRDNSCVSQDRAYTVKLDPGSRTTGVAIIDDTNQVVMLAEIEHRGSVVKKKLDSRRVVRHHRRQRKTRYREARFDNRVKPKGWLAPSVKSRADNVINFIKKYKKFLNITKVEIERVSFNVSQMSSETKLYGADYQQGPLYQKKLRDFIFSRSNGKCSYCGAKAEEIDHIIPRSNGGTNSTYNLVAACKSCNQMKSNLSLKEFGKLVGKDFSKIKAKALPKDAAIVQSARNYMAREISKFVADTTTHDAWLTKYNRNELGLSKEHYYDALSVGNLQDYKFLTDKVLQISAKGRGSRQMCRVDRYGFPRTSAKASKSVRGFQTGDIVKAIVPSGFKKRGEYLGRVIVRSNGGFNIETNEETTQGIGYKYCRLIQRGDGYSYKYKERNRVSVAKI

SEQ ID NO: 9980 - protein, 414 aa, unidentified
MPCSPAKARLLLKEKKAIVKRRTPFTIQLTIATGETKQPVGLGVDAGYKHVGLSASTDKAELYASQVELRQDITDLLSARRALRRARRKRKTRYRAPRFNNRIRTKRKGWLAPSVENRINAHLSRIEAVLRLLPVTKITVETASFDMLLLKNPDIAGKEYQEGEQLGFWNVREYVLFRDGHVCQHCYGRSKDPVLNVHHLESRRTGGDSPGNLITLCETCHEALHRGEIALKTKRGHSFRAEAFMGMMRWEVLNRLKASHSELEVNNTYGYRTKHARIVNGIDKSHCADAFCIAGNLGAERLCEFFFQKQTRRNNRQIHKLSILKGGIRKRNQAPFEIKGFRLFDKVACKGEESFIFGRRSSGYFDVRKLDGTRISAGISYKKLRLLEKRRTYLTEIRKEEALPPLPEGRGLRA

SEQ ID NO: 9981 - protein, 434 aa, unidentified; identical to SEQ ID NO: 5659

SEQ ID NO: 9982 - protein, 411 aa, unidentified; identical to SEQ ID NO: 6901

SEQ ID NO: 9983 - protein, 415 aa, unidentified; identical to SEQ ID NO: 6534

SEQ ID NO: 9984 - protein, 469 aa, unidentified
MVITLDKRKRPLGVCTERRARILLEKKRACVYKTFPFVIILKDKDTREIKPEGTYRVKIDPGAKYTGIAVVRNEDNAVVFFQQIEHRGDQVKKNLQTRSQCRRNRRNRETRYRRPKWGNKQLPEGKKPQYDSSRPDGWLPPSQRSIGDNVISWVIRLKQLFNITDCSFEAVRFDSQLMDNPDIEGVQYQQGTLAGTEIREYLLEKYAHTCQYCGGESNDSIMEWEHVIPRSRGGSDSVKNATLSCHTCNQEKGSMKLEEWLESINVKPKKTKLDKARLKGIKAVMNGKVQKNSNRYSAWAGILRRYEENGLFAIFDDVECSTGGKTKYNRTKLNLPKDHHYDALCVGTVPKKGFKDLTNGYFLYAEAMGRGTHFRGKINKCGIIIQKLGKTPKRIFGFQNGDIVTADVPKGKYKGKHTGRVSTRASGYFDIKTTEGERITVNYKNCKLKQYGDGYRYSYKRTPLGDSSR

SEQ ID NO: 9985 - protein, 425 aa, unidentified; identical to SEQ ID NO: 3151

SEQ ID NO: 9986 - protein, 423 aa, unidentified
LSNYVLVIDTNKQPCNPIHPGTARKLLNDGKAAVFRRYPFTIILKTISTKPIKPIQIKLDPGSKTSGIALIQSNKVIFGAELTHRGATIKASLESRKSLRRARRSRHTRYRQARFLNRTRCQQWLAPSLQHRVETTITWVNRLIKFVPVTCISQELVRFDLQQLENPEISGIEYQQGELLGYEVREYLLNKWDRRCSYCDVENVALQVEHIHALSRGGTNRISNLCLACDRCNKKKGTQDIEKFLAKKPDVLKRILSQTKRPLKDASAVNSTRWALFNRLKETGLPISTGSGGLTKFNRTRLGLPKTHWLDAACVGKVETLEILTNKPLLIKATGHGTRKMCGTNKFGFPIRHRERKKFHFGLQTGDIVKALVITGKYIGNYVGRIAVRAKGSFSVTHKLGKFDTSHKFCKTIHKNDGYEYSI

SEQ ID NO: 9987 - protein, 419 aa, Geobacillus sp.
LFVYIINKHGKPLMPCSPRKARLLLKQKKAKVVRRTPFTIQLLYGSSGYKQPVSLGVDMGTRHVGISATTKKDVLFEAEAQLRTDIVELLAIRRQFRRSRRNRKTRYREARFLNRRKPEGWLPPSIQHKINSHIKLIDLVHNILPATSVTIEVAAFDTQKLKNLNIRGVEYQQGEQMGFWNVREYVLYRDNHTCQYCKGKKKDPVLQVHHIESRKTGGDSPDNLITLCKTCHHEIHEKGLEHIFQRKRPPMRDASQMTAMRWAMFSRIREKYSHANITYGYITKCIRIANGLSKSHMVDARCISGNPLAKPSGTVYLLKFVRKNNRQLHKATILKGGKRKSNKAPRFVKGFQLFDKVVYERKECFIFGRRSSGYFDLRLLDGTKVHASASWKKLKRVEHASTLLIERRKGDSSPTFALA

SEQ ID NO: 9988 - protein, 442 aa, Anaerostipes sp.; identical to SEQ ID NO: 2903

SEQ ID NO: 9989 - protein, 441 aa, unidentified; identical to SEQ ID NO: 6268

SEQ ID NO: 9990 - protein, 442 aa, unidentified; identical to SEQ ID NO: 2637

SEQ ID NO: 9991 - protein, 414 aa, unidentified
MPCSPAKARLLLKEKKAIVVRRTPFTIQLTIATGEAKQPVSLGVDAGYKHVGLSASTEKAELYASEVELRQDVSDLLSARRALRQSRRSRNTRYRAPRFDNRIRTKRKGWLAPTVENRINVHLSRIETVLRLLPVTKITVETASFDTQLLKNPDIAGKEYQEGEQLGFWNVREYVLCRDGHVCQHCYGRSKDPVLNVHHLESRRTGGDSPGNLITLCETCHKALHRGEITLKAKRGQSFRAETFMGIMRWGVLNRLKASHPKLEVHNTYGYRTKHARIANGIAKSHCADAFCIAGNFGAKRLGEFFFQKQTRRNNRQIHKLSILKGGIRKRNQAPFEVKGFRLFDKVACQGEEGFIFGRRSSGFFDVRKLDGTRISAGISCKKLHLLEKRRTYLTEIRKEEALPPLPEGRGLRA

SEQ ID NO: 9992 - protein, 524 aa, unidentified
MEILRIDWKDICPTGRSGLPQKELFMRPVYVLDMNGKPLMPTCRFGKVRRMLKSGEAKVVDTLPFTIQLDRPTKTHVVQSVTLGCDPGRTNIGLAAVRSDGTDLYRSHCETRNKEIVDLMDARRAARRASRRGERLARKRLAAKHETATTFPDGRKLPGCEKPIMLKDIINTEARFNNRVRPAGWLTPTATQLLWTHLNLIKRISRILPVSDIALEINKFAFMQLDEPDKNKWNIDFQHGPLYGTGGLKAAVRQLQNNTCLLCQENVIEHFHHLIPRSKRGDNTINNIAGLCQKCHEAVHKSADTAEKLSTLKKGQTKRYGGTSVLNQIIPKLVEELGKTYHEHLHLTYGWQTKEFRTKHKLEKTHDTDAYCIAAGTMQTVKPNIRTDVYEIKQFRRHNRANIHHQTERTYKLNGQTVARNRRKRTDQKTDSLAEWFENTVKQYGQQKAEHLRAGLKVRKSTRYYNFKDRVMPGAVFQYEGNRYVVTGQLSGGQYYRAYGKGNQNFPAKKIRIISLNRGLVYVA

SEQ ID NO: 9993 - protein, 490 aa, unidentified
MYVVYVLNHQGKPLMPTKRFGHVRRMLKTGKAKAISTKPFVIQLQYKSTDFVQPLYGGTDPGRTNIGEAVLNNKGEVVYAAHLVTRNKEIPKLMADRATYRRASRRGERLRRKRRAKANGTMTCFPEGRKLPGYKDGVLKLKGIINTESRFNNRKRPAGWLTPTARQCIQTHLNMVRNICKILPVTNWTLEYNRFAFMQLEDGSVRGWDFQNGRLKGYASKEDYVYALQGGVCVCCGASIEHYHHIKPRHKGGSNTHENLVGLCSVCHAEIHTGKRSLDRIGKYKEYAGASIVNIAIPFIWDGIARMFGDKAHICEGQETAELRRANNIPKEHFADAVCIASIGSGITPQYDNNQPFELRQFRCHDRSRINAQVERTYMDGKTIVAKNRKPRFEQKGDALSDLQSKIAKEHGELAARRAVSKLVAKKSYRRYNASERIKPSAVFIFNNKKYLLRGQLTNGMYYRAFGEGTKNFPSRNCEVVSSGCSLTYM

SEQ ID NO: 9994 - protein, 501 aa, Nocardiopsis sp.; identical to SEQ ID NO: 8413

SEQ ID NO: 9995 - protein, 467 aa, unidentified
MSTCVCVLSNNGERLMPTFRLGKVRRLLKDGKAKIVKHHPFTIQLLYDSKTNTQPIEICEDVGYNYIGISVKSESHEYVSAQYDTLQDEKACHDSCRKLRRTRRNRLRYRQKRFDNRKRKRSEGWLAPSLRHKKELNVNVVKMYCAVMPITHATIEVGSFDTMLVKAIQEGKAIPEGADYQKGPRYNLATLREAVFYRDNYVCKVCGRKATEGAILHMHHMFYWKGRHGDSLDELLTVCEKCHTPANHQKGGKLYGFGENVKFADLSGAAFMNTVRWQIVNELYAAFGKDFVTVTYGAMTKEKRIALRLEKSHNNDAYAMGEFHPNCRCTFEHYEKVRRNNRILEKFYDSRYIDIRTGEIATGKKLFNGRINRNHKKDSENLHKYRGKRLYKGHRALVRKKVNFNPGDLVSLNGEVLVVHGTHTNKKGAVNVEFKTPAKNGRKSASLKKLKIVKATSSIHPAWEKVS

SEQ ID NO: 9996 - protein, 628 aa, Streptomyces sp.
MRHVRSLNSNVTHTTPHSGKSMRRCIRGNPTGTTTRSSYPARSACTPRPAAHSVGTPREGRSLAPSYRVTSPGHHDLRIGGGASMTTFFTGEQTHQAVLPQQPALESAGADTPGSRDETARGLPATEPDTGVGHGRGETDAVRTGTRRRHARGAASAAPTAETRSGDAPHPAASRVFVLAKGGEPLMPCHPARARELLGSGRAVVVRRAPFTIRLKHRGCADSAVPGVQLRLDPGSKATGIAVTDERARSTSTGQAAVERRGLIAIELRHRGRQIHSAMTRRAAYRRRRRSANLRYRAPRRDNRSRPDGWLPPSLRHRIDSTMSLVARLCRYAPVREIHVEQVAFDTAAIAASPSADARDIREPAPAGSEIREFLLATWKRSCAYCGAAGVPLNIEHVRPRSRGGSDRVTNLVLACIPCNQAKGTATVDEFLADRPDRLKNVTAQLRKPLHDVAAMNTTRLVLVKALATRGVPVHAWSGGRTAGNRLAMGLPKSHTLDALANGLMDRERGDRIVRVPAQILVVRSTGRGSYARTTPDRYGFPRLQRPRRKVQHGYATGDLVVAVVPRGKWAGKWVGRVAVRTSGQHRITTLTSRFDVSYRNLRLLQRADGHAYGFTEEIRWSEETGPA

SEQ ID NO: 9997 - protein, 406 aa, unidentified
MVYVQDINGKSLMPTTRHGKVRRLLKDKKAVVVNLCPFTIKLMYITPDYKQEIVLGVDAGTKHVGLSATTKSKELYASEVILRNDIVDLLSTRRELRRTRRSRLRYRKPRFNNRIKSKRQEWIAHSVKYKIDAHIRVVEKVYSILPVSHIIIEVAQFDTQKIKNPDISGKEYQEGDQLGFWNVREYVLTRDEHKCQHCKGKSKDKILNVHHIESRKTGGNSPSNLITLCKTCHKEYHKGNIKLKVKRGTSLRDAAAMGIMKWKLLDKLKSLFPNVSMTFGYITKYNRIHNNIEKSHISDAFVISKNFKAKRLGYYFKEKLVRRHNRQIHKTKILKGGKKKMNQAPFKVFGFRLFDKVEFQGNEYFIYARRLSGYFNIRDINSENKKDVTYKKLTYIGHGLVSVETE

SEQ ID NO: 9998 - protein, 512 aa, unidentified; identical to SEQ ID NO: 4350

SEQ ID NO: 9999 - protein, 442 aa, unidentified
MSTSVFVLDKKHRPLMPCRPARARRLLRAGRARVVKRFPFVIRLVDRTVEQSEVQPVLIKLDPGSRETGAAVVRDDGKKRHHALAFFVIEHRGGAIRDALKARSAFRRRRRSQNFRCRSPRFLNRVKPKGWLPPSLRHRVETTLSFVRRMCRYLPVSGIATELVKFDSQKLQNPEVSGVKYQQGTLFEYEVREYLLEKFGRKCVYCGAEGVPLNIDHVVPRAKGGSNRVSNLVLACVSCNQKKGARSLEDFLKGKPEVLARVRRELKTPLRDAAAVNATRWVLFNELKATGLPVETGSGALTKFNRHAFGVEKEHWLDALCVGRLNGAVTRKGLNVLEIRCMGRGSRQRTRLTKYGFPRGYLMRQKCVHGFATGDMVEANVPKGKKAGLWRGRVAVRVSGSFNIQTPKGVIQGVGWKHCRLISHNDGYGYAWLGHAPHSSPA

SEQ ID NO: 10000 - protein, 425 aa, unidentified
MVYTLNKDGQPLMPTDRHGKVKHLLKDGKAKVVKRCPFTIKLLYESTTHTQNLTLGVDTGSGTVGAAVSKDNGDIVYMSEVVVRNDITDKMTQRSKYRRNRRNRKTRYRKARWLNRKNSIKPDRFSPTMISKFHSHIKEIEYIRSILPITTMVFETGQFDTHLMKNPSLAGPDIRHWGYQKGSNYGFENTKAMVLNRDGYTCQYCKDRHKDRKLEVHHIMFRSKGGSDEESNLITLCRTCHKDLHSGKIRPDFKGKTKGTLKYATQMNSIRKQLFRSYPEAAETFGYITKANRLAIGVAKGHYYDACTIATQGKPFIVKTSLYKKKCVSDGDFQKTKGTRSEQPIVTDKICGFRKFDKVQYFGKEYFIKGRMSTGYAILMNIDGKKADFSTMPKGCKIPKMTKLKRVEARTTWMVTAVEVTPNIA

SEQ ID NO: 10001 - protein, 493 aa, unidentified; identical to SEQ ID NO: 5942

SEQ ID NO: 10002 - protein, 512 aa, unidentified; identical to SEQ ID NO: 5811

SEQ ID NO: 10003 - protein, 424 aa, Moorena sp.
MRVFVLDKNKKPLDPCQPARARILLKQGKARVLKRYPFTIIMPELEVKNCVTHEHQLKIDPGAKTTGLAIVQDNKVVWGAELTHRGFQIRDALISRRRLRRSRRNRKTRYRQPRFLNRKRSVGWLAPSLMSRVHNILTWTKKLSRLCPIVGISQELVRFDTQKMENPEISGVEYQQGTLYGYELREYLLEKWHRQCAYCGAANTPLEIEHIKPLARGGSNRVCNLAIACHKCNQTKGVQEIEQFLSGKPSVLKRVLAQAKKPLANAAAVNSTRWKLYNHLKSTGLPIETGSGGLTKYNRCRQNLPKTHWLDAANVGKVDNLYIESYQPLLITAKGHGTRQMCRTNKFGFPTRYVPRYKEVKGFQTGDIVKAIVTKGKKIGTYTGRVATRQTGSFNISTKPGLVQGISHKYCSVIHRKDGYYYSL

SEQ ID NO: 10004 - protein, 422 aa, Petrotoga sp.; identical to SEQ ID NO: 5403

SEQ ID NO: 10005 - protein, 465 aa, unidentified; identical to SEQ ID NO: 3603

SEQ ID NO: 10006 - protein, 496 aa, unidentified
REREREHCSPSFPPFFPVPLLQTPPPLPFSLLLREGKAKVVKTKPFTIQLLYESTEYTQPLYGGTDPGRTNIGEAVLDQCGTVQYAAHVESRNKDIPKLMENRAAHRSASRRGERKRRQRRAVANGTITFPLQKQWILPGCQKPITNKFIINSEAKFLNRKRPANWLTPTTNQLVQTHLNMVKKICSILPVTDWTLEINKFAFMLMEDGTIRGVDFQNGRMKGYPDVEAYIYAIQDGKCPFCGKTIEHYHHIKPRSEGGSNRPENLVGLCSDCHARIHKGDTEMAGLIDKLGEQKKYAALSVLNQAIPYIYQGLVEIFGEEHTHICYGWQTKEMYTKLKIPKTHSNDAICIAALGSGVVPPIQMTNPYEVKQCRRHNRAIVKAQRERTYKLFGETVAKNRHPRFKQEGPSLEDFVESIPAAYRQQVISVLKVTPSKRYYNTMDRDLPGTVFYYQGHRYVKSGQSSGGKDLRAYGMGSKNFPSAKVSIVPSGGLVYL

SEQ ID NO: 10007 - protein, 442 aa, unidentified
MVTVQQSTHHLPFGRVFIRRNLFMVYVISQDSKPLMPCSNPIARLLLKQGKAKVKRREPFTIKLIYETTDYTQDLTLGVDTGSGTIGAAVSKDNGDIVYMSEVVVRNDITDKMTQRAKYRRNRRNRKTRYRKARWLNRSNSIKKDRFSPTMQSKFHSHVKEIEYIQSILPITEMVFETGQFDMHLMKNPSLANPKVRPWGYQKGTNYGFENTKAMVLNRDNYTCQCCKGKHKDSKLEVHHIVFRSQGGSDEESNLITLCHTCHKDLHSGKINLKLSGKVKGNLKYATQMNSIRKQLFRLYPNAIETFGYVTKANRLHLGVDKEHYYDACTIATQGNAFNVKSDLYKKKCVSDGDFQKTKGIRSEQPIVTDKICGFRKFDKVRYFGKDYFIKGRMSTGYAILMDIDGNKIDFSTMPRGYKTPKLSNCKRITARSTVMTQVKVV

SEQ ID NO: 10008 - protein, 414 aa, unidentified
MPCSPAKARLLLKEKKAVVVRRTPFTIQLTIATGETKQPVSLGVDAGYEHVGLSASTEKAELYASEVELRQDVSDLLSARRALRQSRRNRKTRYRAPRFDNRIRTKRKGWLAPSVENRINAHLSRIEAVLRLLPVTKITVETASFDMQLLKNPDIAEKEYQEGEQLGFWNVREYVLFRDGHVCQYCHGRSKDPVLNVHHLESRRTGGDSPGNLITLCETCHKALHRGEIKLRAKRGQSFRAETFMGIMRWEVLNRLKASHSKLEVNNTYGYLTKHARIKSGITKSHCSDAFCIAGNLGAKRLGEFLFQKQTRRNNRQIHKLSILKGGIRKRNQAPFEIKGFRLFDKVACKGEEGFIFGRRSSGSFDVRRLDGTRISAGISYKKLRLLQKRQTYLTEIRKEEALPPLPEGRDLRA

SEQ ID NO: 10009 - protein, 483 aa, unidentified
MLNKNSVFVLNNNKVPCDPIHPAKARKLLSEGKAAVFRNYPFTIILKSESKPTKNYRIKVDPGAKFTGLALLSNSNIIWCAELEHRGFQISESLIKRRQVRRFRRNRKTRYRQPRFLNRTRPNGWLPPSLISRVQNIKSWVDKLIKLVPVSAISMELVKFNTQKIVNPEIQGTEYQKGELFSYEVREYLLEKFNRTCVYCGTKEAVFNLDHFHPKSRGGSDKVSNLVLSCVQCNQNKRARLPTEFLSDRPKLLALINKQRKLPLADAAAVNATRWKLKLVLESTGLEIETGSGGLTKYNRKRNGISKSHWTDAACVGTSTPDSLNISNYQPLIIKAMGRGNRQMVKPDKYGFPKTKPKLRQKLFYGFQTGDIVKAVVTKGKKIGTYVGRVAVRKTGNFNIKTQTETVQGISYKYCKIIHKSDGYIYSFGELVKQESTNFVKKVVKVLNTPIQLNLFDTSELTTVGVSVAKESTSKSQKEKEKV

SEQ ID NO: 10010 - protein, 507 aa, unidentified; identical to SEQ ID NO: 2446

SEQ ID NO: 10011 - protein, 430 aa, unidentified; identical to SEQ ID NO: 5985

SEQ ID NO: 10012 - protein, 420 aa, unidentified
MQYAYVLNKRGEPLMPCSPGKARLLLKQQKAHVVKRTPFTIKLLYGSTGYKQPITLGVDAGNKHVGLSASTEKRELYCEEFTPRNDVVDLLSTRKQNRRSRRNRKTRYRAPRFDNRVHCKHKGWLAPSVEVKIQEHITVIKRICRILPVALVRVETAEFDTQRLKAMLERKPLPVGTDYQLGEMYDEYNVRQYVLKRDHYTCQCCEAHTTTKKTVKLHVHHLESRKVGGNAPSNLITLCTTCHDALYKGKVSLDGKERGKPLRDAAFMGIMRKALIARLREELPIPVQGTYGYITKMRREQNDIKKSHVNDARCISKHPLAEPCSVCYRTKAIRHHNRQTHKANFSKGGIRKRSQMPYVVEGYRLWDKVLYKGQECFVSGRRASGSFTLKKLDGTRISKGVTFKKLRLLEPATNYLIERM

SEQ ID NO: 10013 - protein, 413 aa, unidentified; identical to SEQ ID NO: 4790

SEQ ID NO: 10014 - protein, 424 aa, Anaerostipes sp.; identical to SEQ ID NO: 3434

SEQ ID NO: 10015 - protein, 414 aa, unidentified
EMTSYSFVLDANGKQLAPTKEPKAWFLIRKKRAALVSKYPMVIQLKKKIQENEICKDEIRCGIDDGGLHVGIALVQKCKSKNKVVFKGTIEQRNDVKHLMEVRRNYRRYHRYHKRYRQARFDNRKSSKRKGRIAPSILQKRQATIRVINRLNKWINITNYWLEDVSIDIRVLTDGYKSYSWQYQKSNRLDENIRKATILRDGGKCMECGKSNCRLEVHHIKPRRRNGSNTLDNLITLCESCHQKTEGQEELYMDRYFSLLKSSDNKNLNYAQHVMIGKMWLRKQLSGLGVLYLTSGGDTANKRIDWNIEKSHTNDAVCITDLQPDTCDIKEWAIKPMRRQSKAKTDHVLGIHHRDLVEYTFKNGETHRGYVTALYPDQKAINFQSQTKHCKKVNARKCKLLWNYSKIYWFENAS

SEQ ID NO: 10016 - protein, 501 aa, unidentified
MPANIYVLNHDGTPLMPSHSYGRVKRMLHTGKARIAGTKPFTIRLTYQIDTPVIQPVILGMDPGRTNIGNCAVETSGKVLYASLVETRNKEIPKLMKERKGHRQMSRRGERKRLQRRAIRADKTGMARATEYWRMLAGQKKPIRCKVIRNQEVKFQNRKRPIGWLTPTAEQLAQTHLNVVRKIQKILPVSAVVIEINRFDFARIENPDIENWEYQRGRLAGYADVREAVSGQQKGKCLLCGRKQIEHYHHIVPKSQGGSESIDNYAGLCMACHEKVHQDEIARGKLQSKKKGIQKKYHALSVLNQIMPALLRELPKLAPAFITTGYETHRIRESVGLQEKQKGDDTHYMDAWCIAMSIVGTYETEPDFSGLYHMKQFRRHDRARVKAQKERTYYHNGKAVAKNRHKRTGQADVKVPFPSLAEYLQEHPEHKGRLTVRKSTRSYNNTKRDLPGTVYTECGNPFVLRATQSNGTRLYGMGEGMDYHKTVRCKLSQHNAGLVYI

SEQ ID NO: 10017 - protein, 424 aa, unidentified; identical to SEQ ID NO: 6716

SEQ ID NO: 10018 - protein, 402 aa, unidentified
MPKVYVLNRHGRPLMPCTPAKARHLLDAGKAKVRHRTPFTIQLLYGSTGYTQEVILGVDAGSKTIGLSAATETEELFSAEVKPRNDVVELMSARRQFRRARRNRTTRYRKPRFDNRVRSKHKGWLAPSVEVKIQEHMTAIRRACAILPVSKVVVETAEFDLQLLKAVAEGKPVPQGEDYQKGEMYGHYNVRQYVLWRDSYTCCICGVHGSVRKGVPLHVHHLESRRVGGDAPDNLVTLCTACHDKLHKGIIMAADIKKLKRRSTRDATFMGIMRMTLLRRLREQLPVPVVETRGYITKATRENLLVLPKSHANDALAIAHGPQGFRAEHLPNIRQADRLYTIRPVRHHNRQLHKATILKGGVRKTNQAEKYICGFRLYDKVLYNGIAVSYTHLTLPTNSRVI

SEQ ID NO: 10019 - protein, 371 aa, unidentified; identical to SEQ ID NO: 2871

SEQ ID NO: 10020 - protein, 392 aa, unidentified
FTIQLVYGSSGYTQEVILGVDAGSKTIGMSASTTKEELLSAEVKPRNDVVDLLSTRREFRRARRNRKTRYRKPRFDNRVRSKHKGWLAPSVEVKIQEHITAIRRVCGILPVSKVVVETAEFDLQLLKAIADGKPVPQGEDYQQGEMYGHYNVRQYVLWRDGYTCQCCGAHATKKKEVRLHVHHLESRKVGGDAPDNQVTLCESCHEKLHKGLIAEKDFKKRKRKSTRDATFMGIMRKTLMQRLCSELPIPVIETRGYITKATREKLLVLPKSHTNDALAIAQGKQGFNVGYLPGIVQINKIYTIRPVRHHNRQLHKATILKGGIRKSNQTEKYVFGYRLFDKVQFNGQDCFIWGRRTTGIFTIKTINGKMIKDGISFKKLKLVEKSTSYLIA

SEQ ID NO: 10021 - protein, 396 aa, unidentified
VLKQQKAHVVKRTPFTIKLLYGSAGYKQHITLGVDAGSKHVGLSASTEKLELYCEEFTPRNDVVDLLSTRRAFRRSRRNRKTRYREPRFDNRVHSKHKGWLAPSVEVKIQEHITVIKHICKILPITLVRVETAEFDTQRLKTMLEGKPLPVGKDYQLGEMYDEYNVRQYVLKRDNYTCQCCGVHTTAEKMVKLHVHHLESRKTGGNAPSNLITLCTTCHDALHKGKVSLDGKERGKPLRDAAFMGIMRKTLMGRLREELPISVQGTYGYITKMRREQNDIKKSHMNDALCIAKHPKAQHCENSYRSKAVRHHNRQIHKAKMLKGGIRKLNQAPYIVKGFRLWDKVLYNGQECFISGRRSSGYFALRKLDGTTITNSASFKKLQLLEATSSYLIERM

SEQ ID NO: 10022 - protein, 373 aa, Moorena sp.; identical to SEQ ID NO: 3006

SEQ ID NO: 10023 - protein, 431 aa, unidentified; identical to SEQ ID NO: 7729

SEQ ID NO: 10024 - protein, 418 aa, unidentified
MVYVLSKTGQPLMPTENHAKVRVLLKQQKAKIVHGCPFTIQLLYDSTDYTQPVSLGIDAGSRHIGVSATTETKVLYEADVTLRNDIVDLLSTRREARRTRRSRKTRYRKPRFNNRTRKDGWLAPSIQQKVDTHLTTVRKVTEILPVNSITVETASFDIQKIKNPDIAGTGYQQGEQLDFWNVREYVLFRDGHKCQCCKGKSKDPVLNVHHIESRKTGGNAPNNLITLCETCHKGYHNGTVSLPKNIRRGMKFNDAAFMGIMRWAFFNRVKETYEPLGIMVKMTYGYITKNTRIEHDLPKDHFIDARCISGHPDATSDGTVFYQKKVRCHNRQIHKQKILKGGIRKRNQAPYLVKGFRLFEKVKYHGKQYFIFGRRSSGFFDIRTLDGTKVNKGSVSCKKIRSLDMPRSYLTEERKAIV

SEQ ID NO: 10025 - protein, 420 aa, unidentified; identical to SEQ ID NO: 3617

SEQ ID NO: 10026 - protein, 426 aa, unidentified; identical to SEQ ID NO: 3614

SEQ ID NO: 10027 - protein, 420 aa, Moorena sp.; identical to SEQ ID NO: 3094

SEQ ID NO: 10028 - protein, 423 aa, unidentified; identical to SEQ ID NO: 3951

SEQ ID NO: 10029 - protein, 420 aa, unidentified; identical to SEQ ID NO: 6017

SEQ ID NO: 10030 - protein, 411 aa, unidentified; identical to SEQ ID NO: 9653

SEQ ID NO: 10031 - protein, 438 aa, Petrotoga sp.
MEKRSVQRVFVLDKNKQPLMPCHSARARELLKKGKAAVFRYHPFTIILKEREGGDTQPIQVKIDPGSKITGVTLVGDFKNGKKVIWGAEIHHRGQSIKKALDTRRGVRRSRRNRKIRYRIARFDNRKRSKGWLPPSLISRVENILTWIKRIRRFSPITGISLELVRFDTQKLQDPEINGIEYQRGTLYGYEIKEYLLEKWGRKCVYCGKENVPLEIEHIVPKSKGGSDRISNLTLACHECNQKKGNQSIEEFLTNNPERLKQIKSESKRPLKDTAALNATRWYIFNQLRGNSLTAGKEELPIEVGTGGRTKYNRETQNYPKKHWIDAACVGESGQNVQIEPDMQVLEIKAMGHGMRRMCFVDKYGFPKSYRPKERTYMGYKTGDIVLAVIPKGKNMGIHIGRIAIRHRPSFLLNGVGDVHPKYLTLLQKNDGYGYQIS

SEQ ID NO: 10032 - protein, 512 aa, unidentified
MSTVYVLNKDGKPLMPTTRCGHVRYLLKEKKARVVASKPFTIQLLYETDDVVQPLYLGIDPGRSNIGVAVVKTDGMAVFTAHLETRNKEIPKLMKKRKDSRRTRRTNGRRCRRQRRAKANGTISKKCVKQTTAQNGSVSKRAKEIGVIKRHLPGCEKDVLCIGIKNKEAKFNNRTRPTGWLTPTANQLLQTHINLVKKIQKFLPISDVVLEVNKFAFMQLDNPNIQKWQYQKGPLYQKESLKSAVSEMQEHHCLFCKKKIDHYHHVVPQHKNGSNTIDNIVGLCTQHHDLVHKDATWQKRLAKKKTGLNKKYGALSVLNQIIPALTKELSSLFPKHFFVTNGKSTFDYRAAHGVSKDHWLDAYCITCSVLPNDTCDKTINSRVPYELKQFRRHDRRALNNENMSRVYTFNGKMVATNRHKATEQTTDSLEEFRQRQPNDVCNLKIKEHHPTYRNMSRNYPGSIFLVEKQVHIMQGIAGSKDGKATTYKDTNANSIAAGKCKFVAKNSGILFV

SEQ ID NO: 10033 - protein, 480 aa, unidentified
LYTKPLDNIGEGSLPSSGEINLKGMTFMVYVKSIDGKALMPTSNAKARKLLKQKKAKVVSLRPFVVKLTYKTKTEYTQKLNLGVDSGYSNIGFSVIDAKQEYIAGEVKLLEGMKKRLLKKASYRRIRRSRLRYRKARWNNRVKSKKKGWLAPSLKHKLDTHIKFIDYLKNILPIGKITIEVANFDIQKMKDDLISGVDYQNGDMFGFWNVREFVLHRDGHKCQNPNCKHKDKKEQILKVHHIRYRSEGGSDRPENLITLCSKCHTPANHKKGKFLYDWCVNGKKVRGFKDATFMSMIRWYLVNDLKSKHNNVSITYGYITKNHRIQNGIEKSHLNDAFAIAKGTNQARTKDRFLVIQDRLKNRSLEKFYDSKIIDIRTGKKVSGGDLSCGRSTRNKNLNTENLRKYRGAKISKGQRRIRKQKYFYQPNDLVKYDGKVYTVKGTQNEGKYIALKEIKKVPKVELLIPYVFKKGLNWSYGLC

SEQ ID NO: 10034 - protein, 427 aa, Enterococcus sp.; identical to SEQ ID NO: 5630

SEQ ID NO: 10035 - protein, 453 aa, Erysipelotrichaceae sp.; identical to SEQ ID NO: 4156

SEQ ID NO: 10036 - protein, 470 aa, unidentified
MSVFVVGLNGCRLMPTSERKARLLLKQGKAFVEQKVPFTIRLNYKTGSTTQLGYLGIDTGSQHIGVSVVREDGTVLHKEEIGLRDSMSKRKLLEAKASLRRGRRYRKTRYRHPKWRPKTKRVYCEVPDRKGRHWQKKKITFTSKRPKGWLPPSLQSKTDHHIRWIKKLQDLLPEGYRLSIELGRFDPARMKNPEIHGDLYQKGPQYDYENVRAYVLDRDRYTCQICKKKGGKLHVHHILYRSHGATDDPQYMVTVCSDCHSAQNHLPGGILYQWMQEQKRFSRGLRDATFMNILRKRLIRAFPEAVFTYGNVTKVNREKLKLPKSHGNDATAIALVKTGITAVKDKESVICIQQVRRKKRSLHEETPRKGRKEPNRTAARNNKNTKAVTVTKRQNKKKVSMTGCLFDRVELNGKKGWISGFTGKSCYVKDADDQYLSTSPKYKQVSLSKLRILHHCGNWIIGAKKTLGKG

SEQ ID NO: 10037 - protein, 414 aa, unidentified; identical to SEQ ID NO: 2588

SEQ ID NO: 10038 - protein, 512 aa, unidentified; identical to SEQ ID NO: 4572

SEQ ID NO: 10039 - protein, 433 aa, unidentified
VGAVLQAPNPVQHWRRMSTGLRAVQAEPAGIRKGDALKVFVLNMRGRPLMPCSPARARHLLKAGKAVVRRRTPFTIQLRIATGETKQSVTLGVDAGAKHVGLSAATEKEEVFASEVELRQDITGLLAARLSLRRDRRHRKTRYRAPRFLNRVRSKHKGWLAPSVENRIQAHMSRIDAVCRLLPVTKIVIEAASFDVQKIKNPTIEGTDYQQGDQLGFWNVREYVLFRDGHICQHCRGRSKDPILNVHHLESRKTGGDAPNNLITLCETCHKAYHAGKIKLKVKRGQSFRAEAFMGIMRWTLLDRVRKTHPKLPVENTYGYLTKHKRIALGLPKTHCADAFCIAGNLKALRRGDFLFQQQTRKHNRQIHRCSILKGGVRKLNQAPFLVKGFRLFDKVRIGGQIGFVFGRRVRGIFNIRRLDKTVIGKDINCKKN

SEQ ID NO: 10040 - protein, 466 aa, unidentified
HYYFTKGVSCMSTCVCVLTNNGERLMPTFRLGKVRHLLKDGKAKIVKHHPFTIQLLYDSKTNTQPIETCEDVGYNYIGISVKSESHEYVSAQYDTLQDEKEHHDDCRKYRRTRRNRLRYRKSRFDNRKRDKGWLAPSLEHKKHLNISLIERYVSVIPITHVTVEVGSFDTMLLQSIQKGEAKPEGADYQKGPRYNLATLREAVFYRDNYTCQVCKRKIADGAILHMHHMFYWKGRHGYQLDELVTVCEKCHTPANHQKDGKLYGFGKDKKFANLSGAAFMNAVRWQIVNALYATYGKEFVTITYGAMTKEKRIALQLEKTHNNDAYAMGDYHPARRCKFRHYQKRRRNNRVLEKFYDANYVDTRTGNKAKGKELFNGRISRNHKKDCKNLHKYRSKKVSKGRRSIRRQHYAIQPYDTVRLEGKTYITSGCHNKGTRLLIPVNGKSKSVAISKVQVVCHAGAWIQII

SEQ ID NO: 10041 - protein, 415 aa, unidentified
MENRIEYCFVVDKNNRPLTPTKVNKGWYLVRKSRAKLKSKYPMVIQLEKEVKSDEDDESHIVCGIDDGSAHVGLAIVQKCPTKNKVVFKGTIEQRQDVKHLMDVRRGHRRYHRYHKRYRQARFNNRSSSKRTCRLAPSIKQKKDAILRVLYQLNKWVNIQEYHLEDVCIDIRALTDDYKPYRWQYQKSNRLDENLRKATILRDECRCQECGKSNCVLEVHHIRARKYGGADTIGNLITLCSGCHQKTEGRERDFEDRYFNMIKSKPKRFDYAMYVMQGKTYLREKISGLGSLYLTNGGETANKRIEWNMEKSHGNDAICVTDCIPDNCDVKEWIIKPMRRKSKAKTNNLLGIRHRDLVSYTYKNGETHTGYVTALYPEQLVLNFQSKTKHCKKVNARKCRLLWKFNKIYWLEQCV

SEQ ID NO: 10042 - protein, 509 aa, unidentified; identical to SEQ ID NO: 5057

SEQ ID NO: 10043 - protein, 414 aa, unidentified; identical to SEQ ID NO: 2588

SEQ ID NO: 10044 - protein, 406 aa, Geobacillus sp.; identical to SEQ ID NO: 3747

SEQ ID NO: 10045 - protein, 314 aa, unidentified
VNRLSRLAPVTAISQELVRFDTQKLDNPEISGVEYQQGTLLGYEVREYLLEKWGRECAYCGTADTPLEIEHVVPRSRGGSNRVSNLTLSCHPCNQSKDALSLVDFFATDKGLKKRLKANGHTANARLERVQRQLKQPMRDASAVNATRWALFSALKTTDLPVAVSSGGRTKYNRQRLNIPKTHALDAACVGAFGKLYDWTVPTLTIKAMGRGSYQRTRLTKHGFPRGFLMRQKQVHGFQTGDMVRAIVPTGKKAGTHTGRVAIRKTGSFNIQAEYGAVQGISHKYCTLIQRSDGYGYYVTLFSNLTGEAGRAVA

SEQ ID NO: 10046 - protein, 423 aa, Moorena sp.; identical to SEQ ID NO: 2845

SEQ ID NO: 10047 - protein, 451 aa, unidentified; identical to SEQ ID NO: 3061

SEQ ID NO: 10048 - protein, 427 aa, Nostoc sp.; identical to SEQ ID NO: 2670

SEQ ID NO: 10049 - protein, 373 aa, Moorena sp.; identical to SEQ ID NO: 6300

SEQ ID NO: 10050 - protein, 413 aa, unidentified; identical to SEQ ID NO: 2636

SEQ ID NO: 10051 - protein, 442 aa, unidentified; identical to SEQ ID NO: 9771

SEQ ID NO: 10052 - protein, 541 aa, unidentified
LKQGKRYLTRYVSNRSFRRTRECFLSSLLCKARIMQTKGKGSKVLVATRKSRSRLLTFPRGDWSQGQRNKSRKGERFEMAVFVLDRSGRPLMPCTEKRARLLLERGRACVHLVMPFTIRIVDLKAENCAFQALRVKLDPGSKATGIALVRETEGKGVAVVNLFELVHRGRQISEALTARRGHRRLRRSKLRYRPPRFDNRGNKQRGWLAPSLQHRVDTSMAWVSRIQRLAPVSAISTELVRFDMQAMENPEIEGAQYQQGTLAGYEVREYLLEKWDRTCAYCGAKDVPLQVEHIQPKAKGGSNRISNLALACQCCNQKKAALPVEMFLAKKPELLKRILAQAKRPLKDAAAVNSTRWALVNALKATGLPVETASGGQTKFNRSQLGIPKTHALDAACVGEVGSITDWQKPTLSIKAMGRGSYQRTRLDKFGCVRGYLTRSKSIKGFQTGDMVKAEVTTGKKIGSYTGRVAVRATGSFNIQTSAGLVQGVSHRYCTVVQRGNGYGYSLVAKTDVRGTPPQHRDASHPALYLPGLKAEVSRAN

SEQ ID NO: 10053 - protein, 418 aa, unidentified; identical to SEQ ID NO: 4424

SEQ ID NO: 10054 - protein, 442 aa, Lactobacillus sp.; identical to SEQ ID NO: 9469

SEQ ID NO: 10055 - protein, 417 aa, unidentified
MPCSPAKARLLLKERKAIVKRRTPFTIQLTIATGEAKQPVALGVDSGYKHIGLSATTEKAELYASEVELRQDITDLLSARLALRRSRRSRKTRYRAPRFDNRVASKREGWLAPSVENRIVAHMSRVEAVMRVLPVTAITVETAAFDTQLLKNPDITGAAYQQGEQLGFWNVREYVLFRDGHVCQHCRGKSKDPILNVHHIESRRTGGDAPNNLITLCETCHKAFHRGEIKLKVKRGKSFKAETFMGIMRWTLFERLKKAHPELSVRHTHGYLTKHKRISHGIAKSHCADAYCIADNLSAKRLKGFFFQKQTRKHNRQIHKLSILKGGLRKKNQAPYEVKGFRLFDKVICKDEEAFIFGRRSSGSFDVRRLDGTRISAGISYKKLRLLEPRTTYLTEFRKEAALPSLHKCRGFRAEFL

SEQ ID NO: 10056 - protein, 421 aa, unidentified; identical to SEQ ID NO: 4757

SEQ ID NO: 10057 - protein, 413 aa, unidentified
MTSYAFVLDANGKQLAPTKEQKAWFFIRKKRASLVSKYPIVIQLMKEIPEKEICQDEIRCGIDDGGLHVGIALVQKCKTKNKVVFKGTIEQRNDVKHLMEVRRGYRRYHRYYKRYRQARFDNRKSSKREGRIAPSILQKRQATIRVIHWLNKWINITNYWLEDVSVDIRALTDGYQSYRWQYQKSNRLDENIRKAAILRDGSKCMECGRANCRLEVHHIKPRRRNGSNTLDNLITLCESCHQKTEGQEELYMDRYFSLLKSSDHKNLNYAQHVMIGKKWLRKQLSNLGVLYLTNGGDTANKRIDWNVEKSHANDAVCITDLQPDTYDMKEWAIKPMRRKSKAKTDNVLGIRHRDLVEYTFKNGETHRGYVTALYPEQKAINFQSPTKHCKKVNARKCKLLWNYSKIYWFENAS

SEQ ID NO: 10058 - protein, 432 aa, unidentified
MLVYVLKQNGQPFMPTARFGKVRRLLKTKKAKVVRREPFTIKLLYEPETDVVQECYCGVDTGSRHIGVAVVSNDKVLYQSQTELRSDIKRKMDARGACRRNRRQRKTHYRKPRFLNRGNSTKSDKLPPSVKHKVQAHIDEIEFCKKILPISDSNLIIEVSQFDTALMKDPSLLNEKVKHWGYQQGFNYGYSSRREAILYRDNYTCQCCGKKNCRLEVHHIKFKSNGGTDDEENLITLCEDCHKGVHAGTIVLSKKPKKSKNLKHATHMSIIRSWLLKKYPNAIETFGFVTAENRNHLNLEKDHYIDACVIASGGFKIKQLDVIFCKRRVPKGNYQLAKGHRGEQKIPTGKICGFRKFDKVKYLGNEYFISGRMSKYGYCLFTDILGNKIDFSNMPKGMKTPKLSNCKRISARSSCLCIISQIRKERAIPVLS

SEQ ID NO: 10059 - protein, 431 aa, Escherichia sp.
MNRVFVLGKTGQALMPCHPARARQLLQSKKARVKRLYPFTIQLTQRSDGYIQPVELKFDPGSKQTGVGLVLHGKNRLSAIYAAVLTHRGQEIKSNLDSRRMIRRARRNRKTRYRQERFLNRVRSKHKGWLAPSVQSRVDNIMEWSKRFMRLSPVGFITVESVKFDMQKMENAAVEGLEYQRGTLFDYEVKEYLLEKYHYSCVYCGAKNVPFEKEHVIPRSRGGSNRISNLVLSCHDCNQKKDNLIIEEFLKDNPALLKKIKAQLKSSLKDAAAVNITRKQIVKELINLNVPVLTGTGAETKYNRVSQKYPKEHYIDALCAGTTGAKIYIPKKLKPLLIKKERRNNRQMCLVDKYGFPRGKAKGSKIVHGFKTGDIVKAVVLKGKKKGVYKGKVAVRSSGSFNINVKQGRIEGIGWKNCVMLHRFDGYSYTY

SEQ ID NO: 10060 - protein, 456 aa, Halomonas sp.
MAVFVLGKNKQPLMPCSEKRARLLLERGRAAVVNLTPFVIRLRDRCLSDCTLQPTLLAADPGSKETGLALMRLENNATEEKAPATRHVLCLCQLVHRGFQIRQALEQRAGFRRRRRSKNLRYRQPRFDNRTRKKGWLPPSLQHRVDTTMAWVDKLCRWAPVTHLSMELVRFDLQKMENPEISGVEYQQGTLLGYEVREYLLEKWGRVCAYCGTGDTPLEIEHVVAKSRDGSSRVSNLTVACHDCNQAKDSQWLADFFATNKGLKKRLKANGLSAEVRLERVQRQLKLPLRDAAAVNATRWALYGSLKTTGLPVAVGSGGRTKYNRQRLGIPKTHALDAACVGKFDTLKGWRVPTQVIKAMGRGSYQRTRLDKFGFPRGYLMRQKQVKGFQTGDRVRAVVPSGKKTGTHTGRVAIRKTGSFNIQTEQGAVQGISWRHCTLLQRGDGYGYHPLPTIQY

SEQ ID NO: 10061 - protein, 427 aa, unidentified
MVYVLAIDGEPLMPTERHGKVRRLLKENKAKVVKRCPFTIQLLYDSTRYVQEINLGIDAGSKHIGVSATTKEKVLYEADVELRNDIVDLISTRRELRHLRRIRKTRYRKARFNNRVSTKKTGWLAPSVKQKIHTHLTVINNVYKILPIKNLIVETASFDIQKIKNPDISGEEYQQGEQKDFWNVREYVLFRDNHTCQCCKGKSKDKVLNVHHIESRKIGGNAPNNLITLCETCHKGYHNGSVKLPKFIHRGMSFRDAAFMGIMRKTLLSELRKIYPNVKETYGYITKNTRITYNLPKDHYIDARCISGNPDAKPLGYYFYQKKARCHNRQIQKMSILRGGLRKNNQAEYLVKGFRLFDKVKHNSKEYFIFGRRKTGYFDIRNFFGEKVNKGSVSYKKLKFLETRHNMLTERRKTIPYPAIKAEGLLA

SEQ ID NO: 10062 - protein, 419 aa, unidentified; identical to SEQ ID NO: 4877

SEQ ID NO: 10063 - protein, 406 aa, unidentified
MVYVQDIDGKPLMPTTRHGKVRRLLKSNKAVVVNLCPFTIRLTYISDSYKQEIVLGVDAGTKHVGLSATTKSKELYSSEVILRNDIVDLLSTRRELRKARRNRLRYRKPRFDNRVKSKRPGWIAPSVKYKVDAHIRVVENVCSILPISRIVIEVAQFDTQKIKNPEISGKEYQEGDQLEFWNTREYVLARDGHKCQYCKGKSKDSILNVHHIESRKTGGDSPSNLITLCETCHKEYHKGNIDLKIRRGKSLRDAAVMGIMKWRLYEELKSRYDRVFMTFGYITKHNRIKYGIEKSHTSDAFVISKNINAKRIERQYLKRLIRRHNRQIHKMKILKGGKKKNNQAPFEVFGFRLFDKVLYNNKIFFVYGRRKSGSFNIRDFNGENSKDVSRKKFKLIRGKRHPIILK

SEQ ID NO: 10064 - protein, 554 aa, unidentified
MIEQSSDIPFAVRVTPSPTLRLGMPMLWKLNRSRQNRISTGPELAVTGLQQKRRTMRYVYVLDMNGEPLMPTCRYGKVRRMLKSGQAKAVDTLPFTIQLLKPTKTRILQPVIAGQDPGRTNIGMAAVRSDGTELYRAHIETRNKEIVSLMNDRRSFRQASRRGERLARKRLAKKLHTTAKHLNGRILPGCKEPLAVKDIINTESRFNNRLRPEGWLTPTATQLLRTHLEAFRKLSGILPVTEMVLEVNRFAFMQLDNPDMEKRDIDFCRGPLHGTGGVKAAVSLQQDELCLLCREREIEHYHHIVPRSKRGSNTINNIAGLCEKCHERVHKDQAAAEKLQSRKDGLSKKYGGTSVLNQIIPSLTEELGIRYPGHTHVTNGWNTKEFREKHELEKNHDIDAYCIAASILKDVQPVMQTEPYEIKQFRRHNRARIHHQTERTYRYDGKIIAKNRKKRMDQKTDSLEDWVADMTKQYGQGTANRMLSKVTVQKSTRHYNAKGRMMPGTVFTYQKKRFVMTGQLTGGTYYRAYGQDKKNFPAKVVRVVQKNKGLVYVA

SEQ ID NO: 10065 - protein, 420 aa, unidentified
MQYVYVLNKHGEPLIPCSPGKARLLLKQQKACVVKRTPFTIKLLFGSAGYKQPITLGVDAGSKHVGLSASTEKRELYSEEFTPRSDVVELLSTRRQNRRSRRNRKTRYRVPRFDNRVHSKHKGWLAPSVEVKIQEHITVIKHICKILPISLVRVETAEFDTQRLKAMLAGKPLPVGTDYQLGEMYDEYNVRQYVLKRDHYTCQCCGTHNTAKKVVKLHVHHLESRKTGGNAPSNLVTLCTTCHKNLHKGRVTLDGKERGKPLRDAAFMGIMRKTLMVRLKEELPIPVQGTYGYITKMRREQNDIKKSHTNDARCISKHPLAEPCSVCYRTKAIRHHNRQTHKANFSKKGIRKRSQMPYLVEGFRLWDKVLYKGQECFVSGRRTSGSFTLKKLDGTRISKGVTFKKLRLLEPATNYLIERM

SEQ ID NO: 10066 - protein, 436 aa, unidentified
MTKTLTTRTIQACVLDRQGKPLMPTTRLGKVYRLLKAKKAHIVSYEPFTIQLDYEPDTQVIQPMTLGVDSGAIHSGYSVANEHREYYNAEVIARNDISNRLSDKRMYRQNRRSRKTRYRKPRFNNRKNKKKGWLPPSLEQKVAVQVNEINHLHRYFPIETIVVEVAEFDIQKIKNPDISGIEYQQGTLQGYNIRNYLLEKHGRKCFYCGKAVSDFEVEHMFPKSKGGSNRIDNLTLSCHDCNEKKGTLTAEEFIQQTLPAKKAVAKLKQLPNEKRLFKYMAYMNATRWALYDAIKERYPNVKMTYGYITKYNRIQAGLPKTHHIDAKCITGFATVPSMSQTVVKVKMRRHNRQLHRATFSKGHVRKAASLPTTVFGFQLYDLVCFNNHRYYIKGRRSSGSFALVSVEGLKNEERNYKKLTLLAHTNAYLTNRYVNA

SEQ ID NO: 10067 - protein, 420 aa, unidentified; identical to SEQ ID NO: 6836

SEQ ID NO: 10068 - protein, 268 aa, unidentified
VETAEFDTQRLKAMLKGKPLPVGTDYQLGEMYDEYNVRQYVLKRDNYTCQCCGAHPTEKKPIRLHVHHIESRHVGGNAPNNLITLCVACHKALHEGKITLDKGKKRGKPLRDAAFMGIMRNTLLARLKDELNIPVKQTYGYITKLLREKNKIPKSHVNDARCIAKAPNAKPCDTMLYTRALRHHNRQIHKAKILKGGIRKKNQAPYLVKGFRLWDKVRYNGEECFITGRRSSGYFALKKYDGTVISNSASYKKLMLLEAATNYITERS

SEQ ID NO: 10069 - protein, 308 aa, unidentified
LAPSVEVKIQEHITTIKRICQILPISEIQVETAEFDLQRLKAMKEGKPLPVGTDYQLGEQYDFYNTRQYVLHRDGYTCQCCGTHDNNIKLHVHHIESRQTGGDAPNNLIILCEHCHKALHEGKLELPKGKKRGKSYRDATFMGVMRKTLLERLKKEIDVPVEGTYGYITKCWREKTGLEKSHINDAICISKHPYAKPLDTYYLTKAVRHHNRQIHKSNFSKGGIRKRNQAPYLVKGFRLFDKVLYQGKEYFIFGRRATGYFDIRTLDGTKVNKGSIKYKKLRIQDTAKAYLKEARAIPHVNKFTCVLA

SEQ ID NO: 10070 - protein, 430 aa, Calothrix sp.
MEGLMSKIFLLDTNKKPLNPIHPAQARQLLKNKKAAIFRQFPFTLILKEAKPDIEVQPLRIKIDPGAKNTGFALVNDTTGEVIFAAELQHRGFQIRDALTSRRQLRRSRRNRKTRYRAPRFNNRKRNEGWIPPSLQSRIVNILTWVKRLQKLALIDSISQELVKFDMQIMQNPDIQGKEYQQGTLAGYEVREYLLEKWNRKCAYCGVEHVPLQIEHIRPRSKGGSNSISNLTLSCEKCNLKKGTQDIKDFLKKDTKKLESILKLCSRPLADAAAVNTTRFALLNALKATGLPVETGSGGLTKFNRSQQGLSKTHWIDAACVGKSIPILNIKGVKPLLIAAKGHGTRQMCRTDKHGFPTRYVPRIKLVHGFQTGDIVKAIVKTGNKVGVYIGRIATRSTGSFNISTKAGLVQGISHKYCKLIHKKDGYSYS

SEQ ID NO: 10071 - protein, 393 aa, unidentified; identical to SEQ ID NO: 6115

SEQ ID NO: 10072 - protein, 379 aa, unidentified
  source 1..379: note = Clostridiaceae bacterium UBA4052
LVYILSKNGNPLMPTNRHGKVKHLLKDGKAKVVRRTPFTIQLLYDSPEYTQPITLGVDAGSKVVGLSATTEKKELFVSEATLRDDITELLSTRRQNRRTRRNHLRYRMARFLNRTASKKEGWLAPSVKHKVDSHLKVIGNVHRILPISRIVIETASLDIQKIRNPEISGREYQQGEQLGFWNTREYVLWRDNHECQHCHGKSKDRILNVHHKESRKTGGDSPGNLVTLCETCHKSHHAGRIKLKLTPNKSYRDASFMGIMRWYVFNSLNELYPEVSITYGYITKNNRIRNNIEKTHSADAYCISGNLNAMRIDEIYYQVFKRKHNRQIHKANFLKGGKKELDQSAYEVKGFRLFDHVRYWDEDCFIFGRRISGYFDLRK

SEQ ID NO: 10073 - protein, 536 aa, unidentified
VLRPRYQCPTRWYPSREQGSGNGCLSGEENTDLEQEVSGTLSKGDHSHPGEQDFCVPAITIQGGPAMSVFVVGLNGCRLMPTSERKARLLLKHGKASVYRKVPFTIKLNYKTGSTTQSGYLGIDTGSQHIGVSVVREDGTVLHKEEIGLRDSMSKRKLMQSRASSRRGRRHRKTRYRHPKWRPKAKRVYCKTPDRKGRHWKKRKITFASKRPKGWLPPSLQSKTDHHIRWIKKLQDLLPEGYRLSIELGRFDPARLKDPEIHGELYQKGPQYDYENVRAYVLNRDRYTCQVCGKKGGKLHVHHILYRSHGATDDPQYMATVCSDCHNTENHHQGGILYQWMQKQKKFTRGLRDATFMNILRKRLIEAFPGATFTYGNITKADRERLILPKSHGNDATAIAIVKTGIMTVKDKEPVIYIQQVRRKKRSLHEETPRKGRKEPNRKASRYDKNTKAVTVTKRKNKKKISITGCLFDRVELNGKKGWISGFTDKSCYVKDENDQYIRTSPKYKQVSLSKLKILHHCGNWAIGARRSLGKG

SEQ ID NO: 10074 - protein, 419 aa, unidentified; identical to SEQ ID NO: 4877

SEQ ID NO: 10075 - protein, 442 aa, unidentified; identical to SEQ ID NO: 2903

SEQ ID NO: 10076 - protein, 421 aa, unidentified; identical to SEQ ID NO: 4238

SEQ ID NO: 10077 - protein, 487 aa, unidentified
MTYVYVLSRSGRPLMPTARCGHVRILLKEKKARVVCGRPFTVQLLYDTDEAEPYLYGGTDPGRTNIGNAVVTEDGECVYRDKVETRNDEVAKGMSDRKKNRQARRRGERLVRKRRAKRCGTLSTKLGSGRLIPGTKKPTLVKDIINQEARFRNRKKRQLITPSVKQLVDTHLNHVDQIRKILPVKGWCLEANRFAFMKLEDGSVRGIDFQNGRLKGYASVDDFVYERQKGKCFCCGAPIEHYHHVKEQNDNGFDGPENKVGLCNSCHTKIHIGELELDVEGFGKKYQALSVLNQAIPYIYLGLVERFDEENVFICAGYDTKEIREAAGLDKDHDIDALCIASMATGVIPKQPEEQAFSVKQYRRHDRAKINNQPERTYKLDGKTVARNRKPRIDQKGLALSQWYEKQVRLCGRKEADRMLSRLKVRKSYRRYNNLYRVMPGAIVRHDGRIEVMERQQNNGYYFNLRCGRIKASECEILHHNAGLVYI

SEQ ID NO: 10078 - protein, 340 aa, Aneurinibacillus sp.
VQLRTDIPQLLATRLQFRRARRSRTTRYRKARFLNRKKSKGWLAPSVQHKVDSHLKVVQLVHRILPVTKITVEVAQFDTQLLKNPSIKGEEYQQGEQMGFWNVREYVLFRDKHTCQRCKGKKKDNILNVHHIESRKTGGDSPDNLITLCETCHNEIHQKGLEHTIKRKTQTLRDASQMTVMRWFIYNGLKERYPHIQLTYGYITKNTRITNGLGKSHEVDARCISGYPLAKPMDTVYHLKFVRKNNRQLHKATISKGGKRKSNKAERFVKGFQLFDKVLYEGQECFIFGRRSSGYFDIRKLDGTKIHASASYKKLTRIEYARTLLIERRKGDSSPTYATA

SEQ ID NO: 10079 - protein, 420 aa, unidentified
MQYVYVLNKHGEPLMPCSPRKARLLLKQKKACVVKRTSFTIKLLYGSTGYKQPITLGVDAGSKHIGISATTEKHELYREEATPRNDVVDLLSARRAFRRSRRNRKTRYRAPRFNNRVHSKHEGWLAPSVEVKIREHITLIKRVCRILPVTLVRVETAEFDTQRLKAMLEGKPLPVGTDYQLGEMYDEYNVRQYVLKRDNYTCQCCGAHSTKTKDVKLHVHHIETRRTGGNAPNNLITLCTDCHKALHAGKVTLDGKKRGKPLKDAAFMCVMRKTLMERLHKKLKIPVQGTYGYITKYLREKNGIPKSHTNDARCISKNPLAIPCDTCYYTKAVRHHNRQLHKATILKGGIRKANQAPYIVKGYRLWDKVSCNGTECFITGRRTSGYFALKKLDGTVISNSISYKKLRLLEVATNYITERR

SEQ ID NO: 10080 - protein, 415 aa, unidentified; identical to SEQ ID NO: 6883

SEQ ID NO: 10081 - protein, 537 aa, Streptomyces sp.
MTTFPAGEQTHQAVLPQQLALESVGADTPGSRDETAHGHPAIARGTGREHGRGETDGHGTEARRRHAKAENGSGDAPTPDRSYTGGVGASRVFVLAKHGQPLMPCHPARARELLGKGKAVVARQVPFTIRLKDRTFAESEVDGVQLRIDPGSKGTGLALTDEKKQVNGQGTVVTARRGLISVELQHRGDQIRMCMQQRAGYRHRRRSANCRYRAPRSNNRTRPTGWLPPSLRHRVETIVSWTARLCRYTPVTEIHVENVAFDTHAMSAARPLNGAEYQQGPLAGTEARAYLRAKWNNACAYCGATGVPLNIDHVRPRSRGGSNRISNLVLACVPCNKAKDNTPVEVFLAHQPDRLTKILHQAKTPLHDAAAINATRWQLTEALSGLGRQVHTWSGGRTKRNRSAMGLAKTHTLDALSVGRLDHESGDALVRLPGQVLVAKAAGRGSYARTTPDRFGFPRLQRARVKQHFGYVTGDLVRATMPTGKWAGTWTGRISVRARGQHSLTTPEGRINVSHWNLRLLQRGDGYGYSLRQEAAP

SEQ ID NO: 10082 - protein, 420 aa, unidentified; identical to SEQ ID NO: 3546

SEQ ID NO: 10083 - protein, 494 aa, unidentified
MTMVYVQNKDGKPLMPTTRYCYVRLLLKEKKARVVSRTPFTIQLNYDTPDITQALILGIDPGRTNIGVAVVKEDGQCVFSAHLETRNKEVPLLMKKRAAFRRNHRTLDRRRKRQRRAKAAGTTIAEGSVERLLHGYSTPIVCHHIRNKEARFNNRSRPAGWLTPTANHLLQTHINLIAKIAKVLPITKVVVELNRFAFMAMDNPNIRRWEYQQGPLYGLGSVEDAVYAQQDGHCLFCKKPIDHYHHVVPRHKGGSETLANRCGLCERHHALVHKDKAWAEKLVTRKGGMNKKYHALSVLNQIIPFLMEYLGEETPYDVYATDGRSTKGFRVAKNVPKEHYTDAYCVACSILGTDIDVSAPVEPFELKQFRRHDRQACIRQMVDRKYLLDGKVVAANRHKAIEQKSDSLEEFREAYGEAAVSQLTVRPHLPQYKDMTRIMPGAVMDFDGTIGVFQGSEGFHNGKPDYYKSTKGERVLTRRCALLAQNAGMVFIPA

SEQ ID NO: 10084 - protein, 424 aa, Petrotoga sp.
MLVYVLNKHGKPLMPCKPSKARKLLKEEKAKVIRKEPFTIQLLYGSSGYKQPITLGVDAGSKTVGLSATTENKELFAAEVELRDDIPKLISQKRQYRRDRRFRKTRYRKPRFLNRVHSKNKGWLAPSVEHKIKSHIKLIDLVHSLLPVTKIVVEVASFDIQKIKNPNIEGKQYQQGEQLDFWNVREYVLWRDNYTCQHCKGKTKDKRLNIHHIESRQIGGDAPNNLITLCETCHKDYHDGKIKLNFKRGQKFKDATFMGIMRWTLYNRLKTLYPNIHLTYGYITKNTRIQNGLPKTHRIDALCISGHPQAKQLEHYYHIKEVRRHNRQIHKANILKGGIRKLNQAPYLVHGFRLFDKVKYNGIKCFIYGRRSTGYFDIRKVDGTVIHRSAKSKDLILVSKTKTLLWERRENSAFLSPLNRASAS

SEQ ID NO: 10085 - protein, 413 aa, unidentified; identical to SEQ ID NO: 2636

SEQ ID NO: 10086 - protein, 415 aa, unidentified; identical to SEQ ID NO: 3500

SEQ ID NO: 10087 - protein, 425 aa, unidentified
MVYVISKDGKPLMPTKRHGKVRRLLKQGLAKVVRREPFTIQLLYDTTTYTQPVVVGVDIGSKVVGISAVTNKQELFSAEVELRQDIRKLLLKRREHRRFRRYRKRRYRKPRFLNRRRPEGWLAPSVKWKADAHIRLVNFVAKILPVTKVVVEVAPFDIHKIVNPTVESTKYQEGPQKDFRDVREYCLWRAGYKSELSGKKGVLEVHHIVPKSQGGTDNPSNLIVLTAEEHKAIHEGKIKIPRSKLEKVKILKDASHVSTIGWYIVNRLKYQYEVEMTYGSITKAKRVEMGLEKTHRNDAFVIAGGNKNVNRVPEWYFGKFFRRQNRSLHKANPIKGGKRPVNTVKEVHGFRRFDKIEYQGRTYIIFGLRSSGYFATSTLSGEKISDSVKYTCLRLVEKAKTLMFERREQRIPLHLTEDGVSCTGL

SEQ ID NO: 10088 - protein, 430 aa, unidentified
MPKVYVLNRHGRPLMPCTPAKARHLLDAGKAKVRHRTPFTIQLLYGSTGYTQEVILGVDAGSKTIGLSAATETEELFSAEVKPRNDVVELMSARRQFRRARRNRTTRYRKPRFDNRVRSKHKGWLAPSVEVKIQEHMTAIRRACAILPVSKVVVETAEFDLQLLKAVAEGKPVPQGEDYQKGEMYGHYNVRQYVLWRDSYTCCICGVHGSVRKGVPLHVHHLESRRVGGDAPDNLVTLCTACHDKLHKGIIMAADIKKRKRRSTRDATFMGIMRMTLLRRLREQLPVPVVETRGYITKATRENLLVLPKSHANDALAIAHGPQGFRAEHLPNIRQADRLYTIRPVRHHNRQLHKATILKGGVRKANQAEKYICGFRLYDKVLYNGIECFVWGRRTSGSFLLRQLNGEKVKDGVSYKHLKLLERSQSYLVA

SEQ ID NO: 10089 - protein, 414 aa, unidentified; identical to SEQ ID NO: 2588

SEQ ID NO: 10090 - protein, 209 aa, unidentified
MECGQSNCRLEVHHIKPRRLNGSNTLGNLITLCESCHQKTEGKEEQYMQHYFNILESSDNKNLNYASYVMIGKTWLRKQLSQLGVLNLTTGGNTANKRIDWNIEKSHSNDAVCITDLQPDSCNVKDWIIKPMRRQSKAKTDNVLGIKHRDLVSYVYKNGELHTGYVTALYPELNALNFQSPTKHCKKVNVRKCRVLWKYNKIYWLDSVS

SEQ ID NO: 10091 - protein, 392 aa, Anoxybacillus sp.
VVGSASVLHITSIYNMVEENMTCFMQRKGENPMVFVLDTNKRPLAPCHEAVARKLLKQGKAAIYKRFPFTIILKKSVDESEIKTTYRLKIDYGSRHTGLAILRGQEVVWLGQLDHRTDIKERIDKRRAFRRARRNRKTRYRKPRFLNRRRKDGWLPPSLESRVQNIQTWVNRLKKLCPIGYISYENTKFDTQLMRNPEINGVEYQQGTLQGYEVREYLLEKFGRKCCYCGKENVPLEVEHIIPKSRGGTDRVDNLCLACHDCNQRKGSKTAEEFGYPHIQKQVKETLKDTSAINSTRWKAYEVLKQTGLDVECGTGARTKMNRIRLDLPKTHYFDACCVGESTTNHLYFKTKEVLFIKAKGRGSRSRTNLDRYGFPRGYLARQKFFFGFQTG

SEQ ID NO: 10092 - protein, 451 aa, unidentified
MTTFVFVLDRKGRSLMPCHPARARKLLKKGRARVHKVFPFTIRLTDRELENSSVQPMLIKIDPGSKETGIALVREEKNKEHHALYFINLQHRGQQIRNALYKRRCLRRSRRSRNLRYRSPRFLNRRRAEGWLAPSLQHRADSILSWVSRLRKITPVERISQELVKFDTQLTQNSKIEGIEYQQGELAGYELREYLLEKFGRKCIYCGADNVPLNIDHVIPKSKGGSNRVSNLVLACVQCNQKKGSRSIEEFLKDKPEVLRQIKNQLKQPLKDAASVNATRWKLFNKLKSTGFPFEVGSGALTKFNRKKFGIPKAHWLDALCVGNVPSVTNWRNLNVLNIKCCGRGAYQRTRTDKYGFPRGICMRQKKVYGFSTGDMVKAIIPKGKKKGVYVGKVAVRKTGSFNLQTSGQTIQGISYRYCRLITHSDGYSYSWKSGPLPPRVETRGILGEVR

SEQ ID NO: 10093 - protein, 459 aa, unidentified
  source 1..459: note = uncultured beta proteobacterium
LVFVLDKRGKPLMPCTERRARILLERGRARVHRLYPMVIRLVDRFAEDSEFQELNLKLDPGSKTSGVALNRVDGSTEAVLNLFELIHRGAFISKKLEQRRALRRNRRNRHTRYREERFLNRGNKQRGWLAPSLMHRVNTTTAWVDRIMRWSPVPLITQELVRFDTQKLENPEISGVEYQQGTLLGYEVREYLLNKWHRACAYCDAQNVPFEVEHIHPKSKGGSNRISNLTLACRPCNEKKDNRDIREFLASDPTRLAKILAQAKAPLKDAAAVNSTRWRLFNELKTMGIVVKTGTGGQTKFNRLQNKIPKTHALDAACAGHVEFVSDWQKPTLSIKSSGRGTYVRTKLDSYGFPRGYCLRQKQVHGFATGDIVRAEVTKGKKIGSYFGKVAIRESGSFNISTNAGVIQGVSHKYCKVVQRADGYGYLFNQDSKQSRVKRIALQSALSLPGMNAEVSRAL

SEQ ID NO: 10094 - protein, 415 aa, unidentified; identical to SEQ ID NO: 7777

SEQ ID NO: 10095 - protein, 457 aa, unidentified; identical to SEQ ID NO: 4365

SEQ ID NO: 10096 - protein, 439 aa, unidentified
MVLVIDRQKQPCNAISAAYARILLFTKQAVIHKRFPFTIRLRNDNAVLKDRSYTVKLDPGSRTTGVAITDDQDSVVMLAELEHRGHIIKKNLDSRRAIRRSRRQRKTRYREVRFLNRTKPEGWLAPSVKSRADNVINFIKKYNKLINIDRVMIENVSFDTAQMSSDSYLIGTDYQQGNLYNKNLRKFIFSKTKGRCSYCEEKATEIDHIVPRAKGGTNSTYNLTPACRSCNEKKSNLSLKEFGKLMNKDYSKLEPKKLPKDAAIVQSARNYMVKEISKLVPDTTTHESWITKYNRDQLGLTKQHYYDALSVGEIPTKFNFLTDKILQISAKGRGSRQMCRMDSYGFPRTSAKASKSVKGFQTGDIVKAVVPTGSKQGEYLGRVAVRSRGFFDIKTKSNLVKDIGYKFCRLLQRNDGYSYNYKERDFLLAMNCRVSVAEF

SEQ ID NO: 10097 - protein, 416 aa, unidentified
MLVYVLNKHGKPLMPCKPSKARKLLKQGKAKITQREPFTIQLIYGSSGYKQPITLGIDAGSKFIGVSATTEKQELFSAEVELRNDIVQLLSERRQYRRSRRYRKTRYRKPRFSNRVRSKNKCWLAPSIENKIQTHLKIVEKVHKILPITKIITEVASFDIQKIKNPNIEGVEYQQGEQLGFWNVREYVLWRDNHTCQICKGKSKDNRLNVHHIESRQTGGNAPNNLITLCETCHNKYHKGELNVKLKRGQSFRDTAFMGIMRWTFYNRLKNIYPNVELTYGYITKNTRITHKLPKSHRIDALCISGNPKAKQLDYWYYIKQVRKHNRQIHKAKILRGGIRKLNQAPYLVKGFRLFDKVKYKRQECFIFGRRSSGYFDLRKLDGTVIHRSASYKDLQLLSKRKTLLLERREGVSSLT

SEQ ID NO: 10098 - protein, 473 aa, unidentified
  source 1..473: note = uncultured beta proteobacterium
MPCSEKRARLLLERGRARVHRLHPFTIRIVDLRLKDCVLQPLRLSLDPGSKTTGLAIARVETKGASEASGEAQEAQQDEGEPVMHIRFLMELAHRGAQIRQDLQGRAALRRGRRSRKLRYRAPRFDNRKRPEGWLAPSLQHRVLTTMTWVRRLRRLAPVTHIAQELVRFDMQAMQAAQDGQTIEGVEYQRGTLAGYEVGEYLLAKWDRTCAYCDAQNVPFEKDHILARSRGGSNRVSNLALACRPCNECKASRDVREFLARDPVRLRRILAQAKAPLRDAAAVNSTRWALYQALQRTGLPVEAASGGRTKFNRTRLGIPKRHALDAACVGAVHDVRGPAQPALQVKCCGRGSRCRTRVNAAGFPRGYLMRSKSVHGFRTGDMVRATVPASSRKAGVHAGRVAVRASGSFNIQTAARVVQGISHKHCVVLMRGDGYAYAQQATPSTRADNKTREAGEVSTATAVSTGHALPPHG

SEQ ID NO: 10099 - protein, 515 aa, unidentified
MTALEERLSKTEYIYVLGFDGKPQMPTRRKRHVLKLLKTGRARIAEDIPFTIRLTYRNAPVLQPVTLAEDPGRTNIGAAVLSPLGDLLFAAVIETRNKEIKKLMADRQKSRQASRRGERKARQRLAKRYGSMVKSGMVMRKLPMYAADRFVTCKFIRNTQARFCNRKRCPDWITPTVQHLVQTHLNIIRKISRYLPVTDIAFEVNRFAFMHMENPEAMGVDFQNGPLKGYGDVKEAIRTQQHGKCLMCKKPISHFHHIVPRSRGGSDTIQNLAGLCPECHTKVHTDTAFRKDFDEKKSGQLKKYGALSALNQAVPFICKKLLKEYGEEHVHFCRGLDTSLIRTALGFEKTKKNQMHEVDAYCIGLAALEVNEVETPAFDHTFQIRQFRRQDRSIIHHQTGRSYYQGKEKVTQNRKPGFEQKTTALSQWYKEQVRIHGEKEAEKLRSQLRVEKSCRHYNDMDRFLPGAVFLYEGKRYVLSGRITNGKYLRACGQGMKNFPAAECTFIRHNAGLVFI

SEQ ID NO: 10100 - protein, 413 aa, unidentified; identical to SEQ ID NO: 2636

SEQ ID NO: 10101 - protein, 416 aa, unidentified; identical to SEQ ID NO: 7736

SEQ ID NO: 10102 - protein, 412 aa, unidentified; identical to SEQ ID NO: 4932

SEQ ID NO: 10103 - protein, 529 aa, Burkholderia sp.; identical to SEQ ID NO: 4276

SEQ ID NO: 10104 - protein, 529 aa, unidentified; identical to SEQ ID NO: 6786

SEQ ID NO: 10105 - protein, 487 aa, unidentified
IRGSPRRNCYETVLILDDGETFGLGVVERCKTQDRANLAAEGKPRGREISGALADRRALRASRRNRRNKKRGKQGESKIAYRRGQEYPPSIRADVQAKVNAVKSALRWFPVSRIILEPVKIDLVKERRPGVKGKGYQNGLSSGIRADSRSQKRRLAILRRDGYRCLCCGDPVTKENACIHHFKARKSGGTNRYDIQGTLCEKCHTSVVTEKLSLVFDPDRYPDPRAAGRCMHGRYLLEQKLRSLGLPVEIRYGHETKAKRYALSLPKSHANDAVALGARGTVPLRLSPVTYRVEYRKRHCNRKLFNANPGVAHYRAAAGRQPGVDPERMKVDDHDQGANKKNRSYRRHVRSEYYKKLKAEREFNHDLLPGRKALNEPFAVNEAVYVDEAGNPVVVKSRRIWRDQDTSNLPYRNKLFEKGDLVCTKEGWLVKVISLMSDGQVKILFCERKEGRKCQFTQRRPASLRTAQKGRGRCWIPQKTALLPSIN

SEQ ID NO: 10106 - protein, 420 aa, Pseudoalteromonas sp.
MLAYVLNKHGKPLMPCKAAKARKLLKAGEAKVVKRTPFTIKLLHGSSGHTQHVVAGMDTGSKHVGCAAIANGKVIYQSEVALRTDVSKKMQQRAMYRRTRRNRKLRYRPARWLNRASMRKEGRLAPSLKSKLDSHLREKKQVEAILPISHWKVETASFDIHKITNPIVTSAGYQQGALLGYYNVKAYVLQRDNYKCQSGRKTKHNVKLHVHHKVFRSQGGTDAPSNLIALCETCHNDLHAGKFELKVKRSKTKHATEIGILKAQLKQCWDFEETFGYVTKFKREQVLGLPKTHYYDAVSICCEDGELVQQGKHVLRKRHVASGDYQQTKGIRSEKRIPVGKLFGLKKHDFVQTPQGTGFVKGKRSSGYFALETILGDKVHASANIKKNTVRISARTTTLTQLMEAAIPLGTKVPSILAVN

SEQ ID NO: 10107 - protein, 376 aa, unidentified
LRVFVRNKRGKPLMPCSPAKARLLLKEKKAIVVRRTPFTIQLTIATGEAKQPVSLGIDAGYKHVGLSASTEKAELYASEVELRQDITDLLSARRALRQSRRNRKTRYRAPRFDNRISTKRKGWLAPSVENRINAHLSRIEAVLRLLPVTKITVETASFDLQLLKNPDISGKEYQEGEQLGFWNIREYVLCRDGHVCQHCYGRSKDPVLNVHHLESRRTGGDSPGNLITLCETCHKALHRGEITLKPKRGQSFRAEAFMGIMRWEVLGRLKASHPELEVNNTYGYRTKHARIANDIAKSHCADAFCIAGNLGAERLGEFFFQKQTRRNNRQIHKLSILKGGIRKRNQAPFEVKGFRLFDKVACQGEEGFIFGRRSSG

SEQ ID NO: 10108 - protein, 465 aa, unidentified; identical to SEQ ID NO: 3603

SEQ ID NO: 10109 - protein, 310 aa, unidentified; identical to SEQ ID NO: 8570

SEQ ID NO: 10110 - protein, 279 aa, unidentified; identical to SEQ ID NO: 5082

SEQ ID NO: 10111 - protein, 451 aa, unidentified; identical to SEQ ID NO: 6972

SEQ ID NO: 10112 - protein, 414 aa, unidentified
MPCSPAKARLLLKEKKAIVKRRTPFTIQLTIATGETKQPVGLGVDAGYKHVGLSASTEKAELYASEVELRQDITDLLSARRALRQSRRNRKTRYRAPRFDNRIRTKRKGWLAPSVENRINAHLSRIEAVLRLLPVTKITVETASFDMQRLKNPDISGKEYQEGEQLGFWNVREYVLFRDGHVCRHCHGRSKDPVLNVHHLESRRTGGDSPGNLITLCETCHKALHRGEITLKTKRGHSFRAEAFMGMMRWEVLNRLKASHSELEVNNTYGYRTKHARIANDIAKSHCADAFCIAGNLGAERLGEFFFQKQTRRNNRQIHKLSILKGGIRKRNQAPFEVKGFRLFDKVACQGEEGFIFGRRSSGSFDVRKLDGTRISAGISCKKLRLLEKRRTYLTEIRKEEALPPLPEGRGLRA

SEQ ID NO: 10113 - protein, 413 aa, unidentified; identical to SEQ ID NO: 2636

SEQ ID NO: 10114 - protein, 416 aa, Parasutterella sp.
MPCSPAKARLLLKEKKAIVVRRTPFTIQLTIATGESKQPVSLDVDAGYKHVGLSASTEKAELYASEVELRQDITDLLSARRALRESRRNRKTRYRAPRFDNRIRTKRKGWLAPSVENRINAHLSRIESVLRLLPVTKITVETASFDTQLLKNPDISGKEYQEGEQLGFWNIREYVLCRDRHVCQHCYGRSKDPVLNVHHLESRRTGGDSPGNLITLCETCHKALHRGEITLKAKRGQSFRAEAFMGIMRSEVPNRLKASHPELEVNNTYGYRTKHARIANDIAKSHCADAFCIAGNLGAERLCEFFFQKQTRRNNRQIHKLSILKGGIRKRNQAPFEVKGFRLFDKVACQGEEGFIFGRRSSGFFDVRKLDGTRISAGISCKKLHLLEKRRTYLTEIRKEEALPPLPEGRGLRAKM

SEQ ID NO: 10115 - protein, 425 aa, Planktothrix sp.
MSNYVLAIDASKQPLSPCHPSVARKLLNQGRALVYRKYPFTIIITKTVENPNPEPIQIKLDPGSKTTGIALVQGNKLLWGAELTHRGQGIKASLESRRSLRRSRKNRHTRYRQARFLNRTRHKGWLAPSLQHRVETTWTWVKKLMKFAPIKGIDQELVRFDLQQLENPEISGVEYQQGELAGYEVREYLLNKWERKCAYCGIENVCLQVEHIHPKAKGGSNRVSNLCLACEKCNIKKGTKNIEQFLAKKPDVLKRILSQAKRPLQDATAVNSTRWTLFNRLKETGLPVSTGSGGLTKFNRTRLNLPKTHWLDAACVGQVESLEVLTRKPLLIKATGHGTRQMCRTDKFGFPSRYVPRLKFVKGFQTGDIVRAIVTSGKKIGTYIGRVAVRTTGSFNISLKETLVQGISHKYCSLIHRKDGYLYAT

SEQ ID NO: 10116 - protein, 512 aa, unidentified
MSTVYVLNKDSKPLMPTTRCWHVRRLLKEQKARVVTSKPFTIQLLYETDDVVQPLYLGIDPGRTNIGIAVVKIDGTAVFTAHLETRNKEIPKLMKERKDSRRTRRTNGRRCRRQRRAKANDTISKKCVKQDTAQNGSVSKRAKRIGVIKRHLPGCEKEVLCIGIKNKEAKFSNRTRPEGWLTPTANQLLQTHINLVKKIRKFLPISDAVLEINKFAFMRLDNPNIQKWQYQQGPLYQKASLEEAVSEMQEHHCLFCKKPIAHYHHVVPQSENGSNTIGNIVGLCTKHHDFVHKDTAWQKKLAKKKTGLNKKYGALSVLNQIIPALTKELSSLFPKYFFATNGKSTYDYRAAHGVSKDHWLDAYCIACSVLPNDVCDSNINSRVPYELKQFRRHDRRVLHKANMNRVYTLDGKKVATNRHKAIKQTTDSLEEFRQRQPDDVCKLKVKEHHPEYRNPERNFPGCVFLVGKHTHVMQGTSGSHNGQADGYYDTNGNSYSSGKCKFVAKNEGIVFT

SEQ ID NO: 10117 - protein, 430 aa, Desulfobacter sp.
LSVFVLDTNKKPQNPVHPAKARLLLTEGKAAVFRQFPFTIILKETVLDVASNPLRIKIDPGSRESGIAVINDDSGEIVFAMELRHRGQQIKNNLESRRAIRRSRRNRKTRYRKPRFDNRTRAEGWLPPSLKSRVHNIETWVNRLCRFCNIQAISMELVRFDMQKIQNPEISGVAYQQGELMGYEVREYLLEKWDRTCAYCGKTDIPLEIEHIVPKSKGGSNRVSNLTLACTACNRKKGNKPLEQFLSRKPGLLKRIQKQSKVPLKDAGAVNTTRWDLFRTLKKTGLPVETGSGGLTKFNRTTRGLHKTHWLDAACVGKSTPEKMFQIDKAVLIVKADGHGSRQMCRVNKFGFPRTTAKSTEKKVKGFQTGDIVKAVVTSGKKVGTYTGRVAVRKSGSFNIKTVDKTVQGINWKYCRLLHASDGYSYNTTC

SEQ ID NO: 10118 - protein, 419 aa, unidentified
MYVYVINKHGEPLMPCSSRKARTLLNNKKACVVKRTPFTIKLLYGSAGYKQPITLGVDAGSRHVGLSASTETHEFYREEFTPRNDVVDLLSTRREFRHARRNRKTRYRAPRFNNRVHSKHKGWLAPSVEVKIQEHITAVKHVCKIMPISLVRVETAEFDTQRLKAMLEGKPLPVGTDYQLGEMYDEYNVRQYVLKRDNYTCQCCGAHATKTKQVKLHVHHLESRKVGGNAPNNLITLCPTCHKAIHEGKKTLGNKKRGRPFRDAAFMGIMRKTLLARLRKELSVPVQQTYGYITKMLREKNNLLKSHMNDALCIAKHPEAAPCENCYRSKAVRHHNRQIHKATILKGGIRKNNQAPYIVKGFRLWDKVRYNGQECFISGRRVTGYFALKRLDGTFATNSASYKKLRLLETAKNYLRERI

SEQ ID NO: 10119 - protein, 420 aa, unidentified; identical to SEQ ID NO: 7011

SEQ ID NO: 10120 - protein, 278 aa, unidentified
LTHQFKKGVPVMVYVLDKNGQPLMPTDRHRKVRLMLQSGQAKVIKRCPFTIQLNYDSGHQTQEISLGIDAGSKHIGVSATTKIKVLYEADVELRNDIVDLLSSRRELRRGRRNRKTRYRQAKFNNRRRGNGWLAPSIRQKIGTHLTVVENICKMLPISRIMVETASFDIQKIKNPDIQGAEYQQGDQLEFWNVREYVLFRDGHTCQCCKGKSKDKILNVHHIESRKTGGNAPNNLITLCETCHTGYHKGTVQLPKAIKRGMRFKDAAFMGIMRWAFYE

SEQ ID NO: 10121 - protein, 434 aa, Lactobacillus sp.
MQNRVFVINRQGEPLMPCKQQKCRKLLQGGRAKVIKKEPFTIQLLFGSTGYKQPISIGVDSGQHHIGLAVTSQDKVLFQGEVSLRQDVKKLLDTRRSYRRGRRNRNTRYRPPRFLNRAKPAGWLPPSVANKVQHNINWIQRIQAVLPKAELHIEVGKFDMAKMVQPGITGLGYQQGDLYGYETTKQYVLDRDNYTCQICRGKNKDPKLKIHHIIYRSNGGTNQVSNLLTVCASCHTQANHQPGGKLFVLQAKKFQSHRSLKGATFMNILRRRLFTAFPEAKFQYGAQTTLDRAKLDLPKAHYNDAVTISGIQKIAQRPTAVVMFHQFRKKKRSLHEATARKGRKTPNRASKRNAKNTKAVSGFHLNDYVQLPDGQKGNISGFSGKTKCFVKAGDGHYLAISSKYKHISLSKLKVIRHQNNWNVTEIKAMTYEMA

SEQ ID NO: 10122 - protein, 451 aa, unidentified; identical to SEQ ID NO: 3061

SEQ ID NO: 10123 - protein, 512 aa, unidentified; identical to SEQ ID NO: 3720

SEQ ID NO: 10124 - protein, 423 aa, unidentified; identical to SEQ ID NO: 3538

SEQ ID NO: 10125 - protein, 369 aa, Caldalkalibacillus sp.
MGYVIPVMAPRGAWASFGQLPSGIKQAYGVEASVPDRTSRDNIGEAHITHKEGRVTAMKTVNRVFVVDRKGNPLMPCHPARARKLLRKGRAAVYRRYPFTILLKDREARDDGKDIQTVRLKIDPGSKVTGISLVGEFQCGKTVIWAAELYHRGEQIRTALLERRSLRRLRRNRKTRYRAPRYLNRRRPKGWLPPSIMSRVFNVFTWVRRLRKFVPLAHLSLELARFDTQKLQNPEIKGIEYQQGTLFGYEVKEYLLDKFGRRCVYCDVENVPFEIEHVIPRSKGGSDRVSNLVIACHDCNREKDNRSLEEFLAHDPERAGRIKAQLKTPLRDAAAINASRWVLFDRLKELGLELEIGTGGRTKYNRSAQ

SEQ ID NO: 10126 - protein, 512 aa, unidentified
MPTVYVLNKDGKPLMPTTRCMHVRHLLKNGKARVVKSKPFTIQLLYETDDVVQPLYLGIDPGRTNIGVAVVKADGAAVFTAHLETRNKEVPKLMKKRKESRCARRTNGRRCRRQRRAKTNGTISKKCVKQTTAQNGSVSKRAKEIGVIKRHLPGCEKDVLCIGIKNKEAKFTNRARPKGWLTPTANQLLQTHINLVKKIQKFLPISDVVLEVNKFAFMQLDNPNIQKWQYQQGPLYQKGSLENAVSEMQEHHCLFCEKPIEHYHHVVPKSENGSNTIANIVGLCTEHHNLVHKDATWQKKLAKEKVGLVKKYSALSVLNQIIPALTKEMNSLFPKHFFVTNGKSTYDYRTAHGVSKDHWLDAYCIACSVLPNDVCDSNINSHVPYELKQFRRHDRRVLHKANMSRVYTLNGKTVATNRHKAIKQTTDSLEEFRQSHPGDVCKLKVKEHHPAYRNLNRNYPGSVFLVDGQVHVMQGVSGSHNGKADGYYNTNGNAYPYYKCKFVVKNEGIVFA

SEQ ID NO: 10127 - protein, 559 aa, Streptomyces sp.
MTTFPAGEQTHQAVLPQQPALESVRADTPGSRDETAHGHPATGRGTGREHGRGETDGRGIRARRRHAKSAAPAAKAAETGSGDAPTQSQTYTGGVGAGRVFVLSKDGQPLMPCHPARARELLGNGRAVIARQMPFTIRLKDRTRADSEVDGVQLRIDPGSKGTGLALTDDKKETGGQGTVVTVRRGLVAVELQHRGDQIRNCMKQRAGYRHRRRSANCRYRAPRPNNRTRPEGWLPPSLRHRVDTTLSIANRLCRYAPVTEVHMEHGSFDTHAMSAGRPLYGAEYTQGPLAGTTARAYLHAKWNSACAYCGATGVPLNIEHLRPRSRGGSNRISNLVLSCIPCNKAKGSKSVESFLANRPDLLARILEQAQAPLRDTAAMNAIQWQLMEALETLGKPVHTWPGHLTKANRDAMGLDKTHTLDALSVGHLDRESGDVIAQFPDQVLIVKATGRGSYARTTPDRYGFPRLRRARKKQHFGYVTGDLVHAVMPFGKWAGTWTGRISVRARGQHSLTTPAGRFNVSHWNLRLLQRGDGYGYAVRPEAAPQYLQKSLERHEPAA

SEQ ID NO: 10128 - protein, 443 aa, Clostridium sp.
VPLMIYVLNKEGKPLMPTNRYAKIRVLLKSKKAVVVNSKPFTIKLLYDTKNFTQSITLGIDSGYINIGFSAITKEKELIAGEVKLLKGMSERLKEKAMYRRQRRSRLRYRKPRFDNRKRSKDWLAPSIQHKYDSHIKFIDKLKKLLPITNIIIEVANFDTHKLKDSSIEGAAYQNGEQKEFFNLREYILHRDGHKCQNPNCKNKNAESILQVHHIGFWKQDRSDRPGNLITLCNKCHTPKNHKKNGFLYGWQPKVKSFKEATFMSMIRWRLVNTLDCKHTYGYITKHNRISLNLQKTHYNDAFCIAGGSSQSRVKPLIFEQIKRNSRSLEKFYDAKIIDIRTNTKVSGVELFNGRRTRNKNLNLENLRKYRGIKVSKGQRRIRTKRYFYQPGDLVKYEDKVYTVKGTQNKGKYIALKELKKVPKVELLTPYKFRKGLVCVENN

SEQ ID NO: 10129 - protein, 426 aa, unidentified; identical to SEQ ID NO: 3294

SEQ ID NO: 10130 - protein, 427 aa, unidentified
MRVFVLDKNRKPLDPCHPAKARKLLKSGRAKVVRRYPFTIIIKDLELENCVTHDHQLKIDPGAKTTGLAITQSNRVIWGAELTHRGFQIREALTSRRQLRRSRRNRKTRYRKPRFLNRTRPKGWLPPSLMSRVHNILTWVNKLIKFCPVTGISQELVRFDTQKMLNSEVSGIEYQQGTLYGYELREYLLEKWNRTCAYCGANNTRLEIEHIKPKSKGGSDRVSNLAIACHNCNQAKGNQEIEQFLSRKPSILKRILSQAKKPLVDAAAVNATRWKLHNELKLIGLPVEVGSGGLTKYNRCRQNLPKTHWLDAANVGKVGTLYIEDYQPLLITAKGHGTRQICRTDKFGFPRLHCSIKKIHKSFQTGDIVRAVVTKGKKIGTYIGRVATRKTGSFDITTPKGRVSGISYKYCQAIHRKDGYNYQFYGG

SEQ ID NO: 10131 - protein, 456 aa, Halomonas sp.; identical to SEQ ID NO: 7909

SEQ ID NO: 10132 - protein, 512 aa, unidentified
MSTVYVLNKDGKPLMPTTRGGHVRHLLKEQKARVVRTNPFTIQLLYETDNLVQPLYLGIDPGRTNIGVAVVKTDGTAVFTAHLETRNKEIPKLMQGRKKARRARRTNGRRCRRQRRAKANGTISKKCVKQATAQNGSVSKRANEIGVIKRHLPGCEEEVLCIGIKNKEAKFSNRTRPEGWLTPTANQLLQTHINLVKKIQKFLPISDVVLEINKFAFMRLDNPNVQKWQYQQGPLYQKASLEEAVSEMQEHHCLFCKNTIDHYHHAVPQSENGSNTIGNIVGLCTKHHDLVHKDTSWQEKLAKKKTGLNKRYGALSVLNQIIPALTKELSSLFPKHFFATNGKSTYDYRAAHGVSKDHWLDAYCIAGSVLPNDACDNNINNHVPYELKQFRRHDRRALHKENMGRVYTLNGKSVATNRHKAIKQTTDSLEEFRQRQPNDVCKLKVKEHHPEYRNPKRNFPGCVFLVGKHTHVMQGTSGSHNGKADGYYDTNGNSYSSGKCKFVVKNEGIVFT

SEQ ID NO: 10133 - protein, 425 aa, Tolypothrix sp.; identical to SEQ ID NO: 8621

SEQ ID NO: 10134 - protein, 404 aa, unidentified
LDAKRKQLDPTIEQNAWRLVRQYKARLVSKFPMIIQLNKVMDNPNNDEIRCGIDDGANHVGMALVQKCQTRNKVLFKGTIEQRKDVKHLLTVRRGYRRYHRYHKQYRPARFLNRASSRRSGRLMPSIIQRKQAILRVIDRLRQWVRIDGYWLEDVKIDIRALTDGYKPYRWQYQKSNRLDNNLRLAAIHRDGCKCVECGKTKTRFEVHHITPRKTGGADTISNLITLCPKCHAKTFGRESQFADRYYALIGSTGHVEGIDDAQRVMQGKHWFREQLQQRGSLVLTTGGNTANKREDWDIAKTHSNDAVCITDLKPENIDIEEWTIKPMRRKNKAGVDEVCGFHHRDYVTYTYRNGETHTGYVTAMYPDKNQLNFQSPTKHCKRVNALKARLLWRYDKIYWFKCA

SEQ ID NO: 10135 - protein, 442 aa, unidentified; identical to SEQ ID NO: 2903

SEQ ID NO: 10136 - protein, 445 aa, unidentified
  source 1..445: note = Microcoleaceae bacterium UBA10368
MSKIFVVDTNKNPLNPIHPGRARMLLQEGKAAVWKRYPFTIILKDVLPNPQIAPLRLKIDPGAKFTGLALVDDATGEVAWAAELEHRGFQIRDALTKRRQLRRGRRHRKTRYRQPRFDNRKRPTGWLPPSLQSRVENIVTWVRRLQKLALISDISQELVKFDTQLMENPDISGFAYQQGELAGYEVREFLLFKFNHTCMYCGAKDTRLEIEHLLPKSKGGSNRISNLGIACRNCNQKKGRQALREFLAQKPDLLQRILRQVKQQKADTAAVNSTRWALFNRLKETGLSVEVGTGGRTKFNRCRQNLPKTHWLDAACVGASTPLKLKVSGVVPLSIRAVGYGNRQMCQVDKFGFPKRGKEGKLIKRERQKNYFGFQTGDMVKAIVPTGKHAGTHVGKVTVRKSGAFDLTVAHVRLQSIRWKHCRAVHRFDGYSYASLSTNVEFLND

SEQ ID NO: 10137 - protein, 477 aa, unidentified
MKSHKSVLVIGMNGIGLMPTTACKARKLLEAKKAKVYSKMPFTIKLLYKTGCAVQNISLGIDTGSQHIGVAVTTDNCVQLKDEYELRSTMEKRKLIETRAEARRSRRYRKTRYRKPKFKPHCKHVYMNSMTKRHGHKTHWHNVKNEYGTNRQPGWVPPSIQQKIDHHIQIINRYLEALPKKTKVNIEVGRFDTQKVKNPDIKGKQYQLGRMYDYENKKAYILAKYDYKCPICGRKFGSVRENGSIVKFRKHHLHFVSNGATDNPDSYMAICDCCHTAEAHGDGGILNKIMKESKKTSRGLRDMPFMNILRRRLWNAFPEACFTYGNITNADRKWISLPKTHANDAVAIAMHEYLQQAKSYDVKDVPYTKIYKEVRKKKRSLHEMNPRKGRRIPNMSATRNSKNTKSVINKHRTFSLYDKVRYAGQIGWITGFSGTNTAYLKNKEGKYITIQGKNYKNIPLSNVQILERNNTWITYTK

SEQ ID NO: 10138 - protein, 462 aa, unidentified
MSVLVIGRNGRALMPTNPRKARLLLKKKTASVVCRHPFTIQLLYKTGCATQEGCIGIDTGSQHIGVGITCGDRVILKDEHALRSSMEKRSLLATRTVMRRGRRYRKVRYRKPKWRHHTKRMYFEKANRRGQHWRKVKTTTQSPRPKGWLPPSLQSKCDHHFRIIDRYLKYLPDPITRNLVIEAGRFDMARMNDPTIHGEMYQRGPMYDAENLRAYIFARDNYQCACCKAKAGTTRKADGTTVKLVAHHILFRSRGATDNPKYIISVCDHCHTTKAHQPGGILYSWMENNKKVARGLRDATFMNILRKRLFARYPQSAFTYGNITATDRKQLRLPKSHANDAVAISLFGKEASTVKNICQTMHYKQIRKSKRSLHEAIPRKGRKNPNTKAVRNKKNTTQVNGFKLWDSVLADGKKLFICSFTGTSAYLIDKNGCYISQPGKTYKQWPLSKLKRLHPNGNWLMA

SEQ ID NO: 10139 - protein, 408 aa, unidentified; identical to SEQ ID NO: 5302

SEQ ID NO: 10140 - protein, 411 aa, unidentified
LRVFVLNKRGQPLMPCSPAKARLLLKEKKAIVKRRTPFTIQLTIATGESKQPVTLGVDSGYKHIGLSATTEKAELYASQVELRQDITDLLSARLALRRSRRSRKTRYRAPRFDNRVASKHKGWLAPSVENRIAAHLSRVEAVMRVLPVTAITVETAAFDTQLLKNPDVAGAAYQQGEQLGFWNVREYVLFRDGHVCQHCRGKSKDPILNVHHIESRRTGGDAPNNLITLCETCHKAFHRGEIKLKVRRGKSFKAETFMGIMRRTLVERLKKAHPELNVRNTYGYLTKHKRISYGIAKSHCADAYCIADNLGAKRLEGFFFQKQTRKHNRQIHKLLILKGGLKKKNQAPYEVKGFRLFDKVICKGEEAFIFGRRTSGSFDVRRLDGTRISAGINYKKLRLLEPRTTYLTEFR

SEQ ID NO: 10141 - protein, 413 aa, unidentified
MVYILNENGQPLMPTENHAKVRVLLRQGKAKVVNNCPFTIQLLYSSTNYTQPVTLGVDAGSKHIGLSATTEDKELYAADVELRNDIVKLLATRRASRRSRRNRKTRYRKPRFNNRKRDKGWLAPSIKEKIGTHLKVVDDTCKLLPVSKIIVETASFDIQKIKNPDVKGTDYQQGEQLGFWNVREYVLFRDGHKCQCCKGKSKDKILNVHHIESRQTGGNAPNNLITLCETCHTGYHKGTIKLPAKIKRGMKFKDAAFMGIMRWAFYGELKKRYPDVSLTYGYITKNTRIENELPKEHYVDARCISGHPLARPLGTVFYIKKVRCHNRQIYKFKILKKGVRKRNQAEYEVYGFRLYDKVSWKGRTCFVFSRKSTGYITLRLLDGTRVKESASYKKIKLLRMRSGYLIESRSVIF

SEQ ID NO: 10142 - protein, 427 aa, Anabaena sp.; identical to SEQ ID NO: 3216

SEQ ID NO: 10143 - protein, 442 aa, unidentified; identical to SEQ ID NO: 3218

SEQ ID NO: 10144 - protein, 413 aa, unidentified; identical to SEQ ID NO: 2636

SEQ ID NO: 10145 - protein, 406 aa, unidentified; identical to SEQ ID NO: 3475

SEQ ID NO: 10146 - protein, 449 aa, Allochromatium sp.
MAVFVLDKQKRPLMPCTEKRARRLLERGRAVVVRLAPFTIRLKDRIGGETQPLRLKLDPGSRVTGLALVRESEIVDLDTGAVERREHGLWFGELAHRGQQISDALTLRRHYRRARRSRKTRYRAPRFLNRTRREGWLPPSLQHRLDTTLNWVERLRRIAPITALSQELVRFDTQALQNPEISRVEYQQGELAGYEVREYLLEKWHRTCAYCGATNVPLEIEHIVPRARGGSDRVSNLTLACRPCNQRKGSRSIEDFLKRQPARLHQIQAQAKAPLKDAAAVNATRWALFDALKATGLPVETGSGGRTKFNRTRLDIPKTHALDAACVGQVDTLSGWQCPALAIKATGRGSYSRSRLDRFGFPRGYLMREKRVYGFQTGDWVRAEVPTGKKAGVHVGRVAVRQTGSFNIQAQGGTVQGISYRHCRVLQRADGYGYAFQPKPDTEAARRAA

SEQ ID NO: 10147 - protein, 456 aa, unidentified; identical to SEQ ID NO: 6138

SEQ ID NO: 10148 - protein, 431 aa, unidentified; identical to SEQ ID NO: 5232

SEQ ID NO: 10149 - protein, 342 aa, unidentified
VEATPRNDAVDLLSARRAFRRNRRNRKIRYRAPRFNNRVHSKHKGWLAPSVEVKIQEHITLIKRVCRILPVTLVRVETAEFDTQRLKAMLEGKPLPVGTDYQHGEMYDEYNVRQYVLKRDNYTCQCCGAHPTKTKAVKLHVHHIETRRTGGNAPNNLITLCTACHKALHAGKATLNGKKRGKPLKDAAFMGIMRKTLMERLLKELKIPVQETYGYITKYLREKHSIPKSHTNDARCISKNPLAIPCDTCYYTKAIRHHNRQLHKATILKGGIRKANQAPYTVKGYRLWDKVFYHGSECFITGRRTSGYFALKKMDGTVVSNSASYKKLRLLEVATNYIAERR

SEQ ID NO: 10150 - protein, 401 aa, Anoxybacillus sp.
MVFVLDTNKCPLAPCHEAVARKLLKQGKAAIYKRFPFTIILKKSVDESENETTYRLKIDYGSRHTGLAILRGQEVVWLGQLDHRTDIKERIDKRRAFRRARRNRKTRYRKPRFLNRKRKEGWLPPSLESRVQNIQTWVSRLKKLCPIGHISYENAKFDTQLMRNPEISGIEYQQGTLQGYEVREYLLEKFGRKCCYCGKENVPLEVEHIIPKSRGGTDRIDNLCLACRDCNQRKGNQTAEEFGCPHIQKQVKESLKDTSIINATRWKVYEVLKQARLDVECGTGARTKMNRIRLGLPKTHYFDACCVGESTPNHLYFKTKEVLFINAKGRGSRSRTNLDRPPCRKKFGTIGRMKTNIVEISPCSWGHEVDVSMVRKSPKDRRTPVAWCTTECRSRVGKHAG

SEQ ID NO: 10151 - protein, 438 aa, Anoxybacillus sp.
VLDTNKRPLAPCHEAVARKLLKQGKAAIYRRFPFTIILKKSVDESEIKATYRLKIDYGSRHTGLAILRGQEVVWLGQLDHRTDIKERIDKRRAFRRARRNRKTRYRKPRFLNRKRKEGWLPSSLESRVQNIQTWVNRLKKLCPIGYISYENTKFDTQLMRNPEINGVEYQQGTLQGYEVREYLLEKFGRKCCYCGKENVPLEVEHIIPKSRGGTDRVDNLCLACHDCNQRKGSKTAEEFGYPHIQKQVKESLKDASAINSTRWKAYEVLKQTGLDVECGTGARTKMNRIRLDLPKTHYFDACCVGESTTNHLYFKTKEVLFIKAKGRGSRSRTNLDRYGFPRGYLARQKFFFGFQTGDMVKAVVPRGKYQGVWFGEVACRKTGSFDIKGKDGKRIAQGINYRYVQVIQRFDGYAYGKGGRNLRKVQFLPVPKGRGFLA

SEQ ID NO: 10152 - protein, 279 aa, unidentified
VVVETAEFDLQLLKAIADGKPVPQGEDYQKGEMYGHYNVRQYVLWRDNYTCQCCGTHPSKKKEVRLHVHHLESRKVGGDAPDNQVTLCESCHEKLHKGLIAEKDFKKRKRRSTRDATFMGIMRKTLMQRLCSELPIPVVKTRGYITKATREKLLVLPKSHTNDALAIAQGKRGFNVGYLPEIAQIDKIYTIRPVRHHNRQLHKATILKGGIRKSNQTEKYVFGYRLFDKVQFNGQDCFIWGRRTTGIFTIKTINGKMIKDGISFKKLKPVEKSTSYLIA

SEQ ID NO: 10153 - protein, 511 aa, Ruminococcus sp.
MTTLEERLSKTEYIYVLGFDGKPQMPTRRKRHVLKLLKTGRARIAEDIPFTIRLTYRNAPVLQPVTLAEDPGRTNIGAAVLSPLGDLLFAAVIETRNKEIKKLMADRKKSRQASRRGERKARQRLAKRYGSMVKSGMIIRKLPMYAADKFVTCKFIRNTQARFCNRKRCPDWITPTVQHLVQTHLNIIRKISRYLPVTDIAFEVSRFAFMHMENPEAIGVDFQNGPLKGYGDVKEAIRTQQHGKCLMCKKPIAHFHHIVPRSRGGSDTIQNLAGLCTEFHTKVHTDTAFRKDFDEKKSGQLKKYGALSALNQAVPFICKKLLEEYGEEHVHFCRGLDTSLIRTALGFEKTKKNQMHEVDAYCIGLAALEVNEVETPAFDHTFQIRQFRRQDRSIIHHQTGRSYYQGKEKVAQNRKPGFEQKTTALSQWYEEQVRIHGEKEAEKLRSQLRVEKSCRHYNDMDRFLPGAVFLYEGKRYVLSGRITNGKYLRACGQGMKNFPAAECTFIRHNAG

SEQ ID NO: 10154 - protein, 470 aa, unidentified
MSVFVVGLNGCRLMPVSERKARLLLKGGKASVYRKVPFTIKLNYKTGNTVQPGYLGIDTGSQHIGVSVVQKDGTVLHKEEIGLRDSMSKRKLLESRASSRRGRRYRKTRYRHPKWKPKTKRIYNEKADRKGRHWKKQKNTFTSKRQAGWLPPSLQSKTDHHIQWIRKLLDLLPEGYRLSIELGRFDPARMKDPGIHGELYQKGPQYDYENVRAYVLARDGYTCRVCKKKGGKLHVHHILYRSRGASDNPKYMAAVCSKCHTTENHLPGGILYQWMQDQKKFTRCLRDATFMNILKKRLRKAFPDAVFTYGNITKADREKLELPKSHGNDATAIALVKTEVKSVKDEEPVIHIQQVRRKKRSLHEETPRKGRKGPNRTASRSDKNTKSVTVTKGSGEKKASMTACLFDRVELDGKKGWITGFTGTSCYVKDKEDNYICTSPKYKQVSISRLRILHHCGNWAIGAEKPLGKG

SEQ ID NO: 10155 - protein, 512 aa, unidentified
MSTIYVLNKDGKPLMPTTRGGHVRHLLKEQKARVVRAKPFTIQLLYETDDAVQLLYLGIDPGRTNIGVAVVKANGTAVFTAHLESRNKEILKLMQDRKKARRARRTNGRRHRRQRRAKANGTISKKCVKQDTAQSKNPSKRAKEIGVIKRRLPGHKKDLLCIGIKNKEAKYTNRARPEGWLTPTANQLLQTHINLVKKIQKFLPISDVVLEVNKFAFMRLDNPDIQKWQYQQGPLYQKGSLENAVSEMQEHHCLFCDKPIDHYHHVVPQSENGSNTIANIVGLCSEHHNLVHKDAAWQKKLAEEKVGLNKKYGALSVLNQIIPALTNKLSALFPKHFLVTTGKSTHDYRESHSVSKDHWLDAYCIACSVLPSNVCDSNINNHVPYELKQFRRHDRRALHKENMSRVYTLNGKAVATNRHKAIKQTTDSLEEFRQSHPGDVCKLKVKEHHPAYRNLNRNHPGSVFFVGEQAHVMQSIVASKDGKATRYKDTNVNKIAAGQCRFVAKNEGIVFT

SEQ ID NO: 10156 - protein, 289 aa, Parasutterella sp.; identical to SEQ ID NO: 7402

SEQ ID NO: 10157 - protein, 346 aa, unidentified; identical to SEQ ID NO: 5507

SEQ ID NO: 10158 - protein, 428 aa, unidentified
LKVFVLNMRGQPLMPCSPAKARHLLKAGKAVVRRRTPFTIQLRIATGETKQSVTLGVDAGAKHVGLSAATEKEEVFASEVELRQDITGLLAARLSLRRDRRHRKTRYRAPRFLNRVRSKHKGWLAPSVENRIQAHMSRIDAVCRLLPVTKIVIETASFDVQKIKNPTIEGTDYQQGDQLGFWNVREYVLFRDGHVCQHCHGRSRDKILNVHHLESRKTGGDAPNNLITLCETCHKAYHAGKIKLKVKRGQSFRAEAFMGIMRWTLLDRVRKAHPGLPVENTYGYLTKHTRITHGLPKTHCVDAYCIAGNLKAVRRGVYLHQRQMRKHNRQIHKFTVLSKRLEDGTKIGYRKLNQSPYLVHGFRLFDKVRCLGQIGFIFGRRSSGYFDVRRLDGVKLSPSISWRKLTLLEKRSTYLTELRKQDGASSPV

SEQ ID NO: 10159 - protein, 557 aa, Streptomyces sp.; identical to SEQ ID NO: 7397

SEQ ID NO: 10160 - protein, 507 aa, unidentified
MSEYIYVLGVDGKPQMPTKRRRHVRKLLNTGKARIAEHVPFTIQLLYDNEPILQPIVMAEDPGRTNIGTAAVGLKGQLYFAAVVETRNKEIRRLMDKRRACRRASRNGERKARQRRAKRFGTMLNAGRIMRKLPQYGENGFITCNIIRNTEARFCNRKHPKGWVTPTVEHLIRTHINLIHKMQRFLPITDVAIEINRFAFMLLDDPTIAGVDYQNGPLKGYKNVNDAIFDMQDGKCLLCGQPIEHYHHIVPRSKNGSNTLENIVGLCCHCHNAVHKDETMQKTLKDKKSGLIKKYAALSVLNQAIPLIYKRVVEEFGKEHVYYCTGRETAIVRKSLGYTKTQKNQLHEVDAYCMALLALCYTDAKAPSFEHVYQIKQFRRQNRANINSQRERSYYYEGKLVAKNRKDRIEQKDDSLKTWYQKMVQQYGEKEAERRRSVLQVKKSIRHYNTSGRVAPGAVFYCNGERHVLNGQITNGQYFKAVGDAKTNHPAKKCRIVKQNEGLVFIG

SEQ ID NO: 10161 - protein, 419 aa, Geobacillus sp.; identical to SEQ ID NO: 3993

SEQ ID NO: 10162 - protein, 431 aa, Klebsiella sp.; identical to SEQ ID NO: 2435

SEQ ID NO: 10163 - protein, 374 aa, unidentified
SKRANEIGVIKRHLPGCEKNVLCIGIKNKEAKFSNRTRPEGWLTPTANQLLQTHVNLVKKIQKFLPISDVVLEVNKFAFMRLDNPNVQKWQYQQGPLYQKASLEEAVSEMQEHHCLFCKNTIDHYHHVVPQHKNGSNTIGNIVGLCAKHHDLVHKDTSWQEKLAKKKTGLNKRYGALSVLNQIIPALTKELSSLFPKHFFATNGKSTYDYRAAHGVSKDHWLDAYCIAGSVLPNDACDNNINNRVPYELKQFRRHDRRALHKENMSRVYTLNGKSVATNRHKAIKQTTDSLEEFRQRQPNDVCKLKVKEHHPEYRNPKRNFPGCVFLVGKHTHVMQGTSGSHNGKADGYYDTNGNSYSSGKCKFVVKNEGIVFT

SEQ ID NO: 10164 - protein, 436 aa, unidentified
MTKTLTKQTTQACVLDQQGKPLMPTTRLGKVYRLLKTQKAHIVSYEPFTIQLDYEPDTHIIQPMTLGVDSGAIHSGYSVANEHREYYSAEVIARDNISKRLSDRRMYRQNRRSRKTRYRKPRFKNRKNKKKGWLPPSLEQKVAVQLNEIDHLHRHFPIKNIIVEVAEFDIQKIKDPNISGIEYQQGTLQGYNIRNYLLEKHERKCFYCGKSVSKFEVEHMLPKSKGGSNRIDNLTLSCHDCNQKKDTLTAEEFIKQTLPAKKATAKLKQLPNEKRLFEYMAHMNATRWALYNAIAKKYPNVEITYGYITKYNRIRADLPKAHHIDAKCITGFANVPSIDQTIVKVKMRRHNRQLHRATFSKEHVRKAACLPTTTFGFQLYDLVSFDNHHYYIKGRRSSGIFALASIEGLKDTNRSYKKLTQLAHTNAYLINRYVNA

SEQ ID NO: 10165 - protein, 465 aa, unidentified
MSTCVCVLSNSGERLMPTFRLGKVRRLLKDGKAKIVKHHPFTIQLLYDSKTNTQPIEICEDVGYNYIGISVKSQSHEYVSAQYDTLQDEKACHDSCRKLRRTRRNRLRYRKPRFDNRKRGEGWLAPSLRHKKELNVNVVKMYCAVMPITHATVEVGSFDTMLLQAIQKGESKPEGVDYQKGPRYNLATLREAVFYRDNYFCKVCGRKATEGAILHMHHMFYWKGRHGNSLDELLTVCEKCHTPANHQKSGKLYGFGENVKFADLSGAAFMNTVRWQIVNELYAAFGKDFVTITYGAMTKEKRIALQLEKTHSNDAYAMGEFHPNCRCTFEHYEKVRRNNRILEKFYDSRYIDIRTGEIATGKELFNGRINRNHKKDSENLHKYRGKRLYKGHRALVRKKVNFNPGDLVSLNGEVLVVHGTHTNKKGAVNVEFKTPAKNGRKSANLKKLKIVKAAGSIHPTWEKVS

SEQ ID NO: 10166 - protein, 426 aa, Parasutterella sp.; identical to SEQ ID NO: 3045

SEQ ID NO: 10167 - protein, 413 aa, unidentified; identical to SEQ ID NO: 2636

SEQ ID NO: 10168 - protein, 502 aa, unidentified; identical to SEQ ID NO: 2616

SEQ ID NO: 10169 - protein, 462 aa, unidentified
MSVLVIGQNGRTLMPTTTRKARILLKENKASVVCRHPFTIHLRYKTGCATQEGSIGIDTGSQYIGVGVTCGNKVILKDEHELRSSMEKRSLMETRATMRRGRRYRKVRYRKPKWRHHTKRMYFEKENRKGQHWRKVKTTTQSPRPKGWSPPSLQSKCDHHFRIIDRYLKYLPDSITKNLVIEVGRFDMAHMNDPTIHGEMYQRGPMYDTENLRAYIFARDGYKCACCKAKAGSIRKKDGTSVKLVAHHIQFRSRGATDNPKYMISVCDHCHTTKAHQLGGILYSWMETNKKVTRGLRDATFMNILRRRLFDGYPQAAFTYGNITAVDRKRLLLPKSHANDAVAISLFGKDVSVINATCQTLRYKQVRKSKRSLHEATPRKGRKEPNTKAIRNKKNTTHVNGFKLWDSVLVNGQKLFICGFTGSSAYLVDQDGHYVSPPGKTYKQWTLSKLSRLHPNGNWLMA

SEQ ID NO: 10170 - protein, 442 aa, unidentified
MVTVQQSTHHLPFGRVFIRRNLFMVYVISQDGKPLMPCSDPIARLLLKQGKAKVKKREPFTIKLTYETTNHTQGLTLGVDTGSGTIGTAVSKDNGDIVYMSEVVVRNDITDKMTQRAKYRRNRRNRKTRYRKARWLNRASSIKKDRFSPTMQSKLHSHVREIEYIQSILPVTEMVFETGQFDMQLMKNPSLANPKVRPWGYQKGANYGFENTKAMVLNRDNYTCQCCKGKHKDSKLEVHHIVFRSQGGSDEESNLITLCHTCHKDLHSGKINLKLSGKVKGNLKYATQMNSIRKQLFRLYPNAIETFGYVTKANRLHLGVDKEHYYDACTIATQGNAFNVKSNLYKKKCVSDGDFQKTKGIRSEQPIVTDKICGFRKFDKVRYFGNDYFIKGRMSTGYAILMDIDGNKIDFSTMPRGYKTPKLSNCKRITARSTVMTQVKVV

SEQ ID NO: 10171 - protein, 424 aa, unidentified; identical to SEQ ID NO: 8578

SEQ ID NO: 10172 - protein, 442 aa, unidentified; identical to SEQ ID NO: 3234

SEQ ID NO: 10173 - protein, 450 aa, unidentified; identical to SEQ ID NO: 2935

SEQ ID NO: 10174 - protein, 428 aa, Enterococcus sp.; identical to SEQ ID NO: 4335

SEQ ID NO: 10175 - protein, 442 aa, Deinococcus sp.; identical to SEQ ID NO: 5259

SEQ ID NO: 10176 - protein, 418 aa, unidentified; identical to SEQ ID NO: 2710

SEQ ID NO: 10177 - protein, 430 aa, unidentified; identical to SEQ ID NO: 4817

SEQ ID NO: 10178 - protein, 431 aa, unidentified; identical to SEQ ID NO: 3801

SEQ ID NO: 10179 - protein, 431 aa, unidentified
METTMNRVFVLDGNKRPLMPCRPARARLLDAGKAAVYRLVPFTLVLKDREGGAVQPVELKAGPGSRTTGLALVAEFSRGREVMWAGELVHRGLPIRAALDKRRALRRGRRSRKTRYRAPRFDNRTRPAGWLPPSLQSRVGNTAAWGRKLQALAPLSAVAVETARFDTQAMEHLGITGVEYQQGTLAGYEVREYVLEHWDRKCAYCGTKNVPLEAEHIVPRSQGGSDRVSNLTLACVPCNRAKGNRPLAEFLAHDPDRLRRIQAHTKAPLKDAAAVNATRYVLGNALKTLGLPTSFWSRGRTKFNRGRQSHPKAHWVDAACVGESGVAVALDPAQKPLVIKAKDRGRRQGQRTDRFGFPRGKAGRVKQVRGFRTGDRVRLTRLSGKYAGVHVGRLAGLRADGRFDIKTPAGKITSSWRNFTLIQKNDGYDYA

SEQ ID NO: 10180 - protein, 490 aa, unidentified
MLNRNSVFVLDTNKTPCDPTHPAKARKLLSEGKAAVFRKYPCTIILKEESKPTKKYRIKIDPGAKTTGLALLSDTNIVFCAELEHRGFQISEALTKRKTLRSSRRNWKTRYRKPRFLNRKRPKGWLAPSLMSRVHNIKSWVDKLIKYAPVDSISMELVRFDTQKIVNPEIQGTEYQRGELFGYEVRQYLLEKFNHTCVYCGTKEAALNLDHFHPKSRGGSDKVSNLVLSCVNCNQVKSNKLPEDFLSDRPKLLEIINKQRKQPLANAAAVNATRWKLKEVLESTGLPVEVGSGGLTKYNRKRLGISKYHWTDAACVGVSTPDTLNIRSYQPLLIKAMGRGSRQMVKPDKYGFPRTAPKLRQKSFYGFQTGDIVKAVVTKGKKIGTYVGRVAVRKTGSFNIKTKTETVQGISYKYCKHLHKSDGYTYNFGELVKQKTINFVQKVEEVLDTPVQLNLFDISELTTESKPKAKRIQRKKFDCLDGKQLSLFLL

SEQ ID NO: 10181 - protein, 414 aa, unidentified
MPCSPAKARLLLKEKKAIVVRRTPFTIQLTIATGESKQPVSLGVDAGYKHVGLSASTEKAELYASEVELRQDITDLLSARRALRQSRRNPKTRYRAPRFDNRIRTKRKGWLAPSVENRINAHLSRIETVIRLLPVTKISVETTSFDMQLLKNSDIAEKEYQESEQLGFWNVREYVLFRDGHVCQHCHGRSKDPVLNVHHLESRRTGGDSPGNLITLCETCHKALHRGDITLKAKRGKSFHAEAFMGIMRWEVHNRLRALHPGIEVSNTYGYRTKHARIANGIAKSHCADAFCIAGNLGAERLCEFFFQKQTRRNNRQIHTLSILKGGIRKRNQAPFEVKGFRLFDKVACQGEEGFIFGRRSSGFFDVRKLDGTRISAGISCKKLHLLEKRRTYLTEIRNEEALPPLPEGRGLRA

SEQ ID NO: 10182 - protein, 418 aa, unidentified; identical to SEQ ID NO: 4950

SEQ ID NO: 10183 - protein, 414 aa, unidentified
MPCSPAKARLLLKEKKAIVVRRTPFTIQLTIATGESKQPVSLGVDAGYKHVGLSASTEKAELYASEVELRQDITDLLSARRALRQSRRNRKTRYRAPRFDNRIRTKRKGWLAPSVENRINAHLSRIETVIRLLPVTKISVETTSFDMQLLKNSDIAGKEYQESEQLGFWNVREYVLFRDGHVCQHCHGRSKDPVLNVHHLESRRTGGDSPGNLITLCETCHKELHRGEITLKAKRGQSFRAETFMGIMRWEVLDRLKASHPKLEVQNTYGYRTKHARIVNGIAKSHCADAFCIAGNLGAERLGEFLFQKQTRRNNRQIHKLSILKGGIRKRNQVPFEVKGFRLFDKVACKGEEGFVFGRRSSGYFDVRKLDGTRISAGISYKKLRLLEKRQTYLTEIRKEEALPPLPEGRGLRA
